United States Patent Application Publication US 2004/0123343 A1 - sequence listing, part 22

SEQ ID NO: 60778 - DNA, 250 bp, Oryza sativa
  Clone ID: PAT_MRT4530_62274C.1
tggttttgatatttggagattatcgtcgaagtggttttggaaataatcaattttcaggtgatgagtgtaggtgattcgatgtctcgggagagtatctgtggtgatggaccgggagtcggcttggtggtaagacgatgtccgtggtgatcagatatcatgcgggatactaaggctagagttgatgcatgtggttggtgaagattccatatggcatacgatggaggtattgtgtgcgtattgtcttcgattt

SEQ ID NO: 60779 - DNA, 1026 bp, Oryza sativa
  Clone ID: PAT_MRT4530_62275C.1
attaaggagctagggttgaggctcattgagctgcggtctgttatgattgatcaggaaatcgattttgctaatgttgtgtgttttatcgatgctgcatcagaggatttgataactcaagagaaagcattatcatcaagattccttaacaagataaaatgcgaggtttcccaactcgaacaactcagcgcaaatcgcttgaaagaaaagaatctgaggataaagacgaagataagagaacttctcaagtgtactcatttgacagggaatgaagtagaaattgatcttgagaaggaagttctggaagaattaaagatgcaaaaggagatgttaaaagttgaagtagagaggagatcggatattgttatcagggctgaaatatggagaaaatcagttgatcaacttgaggccctacaaaaaggtagcaaaaatacaaacaaaatggagctgatgaggtgtgagttactagcaaagaggactgaaggtatcaaaaatatcctggtagaaatggtgcaaacttgggaggaaaaatatgactctccattttcttatgacggggaccatctcctcacaatattaaatgctgatgctaaacctagttcaagtgaagctgaaggtatgcaaaaacaaaaggctgaaggccaagtaccagcacaggatctcaagtcactgcttacgcctcacccaaagctccgtcgcacgccaagggtgcctgtgccacttgaagaacatgtccctcttcagctacatgtagttgcgcctctgcttctagtaccacccgctggtgcaccacctccaatggcccaagcagcccaagcagttcaggagctgcctgctccactacctcttccagatgtaccagtgcaggctggttcgccaccgaccatgatcagccagttcaacaggagccggcaaagtctgctgacttctacaatgctgaaggctctccaggtgatgaagagaccggctctatcaacgtttcaagtgacaatgatgatagcgatgacagtgactacctaccttgagtga

SEQ ID NO: 60780 - DNA, 1559 bp, Oryza sativa
  Clone ID: PAT_MRT4530_62276C.1
cctccttttttttttttttttttttttttttttttttttttttctataattatattacaatcacattctagctataattaattttccagccccatacaaaagcaagttccagaatacagtttccatacaaaagcacaaaacatgaatacaaaatgattcatccaccatccaactacacaagtcccagccgactacaaagttcctacaggtagtgccaagttcctgcaccaaaaaattccacctagcagccactactaagtttcggcgtatatcttgccagcagccagcaaaaaaaattccaccaagcagcaatgcaacctttagttttgctgcaatgcaactccttaaagagatcaattgcagtgggctcactgtctcttgtatttttcttgctttatggcaagtaatcgagctgaaagtcaccgtagagctccagtcttcccgtctctagtgctccttgattccttactctcaacgagcacatcaagatgagcctctggtaccaacctcggttgcatatcctgcaagcaaccaaaaaaaaattatcattagaaagtagaaacacctcaaatcacactggtgcggaagctaaatccaacctggctggggctattgtgctgctcctcgaccaagaacggctcgacgagcgacgcggaggtaagcgcaactccccctgagtggccgtgagccaagcagatgcgatcgagaagcggcggcgactccgccagtgatcccggcggcaggagtacgtagcgccgacgcggaaagcgtggttgaccccgactggtggagatggaaggcgtgccgccgtatcttgatggccttggggtcctggaggaagagcaaagagcagagtggcgtttagtgagagaactcggggaatagcttacgtggcccactttgtcatcctccatccagtgcttccccttgccctccccttccacctccgcgccctccatcgccttcctcctggcggcggcggcgctggccttccatcgccacctgatctgctagccgctcggctgttggcgccggcggtggaacatgtaacgcaccgcccagctggcccgccgtatggaggccgccgacaccgccatcgcgcggtggctgtcccgccacgaccctaccacgtgctcgacggcgtgcgccgcctccgcgacgaggccgatgcgcgcattggccgcctcgagcgccgcgtcgaggaggtcgccgccgtgcagcaggcgtcggccgcccatccgctccccgccatgtccctccccttcacgctcccgcctccgccgccgccgccgccgcccaaggccatggcgatgatggccatggacacgccacccaaggccatggcgatggggatcgaagcgcgaccgaggaggaggaggacgacggcgtggtgggcggcggcgtgagggtggggaaagagaaggtgaaggagatggtgatgagcagcggcgcccgcagcggcgggtgggaggaggaggaaggggacggtggtgacggcggagtggatgctggtggcggcgacacagtggatggagcggacgcgtgggcggacgcgtggg

SEQ ID NO: 60781 - DNA, 2661 bp, Oryza sativa
  Clone ID: PAT_MRT4530_62277C.1
atggtgatgtggtacctaccaattaaggaccgcctgaagcgtctgtactcaaacccgactgatgctgagttgatgagatggcatcaagagagccggaaaatatatggtatgattcgacatcccgccgacgctcgccagtggaagacatttgatgcaaaacacccagaatttgctaaggatcctaggaatgtaaggtttgcgttgagcactgatggaatgaacccgtttggtgacttaagcagctcgcacagcacatggccagtccttctcacaatgtataatcttccaacatggatatgtcagaaacgaaagtacattctactcactatcctcatacaaggtccaaaccaacctggaatcgacatagatgttttccttgagcctttgatggaggacatggaggagctttggaaagaagggttacgactatgggatgagtttaagcgggagcacttcaatctacgtgcgatcatattcgttaccatcaatgacctacctgcaaacttttcattatctgggcagattaaagggaagactggatgtctgatatgtctggagaaaacttcatacaaatacctgacgtcgtctttgaagacagtgtacatgcgacatcgacggttcctaccacaaagacataggtaccgtaagatggctagattgttcgataatacaatggagaatgacactgccccagtagcaagaggtggtacatacgtgtatgagataacaaagaagattaaggttgtatatggaaagggaaagaagaagacagtaaagaggaagaaagctgatggtgacaacggtactgcgtcgcctttcaagaagcactcaattttctttaaatacttagattactggaaggacctagagattcgacatgcaattgatgttatgcacctcgagaagaacgtgtttgatagcaccgttggcacattgctggacatcccgagtaaaacgaaggatggattgaagtcacgtaacgaccttgtagatttgtccatacggcatgaccttcacccagtagtgctgccaaatgggaagaccgagattcttcctgcttgttactcgttgacacttgaagagaaaaaagccttctgtaaatgtttacaaggggttagagtgcctactggtttcgcatcgaacattaggaagctagtatcaatgaaggatttgtccatttcgggatacaatgcgcatgattgtcataggttgctaacggtgttcctaccaattgctataagggcagtcaaaccagtccatacaaaggtggttataacaaagttgtgctactttttcaatcgaatttcgcagaaggtatttgatcctttggaattaggtccgcttcagacatttgccgtcgagactgtatgccagcttgagatgtatttcccaccatcatttttagatatgatggagcatttgatcgttcacatcatccctcggattattgaacttggtccattatacttacatcagatgtgggcctatgagcgttacatgtcgatcctcaaaggctatgtacgcaatcgcgctcacccggaaggatcaatgatagagggatacacaactgaagaggcagtcgagtgttgtatggactacataaaggatgctaatgccattggcattcctgttcatcgacatgaaggtagattgtctggaaggggtactgttggtaggaagcagttcttcgataatgattacaaaaaggtgtccgcggcacacaacagcgttcctcaacagctcgctatcgttgagccattcattgagcgacacctagaagaaatcaaagcctgcttcccagggcggtccaatgattggatatcaagagagcacaagcgtcgctttcctctgtggttgaaagatctaaacctgccagttggtgattctgtggaggaacttactttacaaagactggcatgtgggccttcaagtattgtcaattcatggcaaggttacgacatcaatggatttaccttgagtacgactacgaaggacatgaaaagcaccgcacaaaacagtgggctccgtgtcgaagcgattgacacgagtggagaaaagaggtcgtattatgggaccattcaagaaatatgggaactgtactatggcctaaacatccagatccctgttctccgttgtgaatgggttaaagacacaataggggtttccgttgatgactacgggctaatgatagtcgatcacagtaaaccaggccacaaggatgatccatgggttttagcagagcgtgtggctcaagtgttttatgtgaaggacccttcagatgaaagaaaaactattgtcatatccggaaagcaacagatcgtcggcatcgacaacatcgaagaccccaatgattacaaccagttcgacgatgtaccattgtttactgatcttcctatgcgaattaagaaggttgagagaacaatcgatgaagcaaatatgtcgtacgttcgagcagatggtgttgccaagatccccgaaatcccatatattgcacaacgattcaaccacactactatcttgaacgtggccgctgacctctgccgattcatccgtcgcgatgtctgcaacgcaagaggtctcttctacgacaaccagagtgaactcgcaatggacgacaaatttaaacctctcagagagtgggagaaagaacatatgcaataa

SEQ ID NO: 60782 - DNA, 3312 bp, Oryza sativa
  Clone ID: PAT_MRT4530_62278C.1
atggagtacggattcaccgccaactacaaggtttggacctatcacggggaattcaccaatccggaagatgacgatgaagagttaagtttcgagatgaatgaggcagagaattttataatcgaagacatgtcgcgtgaaagaatggatgtcgatgtttccaccgatagtgatgatttcgatggtggttttgatttagaggatatgctacgccatgttgaaccagaggtgctagcggtggagaatgacactgccccagtagcaagaggtggtacatacgtgtatgagataacaaagaagattaaggttgtatatggaaagggaaagaagaagacagtaaagaggaagaaagttgatggtaacaacggtactgcgtcgcctttcaagaagcactcaattttcttcaaatacttagattactggaaggacctagagattcgacatgcaattgatgttatgtacctcgagaagaacgtgtttgattgcaccgttggcacattgctggacatcccaagtaaaacaaaggatggattgaagtcacgtaacgaccttaaggtatttgatcctctggaattaggtccgcttcagacatttgccgtcgagactgtatgccagcttgagatgtatttcccaccatcatttttagatatgatggagcatttgatcgttcacatcgtccctcagattattgaacttggtccattatacttacataagatgtgggcctatgagcgttacatgtcgatcctcaaaggctatgtacgcaatcgcgctcacccggaaggatcaatgatagagggatacacaactgaagaggcagtcgagtgttgtatggactacataaaggatgctaatgccattggcattcttgttcatcgacatgaagggcggtccaatgattggatatcaagagagcacaagcgtcgctttcctctgtggttgaaagatctaaacctgccagttggtgattctgtggaggaacttactctacaaagactggcatgtgggccttcaagtattgtcaattcatggcaaggttacgacatcaatggatttaccttgagtacgactacgaaggacatgaaaagcaccacacaaaacagtgggatccgtgtcgaagcgattgatacgagtggagaaaagaggtcgtattatgggaccattcaagaaatatgggaactggactatggcctaaacatccagatccctgtgctccgttgtgaatgggttaaagacacaacaggggtttccgttgatgactacgggctaacgatagtcgatcacagtaaaacaggccacaaggatgatccatgggttttagcagagcgtgtggctcaagtgttttatgtgaaggacccttcagatgaaagaaaaactattgtcatatccggaaagcaacagatcatcgacatcgacaacatcaaagaccccaatgattacaacctgttcgacgatgtaccattgtttactgatcttcctatgcgaatcaagaaggttgagagaacaatcgatgaagcgaatatgtcgtacgttcgagcagatggtgttgccaaggacctctaccccctcgccgtcgccgtcgccgccgcacggacctcacccccctcgccgtcgtcgccgtcgccgccgcacggacctctccccccttgccgtcgtcgtcgccgccgcacggacctctcccccctcgccgttgccgtcgccgccgccaggtcgtccccgccgccaagtcgtccccgctaccgccggctcctccccgaagtcgccccgcccctcgccgtcgccgacgccgctgccaggacttctaccccgtcgccgtcgccatcgctgtcgctcgaaacgtggcgcacaccaagtgacccgtttccaatggaaataacacaagtcgccccctgcgatgatgatccggactacatacctatcgaacaggccatggtagtccgacgccgctcgaaacgtaaagccgggaggaacaggacagagaaagaagttgagatggacaccgctacgatgggaagcccgtcgaccaccggtagtgcggtccaagttcagcaatgcctgtggcactctagtggcactctagtcaggatgcgttgtcccattaatgtcaagttgtgggaaacggtggacgacaacatcaagacacttctctggaatgagttgcagaagtattttgtgttccctcctggatcagaggatgactgggacacgtttgttgcggatcatacaacagctgaagcattggctttgaggaaaaaaatgtccgagctcgcgaagaagaacagatatccccatagattggggtcgagcggatacgctggtcacatcgatcaatggcgggagatcgagcaaagatttgccacggccggtaagcccctgctggtagaccccatggttgaacgtagcaagaactgggtttgggcgcgcagcacaggtcaagtctcggatgagggagacatactattcgagactccagacatagaagaagtgactactaatttgcagcagatagtcgagaaagaaagatcaggacagttcgtcccacggagggagcgagatcagcttactgcggcgttggggacggctgaacactctggacgtgtaaggggtttgtcctcaaagacaagttggaaggtcgggtttccacaagacgcaccaagttataagaagagagacaaatacaaagaacaactatcggacaagatctatgcgcaagtaaaggaacacttctactcgttggcagctgaaaacccgacagcctttccaaggaattctgagaagagaaaagaacttgctcacgtcttgtcagactcccagaagtcagtactagaggcccaagatgaagtgcaatcctggttatctgccgatgtgcctgaaacttatgagtatggcaagccattcttgccaacttatcttatgaacaagctaccatgggaaatgagggtaatgcacgaatgtatgcaattccacgaagctgatagaactggagcaaaggttggatatgtcgatccaacaagaatatgcaaaacacaacacaccgtagagctgagagaggactgcgagcaattggttggcaagacccctgaagaaaaggaagaatatgtgaagacattgcacaagaggaagaagctagaagtagcaacatacttggcaatagcaatgttggcgcacgccgacgaagatgtcttaatgatccccgaaatcccatatattgcacaacgattcaacgacactactatcttgaacgtggccgctgacctctgccgattcatccatcgcgatgtctgcaacgcaagaggtctcttctacgacaactag

SEQ ID NO: 60783 - DNA, 243 bp, Oryza sativa
  Clone ID: PAT_MRT4530_62279C.1
agaaaacacataaattttattaagctagaacaattatagggaaaaaaccccattacatatccaagcaaaagagccatccttaaaaaaggggaggtaattgaactaccaaaggaaccttcctgaaaaaacccaaccttaaaacagaaaaaggaccaggtcaacaggtatctggggtgaacccgtgacaactgttaccctgggcctaaaaaaaggtgtgatccggttgacaaaccgtttaacccc

SEQ ID NO: 60784 - DNA, 824 bp, Oryza sativa
  Clone ID: PAT_MRT4530_6227C.1
atggcagtggctgcagccgctggtccatggtggatcgggtccatggaccggggaaaaagggcagcgcaccacgtggtgcaaacgtggcgccgacgtggcacgcacgtgacggcctcgtggcagccacgcgggcggcgggatcggatggccccgatctaccgcccggtagatcggacggcggatgcggctcgcggccggcgcgcacgggcacggctcaagccggcccagcggccatggcgcgcggcggcgcgaggcggcgatcggccggctaagcggctaggcggcggcgcgtcggctaagcagcgtgggagagagggagaaaggggaggaggggccgcaccgacgacgatcgacgacgatgagagacgaatggtgatggcgacggcgagacgagctccgggaccacctaagggatcgaaagggatgagttagagagggagagggaagccatggatggctagagcggcgaccgaaggcgctggccatggcgaagccgcgcggcacgggcggtgttccggcggcggattactacggaggaggggtggacgggacggcccgcacgatggcgaatgcgacaaagtcaacggcgcggctcggcacggcggctagcggtgaccggagcagcggcggcggcggcggaagggaggacgacggcgctagggtggtggagtgcacgggagcgggcgattgcaaaacgaaaaagagagaggagggaacgaggatgcattatatagacccacgaggttcgatcgtggccgggagaccgcgatttcgccggcggagtggggagaggtggggaggagagagaggcgggattcaaaaat

SEQ ID NO: 60785 - DNA, 5736 bp, Oryza sativa
  Clone ID: PAT_MRT4530_62280C.1
atggctgacaagacactccgcgagttcgctgctccctctgttgacaatgtggccattgggccgcaaatcaacatgggagacgtggatttcggcttgaagtccagcctcatcacgatggcgcaggctagcccgttcagcggcaagcctaacgaggatccaacgctcatatgcagcagttcctggagatctatagcacaactcctacaatggactcactcccatgtcccgcgatcactggccgcggcggctggaggagcattcttctctaagacggttcgaggagctgttgatctaatagagaagatggtctccaatatgggttggagcgaggaacgactccagacccgtcagcgaggtatgcacaccgtcaaggagacggaattactcactgccaaactagacctcctcatgaaacacctggacgaccacgacaaacggcctcaaggcaccgtcaaggccttggactcacatgtcacgtgtgaggtctgcggcggcacgggacattctgggaataactgcccggaaatccatgaggaggcgaagtacatgggcaacaataacaacgggtaccgtccacaaggaggtcaggggtggaacgagccacgcccgtattatcaaggaggaaccaatgggatagccaaggaagtgccatccaatgactcagctgacaaggagattcagccagagaaagccgtgccgcaggagtattgtgacacacgattgctgccgtttcctcaacgaagtaggaaaccgtcagtggacgagcaattcgctcattttgttgaagtaatccagaagatccacatcaacgtgccattgttggatgctatgcaagtgccaacatatgcccgctaccttaaggatatactcaacaacaagagactgctcccaacaacggagttcggccaagctttatatgatcttggagcaagtgtcagcgtcatgccaaaggacgtctttgacaagctcaacttcacggtgttggcaccaacaccgatgcgcctacaactggctgactcgtcagtccgttacccggtgcggatagcggaggatgtgccggtcaagatacgggatttcttcatccctgttgacttcgtagtgctggacatggacacgggaaaggaaacagcacttatcttggggcgcccgttccttagcaccgcacgagccaacattgacgtgggaacgggaagtatccgtttccatatcaatgggaaggaggaaaagttttattttcagctaaggaccgaacaattctccatggtcagaataaagtacaggccaaacccgcaaaatattcaagtggtcgaagtggagccacccaagacggacagcctcgtaaagttcatgcagaatttcctggagaaggaaacaacaatgcccaggaaccgttattggaagacgccgatggatcggtcgtcatggatgtatgagatgcggagaatgcagccggtatttattaaggaagcatctaaatttattgatcaggctaaggcgcatgctttgagggagaatatgacaaagatcttttgtccgtgccgtcattgcaagaatcagaaattgttggtagatcctgatgaaatattgggtcacataatggagtacggattcaccgccaactacaaggtttggacctatcacggggaattcgccgatcccgaagatgacaatgaagagttaagtttcgagatgaataaggcagagaattttataatcgaagacatgtcccgtgaaagaatggatgttgatgtttccaccgatagtgatgatttcgagggtggttttgatttagacgatatgctacgccatgttgaaccaaaggtgctagcgggcaggtcacgaggattggagaattggcaggcattagagaaggcatcgaaggatcttctttacgatgaaacgaagggatgtgataaggatttcacagtcttgcgttcagtgcttgaacttctgagattgaagactaaacatggatggttggacacaagttttaatgatctgatgagtttgttgcttgtgttgcttcctaagcctaactttgtaccatcaaacacgtatcaagcgaagaaactcatatgtcctttatctcttggtgtagaaaagattcatgcttgtaagaatcactgcatattataccgtaaagaatatgcaaacttggaaagttgcccaatgtgtggcacaagtcggtataaaatggggaatgggcccatagattcagagtgtaccgatccagattctgataagggtaagcgcggaaagattccctcaatggtgatgtggtacctaccaattaaggaccgccagaagcgtctgtactcaaacccgactgatgctgagttgatgagatggcatcaagagagccggaagatagatggtatgattcgacatcctgccgacgctcgccagtggaagaaatttgatgcaaaacacccagaatttgctaaggatcccaggaatgtaaggtttgcgttgagcattgacggaatgaactcgtttggtgacttaagcaactcgcacaacacatggccagtccttctcacaatgtataatcttccaacatggatatgccagaaacgaaagtacattcttctcactatcctcatacaaggtccaaaccaacctggaatcgacatagatattttccttgagcctttgatggaggacatggaggagctttcgaaagaggggttacgactatgggatgagtttaagcgggagcacttcaatctagggaagactggatgtctgatatgtttggagaaaacttcgtacaaatacctgacatcgtctttgaagacagtgtacatgcggcatcgacggttcctaccacaaagacacaggtaccgtaagatggctagattgttcgataatatagtggagaatgacactgccccagaagcacgaagtggtacatacgtgtatgagataacaaagaagattaaggttgtatatggaaagggaaagaagaagacagtaaagaggaagaaagctgatggtgacaaagatactgcattgcctttcaagaagcactcaattttcttcagatacttagattattggaaggacctagagattcgacatgcaattgatgttatgcacctcgagaagaacgtgtttgatagcaccattggcacattgctggacatcccgagtaagacgaaggatggattgaagtcacataacgaccttgtagatttggccatacggcatgaccttctcccagtagtgcttccaaatgggaagaccgagattcctcctgcttgttactcattgacacttgaagagaaaaaagccttctgtaaatgtttgcaaggggttagagtgcctactggtttcgcatcaaacatcaggaagctagtatcaatgaaggatttgaccatttctggatacaatgcgcatgactgccataggttgctaatggtattcctaccaattgctataagggcagtcaaaccagtccataccaaggtggttataacaaagttgtgctactttttcaatcgaatttcgcagaagatgtgggcctttgagcgttacatgtcgatcctcaaaggctatgtactcaatcgcgctcaccccgaaggatcaatgatagagggatacacaactgaagaggcggtcgagtgttgtatggattacataaaggatgctaatgccattgggattcctgttcatcgacacgaatggagattgtctggaaggggtacggttggtaggaagcagttcttcgataatgagtacaaaatggtgtccgcggcacacaacaatgttcttcaacagctcgctatcgatgagccattcattgagcgacaccttgaagaaatgaaagcatgcttcccagggaacttactttacaaagactggcatgtgggccttcaagtattgtcaattcatggcaagatccctgtgctccgttgtgaatgggtcaaagacacaacaggggtttccgttgatgactacgggctaacgatagtcgatcacagtaaaacaggccacgaggatgatccatgggttttagcagagcgtgtggctcaagtgttttatgtgaaggacccttcggatgaaagaaaaactattgtcatatccggaaagcaacagatcgtcggcatcgacaacatcgaagaccccaatgattacaaccagttcgatgatgtaccattgtttactgatcttcctatgcgaattaagaaggttgagagaacaattgatgaagcgaatatgtcttggaagatgtcgaacgataaggttccatcgaacgcgccaatagctcctcaagaaggtaacgctcctcaaaaatctggtagcaacaagcagcctgacgcttctagtgaagaaacatggcgcacaccaagtgacccgtttccaatggaaataacacaagtcgcccctcgcgatgatgatccgtactacatacctatggaacaggccgatgggaagcccgtcgagccaccgatagtgcggtccaagtttagcaacacctgtggcactctagtcaggacgcgttttcccattaatgtcaagttgtgggaaacggtggatgacaacatcaagacacttctttggaatgagttgcagaagtattttgtgtaccctcctggatcagagttaatatcgacatatgacccaaaggagattgacaaggataaggagaagttcatgttttcagctttcaggaattctgagaagaggaaaaaacttgctcatgtcatgtcagactcccagaagtcagtactagcggcccaagatgaagtgcaatcctggttatctgccgatgtgcctgaaacttatgagtatggcaagccattcttgccaacttatcttatgaacaagctaccatgggaaatgagggtaattcacgaatggtatatcaaggcatctaggaagggtctcggtttcataagcgtcgccgtcccggaaggtgctttcatgagtggtcctaatgggatattttttatctctttccaagacctttacgccctctacaagctagataaaatggacgttaatctcgttgcggtgttctgtcttatgcaattccacgaagctgatagaactggagcaaaggttggatacgtcgatccaacaagaatatgcaaaacacaacacatcgtagagctgagagaggactgcgagcaattggttggcaagacccctaaagaaaaggaagaatatgtgaagacattgcacaagaggaagaagctagaagtagcaacatacttggcaatagcaatgttggcgcacgccgacaaagatgacttaatggtcccctacgcgttcacagaccactacatattattccttgtatatccaaaagaccaattgatcatatcattggaccccgcacactatgacaaggaaacatttatggaattcctcactattttgaatttagcacataagtactaccgcaaaagaggtggaccagtacatattacatcccagaagcagttatctgtcaggactggctggctgtgctacaaacaaccaccgggaaccaacttgtgcggttattacgtgtgcaagatgctcagagtaaatgggaggtacaaaacaaccagtaaccgaatccccaaaatcccatatattgcacaacaattcaatgacaatactatcttgaacatggccgctgacctctgtcgattcatccatcgcgatgtctgcaacgcaagaggtctcttctacgacaaccagagtgaactcgcaatggacgacaaatttaaacctctcagagagtag

SEQ ID NO: 60786 - DNA, 663 bp, Oryza sativa
  Clone ID: PAT_MRT4530_62281C.1
atggcggtggcgccccccttcccccaccgagcggcgacgggcgacagcgtggagcagcggccgacctcctctccctcgccatggggccctgggagggctcgaccgtggcgagcggcgacgccctcccttccggcgggaggggaggcggcggacaggggcgccggtgcccttccctccgccggatccagtgggaggggaggcgccggcggcccgccggcatcccagcagcagtggcgctcctcccctccgccggatccagtggcagggggaggcggcggcggtggcgcccctcccctccgtcagatccagcgggaggggagctggcagcggcctgtgacggcagcggcagttcggcggcggcggcggctcgacggcggcgtcctctcctcccgagtactgacgacggcagcgggcgtaggcggcgacgacgcgcgggatccgatccggtggaggggaggggcgtcggcagcggtgcggccggaggggagcacggaggtcagtgggagggcggatccggcggcgcggaggccgccgccgccgctgacgagagtgggagcggtgtccttggctgccgccgccgacgatgatgaggatgatgacgaggatgacgacgaggaggaggcggtggcgctgtcgccggattctaggttttcatttttttga

SEQ ID NO: 60787 - DNA, 3093 bp, Oryza sativa
  Clone ID: PAT_MRT4530_62282C.1
atgccacctcccaccaccaccacagccgctgctgccgacaccacctcgctgtcggccagccacagccccatcaccgttgtccagccgctaccccgccaatgccgtcaaccagccaccgtgctttcgccgccgacaagccgctgctgccatcgtcgccatgaaatccataccattgccaccgtcgccggcgccccgtgctcacgcgccgttgccaccgccgacgtcaccgcgagctccgcggtgccgccaccgccgcgagcttgccccgcaccggatccgccctcgggggggggggatccacctctggccaccatcgccatcctcactggcctccgggcaacggcctcaatcgccgcctggcgacgctcacacgcgcccggccgcgccgcgacctcgcccagctgcgccacccgcgcaaccgtcgccgccgccacctcttccccaccgccagcacgcctgtttcctcgccgcccgccgtcgcccggcccgccgccgccaccactccgccccgccaccaagcgccaccccgccggatccggccgggcgggtgcagatccggacggtttgctaccgtcgccgcccggccagctccccgggccgccgagcgcgtgctgggcaaaagccccgccgccgccgtccccgcggccgcgcggctttgccggcacccgctcaggtggcggcgaggcagagaaggagggggggaggaggaagaagacggcggcggcgtcgcctcttgtgtcgccggctaaggcgcatgctttgagggagaatatgacaaagatcttttgtccgtgccgtcattgcaagaatcagaaattgttggtagatcctggtgaaatattgggtcacataatggagtacggatttaccgccaactacaaggtttggacctatcatggggaattcgccaatccggaagatgacgatgaagagttaagttttgagataaatgaggcagagaattttataatcgaagacatgtcgcgtgaaagaatggatgtcgatgtttccaccgatagtgatgatttcgatggtggttttgatttagaggatatgctacgccatgttgaaccagaggtgctagcgggcaggtcacgaggattggagaattggcaggcattagagaaggcatcgaaggatcttctttacgatgaaacgaagggatgtgataaggatttcacagtcttgcgttcagtgcttgaacttctgagattgaaggctaaacatggatggtcggacacaagttttaatgatctgaagagtttattgcgtgtgttgcttcctaagcctaactttgtaccatcgaacatgtatcaagcgaagaaactcatatgtcctttatctcttggtgtagaaaagattcatgcttattctgataagggtaagcgcgggaagattccttcaatggtgacgtggtacctaccaattaaggaccgcctgaagcgtctgtactcaaacccgactgatgctgagttgatgagatggcctcaagagagctggaaaatagatggtatgattcgacatcctgccgacgcttgccagtggaagacatttgatgcaaaacacccagaatttgctaaggatcctaggaatgtaaggtttgcgttgagcactgatggaatgaacccgtttgtggagaatgacactgccccagtagcaagaggtggtacatacatgtatgagataacaaagaagattaaggttgtatatggaaagggaaagaagaagacagtaaagtggaagaaagctgatggtgacaacggtactgcgtcgcctttcaagaagcactcaattttctttaaatacttagattactggaaggacctagagattcgacatgcaattgatgttatgcacctcgagaagaacgtgtttgatagcaccgttggcacattgctggacatcccgatgctgccaaatgggaagaccgagattcctcctgcttgttactcgttgacacttgaagagaaaaaagccttctgtaaatgtttacaagggaaggtatttgatcctctggaattaggtccgcttcagacatttgccgtcgagactgtatgccagcttgagatgtatttcccaccatcatttttagatatgatggagcatttgatcgttcacatcgtccctcagattattgaacttggtccattatacttacatcagatgtgggcctatgagcgttacatgtcgatcctcaaaggctatatccctgtgctccgttgtgaatgggttaaagacacaacaggggtttccgttgatgactacgggctaacgatagtcgatcacagtaaaataggccacaaggatgatccatgggttttagcagagcgtgtggctcaagtgttttatgtgaaggacccttcagatgaaagaaaaactattgtcatatccggaaagcaacagatcgtcggcatcgacaacatcgaagaccccaatgattacaaccagttcgacgatgtaccattgtttactgatcttcctatgcgaattaagaaggttgagcgaacaatcgatgaagtgaatatgtcgtacgttcgagcagatggtgttgccaaggtggccgtcgccgccgcacggacctctcccccctcgccgtcgccgtcgccgccgccaagtcgtccccgccgccaagtcgtccccgccaccgccggctcctccccgaagtcgccctgcccctcgccgtcgccgatgccgccgccaggacctctacctcctcgtcgtcgccgtcgccgccgcacggacctctcccccctcgccgtcgccatcgccgccgccaggtcgtccccgtccctcgccgtcgccgacgccgctgccaggacttctaccccctcgctgtcgctcggcgggagtgggaaaaaaagacgtggtgagagaagcaagaataaattacccaaggaaacttacaacgtgattgctctcgatcaggatgggaagcccgtcgagccaccgatagtgcggtccaagttcagcaacgcctgtggcactctagctgactgggacgcaagaggtctcttctacgacagccagagtgaactcgcaatggacgacaaatttaaacctctcagagagtgggagaaagaacatatgcaataa

SEQ ID NO: 60788 - DNA, 254 bp, Oryza sativa
  Clone ID: PAT_MRT4530_62283C.1
gataaaagaatatacgtatggattccagtccaatggggcataacacattcaccatcttagcccaaaaaaaataagcctgaccgtcactgattaccttagtttatttgcgcctaacgctagactatctaacagacacaccccgaaataccgcacacaatcagcatcctatactcgacactttttgtatcaactaataaggcgaacactcagactgaatctgaccatgtccttatatcgactccaccgtgcaatgc

SEQ ID NO: 60789 - DNA, 1005 bp, Oryza sativa
  Clone ID: PAT_MRT4530_62284C.1
atggataattcttcagattctcagaggaggaagaggtgcgcggcgtgctatagggagttcaacaagaaggagcacctggtggagcacatgcggacgtcgctgcattcggcgcacgaccctcgctgcggcgtctgcggcaagcactgccgctccctcgacgccctccgcgaccacctcaccggcgccctccccaagccggagtgcgccgccgccttcgcctcccgcggctgccccctctgcctccacgtagtcctcccgcccaccgccgccgcccactcctgccccgcggccgcgccaccgctcggcggcgtcctcgccctggggtgcaagatggtgggcgccggcagcgacgggtccctggacgtgtgcgcccgcgtgtgcgtggtggacgagcaggagcgcgtggtgttggacaccttcgtcaagccgcacatccccgtcacgcactaccgctacgacaccaccggcatccgccccgagcacctgcgcgacgccatgacgcccaagcaggcggcgcgccgggtgcaggagctgctgctcaacggcgagccggcgtggaaggcgcggagcagccgcgggagggcccggatcctggtcggccacggcctggaccacgacctcgagtcgctgggcatggactacccggagtacctgaagcgggacacggcgaggtacccggcgctgatgaagacgagcaacagccgcctcagcaactcgctcaagtacctcaccctcgcctacctcggctaccacatccagatcgccggccgccaccaccacccctacgacgactgcgtcgccgcgctgcgcctctaccgccggatgcgtggcgcgcggccgcacacctgcagggacgccggcgtggggccgcacgcgccgccgccaacgccggcggaggcgttcccggcgtggaggcagcgggagctggagcgcatgtcgccggaggagctcctccagctgtccacctcggactactactgctggtgcctcgacgccaccgactaa

SEQ ID NO: 60790 - DNA, 2439 bp, Oryza sativa
  Clone ID: PAT_MRT4530_62285C.1
atggagtacggattcaccgccaactacaaggtttggacctatcacggggaattcgccgatcccgaagatgacgatgaagagttaagtttcgagatgaatgaggcggagaattttataatcgaagacatgtcccgtgaaagaatgggtgtagatgtttccaccgatagtgatgatttcgagggtggttttgatttagaggatatgctacgccttgttgaaccagaggtggtagcgggcaggtcacgaggattggagaattggcaggcattagagaaggcattgaaggatcttctttacgatgaaacgaaggaatgtgataaggatttcacagtcttgcgttcagtgcttgaacttctgagattgaaggctaaacatggatggtcggacacaagttttaatgatctgatgagtttgttgcgtgtgtttcttcctaagcctaactttgtaccatcaaacacgtatcaaacgaagaaactcatatgtcctttatctcttggtgtagaaaagattcatgcttgtaaaaatcattgcatattataccataaagaatatgcagacttggaaagttgcccaacatgtggcacaagtcggtataaaacgggaaatgggcccgtagatacagagtgtaccgatccagattctgataagggtaagcgtagaaagattccctcaatggtgatgtggtacctaccaatcaaggaccgcctaaagcgtctgtactcaaacccgattggtgctgagttgatgagatgccgaaagacagatggtccaaaccaacctagaatcgacatagatgttttccttgagcctttgatagaggacatggaggagctttggaaagaggggttacgactatgggatgagtttaagagggagcacttcaatctatgtgtgatcatattcgttaccatcaatgacctacctgcaaacttttcattatctgggcagattaaagggaagactggatgtctgatatgtttggagaaaacttcgtacaaatacctaacgtcgtctttgaagacagtgtacatgcgacatcgacggttcctaccacaaagacacaggtaccgtaagatggccagattgttcgataatacagtggagaatgacactgccccagaagcacgaagtggtacatacgtgtatgagataacaaagaagattaaggttgtatatggcaagggaaagaagaagacagtaaagatgaagaaagctgatggtgacaaagatactgcgttgcctttcaagaagcactcaattttcttcagatacttagattactggaaggacctagagattcgacatgcaattgatgttatgcacctcgagaagaacgtgtttgatagcaccattggcacattgctggacatcccgagtaagacgaaggatggattgaagtcacgtaacgaccttgtagatttggccatacgacatgaccttcacccagtagtgctgccaaatggaaagaccgagattcctcctgcttgttacccgttgacatttgaagagaaaaaagccttctgtaaatgtttacaaggggttagagtgcctactggtttctcatcgaacatcaggaagctagtatcaatgaaggatttgaccatttccggatacaatgcgcatgacttccataggttgctaacggtattactaccaattgctataagggcagttaaaccagtctataccaagaaggtatttgatcctctggaattaggtccccttcagacatttgttgtcgagaccgtatgccaacttgagatgtatttcccagcatcatatttagatttgatggagcatttgatcgttcacatcgtccctcagattattgaacttggtcccttatacttacatcagatgtgggcctatgagcgttacatgtcgatcctcaaaggctatgtatgcaatcgcgctcaccctgaaggatcaatgatagagggatacacaactgaagaggcggtcgagtgttgtatggattacataaaggatgctaatgccattgggattcctgttcatcgacacgaagggagattgtctggaaggggtactgttggtaggaagcagttcttcgataatgattacaaaaaggtgtccacggcacacaacagcattcttcaacagctcgctatcgttgagccattcattgagcgacaccttgaagaaatcaaagcctgcttcacagggcgattcgatgattgggtatcaagagagcacaagcgtcgctttcctctgtggttcaaagatctaaacctgccagttggtgattctgtggaggaacttactttacaaagactagcatgtgggtcttcaagtattgtcaattcatatcaaggttatgacatcaatggatttaccttgtatacgactacgaaggatatgaaaagcactgcagaaaacagtgggatctgtgtcgaagcgattgacacgactggtgaatag

SEQ ID NO: 60791 - DNA, 256 bp, Oryza sativa
  Clone ID: PAT_MRT4530_62286C.1
catctcttacttcccaaaaaacttctgtaaaaattcaccatttagaaggtgcgaacacttttaacaaaccaatggccaattgggaatatggaacagccggtacccttttattaggccgtttccatcattcggtacaaattgggcaacacaaagaacgatcggccctccaaaacagaattcacaggtcccaacaaaacggtacaaggttcttccaaatttttcaatcactcatggaggaagaaggcaccttcaatcg

SEQ ID NO: 60792 - DNA, 2297 bp, Oryza sativa
  Clone ID: PAT_MRT4530_62287C.1
gccaagcgcgcggcggtccacacacatttgcatagccacagccaagaagcgacgcgatggtgacggcggagtcgggcgtcgccggcggcgccgtggcgcggcggcgctgctgcgggaggtggcgacggcgcggttcgcgcggcaggtggtgctggggcggtggttcatggtgttcgcgtgcctgctgatcctgtcggcgtcgggggcgacgtacatcttcgggatctactccaaggtgctcaagtcgtcgctgggctacgaccagcggacgctgaacacgctctccttcttcaaggacctcggcgccaacgtcggcgtcatctccggcctcatcaacgaggtgacgccgccgtgggtggtgctcgccatgggcgccgccatgaacctcgcgggctacctcatgatctacctcgccatcgacggccgcacggcgcggccccccgtgtggctcatgtgcatctacatctgcgtcggcgccaactcgcagtcgttcgccaacaccggcgcgctcgtcacctgcgtcaagaacttcccggagagccggggcatcgtgctcggcttgctcaaggggttcgtcggcctcagcggcgccatcttcacgcagctctacgtcgccatctatggcgacgacgccaagtcgctggtgctgctcatcgcgtggctccccgccgccatctccatcctgttcgtccacaccgtccgcatcatgccgtacctccccagccgccgccgccgcgccgacggcgagctcgaggcctccgccgccaccagcaacgacgccttcttctgcttcctctacatctccatcgcgctcgccacctacctgctcaccatgatcgtggtgcagaaccagaccaacttctcgcacaccgcctacgtcgtgtcggccaccgcgctcctcctcgtcctcttcctcccgctcgtcgtcgtcatcaagcaggagtaccagatcaagaaggagctcgacgactccctccgtgagccccccacggtgaccatcgaaaagccagccgccgccgccatgcaaatgtcagcgatcaccaccaagcccaaaaccgagacaccgtcgtcgtcgtctccggcgccggcgccgccgtcttgctgcctcggttcttgcctgaagcacatgttcaacccgccagcgcagggggaggactacaccatcctgcaggcgctggtgagcgtggacatgctggtgctgttcctcgccaccatttgcggcgtcggcggcacgctgacggcgatcgacaacatggggcagatcgggcagtcgctggggtacccggcgaagagcatcaagacgttcatctcgctcatcagcatctggaactacgcgggccgcgtcacctcgggcttcgcgtcggagatgttcctcgcccgctacaggttcccgcgaccgctgatgctcacggcggtgctcctcctcgcctgcgtcggccacctcctcatcgcgttcggcgtcgcgcagtctctctacgccgcctccgtcatcatcggcttctgcttcggggcgcagtggccgctcctcttcgccatcatctccgaggtgttcggcctcaagtactactccacgctctacaacttcggctccgtggcgagccccgtcggcgcctacgtcctcaacgtccgcgtcgccggctacctctacgacgtcgaggcggccaggcagcacggcggctcgctcgccggcggcgacaagacctgcctcggcgtgcagtgcttcaggaaggccttcctcatcatcaccgccgccaccgtcgccggcgcgctcatctccctcgtgctcgtctggaggacaaggaacttctacaagggggacatctacgccaagttccgcgagaacaccgccaccgacgaagctaccaccaacggtaactccgccgatacagcggcggaaaaaaggtcaaccttagtcaatgacgaggacagtaaaaaggggtagtaatgtagtttactgatataaagattactacaccaaaagacaagagcttgttacttcttattagcagaaaagtcaaaaaatggtaggcttgctgctaatataagtttccagatatctgtaaaaaattttggggctaaaaagaaagaatctactactagtggagtaaacaagattaggcagcagctctgtgcttgtacccattacaagcaacagtaagctgcaagctagagtaaaatactgtcactgtaagaagttgggtgattaaggccctgtttagatgggactaaaagttttaagtccctatcacatcggatgtttgaaaattaattataaatattaaacgtagactattaat

SEQ ID NO: 60793 - DNA, 4408 bp, Oryza sativa
  Clone ID: PAT_MRT4530_62288C.1
atggtggcctctacttgtcagatagacgggggtagcagaatcacggatagagtatatagtaaatcgaaggtcttcgcggaagccaacgctgtgcgacccgccctcgcgcacagcgcattgctccgcgtgagcgtgaccccgcgcgatatggctaaggagcatgctttgagggagaatatgacaaagatcttttgtccgtgccgtcattgcaagaatcagaaattgttggtagatcctggtgaaatattgggtcacataatggagtacggattcaccgccaactacaaggtttggacctatcacggggaattcgccaatccggaagatgacgatgaagagttaagtttcgagatgaatgaggcagagaattttataatcgaagacatgtcgcgtgaaagaatggttgtcgatgtttccaccgatagtgatgatttcgatggtggttttgatttagaggatatgctacgccatgttgaaccagaggaccgcctgaagcgtctgtactcaaacccgactgatgctgagttgatgatatggcatcaagagagccgaaaaatagatggtatgattcgacatcccgtcgacgctcgccagtggaagacatttgatgcaaaacacccagaatttgctaaggatcctaggaatgtaaggtttgcgttgagcactgatggaatgaacccgtttggtgacttaagcagctcgcacagcacatggccagtccttctcacaatgtataatcttccaacatggatatgtcaaaaacgaaagtacattctactcactatcctcatacaaggtccaaaccaacctggaatcgacatagatgttttccttgagcctttgatggaggacatggaggagctttggaaagaggggttacgactatgggatgagtttaagcgggagcacttcaatctacgtgcgatcatattcgttaccatcaatgacctacctgcaaacttttcattatctgggcagattaaagggaagactggatgtctgatatgtctggagaaaacttcatacaaatacctgacgtcgtctttgaagacagtgtacatgcgacatcgacggttcctaccacaaagacataggtaccataagatggctagattgttcgataatacagtggagaatgacactgccccagtagcaagaggtggtacatacgtgtatgagataacaaagaagattaaggttgtatatggaaagggaaagaagaagacagtaaagaggaagaaagctgatggtgacaacggtactgcgtcgcctttcaagaagcactcaattttctttacatacttagattactggaaggacctagagattcgacatgcaattgatgttatgcacctcgagaagaacgtgtttgatagcaccgttggcacattgctggacatcccgagtaaaacgaaggatggattgaagtcacgtaacgaccttaaagtatttgatcctttggaattaggtccgcttcagacatttgccgtcgagactgtatgccagcttgagatgtatttcccaccatcatttttagatatgatggagcatttgatcgttcacatcgtccctcagattattgaacttggtccattatacttacatcagatgtgggcctatgagcgttacatgtcgatcctcaaaggctatgtacgcaatcgcgctcacccggaaggatcaatgatagagggatacacaactgaagaggcagtcgagtgttgtatggactacataaaggatgctaatgccattggcattcctgttcatcgacatgaaggtagattgtctggaaggggtactgttggtaggaagcagttcttcgataatgattacaaaaaggtgtccgcggcacacaacagcgttcttcaacagctcgctatcgttgagccattcattgagcgacacctagaagaaatcaaagcctgcttcccagggcggtccaatgattggatatcaagagagcacaagcgtcgctttcctctgtggttgaaagatctaaacctgccagttggtgattctgtggaggaacttactttacaaagattggcatgtgggccttcaagtattgtcaattcatggcaaggttacgacatcaatggatttaccttgagtacgactacgaaggacatgaaaagcaccacacaaaacagtgggatccgtgtcgaagcgattgacacgagtggagaaaagaggtcgtattatgggaccattcaagaaatatgggaactggactatggcctaaacatccagatccctgtgctccgttgtaaatgggttaaagacacaataggggtttccgttgatgactacgggctaacgatagtcgatcacagtaaaacaggccacaaggatgatccatgggttttagcagagcgtgtggctcaagtgttttatgtgaaggacccttcagatgaaagaaaaactattgtcatatccggaaagcaacagatcgtcggcatcgacaacatcgaagaccccaatgattacaaccagttcgacgatgtaccattgtttactgatcttcctatgcgaattaagaaggttgagagaacaatcgatgaagcaaatatgtcgtacgttcgagcagatggtgttgccaaggacctctcccccctcgccgttgccgtcgccgccgccaggacctctcccccctcgccgtcgccgtcgccgccgccaggtcgccgtcgccaccgcacggaactctcccccctcgccgttgccatcgccgccgccaggtcgtccccgccgccaagtcgtccccgctaccgccggctcctccccgaagtcgccccgcccctcgccgtcgccgacgccactgccaggaccgttgccctcgccgtcgccgtcgccgccgccagcaataagcagccaggcgcttctagtgaagaaacgtggcgcacaccaagtgacccgtttccaatggaaataacacaagtcgccccccgcgatgatgatccggactacatacctatcgaacaggccatggtagtccgacgccgctcgaaacgtaaagccgggaggaacaggacagagcaagaagttgagatggacaccgctacgtctgcacctgaactggacgacaacatcaagacacttctctggaatgagttgcagaagtattttgtgttccctcctggatcagagaagaatctcccaccgtttacggattatggacatatatcccaggctgattgggacacgtttgttgcggatcgtacaacagctgaagcattggctttgaggaaaaaaatgtccgagctcgcgaagaagaacagatatccccatagattggggtcgagcggatacgctggtcacgtcgatcaatggcgggagatcgagcaaagatttgccgcggccggtaagcccctgctggtagaccccatggttgaacgtagcaagaactgggtttgggcgcgcagcacaggtcaagtctcggatgagggagacatactattcgagactccagacatagaagaagtgactactaatttgcagcagatagtcgagaaagaaagatcaggacagttcgtcccacggagggagcgagatcagcttactgcggcgttggggacggctgaacactctggacgtgtaaggggtttgtcctcaaagacaagttggaaggtcgggtttccacaagacgcaccaagttataagaagagagacaaatacaaagaacaactatcggacaagatctatgcgcaagtgaaggaacacttctactcgttggcagctgaaaacccgacagcttttccaaggaattctgagaagagaaaagaacttgctaacgtcttgtcagactcccagaagtcagtactagcggcccaagatgaagtgcaatcctggttatctgccgatgtgcctgaaacttatgagtatggcaagccattcttgccaacttatcttatgaacaagctaccatgggaaatgagggtaatgcacgaatgtatgcaattccacgaagctgatagaactggagcaaaggttggatacgtcgatccaacaagaatatgcaaaacacaacacaccgtagagctgagacaggactgcgagcaattggttggcaagaccccggaagaaaaggaagaatatgtgaagacattgcacaagaggaagaagctagaagtagcaacatacttggcaatagcaatgttggcgcacgctgacaaagatgtcttaatggtcccctaccagttcacagcacacaagtactaccgcaaaagaggtggaccagtacatattccatcccagaagaagttatctgtcaggactggctggccgatccctgaaatcccatatattgcacaacgattcaaccacactactatcttgaacgtggccgctgacctctgccgattcatccgttgcgatgtctgcaacgcaagaggtctcttctacgacaaccaga

SEQ ID NO: 60794 - DNA, 4818 bp, Oryza sativa
  Clone ID: PAT_MRT4530_62289C.1
atggagtacggattcaccgccaactacaaggtttggacctatcacggggaattcgccaatccggaagatgacgatgaagagttaagtttcgagatgaatgaggcggagaattttataatcgaagacatgtcgcgtgaaagaatggttgtcgatgtttccaccgatagtgatgatttcgatggtggttttgatattgaggatatgctacgccatgttgaaccagaggtgctagcgggcaggtcacgaggattggagaattggcaggcattagagaaggcatcgaaggatcttctttacgatgaaacgaagggatgtgataaggatttcacagtcttgcgttcagtgcttgaacttctgagattgaaggctaaacatggatggtcggacacaaatccagattctgataagggtaagcgcgggaagattccttcaatggtgatgtggtacctaccaattaaggaccgcctgaagcgtctgtactcaaacccgactgatgctgagttgatgagatggcatcaagagagccggaaaatagatggtatgattcgacatcccgccgacgctcgccagtggaagacatttgatgcaaaacacccagaatttgctaaggatcctaggaatgtaaggtttgcgttgagcactgatggaatgaacccgtttggtgacttaagcagctcgcacagcacatggccagtccttctcacaatgtataatcttccaacatggatatgtcagaaacgaaagtacattctactcactatcctcatacaaggtccaaaccaacctggaatcgacatagatgttttccttgagcctttgatggaggacatggaggagctttggaaagaggggttacaactatgggatgagtttaagcgggagcacttcaatctacgtgcgatcatattcgttaccatcaatgacctacctgcaaacttttcattatctgggcagattaaagggaagactggatgtctgatatgtctggagaaaacttcatacaaatacctgacgtcgtctttgaagacagtgtacatgcgacatcgacggttcctaccacaaagacataggtaccgtaagatggctagattgttcgataatacagtggagaatgacactgccccagttgcaagaggtggtacatacgtgtatgagataacaaagaagattaaggttgtatatggaaagggaaagaagaagacagtaaagaggaagaaagctgatggtgacaacggtactgcgtcgcctttcaagaagcactcaattttcttcaaatacttagattactggaaggacctagagattcgacatgcaattgatgttatgcacctcgagaagaacgtgtttgatagcaccgttggcacattgctggacatcccgagtaaaacgaaggatggattgaagtcacgtaacgaccttaaggtatttgatcctttggaattaggtccgcttcagacatttgccgtcgagactgtatgccagcttgagatgtatttcccaccatcatttttagatatgatggagcatttgatcgttcacatcgtccctcaaattattgaacttggtccattatacttacatcagatgtgggcctatgagcgttacatgtcgatcctcaaaggctatgtacgcaatcgcgctcacccggaaggatcaatgatagagggatacacaactgaagaggcagtcgagtgttgtatggactacataaaggatgctaatgccattggcattcctgttcatcgacatgaaggtagattgtctggaaggggtactgttggtaggaagcagttctttgataatgattacaaaaaggtgtccgcggcacacaatagcgttcttcaacagctcgctatcgttgagccattcattgagcgacacctagaagaaatcaaagcctgcttcccagggcggtccaatgattggatatcaagagagcacaagcgtcgctttcctctgtggttgaaagatctaaacctgccagttggtgattctgtggaggaacttactttacaaagactggcatgtgggccttcaagtattgtcaattcatggcaaggttacgacatcaatggatttaccttgagtacgactacgaaggacatgaaaagcaccgcacaaaacagtgggatccgtgtcgaagcgattgacacgagtggagaaaagaggtcgtattatgggaccattcaagaaatatgggaactggactatggcctaaacatcctgatccccgtgctccgttgtgaatgggttaaagacacaataggggtttctgttgatgactacgggctaacgatagtcgatcacagtaaaacaggccacaaggatgatccatgggttttagcagagcgtgtggctcaagtgttttatgtgaaggacccttcagatgaaagaaaaactattgtcatatccggaaagcaacagatcgtcggcatcgacaacatcgaagaccccaatgattacaaccagttcgacgatgtaccattgtttactgatcttcctatgcgaattaagaaggttgagagaacaatcaatgaagcaaatatgtcgtacgttcaagcagatggtgttgccaaggctgccaaaatttcccaagtcgccgtcgccgtcgtccccgccaccgccggctcctccccaaagtcgccccgccccacgccgtcgccgccgccgccgtcaggacctctcccccctcgcctttgccgtcgccgccgccaggacctctcccccctcgccgttgccgtcgccaccgccaggacctctcccccctcgccgtcgccgtcgccgccgccaagtcgccgtcgccaccgcacggaactctcccccctcgccgttgccatcgccgccgccaggtcgtccccgccgccaagtcgtccccgctaccgccggctcctccccgaagtcgccccgcccctcgccgtcgccgacgccactgccaggacctctcccaccccgccgtcgccgtcgccgccgcacggacctctcccccctcgccgttgccatcgcctccgccagttcgtccccgccgtcgctcgcaataagcagccagacgcttctagtgaagaaacgtggcgcacaccaagtgacccgtttccaatggaaataacacaagtcgccccccgcgatgatgatccggactacatacctatcgaacaggccatggtagtccgacgccgctcgaaacgtaaagccgggaggaacaggacagagcaagaagttgagatggacaccgctacgtctgcacctgaacgtacggagacatctacaagtgcagacgggagtgggaaaaaaagacgtggtgagagaagcaagaataaattacccaaggaatcttacaacgtgattgctctcgatcaggatgggaagcccgtcgaaccaccgatagtgcggtccaagttcagcaacgcctgtggcactctagtcaggacgcgttgtcccattaatgtcaagttctgggaaacagtggacgacaacatcaagacacttctctggaatgagttgcagaagtattttgtgttccctcctggatcagaggctgactgggacacgtttgttgcggatcatacaacagctgaagcattggctttgaggaaaaaaatgtccgagctcgcgaagaagagcagatatccccatagattggggtcgagcggatacgctggtcacgtcgatcaatggcgggagatcgagcaaagatttgccgtggccggtaagcccctgctggtagaccccatggttgaacgtagcaagaactgggtttgggcgcgcagcacaggtcaagtctcggataagggagacatactattcgagactccagacatagaagaagtgactactaatttgcagcagatagtcgagaaagaaagatcaggacagttcgtcccacggagggagcgagatcagcttactgcggcgttggggacggttgaacactctggacgtgtaaggggtttgtcctcaaagacaagttggaaggtcgggtttccacaagacgcaccaagttataagaagagagacaaatacaaagaacaactatcggacaagatctatacacaagtgaaggaacacttctactcgttggcagctgaaaacccgacagcctttccaaggaattctgagaagagaaaagaacttgctcacgtcttgtcagactcccagaagtcagtactagcggcccaagatgaagtgcaatcctggttatctgccgatgtgcctaaaacttatgagtatggcaagccattcttgccaacttatcttatgaacaagctaccatgggaaatgagggtaatgcacgaatgtatgcaattccacgaagctgatagaactggagcaaaggttggatacgtcgatccaacaagaatatgcaaaacacaacacaccgtagagctgagagaggactgcgagcaattggttggcaagaccccggaagaaaaggaagaatatgtgaagacattgcacaagaggaagaagctagaagtagcaacatacttggcaatagcaatgttggcgcacgccgataaagatgtcttaatggtcccctaccagttcacagcacacaagtactaccgcaaaagaggtggaccagtacatattccatcccagaagaagttatccgtcaggactggctggccgatccccgaaatcccatatattgcacaacgattcaacgacactactatcttgaacgtggccgctgacctctgccgattcatccgtcgcgatgtctgcaacgcaagaggtctcttctacgacaaccagagtgaactcgcaatggacgacaaatttaaacctctcagagagtgggagaaagaacatatgcaataa

SEQ ID NO: 60795 - DNA, 310 bp, Oryza sativa
  unsure (1)..(310): unsure at all n locations
  Clone ID: PAT_MRT4530_6228C.1
aattgggtacngggccccccctcgangccataaggctgcttctgacgttcgtgatgagtttgtatctgttactgagaagttaatggatgaattggcacaatgctacaatgtgctcccccaacttgatattaataacactatagaccaccgccccgaagggggcgaaaaatggtttttagagaacgagaagacggttacgcagttttgccgcaagctggctgctgaacgccctcttaaggatattcgcgatgagtataattaccccaaaaagaaaggtattaaggatgagtgttcaagattgctggagggc

SEQ ID NO: 60796 - DNA, 408 bp, Oryza sativa
  Clone ID: PAT_MRT4530_62290C.1
tccccgggctgcaggaatttggcacgaggctagtctcgagtttttttatttttttttttttgaaaaaaagattgttgtgcttgaactattgaatgcatttacattgtgggggagaatgtgatggagtacaaccaaaatttgcttctcttttgatgatcctacttgtgttattcacattcaagaattggcgctattaagggaaaaaaaagagatttggaacaaaattgtacgaagaaaaaagaagaatgtttgttggtgagattttttatctacacctacgttgactatgtgagcttgcttgcttactcgccgccgcgcgacgagctgccgccgccgccgccggacccggcgatgtcgagtaaggcggcgagcacgtccggcatgtccggccgctcctgcggtgagtcg

SEQ ID NO: 60797 - DNA, 427 bp, Oryza sativa
  Clone ID: PAT_MRT4530_62291C.1
aacagcccacacggaaagatctttttcgcatgcggctggcttaacagcccgcatggaaagatctttttcgcatgcggccggcttaacagcccgcatggaaagatctttttcgcatgcggccggcttatgtcaaccgcatggaaagatattttttccatgcggtcccttaagccgcccgcatgcgatgatctgcgccccctcgccgttgccatcgccgccgccaggtcgtccccgccgccaagtcatccccgctaccgccggctcctccccgaagtcgccccgcccctcgccgtcgccgacgccactgccaggacctctcccccctcgccgtcgccgtcgccgccgccaggtcgccgtcgccgccgcacggacctctcccccctcgccgttgccatcgccgccgccaggtcgtccccgccgtcgctcg

SEQ ID NO: 60798 - DNA, 165 bp, Oryza sativa
  Clone ID: PAT_MRT4530_62292C.1
atgaacggcatgagcaaggatacgagttcaagctacgcattgaacatggcctcatgggatacgatcccggcttttgaacactgtgcagacagaaactgcacaccaaagattcgatgcactggaggcacttcagagttcagagttgcagtcattgtcctctactga

SEQ ID NO: 60799 - DNA, 453 bp, Oryza sativa
  Clone ID: PAT_MRT4530_62293C.1
aacagcccgcatggaaagatctttttcgcatgcggccggcttaacagcccgcatggaaagatctttttcgcatgcggccggcttaacagcccgcatggaaagatctttttcgcatgcggccggcttatgtcgaccgcatggaaagatatttttccatgcggtcccttaagccgcccgcatgcgatgatctgcgcgccaaaatttcccaagtcgccatcgccgtcgtccccgccaccgccggctcctccccaaagtcgccccgccaccgccggctcctccccgaagtcgccccgcccctcgccgtcgccgacgccactgccaggaccgttgccctcgccgtcgccgtcgccgccgccaggtggccgtcgccgccgcacggacctctcccccctcgccgttgccatcgccgccgccaggtcgtcgccgccgccaggtcgtccccgccgtcgctag

SEQ ID NO: 60800 - DNA, 126 bp, Oryza sativa
  Clone ID: PAT_MRT4530_62294C.1
attcatgttatacaatacagagaaccggattacatgcacatttacatgtttgacgctaaaattacacaaaggtttcaaaagggatagaatgcacacaaaacatacacgataaggcatatcattcac

SEQ ID NO: 60801 - DNA, 1545 bp, Oryza sativa
  Clone ID: PAT_MRT4530_62295C.1
atggccaacgtcgacgcatcacagtggctcatgctcctcctcgccttcctagtcgcactcttcatcctcctctcgctgcgaaaatgcggcggccgcagccgcgtgcccccgggcccgctcgccgtgcctgtcctcggcaacctgctctggctgagccactcctccgccgacctggagcccctgctccggcgcctcatcgcggtgtacggccccgtcgtgtcgctgcgcgtgggatcccacctgtccatcttcgtcgccgaccgccgcgtcgcgcacgccgcgctggtggagcgcggcgccgcgctcgcggaccggccggaggtcacgcgcgcgctcctcggcgagaacggcaacaccatctcgcgcggcaactacgggccgacgtggcgcctcctgcggcgcaacctcgtcgccgagacgctgcacccgtcgcgcgcccgcgcggccttcgcccccgcgcgctcctgggctcgccgcgcgctcgtcgacgggttggtgggcggcggcgccgtgctggcggacgcgttccggcacgccatgttctgcctcctcgtgctcatgtgcttcggcgagtggctcgacgaggccgcggtgcgcgccatcggcgacgcgcagcacggctggctcctgcactacgcgacgaagatgaaggtcttcgcgttctgcccggcggtcaccaagcacatcttccgtgggcgcatccagacgagcctcgctctgcggcggcggcagaaggagctcttcatgccgctcatcagcgcgcggcgagagcgcaagaaccaactcgcggaacgcgcggtgccggagaaggagacgacgacgttcgagcactcgtacgtcgacacgctgctcgacatcaagctccctgaggacggcggcgaccgcgctctcaccgacgacgagatggtcaggctctgctccgagttcctcgacgcaggcacggacacgatgtcaaccacgctgcaatggatcatggccgagctggtcaagaacccatccatccaatccaagctccacgacgagatcaagtccaagaccagcgacgaccacgacgagatcaccgaggaggacacccagaagatgccatacctgaaggccgtcatcctcgagggtctccggaagcatccgccgggccacttcgcgctgccacacaaggcggcggaggacatggaggtcggcgggtacctcatccccaagggcgccacggtgaacttcatggtggccgagatgggaagagacgagaaagaatgggagaatccaatggagttcatgccggagaggttcctccccggcggcgacggcgagggggtggacgtgacgggcagcaaggggatccgcatgatgccgttcggcgtcgggcggaggatttgcgcggggctcaacaccgccatgctgcacctggagtacttcgtggccaatatggtcagggagttcgagtggagggagatcgccggcgaagaggtggactttgccgagaagttggagttcaccaccgtcatggcaaagccacttcgcgctcagctcgtgcgcaggaggatgaattaa

SEQ ID NO: 60802 - DNA, 3876 bp, Oryza sativa
  Clone ID: PAT_MRT4530_62296C.1
atggagtacggattcaccgccaactacaaggtttggacctatcacggggaattcgccaatccggaagatgacgatgaagagttaagtttcgagatgaatgaggcagagaattttataatcgaagacatgtcgcgtgaaagaatggttgtcgatgtttccaccgatagtgatgatttcgatggtggttttgatttagaggatatgctacgccatgttgaaccagaggtgctagcgggcaggtcacgaggattggagaattggcaagcattagagaaggcatcgaaggatcttctttacgatgaaacgaagggatgtgataaggatttcacagtcttgcgttcagtgcttgaacttctgagattgaaggctaaacatggatggtcggacacaaagtgtaccgatccagattctgataagggtaagcgcgggaagattccttcaatggtgatgtggtacctaccaattaaggaccgcttgaagcgtctgtactcaaacccgactgatgctgagttgatgagatggcatcaagagagccggaaaatagatggtatgattcgacatcccgccgacgctcgccagtggaagacatttgatgcaaaacacccagaatttgctaaggatcctaggaatgtaaggtttgcgttgagcactgatggaatgaacccgtttgtggagaatgacactgccccagtagcaagaggtggtacatacgtgtatgagataacaaagaagattaaggttgtatatggaaagggaaagaagaagacagtaaagaggaagaaagctgatggtgacaacgatactgcgtcgcctttcaagaagcactcaattttctttaaatacttagattactggaaggacctagagattcgacatgcaattgatgttatgcacctcgagaagaacgtgtttgatagcaccgttggcacattgctggacatcccgagtccgcttcagacatttgccgtcgagactgtatgccagcttgagatgtatttcccaccatcatttttagatatgatggagcatttgatcgttcacatcgtccctcagattattgaacttggtccattatacttacatcagatgtgggcctatgagcgttacatgtcgatcctcaaaggctatgtacgcaatcgcgctcacccggaaggatcaatgatagagggatacacaactgaagaggcagtcgagtgttgtatggactacataaaggatgctaatgccattggcattcctgttcatcgacatgaaggtagattgtctggaaggggtactgttggtaggaagcagttcttcgataatgattacaaaaaggtgtccgcggcacacaacagcgttcttcaacagctcgctatcgttgagccattcattgagcgacacctagaagaaatcaaagcctgcttcccagggcggtccaatgattggatatcaagagagcacaagcgtcgctttcctctgtggttgaaagatctaaacctgccagttggtgattctgtggaggaacttactttacaaagattggcatgtgggccttcaagtattgtcaattcatggcaaggttacgacatcaatggatttaccttgagtacgactacgaaggacatgaaaagcaccacacaaaacagtgggatccgtgtcgaagcgattgacacgagtggagaaaagaggtcgtattatgggaccattcaagaaatatgggaactggactatggcctaaacatccagatccctgtgctccgttgtgaatgggttaaagacacaataggggtttccgttgatgactacgggctaacgatagtcgatcacagtaaaacaggccacaaggatgatccatgggttttagcagagcgtgtggctcaagtgttttatgtgaaggacccttcagatgaaagaaaaactattgtcatatccggaaagcaacagatcgtcggcatcgacaacatcgaagaccccaatgattacaaccagttcgatgatgtaccattgtttactgatcttcctatgcgaattaagaaggttgagagaacaatcgatgaagcaaatatgtcgtacgttcgagcagatgggagcgcggggagccaaaattttctaagtcccggctcccgcgaaaccctagccgccaggctgccaaaatttcccaagtcgccgtcgccgtcgtccccgccaccgccggctcctccccaaagtcgccccgccccacgccgccgccgtcaggacctctcccccctcgccgttgccgtcgccgccgccaggacctctcccccctcgccgttgccgtcgccgccgccaggtcgccgtcgccaccgcacggaactctcccccctcgccgttgccatcgccgccgccaggtcgtccccgccgccaagtcgtccccgctaccgccggctcctccccgaagtcgccccgcccctcgccgtcgccgacgccactgccaggacctctcccccctcgccgtcgccgtcgccgccgcacggacctctcccccctcgccgttgccatcgccgccgccaggtcgtcgccgccgccaggtcgtccccgccgtcgctcggcgggagtgggaaaaaaagacgtggtgagagaagcaagaataaattacccaaggaaacttacaacgtgattgctctcgatcaggatgggaagcccatcgagccaccgatagtgcggtccaagttcagcaacgcctgtggcactctagtcaggacgcgttgtcccattaatgtcaagttgtgggaaacagtggacgacaacatcaagacacttctctggaatgagttgcagaagtattttgtgttccctcctggatcagaggctgactgggacacgtttgttgcggatcgtacaacagctgaagcattggctttgaggaaaaaaatgtccgagctcgcgaagaagaacagatatccccatagattggggtcgagcggatacgctggtcacgtcgatcaatggcgggagatcgagcaaagatttgccgcggccgcatgctcccccggctccgccctcagttcaaacctctccacctacaccccaatctgctctgctttcaggaattctgagaagagaaaagaacttgctcacgtcttgtcagactcccagaagtcagtactagcggcccaagatgaagtgcaatcctggttatctgccgatgtgcctgaaacttatgagtatgacaagccattcttgccaacttatcttatgaacaagctaccatgggaaatgagggtaatgcacgaatgtatgcaattccacgaagctgatagaactggagcaaaggttggatacgtcgatccaacaagaatatgcaaaacacaacacaccgtagagctgagacaggactgcgagcaattggttggcaagaccccggaagaaaaggaagaatatgtgaagacattgcacaagaggaagaagctagaagtagcaacatacttggcaatagcaatgttggcgcacgccgacaaagatgtcttaatggtcccctaccagttcacagaccactacatattattccttgtatatccgaaagaccaattgatcatatcattggaccccgcacactatgacaaggagacatttatggaattcctcactattttgaatttagcacacaagtactaccgcaaaagaggtggaccagtacatattccatcccagaagaagttatccgtcaggactggctggccgatccccgaaatcccatatattgcacaacgattcaacgacactactatcttgaacgtggccgctgacctctgccgattcatccttcgtgatgtctgcaacgcaagaggtctcttctacgacaaccagagtgaactcacaatggacgacaaatttaaacctctcagagagtgggagaaagaacatatgcaataa

SEQ ID NO: 60803 - DNA, 1179 bp, Oryza sativa
  Clone ID: PAT_MRT4530_62297C.1
atgaccaacgagcaacgagtggtcgagtgcggaggtggtgtcaatgaggtcaggcggtgcgcgggacgcacgcacgccgtttctgctgggagaaacgccgccgctcgtccctcgcgcgcctgccgtgaccgaggaattcctcggcgaggtggcacagcttcacttacatgtttctatcttgtaatcttgccccccatcctatataaggcgggtaggaagccctctaggatagaggattcacaacctgatcgtcagattaatactgcacctgacggattcaagcccccaaacaggccagtagggccattcaatgtgtgccaaaattcgtgcgcatatattgggctgggaagcgcgaacccgcataggattctgttgggccgcgtgtaccagcgtcgatcgttgatatggcatttcgttggatgtaaatctaagggtagaaaaaaattagttgatatgacatgtaaatgcactgtaattttgataacaatgatatttgatatggcatgcaagtgcattgtaattttgataacaatgatgtacacgatgtcaaccacactgccatggatcatggccgagctggtcaagaacccatccatccaagcaaagctctacgaggagatcaaggccacggtaagcgacgaccacgacgagatcaccgaggaggacacccagaagatgccatacctaaaggccgtcatcctcgagggtctccggaagcatccgctgggccacttcgcgctgccgcacaaggcggcggaggacatggacgtcggcgggtacctcatccccaagggcgccacggtgaacttcatggtggccgagatgggaagagacgagagagaatgggagaacccgatgcagttcatgccggagaggttcctacccggcggcgacggcgagggagtggacatgacgggcagcaagaggatccgcatgatgccgttcggcgtcgggcggaggatgtgcgcggggatcaacaccgccatgttgcacctggagtacttcgtggccaacatggtgagagagttcgagtggaaggcggtggtcggcgacaaggtggacttcgccgagaagttgagttcaccaccgtcatggcgaagccactccgcgcgcagctggtgctcaggagcgtcgattaaacgggcttttaatcaagtttttagtactcggtacaaataa

SEQ ID NO: 60804 - DNA, 1456 bp, Oryza sativa
  Clone ID: PAT_MRT4530_62298C.1
ccacgcgtccccgcgtttatattactagtaggaggagcggggtgagtcgaggtggggagaggtgggttgagttggggattgattgattgattcggattgggaagaagaagaagcaggggagcatgggcagcaagtcgtacccgacggtgagcgatgagtacctggcggccgtgggcaaggcgaagcgcaagctccgcggcctcatcgccgagaagaactgcgccccactcatgctccgcctcgcgtggcactctgctggcaccttcgatgtgtcgtcgaggaccggcgggcccttcggcaccatgaagaaccccggcgagcagtcccacgccgccaacgccggcctcgacatcgccgtcaggcttctcgaccccatcaaggaccaacttcccatcctctcctacgccgacttctaccagcttgctggcgttgtggccgtcgaggtcaccggcggacctgaggtccccttccatccgggcaggcaggacaagcctgagcctcctcctgaaggccgtcttcctgatgccacacaaggttctgaccacctaaggcaggtcttttctgcgcagatgggtttgagtgacaaggacatagttgctctttctggtggtcacaccctgggaagatgccacaaggagagatctggctttgagggagcctggacgtccaaccctttgatctttgacaactcttacttcaccgagcttgtgagtggcgagaaggaaggccttcttcagctgccaagtgacaaagccctcatggctgacccagccttccgtccactggtggagaaatatgctgcggatgaggacgccttctttgcggattacgccgaggcccacctcaagctctctgaactggggatccccgcggccgcgcgcgttttagatcccgccatcaacacccgttgccctccgccccacgccgttgtcatgcgcatgcgcagtcgcagccgccgttccatcgctgcctccgtttcgccgccgggggacccctccatccgcgaccccatctcactgccaagtaaggagccgcctgcctgtgcctctgcctctttttccttactttttggtcactcaccaaggtcaccaccagggccgctcaccagcgcggatctgatggaggccagcggagacggtttgaaggtcgcataccagggatgcccgggtgcctacagtgaggccgccgccaagaaggcgtacccgagttgccacaccgtgccctgcgaatacttcgagaccgcctttcaggctgtcgaaaattgggtggctgaccgcgcggtcctgccacttgagaattccttgggtggtagcatccatcgaaactatgaccttctacttcgccataggctgcacattgttggtgaggtgcgccttgcagttcgccattgcttgttagcaaaatcgtggtgtgaagatccaaaatttgagaagtgccatgagccatcctcaaagct

SEQ ID NO: 60805 - DNA, 701 bp, Oryza sativa
  Clone ID: PAT_MRT4530_62299C.1
cccccaactggaagggtgagctcaaggtgcccgagaaacccccggatcggccgccatcgatccactgaacgccaacgttgtgtacctgatattcctccacgaggttcttgccgtggacatggccaagggcgaggtgattgggaggagttctcctgatgacgtcaactctagttcagttgtgccatgcatcctaccaccgtggctcgaatcatgtcagatcccctctgcagcaaccctttcgagcaagaagactgatgttgaaagaaatactctggcagacacactggttcgtgtggatagaggcagttaaaactgaactgcatcagtcgattcatcttttggttccttgggactgactggaaaagatgttcgagagaacttgtttagatggtagcagtttcctgaagtacctgaactctcgtttttgggggatgctgtgagaagtttgggttttgatgcgcatttggactttgctggtccaacttgttgaatttcgttttggacaaacaccggggaatgttaacatattttcgtatttttccttttcttccatacctgttgaatggttaagtagaatgagtatctccaagtagaagctgggcatggtactcctatgaacccaatgtttgttttcaggacacttatctctcataagcatttaaactatcttcgcttgtaaaaaaaaaaaaaaacaacaaccc

SEQ ID NO: 60806 - DNA, 292 bp, Oryza sativa
  Clone ID: PAT_MRT4530_6229C.1
gagccgcagcggcggctcttcggcgcagcggctccgctgcacatgcagcggcggcgccgcggctcctcggtgcagtggcggctcctcggctgggccgcgcctcctcggcctcgtcgtcgccgcctgctcggtggctccccggcgcagcggctcccccgtggcttgggacctccacgacggcgaggtggcgaggaggaagttgggcgaggagcagcagaagcctcccgctcacccctccctcctcctatgtgatgttggattatctcctatcctggaatttttttttggctga

SEQ ID NO: 60807 - DNA, 1510 bp, Oryza sativa
  unsure (1)..(1510): unsure at all n locations
  Clone ID: PAT_MRT4530_622C.1
tcctcccgggtttcgagggcgtcagcaacccgggcgccgtggactacggcctccgccggttcgaccacgtcgtcggcaacgtgccggagctcgctccggtagccgcgtacatctccgggttcaccgggttccacgagttcgccgagttcaccgccgaggacgtgggcaccgccgagagcggcctcaactcggtggtgctcgccaacaacgcggagaccgtgctgctgccgctcaacgagccggtgcacggcaccaagcggcggagccagatacagacgtacctggaccaccacggcggcccgggggtgcagcacatcgcgctggccagcgacgacgtgctcgggacgctgagggagatgcgggcgcgctccgccatgggcggcttcgagttcttggcgccgccgccgcccaactactacgacggcgtgcggcggcgcgccggggacgtgctctcggaggagcagatcaacgagtgccaggagctcggggtgctcgtggacagggatgaccagggggtgttgctccagatcttcaccaagccagtaggagacaggccaacctttttcttggagatgatacaaaggattgggtgcatggagaaggatgagagtgggcaggagtaccagaagggcggctgcggcgggtttgggaagggcaacttctcggagctgttcaagtccattgaggagtatgagaaatcccttgaagccaagcaagcccctacagttcaaggatcctaggtaggaactggaggcctggagcaacagatgtaaccagtgtatttgtattatggagcagaagaaaaaagatgtgctttcactgctttgtgatatgtgtcatgcaagttgatgttgtaatttgtggaagctgaagacaaatgatggtacaatcactgtaatagataatagacatggatcacatacaagaatgtaacctagtgttggcattgctgctgtacaatcttgcttggaaataaaataataatcaacctggagaaaaaatgtaaaaaactgttggcattgctgatgtaccatcttgcttgggaatgaaataagaatccaccaacagaagcgcccaatgagagacttgcgctcttctggtgccttgcgctctctcccgctgtcctggcccgctgccgccgcccaccggcctggggaatcggccaacccgcgggctgaggcgcagcgcgttgcgggcgcccttcccctcctccgctccgctcccgccgcgcggcctcggctgcgcggccgcccctgcaccgcagcgggcacggtgcactgctgcgggtgcccgtccaanaccgggantcttcccncttcntgcnccaccctttcaacatnttcccgcaacctngtnntggnaaaacnaaaacacctannggcccgantnnaattnaaccccnccccaccnaaaattcctcccccnttntgaaaaaattttngnncccngntntncctttcaatccaccgccccttcaccaattcggnntgggnannncntntggannagt

SEQ ID NO: 60808 - DNA, 338 bp, Oryza sativa
  Clone ID: PAT_MRT4530_62300C.1
ccgttggtctcgtgcgccagaagatgaagtaccgggggggtctctttatgcggatgagcacctatccatcccatgggcccatccacttccgcgccccgtccaagatcctgtggcgcaccatccgcgggatgattccgcacaagaccaagaggggggaggcggctctggcgaggctcaagacgtacgagggcgtcccgccgccggacgacaagaccaagcgcctggtcatccctgacgctcttaaggtcctgagggtgcaacctggacacaagtactggctccttggtgagctttctaaggagggcgggtggaactaccatgaccccatcagggagctt

SEQ ID NO: 60809 - DNA, 593 bp, Oryza sativa
  unsure (1)..(593): unsure at all n locations
  Clone ID: PAT_MRT4530_62301C.1
aattgtaatacgactcactatagggcgaattgggtaccgggccccccctcgagttttttttttttttttttgaacaacaacctangtnnnnatntcnntgtaagtaaaacacttcgtaaatctnttccaacnggagntagcatttgaacaactataaggactgtananattctntgagcttcctctnaattcatngggggccccctctanagcnnctgtggcntnttncntatngcctnnncngtntgnacctcccggtggngannnctcaanacagggcctcnnctgtccgtgataccgnngcccgtgngnnttgaagcaaanngnctgatgnccgngtcggtggccatntcntnaggannaagtgngcgttctctgagggtacgaactatgancanccccttgaaggccatntccngantcgagatggntcaaaacatcntggtcgttgcctgncacatgtnttgagatacttcangacccatctgattnaaganngtgtcgtnacantgtactcccnaagttagncgcgtcantncngctccgcgaatcctgcgacagnggntacttatctcacagcccccnccgggacc

SEQ ID NO: 60810 - DNA, 566 bp, Oryza sativa
  Clone ID: PAT_MRT4530_62302C.1
gctcagatcctcatcagagctgaggaaatgccccagaatatctcatttgtttattgccactcaaaacctctcacactttccctctttccttcacttctattttttcgattatttttgccagggttgctatcactctgaccgggatgtaaggcaggtgctaatgaatgtattatccctttaattttctgaagaggttgtcacaatctcagtgtacatataacttcctttacttagatgtttttagaacgtgggctataatggtacattgttaagtttatgatggccgaataaaaacacaggttttaagtgcattggggggttactttgttaaaaaaaaaatcccacattgaattttgataaactttaaaagttacctacagaattatttagaacagggagaataatcaccctttacttttaaaaatttggattttcatggacatgtctgtaaaataaactaaggagctttcatttgtgtttaaagggatagcattcctatgtgtgtcatttaaacttgttaaacgatattttcaaaagaagcccttaaaatcctggattcctaccct

SEQ ID NO: 60811 - DNA, 1641 bp, Oryza sativa
  Clone ID: PAT_MRT4530_62303C.1
atggggagcggggaggaggagagggaggcgcggagcgaggcggcgttcacggactccgccgacgggagcagctccagctccgacgcggcctcggccgacgagtggcccgtgacgctggcggcgccgcccaggaagacggcggcgtgcggccgcgtccccggcgcggaggtggtggacagcagcaagccgcacgcgcagaagcgcagagctcccagctcagagatggagatgatgaaggagaggttcgcgaagctgctgctcggggaggacatgtccgggagcggcaagggcgtgtgcacggcgctcgccattgccaacgccattaccaacctctgcgccaccatcttcgggcagctgtggaggctggagccactcccgccggagaagaaggccatgtggcggcgcgagatgggctggctgctctgcgtcagcgaccacatcgtcgaactggtccccacctggcaatcgttccccgacggaaccaggctcgaggtcatgacaagcagaccacgatctgatttatacatcaatctgccagcacttcggaagctagaccatatgctcattgaaatcctggacagcttcagagaccctgagttctggtacgttgaacaagggatatgcgcaccggattgtgatggctcagcttccttcagagcagctttccaccgccgtgatgagaaatggtggttgccggtgcctcgtgttcctcccggaggcctgcgtgacaaagcgaggaagcaactgcagcacaaacgtgactgtgctaatcaaatcttgaaggctgccttggccatcaacagcaatgctctagctgaaatggaggtccctgaatcgtatctagaatccctaccaaagaatggaagggcaactttgggtgacatcatataccgctacataacgtctgatcatttctctcctgagtgccttctcgactgcctggacctgtcaacggagtaccaagcactggaaatcgccaaccgtgtcgaggcatcagtgtatgtgtggcgccggaggattgctgcaaaaccagcaagtgtcttaggccgtgccaccagtggcagatcatcctggggcatggtgaaagacatgataatagacacggagaagagggagctgcttgccgaacgagcagagggcctactgatatgtttgaagcaaaggtttcctggactgacgcagacaagcttggacatgagcaaaattcagtataacagggatgtgggtaaatcaatactggagagttattcaagggtgctggagagtctggcgtccaacattgtcgctcgcatcgacgacctactgaacatcgatgaactgaacaggcatgcagagcattttccacagggtgatgcagattgcaggattgcttgcaacaaggctgctgttccaccgtaccaagtgcctgcctcaggcacaccgtttgtgaccgcatatgcgacgcccagcttctcgccggcgcagcttgcaagcccatcaaagaaagagaggagcccactgggtgcagggagacggtcttacagcaacagggggtttggcgcaaagaaagccttggcaattgatctagttaatcctgaagtaatgggggtgataatcagcggtggtaagatgatcgatgtctcgacgaccacagagctgtaa

SEQ ID NO: 60812 - DNA, 185 bp, Oryza sativa
  unsure (1)..(185): unsure at all n locations
  Clone ID: PAT_MRT4530_62304C.1
tttttntttttttaaactcaataaaatatgcggactccagtttctcggtagtcttcaatatacatcgtttcatcaagcttttttttaaaaaaaaatccagagtcatggaggagctagctaggagccgcagctggcaaatgcagcaaggaacagaacaggaagggttttcttatggtgccaaggat

SEQ ID NO: 60813 - DNA, 989 bp, Oryza sativa
  Clone ID: PAT_MRT4530_62305C.1
atgcccgaggccgataccgccgccgccgccgactccgccgccgcccgcgtctacctcccctccaccgccgccgccgaggactcctccgccgccgtgcgatctgcctccccgccgccgcccgaggcctccgccgccgccgccgatgtctccgacgacgccgcggccgactccgccgcccgcgtctacctcccctccaccgccgccgccgaggactcctccgccgccgtgcgatctgcctccccgccgccgcccgaggcctccgccgccgccgccgaagtctccgacgacgccgcggccgactccgccgccgcccgtgtctactccccttcgccgccgccgccgccgaggactctgccgtcgccgttgaggccgaatccgtcgccggctcgccgccgaggccgactccgacacagccgaggtcgactcccgcgcgttcgactccgccaccgctcgcgtttgcctccccgccgccgccgggccgccgaggtcgactcagccgccacgcgcgtctgcctcccgcgcatctgcctcctcctccgccgccgcgcgcgtcttccgccgccgccgaggccaacgccgcgctgccgacgccatgcgcgtcatttttttctttcctctttttttcccttcttttccgacggcgactaccactgccgccgcgactcctcctccaacggctcatccgccgcggcggtctctcctccctattcccctacctcagcgtcccccggaggtcggcggcctatgggccggcctcagggccaccagatctggcctcccgccggccagatccagcgaggagcatggggcagggcactcccggaggcatgggcaagcagggtggcacccccggtgagcgcaagtctggcggcgacggcgacaagaaggagcgcaagttcgagccccccccccccccccccgcggcgccctccggcgaaaaagttaccggtggcggcggcgtccaccatgcaatggagcaccgaccatga

SEQ ID NO: 60814 - DNA, 1148 bp, Oryza sativa
  Clone ID: PAT_MRT4530_62306C.1
atcatctccaagcttagctaattaagctactagtggccatggcggtggaggcggttcttgaggcgtcgagaagtagtagtgaggaggaggcggaggtgatcgtcacgcacggcggcggcggcggcggcggaggaggaggaggacaggtggaggggtgggggaagcggaagcggtcgcggcggcggcgaccgcagctgccgccctccgaggaggagtacctcgcgctctgcctcctcatgctggcgcgcgggcgacgcgacggcgacgacgtggcggcgtcggcgtcggcggcggcggcggcggtggagcaccggtgctccgtctgcggcaaggcgttcgcgtcctaccaggctctcggcggccacaaggccagccaccggaagccgccgccgcccgccatggtcgacgacgacgaggtggtggtggagacgaaaccggcggctatcgcgacgccgtcctcgtcggcgtcgggcgtctccggcggcggcggcgggagggcgcacgagtgcaacgtgtgcggcaaggcgttcccgacggggcaggcgctgggcggccacaagcgatgccactacgacggcacgatcggcagcgccgccggcgccggcgcgtccaagccggcggcgaagacgaccgtggcggtggcggcgagccggggcttcgacctcaacctgccggcgctgccggacgtcgccgccgccgccgaccagcggtgcgcggcggaggacgacgaggtgctcagccctctcgccttcaagaagcccaggctcatgatcccggcatagctagccaagcccacaagatttgtttaattttagccataaaattccattaaattaaacccatagttttttctgttaattactttcttaatttggtgattagtcttaggaatgatgattagtttgtgtatatagccattgtttgttcatctatcatttgtatcttgtaattaatcccctgttagctagatttggtttaattggatataggagttacagatcaattctttcattggttgaattggtttaatttatgtatatatatacatatgtaaaatacatgtataagaaaaatacgcatatgtatttaatttttttgttaaaaaaaaaaaaaaaactcagctatagctaaataaaaaaaaaaaaaaa

SEQ ID NO: 60815 - DNA, 468 bp, Oryza sativa
  Clone ID: PAT_MRT4530_62307C.1
atgcccttgctcttgacagagcagaggagcagctctcccgcgagcttcccgacatcgccggcggtgaacagcggcgattcagttcaagctcccaaaacaaaaggtgtagaggacaaccgtcctagggactaccagaaagctcaccaagcagcgaacacggctcagcacggtcttggcgatggagagctggtctggcagcggcgcagcggctacggttgtcgttggcggtacacctccggtcttgatctattcaaagagaaggcatgcatcgatttgagatggcacaagacagatttaggcgaaaaagcttgcgccgaagctcaccagagaaggaagaagagaggaatggcgtgggcggccggagttggggaagaagatggagatctcccaccatggttcaccacgtgcctattccttcgggattcttggtcaatgggtgctggtgaagatgatggcgagatggcttga

SEQ ID NO: 60816 - DNA, 353 bp, Oryza sativa
  Clone ID: PAT_MRT4530_62308C.1
ggggttccctagtcgtgctggcggccgacggcgtggtcctcttgtggcgagaggttcggctgctggcggcgccgaacagcgacgcaagagaaggggagggcgtcggcgacggcggaaggtggccggagaagaaggtcgccggcgagcgcgctcctgctcctgctctggctgctgatgcggccgggaggtatcgccgatacaggggctcgtcgttggtcgtcgtcacgggaggtatcgccgtgcgctggggatgtcaaaatgcagagagttcgtgtcttagaagacggccatgagcttggcttctcccagcacatgcccctcgatggcgtccatcagcttgtccttgatcacct

SEQ ID NO: 60817 - DNA, 2838 bp, Oryza sativa
  Clone ID: PAT_MRT4530_62309C.1
atggctagattgttcgataatacagtggagaatgacactgccccagtagcaagaggtggtacatacgtgtatgagataacaaagaagattaaggttgtatatggaaagggaaagaagaagacagtaaagaggaagaaagctgatggtgacaacggtactgcgtcacctttcaagaagcactcaattttctttaaatacttagattactggaaggacctagagattcgacatgcaattgatgttatgcacctcgagaagaacgtgtttgatagcaccgttggcacattgctggacatcccgagtaaaacgaaggatggattgaagtcacgtaacgaccttaaagtatttgatcctttggaattaggtccgcttcagacatttgccgtcgagactgtatgccagcttgagatgtatttcccaccatcatttttagatatgatggagcatttgatcgttcacatcgtccctcagattattgaacttggtccattatacttacatcagatgtgggcctatgagcgttacatgtcgatcctcaaaggctatgtacgcaatcgcgctcacccggaagaatcaatgatagagggatacacaactgaagaggcagtcgagtgttgtatggactacataaaggatgctaatgccattgacattcctgttcatcgacatgaaggtagattgtctggaaggggtactattggtaggaagcagttcttcgataatgattacaaaaaggtgtccgcggcacacaacagcgttcttcaacagctcgctatcgttgagccattcattgagcgacacctagaagaaatcaaagcctgcttcccagggcggtccaatgattggatatcaagagagcacaagcgtcgctttcctctgtggttgaaagatctaaacctgccagttggtgattctgtggaggaacttactttacaaagattggcatgtgggccttcaagtattgtcaattcatggcaaggttacgacatcaatggatttaccttgagtacgactacgaaggacatgaaaagcaccacacaaaacagtgggatccgtgtcgaagcgattaacacgagtggagaaaagaggtcgtattatgggaccattcaagaaatatgggaactggactatggcctaaacatccagatccctgtgctccgttgtgaatgggttaaagacacaataggggtttccgttgatgactacgggctaacgatagtcgatcacagtaaaacaggccacaaggatgatccatgggttttagcagagcgtgtggctcaagtgttttatgtgaaggacccttcagatgaaagaaaaactattgtcatatccggaaagcaacagatcgtcggcatcgacaacatcgaagaccccaatgattacaactacccgcatagaaagatctttttcgcatttcctatgcgaattaagaaggttgagagaacaatcgatgaagcaaatatgtcgtacgttcgagcagatggtgttgccaaggacctctcccccctcgccgtcgccgtcgccgccgccaggtcgccgtcgccaccgcacggaactctcccccctcgccgttgccatcgccgccgccaggtcgtccccgccgccaagtcgtccccgccgccaagtcgtccccgctaccgccggctcctccccgaagtcgccccgcccctcgccgtcgccgacgccactgccaggacctctcccccctcgccgtcgccgtcgccgccgccaggtcgccgtcgccgccgcacggacctctcccccctcgccgttgccatcgccgacgccagcgggagtgggaaaaaaagacgtggtgagagaagcaagaataaattacccaaggaaacttacaacgtgattgctctcgatcaggatgggaagcccatcgagccaccgatagtgcggtccaagttcagcaacgcctgtggcactctagtcaggacgcgttgtcccattaatgtcaagttgtgggaaacagtggacgacaacatcaagacacttctctggaatgagttgcagaagtattttgtgttccctcctggatcagaggctgactgggacacgtttgttgcggatcgtacaacagctgaagcattggctttgaggaaaaaaatgtccgagctcgcgaagaagaacatatatccccatagattggggtcaagcggatacgctggtcacgtcgatcaatggcgggagatcgagcaaagatttgccgcggccgtgaatcagtttatcttgtggcaccgcagagacataatcctgagcgcggccgttcttgcagcaggatcttcaaccccatcctcatcgcaggcaatgactgctgccgctcctgcaccaccgtcgcctcctgaaccaccgtcacctcgacatccgccgtcaccaccaccgcttaggaattctgagaagagaaaagaacttgctcacgtcttgtcagactcccagaagtcagtactagcggcccaagatgaagtgcaatcctggttatctgccgatgtgcctgaaacttatgagtatggcaagccattcttgccaacttatcttatgaacaagctaccatgggaaatgagggtaatgcacgaatgtatgcaattccacgaagctgatagaactggagcaaaggttggatacgtcgatccaacaagaatatgcaaaacacaacacaccgtagagctgagacaggactgcgagcaattggttggcaagaccccggaagaaaaggaagaatatgtgaagacattgcacaagaggaagaagctagaagtagcaacatacttggcaatagcaatgttggcgcacgccgacaaagatgtcttaatggtcccctaccagttcacgtaa

SEQ ID NO: 60818 - DNA, 2011 bp, Oryza sativa
  Clone ID: PAT_MRT4530_6230C.1
ccgatgacgacgacatccagggccctcgcgctggtgctcctctcgtcttgctgcctcctcgtcgccgtcgacgcggcctacgccaagaagccgaatctgtccaagaatgacttcctctcctgcctagccgccggcatccccgcccggcagctgtacgccaagggctcgccgtcgtacggctccgtgctgacgtccaccatccggaacctcaggtacttgtcgtccaagacgtgcaacccgctgtacatcgtcacaccgaccgacgtgaagcacatccaggtggccgtctcctgcggccgccgccacaacgtccgcatccgcgtgcgcagcggcggccacgactacgagggcctctcgtaccggtcggagatccccgagccgttcgccatcgtcgacctcgtcaacatgcggaacgtgaccgtcgacggcaaggcgcgcacggcgtgggtggagtccggcgcgcagatcggcgagctctactacggcatctccaaggcgagccccacgctggcgttcccggcgggcgtgtgcccgaccatcggcgtcgggggccacttcagcggcggcgggttcggcatgctgctgcgcaagttcggcctcgcgtccgacaacgtgctcgacgtgaaggtggtggacgcgaacggcaaggtgcaggaccggaagtcgatgggggaggactacttatgggccgtccgcggcggcggcggctcgagcttcgggatcgtggtgtcgtggaagctgaggctgttgccggtgccggcgacggtgacggtgatccagatgcccaagatggtgaacgagggcgccgtcgacctcctcaccaagtggcagtccctcgcgccgacgttcccggaagacctgatgatccgcgtgatggcgcaggcgcagaaggccgtgttcgagggcctctacctcggcacctgcgacgcgctcctcccgctggtgaccagccgcttcccggagctgggcgtcaaccgctcccactgcaacgagatgtcatgggtgcaatccatcgcgttcatccacctgggcaagaacgccaccgtcaaggacatcctcaaccggacctcctccatccgagccttcggcaagtacaagtcggactacgtgacgcagccactgtccaaggcgacatgggacaccatctacaaggactggttctccaagccgggctccggcatcatgatcatggacccgtacggcgccaccatcagcaaacccggcgaggcggacacgccgttcccgcaccggaaggggatgctgtacaacatccagtacatcaccttctggttcggcgagggcgcgccggcggaggcgccgatcaagtggatcagggacttctacgcgttcatggagccgtacgtcaccaagaacccgaggcaggcgtacgtcaactacagggacctcgacctcggcgtcaacgccgtcgaggccggcgccaacgtctcctgctaccaggtcggcaaggtgtggggcgagaagtacttcaagggcaacttcgagaggctcgccaggacgaaggccaaggtggatcccaccgacttcttcaggaacgagcagagcattcctccattgctcgcgtgatcgatcgatcgacagaaattaatcatcgacggaaacgcacaatttgcatcgagatttaattagtgtgtgtgagtggtgagtacgattaattaagtacttggacgtgtcacatgtccaacaaataaagatcaaccaactaacgtataatcgtaagaagattattgtttttttttctttttcatacacgtgtgcgcgtatgagttctacttcctccgttttataatgtaaaactttctagcattgcccacgttcatttatatgttaatgaatctagatatatgtatgtgtttaaattcattaacatctatatgtatatgagcaatgttagaaattcttatattatgaaacggagggagtagctagtagcgttttacatttcaatgttcgtgccatccacttaatttattgcgtgatgagactcccaccc

SEQ ID NO: 60819 - DNA, 4044 bp, Oryza sativa
  Clone ID: PAT_MRT4530_62310C.1
atggagtacggattcaccgccaactacaaggtttggacctatcacggggaattcgccaatccggaagatgacgatgaagagttaagtttcgagatgaatgaggcagagaattttataatcgaagacatgtcgcgtgaaagaatgattgtcgatgtttccaccgatagtgatgatttcgatggtggttttgatttagaggatatgctacgccatgttgaaccagagggtaagcgcgggaagattccttcaatggtgatgtggtacctaccaattaaggaccgcctgaagcgtctgtactcaaacccgactgatgctgagttgatgagatggcatcaagagagccggaaaatagatggtatgattcgacatcccgccgacgctcgccagtggaagacatttgatgcaaaacacccagaatttgctaaggatcctaggaatgtaaggtttgcgttgagcactgatggaatgaacccgtttggtgacttaagcagctcgcacagcacatggccagtccttctcacaatgtataatcttccaacatggatatgtcagaaacgaaagtacattctactcactatcctcatacaaggtccaaaccaacctggaatcgacatagatgttttccttgagcctttgatggaggacatggaggagctttggaaagaggggttacaactatgggatgagtttaagcgggagcacttcaatctacgtgcaatcatattcgttaccatcaatgacctacctgcaaacttttcattatctgggcagattaaagggaagactggatgtctgatatgtctggagaaaacttcatacaaatacctgacgtcgtctttgaagacagtgtacatgcgacatcgacggttcctaccacaaagacataggtaccgtaagatggctagattgttcgataatacagtggagaatgacactgccccagtagcaagaggtggtacatacgtgtatgagataacaaagaagattaaggttgtatatggaaagggaaagaagaagacagtaaagaggaagaaagctgatggtgacaacggtactgcgtcgcctttcaagaagcactcaattttctttaaatacttagattactggaaggacctagagattcgacatgcaattgatgttatgcacctcgagaagaacgtgtttgatagcaccgttggcacattgctggacatcccgagtccgcttcagacatttgccgtcgagactgtatgccagcttgagatgtatttcccaccatcatttttagatatgatggagcatttgatcgttcacatcgtccctcagattattgaacttggtccattatacttacatcagatgtgggcctatgagcgttacatgtcgatcctcaaaggctatgtacgcaatcgcgctcacccggaaggatcaatgatagagggatacacaactgaagaggcagtcgagtgttgtatggactacataaaggatgctaatgccattggcattcctgttcatcgacatgaaggtagattgtctggaaggggtactgttggtaggaagcagttcttcgataatgattacaaaaaggtgtccgcggcacacaacagcgttcttcaacagctcgctatcgttgagccattcattgagcgacacctagaagaaatcaaagcctgcttcccagggcggtccaatgattggatatcaagagagcacaagcgtcgctttcctctgtggttgaaagatctaaacctgccagttggtgattctgtggaggaacttactttacaaagattggcatgtgggccttcaagtattgtcaattcatggcaaggttacgacatcaatggatttaccttgagtacgactacgaaggacatgaaaagcacatcacaaaacagtgggatccgtgtcgaagcgattgacacgagtggagaaaagaggtcgtattatgggaccattcaagaaatatgggaactggactatggcctaaacatccagatccatgtgctccgttgtgaatgggttaaagacacaataggggtttccgttgatgactacgggctaacgatagtcgatcacagtaaaacaggccacaaggatgatccatgggttttagcagagcgtgtggctcaggtgttttatgtgaaggacccttcagatgaaagaaaaactattgtcatatccggaaagcaacagatcgtcggcatcgacaacatcgaagaccccaatgattacaaccagttcgacgatgtaccattgtttactgatcttcctatgcgaattaagaaggttgagagaacaatcgatgaagcaaatatgtcggagcgcggggagccaaaattttctaagtcccggctcccgcgaaaccctagccgccaggctgccaaaatttcccaagtcgccatcgccgtcgtccccgccaccgccggctcctccccaaagtcgccccgccccacgccgccgccgccgccgccgtcaggacctctcccccctcgccgttgccgtcgccgccgccaggacctctcccccctcgccgttgccgtcgctgccgccaggacctctcccccctcgccgtcgccgtcgccgccggcaggtcgccgtcgccaccgcacggaactctcccccctcgccgttgccatcgccgccgccaggtcgtccccgccgccaagtcgtccccgctaccgccggctcctccccgaagtcgccccgcccctcgccgtcgccgacgccactgccaggacctctcccccctcgccgtcgccgtcgccgccgccaggtcgccgtcgccgccgcacggacctctcccccctcgccgttgccatcgccgccgccaggtcgtcgccgccgccaggcgggagtgggaaaaaaagacgtggtgagagaagcaagaataaattacccaaggaaacttacaacgtgattgctctcgatcaggatgggaagcccatcgagccaccgatagtgcggtccaagttcagcaacgcctgtggcactctagtcaggacgcgttgtcccattaatgtcaagttgtgggaaacagtggacgacaacatcaagacacttctctggaatgagttgcagaagtattttgtgttccctcctggatcagaggctgactgggacacgtttgttgcggatcgtacaacagctgaagcattggctttgaggaaaaaaatgtccgagctcgcgaagaagaacaaatatccccatagattggggtcgagcggatacgctggtcacgtcgatcaatggcgggagatcgagcaaagatttgccgcggccggtaagcccctgctggtagaccccatggttgaacgtagcaagaactgggtcgccaaggtccatagcgaccacgtttccttggaactagacatacctgcacctgaggggattgaacttctcggtgatgcagtgaatcagtttatcttgtggcaccgcagagacatattcctgagcgcggccgttcttgcagcaggatcttcaaccccatcctcatcgcaggcaatgactgctgccgctcctgcaccaccgtcgcctcctgaaccaccgtcacctcgacatccgccgtcaccaccaccgcttaggaattctgagaagagaaaagaacttgctcacgtcttgtcagactcccagaagtcagtatctcacgtcttgtcagactcccagaagtcagtactagcggcccaagatgaagtgcaatcctggttatctgccgatgtgcctgaaacttatgagtatggcaagccattcttgccaacttatcttatgaacaagctaccatgggaaatgagggtaatgcacgaatgtatgcaattccacgaagctgatagaactggagcaaaggttggatacgtcgatccaacaagaatatgcaaaacacaacacaccgtagagctgagacaggactgcgagcaattggttggcaagaccccggaagaaaaggaagaatatgtgaagacattgcacaagaggaagaagctagaagtagcaacatacttggcaatagcaatgttggcgcacgccgacaaagatgtcttaatggtcccctaccagttcacgtaa

SEQ ID NO: 60820 - DNA, 504 bp, Oryza sativa
  Clone ID: PAT_MRT4530_62311C.1
atgttaccgagcgacggcggggacgacctggcggcggcgacgacctggcggcggcgatggcaacggcgaggggggagaggtccgtgcggcggcgacggcgacctggcggcggcgacggcgatggcgagggcaacggtcctggcagtggcgtcggcgacggcgaggggcggggcgacttctggaggagccggcggtagcggggacgacttggcggcggggacgacctgccggcggctatggcaacggcgaggggggagaattccgtgcggtgaggacggcaacctggcggcgcgaacgcggacgacgaggggggagaggtcctggcggcggcgacggcaacggcgaggggggagaggtcctggcggcggcgacggcaacggcgaggggggagaggtccggacggcggcggcggcgacggcgtggggcggggcgactttggggaggagccggcggtggcggggacgacggcgacggcgacttgggaaattttggcagcctggcggc

SEQ ID NO: 60821 - DNA, 261 bp, Oryza sativa
  unsure (1)..(261): unsure at all n locations
  Clone ID: PAT_MRT4530_62312C.1
agaagaagaagaagaagaaagactagtgcaatctagaagccttccaacggggaggagagagagggtaatccggggagtaggactagactactactagtacatgagatcgatcgatcgatcggcatctgcatctccgcccccgcccccgtggatctgaagcggcggaagagggatgnncncnncgnncgactccgggcagctgctagcctctgcctccttcgccctcggcgtccccctccttctactagcctgtgctgagct

SEQ ID NO: 60822 - DNA, 3666 bp, Oryza sativa
  Clone ID: PAT_MRT4530_62313C.1
atggaagttgcggtgcgggagattgctacgtactggttcgacaaccagcgagcgagaatcatctctcgaacaccaatggaggttgcggtgcgggagattgctacgtactggttcgagaaccagcgagcgagtagaatcatctctcgaataccaatggaggttcgggcccctgaattatcagtcgataacagggtagtcttcctcctcgagttcgtgcccggcgagatcagagatagcgctttcgtctctcctgacagtatctggagacaccgtaggggactagccgtgcctatccctgaagtcgatatccggcgtcttgtcctgtcgtatgttggcttgtatgttgtggcttctgttgttccgtctatggctaaggagcatgctttgagggagaatatgacaaagatcttttgtccgtgccgtcattgcaagaatcagaaattgttggtagatcctggtgaaatattgggtcacataatggagtacggattcaccgccaactacaaggtttggacctatcacggggaattcgccaatccggaagatgacgatgaagagttaagtttcgagatgaatgaggcagagaattttataatcgaagacatgtcgcgtgaaagaatgattgtcgatgtttccaccgatagtgatgatttcgatggtggttttgatttagaggatatgctacgccatgttgaaccagagggtaagcgcgggaagattccttcaatggtgatgtggtacctaccaattaaggaccgcctgaagcgtctgtactcaaacccgactgatgctgagttgatgagatggcatcaagagagccggaaaatagatggtatgattcgacatcccgccgacgctcgccagtggaagacatttgatgcaaaacacccagaatttgctaaggatcctaggaatgtaaggtttgcgttgagcactgatggaatgaacccgtttgtggagaatgacactgccccagtagcaagaggtggtacatacgtgtatgagataacaaagaagattaaggttgtatatggaaagggaaagaagaagacagtaaagaggaagaaagctgatggtgacaacggtactgcgtcgcctttcaagaagcactcaattttctttaaatacttagattactggaaggacctagagattcgacatgcaattgatgttatgcacctcgagaagaacgtgtttgatagcaccgttggcacattgctggacatcccgagtccgcttcagacatttgccgtcgagactgtatgccagcttgagatgtatttcccaccatcatttttagatatgatggagcatttgatcgttcacatcgtccctcagattattgaacttggtccattatacttacatcagatgtgggcctatgagcgttacatgtcgatcctcaaaggctatgtacgcaatcgcgctcacccggaaggatcaatgatagagggatacacaactgaagaggcagtcgagtgttgtatggactacataaaggatgctaatgccattggcattcctgttcatcgacatgaaggtagattgtctggaaggggtactgttggtaggaagcagttcttcgataatgattacaaaaaggtgtccgcggcacacaacagcgttcttcaacagctcgctatcgttgagccattcattgagcgacacctagaagaaatcaaagcctgcttcccagggcggtccaatgattggatatcaagagagcacaagcgtcgctttcctctgtggttgaaagatctaaacctgccagttggtgattctgtggaggaacttactttacaaagattggcatgtgggccttcaagtattgtcaattcatggcaaggttacgacatcaatggatttaccttgagtacgactacgaaggacatgaaaagcacctcacaaaacagtgggatccgtgtcgaagcgattgacacgagtggagaaaagaggtcgtattatgggaccattcaagaaatatgggaactggactatggcctaaacatccagatccctgtgctccgttgtgaatgggttaaagacacaataggggtttccgttgatgactacgggctaacgatagtcgatcacagtaaaacaggccacaaggatgatccatgggttttagcagagcgtgtggctcaggtgttttatgtgaaggacccttcagatgaaagaaaaactattgtcatatccggaaagcaacagatcgtcggcatcgacaacatcgaagaccccaatgattacaaccagttcgacgatgtaccattgtttactgatcttcctatgcgaattaagaaggttgagagaacaatcgatgaagcaaatatgtcgtacgttcgagcagatggtgttgccaaggacctctcccccctcgcctttgccgtcgccgccgccaggacctctcccccctcgccgtcgccgtcgccgccgccaggtcgccgtcgccaccgcacggaactctcccccctcgccgttgccatcgccgccgccaggtcgtccccgccgccaagtcgtccccgctaccgccggctcctccccgaagtcgccccgcccctcgccgtcgccgacgccactgccaggaccgttgccctcgccgtcgccgtcgccgtcgccgccgccaggtcgccgtcgccgccgcacggacctctcccccctcgccgttgccatcgccgccgccaggtcgtcgccgccgccaggtcgtccccgccgtcgctcggcgggagtgggaaaaaaagacgtggtgagagaagcaagaataaattacccaaggaaacttacaacgtgattgctctcgatcaggatgggaagcccatcgagccaccgatagtgcggtccaagttcagcaacgcctgtggcactctagtcaggacgcgttgtcccattaatgtcaagttgtgggaaacagtggacgacaacatcaagacacttctctggaatgagttgcagaagtattttgtgttccctcctggatcagaggctgactgggacacgtttgttgcggatcgtacaacagcggaagcattggctttgaggaaaaaaatgtccgagctcgcgaagaagaacagatatccccatagattggggtcgagcggatacgctggtcacgtcgatcaatggcgggagatcgagcaaagatttgccgcggccgcatgctcccccggctccgccctcagttcaaacctctccacctacaccccaatctgctctgctttcaggaattctgagaagagaaaagaacttgctcacgtcttgtcagactcccagaagtcagtactagcggcccaagatgaagtgcaatcctggttatctgccgatgtgcctgaaacttatgagtatggcaagccattcttgccaacttatcttatgaacaagctaccatgggaaatgagggtaatgcacgaatgtatgcaattccacgaagctgatagaactggagcaaaggttggatacgtcgatccaacaagaatatgcaaaacacaacacaccgtagagctgagacaggactgcgagcaattggttggcaagaccccggaagaaaaggaagaatatgtgaagacattgcacaagaggaagaagctagaagtagcaacatacttggcaatagcaatgttggcgcacgccgacaaagatgtcttaatggtcccctaccagttcacgtaa

SEQ ID NO: 60823 - DNA, 3576 bp, Oryza sativa
  Clone ID: PAT_MRT4530_62314C.1
atggagtacggattcaccgccaactacaaggtttggacctatcacggggaattcgccaatccggaagatgacgatgaagagttaagtttcgagatgaatgaggcagagaattttataatcgaagacatgtcgcgtgaaagaatggttgtcgatgtttccaccgatagtgatgatttcgatagtggttttgatttaaaggatatgctacgccatgttgaaccagatgtgctagcgggcaggtcacgaggattggagaattggcaggcattagagaaggcatcgaaggatcttctttacgatgaaacgaagggatgtgataaggatttcacagtcttgcgttcagtgcttgaacttctgagattgaaggctaaacatggatggtcggacacaaagtgtaccgatctagattctgataagggtaagcgcgggaagattccttcaatggtgatgtggtacctaccaattaaggaccgcgtgaagcgtctgtactcaaacccgactgatgctgagttgatgagatggcatcaagagagccggaaaatagatggtatgattcgacatcccgccgacgctcgccagtggaagacatttgatgcaaaacacccagaatttgctaaggatcctaggaatgtaaggtttgcgttgagcactgatggaatgaacccgtttgtggagaatgacaatgccccagtagcaagaggtggtacatacatgtatgagataacaaagaagattaaggttgtatatggaaagggaaagaagaagacagtaaagaggaagaaagctgatggtgacaacggtactgcgtcgcctttcaagaagcactcaattttcttcaaatacttagattactggaagaacctagagattcgacatgcaattgatgttatgcacctcgagaagaacgtgtttgatagcaccgttggcacattgctggacatcccgagtaaaacgaaggatggattgaagtcacgtaatgaccttaaggtatttgatcctttggaattaggtccgcttcagacatttgccgtcgagactgtatgccagcttgagatgtatttcccaccatcatttttagatatgatggagcatttgatcgttcacatcgtccctcagattattgaacttggtccattatacttacatcagatgtgggcctatgagcgttacatgtcgatcctcaaaggctatgtacgcaatcgcgctcacccagaaggatcaatgatagagggatacacaactgaagaggcagttgagtgttgtatggactacataaaggatgctaatgccattggcattcctgttcatcgacatgaaggtagattgtctggaaggggtactattggtaggaagcagttcttcgataatgattacaaaaatgtgtccgcggcacacaacagcgttcttcaacagctcgctatcgttgagccattcattgagcgacacctagaagaaatcaaagcctgcttcccagggcagtccaatgattggatatcaagagagcacaagcgtcgctttcctctgtggttgaaagatctaaacctgccagttggtgattctgtggaggaacttactttacaaagactggcatgtgggccttcaagtattgtcaattcatggcaaggttacgacatcaatggatttaccttgagtacgactacgaaggacatgaaaagcaccgcacaaaacagtgggatccgtgtcgaagcgattgacacgagtggagaaaagaggtcgtattatgggaccattcaagaaatatgggaactggactatggcctaaacatccagatccctgtgctccgttgtgaatgggttaaagacacaataggggtttccgttgatgactacgggctaacgatagtcgatcacagtaaaacaggccacaaggatgatccatgggttttagcagagcgtgtggctcaagacctctcccccctcgccgttgccgtcgccgccgccaggacctctcccccctcgccgtcgccgtcgccgccgccaggtcgccgtcgccgccgcacggaactctcccccctcgccgttgccatcgccgccgccaggtcgtccccgccgccaagtcatccccgctaccgccggctcctccccgaagtcgccccgcccctcgccgtcgccgacgccactgccaggacctctcccccctcgccgtcgccgtcgccgccgccaggtcgccgtcgccgccgcacggacctctcccccctcgccgttgccatcgccgccgccaggtcgtccccgccgtcgctcggcgggagtgggaaaaaaagacgtggtgagagaagcaagaataaattacccaaggaaacttacaacgtgattgctctcgatcagtatgggaagcccgtcgagccaccgatagtgcggtccaagttcagcaacgcctgtggcactctagttaggacgcgttgtcccattaatgtcaagttgtgggaaacagtggacgacaacatcaagacacttctctggaatgagttgcagaagtattttgtgttccctcctggatcagaggctgactgggacacgtttgttgcggatcatacaacagctgaagcattggctttgaggaaaaaaatgtccgagctcgtgaagaagaacagatatccccatagattggggtcgagcggatacgctggtcacgtcgatcaatggcgggagatcgagcaaagatttgccgcggccggtaagcccctgctggtagaccccatggttgaacgtagcaagaactgggtttgggcgcacagcacaggtcaagtctcggatgagggagacatactattcgagactccaaacatagaagaagaacacttctactcgttggcagctgaaaacccgacagcctttccaaggaattctgagaagagaaaagaacttgctcacgtcttgtcagactcccagaagtcagtactagcagcccaagatgaagtgcaatcctggttatctgccgatgtgcctgaaacttatgagtatggcaagccattcttgccaacttatcttatgaacaagctaccatgggaaatgagggtaatgcacgaatgtatgcaattccacgaagctgatagaactggagcaaaggttggatacgtcgatccaacaagaatatgcaaaacacaacataccgtagagctgagagaggactgcgagcaattggttggcaagaccccggaagaaaaggaagaatatgtgaagacattgcacaagaggaagaagctagaagtagcaacatacttggcaatagcaatgatggcgcacgccgacaaagatgtcttaatggtcccctaccagttcacagcacacaagtactaccgcaaaagaggtggaccagtacatattccatcccagaagaagttatccgtcaggactggctggccgatccccgaaatcccatatattgcacaacgattcaacgacactactatcttgaacgtggccgctgacctctgccgattcatccgtcgcgatgtctgcaacgcaagaggtctcttctacgacaaccagagtgaactcgcaatggacgacaaatttaaacctctcagagagtgggagaaagaacatatgcaataa

SEQ ID NO: 60824 - DNA, 1455 bp, Oryza sativa
  Clone ID: PAT_MRT4530_62315C.1
atggatctcgataagtctacctccaccaccgcgtctctaaagaagtggcaagacgacggcgccctccctggtcatgggaccatgcagagggaaacaggaggtttggacagggacaccatggcacgccgcattggccaggtgatgatcagcgctcctgtgacagcgagcaacatccccgtccccctttgcgagaagggtccggctgaacgcgaagctgcgatcaacgccctccctctgacggacgtcatcgggccgcttgcggaccatcaagcggcggcttcattgaaagagggcatcgcgaaggaggcatctgacgtcgctgcttctaccacaagcggcagcaacgttccaaagaaggggaggaaattctcctctgtactcgggacccgtcgaaaggcgcctaatccatcgagcggaaatttttcgcagggtggcgcgggcgaaggtggcacaagacgggtccgggactgggaggtgacgccaagcggccccgccgacggccttgtgcccgctcggggcctgcctgctgatgtcctcacctggggggagctccaggctgagatggagcgcatcctccagctgctggcacacgacctagcggaggcctgcgaggacctcctgaagatgaggaagctggtggccggcaacgaaaggcagcggcaaggactcgagcaccggatgtcggagctcgagaacaacttgtcggagatccgcggctcgctgcggatatcttacaccggcctacaccagctcgccagggagtgcggcgtcacgaccaccatccaagcatgctgccaggatctgcgaggagacgtccaacgacatgtcgacatcaaggatgtccagcagcacgggcagcctgagatgccggtaatcgtcccggcacttgcgcttgagccggagaagaagaacctgactcagtcctttccgtgttgggcagacctcgagagtgcgttggccgaccgagatcgtcgaatccaatactggaggacgaagctcgaggtggccgaactcgagaagaccatggtggaagtgaagaaagacctggccatggaagctctcagaggtcgcgaggtatggttcaactcgtacctcaggagctgctgcacggcaatggctggagtctgcaggaaactccgagttcctcgcgggaatcccgaggagtcagcggccagatatatctcgtggttgaataggacctgcacacagctcgaagggatcggtaagcgcatcgacgaggccctaaagcaggagtgtcatcgatcgagccgctatgccagagggcatgtgctggactgtatccgagatcaccgcccgcagctgcacctcgagttcctccacgaagggttctcacgctctcggaggactcccgcagagattgacgatcaggcacagtcaatggcgccgctcgcagagaaggtctttcagtccatggactggcgttggccgtcctag

SEQ ID NO: 60825 - DNA, 183 bp, Oryza sativa
  unsure (1)..(183): unsure at all n locations
  Clone ID: PAT_MRT4530_62316C.1
gattcggccgagcctggatggtttgatttggccatgtgcaactggagcaggagcaggagcaggagcagaagcaagccgcattaattaattaatcctctgagccttgtcaattcaattggccgatttgtnnttgccaccatcatcctacctacgagcagagcagancgcaccgattcagcgagg

SEQ ID NO: 60826 - DNA, 592 bp, Oryza sativa
  Clone ID: PAT_MRT4530_62317C.1
gtggtggtgctgtacacgttgtgtgtgtgtgttcaatgtatgtgagtccagaggccaagtcctggcggttgagcgcatgcaggagcacgccatgcgagaaggatggaggcccgttcatgtggaggagtatgtggctcacgaacgcgtgaaaccaggtcgtccaggctgccatgcgtacgtgcgcgtgaagctcgctaagtgggtgcgtgggcgctgcgtccccgtgggtataaaactggctgtgtaggctcgtatttagtgagtgccgtgtgaactttcagtgagtaataaagccaagatacaggagcgataggctccgcggcgttcgtcgccgaaactccactgttcatcttcaacctccagccatttttgtgtgtgagagaaagagagctctgttcttgtgttcctaggctgattccaacaattggtatcagagccggatgacgaagatcggagatagctcgccaccgaagatcggagaaggctcgagctcgggtgccgccgagcgcgtcatggccaactccagcgtcgtggagctcccgctattgacaaggaccaactaccacgagtggtctttggtgatgcaggtgag

SEQ ID NO: 60827 - DNA, 180 bp, Oryza sativa
  Clone ID: PAT_MRT4530_62318C.1
aagcttaagctttggtcaggcatttggagaagagataagacttgagagggtaggatcatagtagtacatgatacagtgtacagaaccgagtggttcaaaaactagccaccgttgtaaagagaaagaaaggaaagatgaaataaaagaaagaaataaattgccttgaaaaaaaaaaagctt

SEQ ID NO: 60828 - DNA, 399 bp, Oryza sativa
  Clone ID: PAT_MRT4530_62319C.1
atggcggtggcggggacgacttggcggccggcggcaacgacttggcggtggcgaggggggagaggtccgtgcggcggcgacggcgacggcaagggggtagaggtcctggcggcagcgacggcggtggcgagggacggggcgacttcggggaggagccggcggtggcggggacgacttggcggcggcgacggcgacggcgagggggcgcagatcatcgcatgcgggcagcttaagagcccgcatggaaaaatgatctttccatgcaggcgacttaagccggccgcatgcgaaaattatctttccatgcgggccgttaagccagccgcatgcgaaaaagatatttctgtgcgggccgtaaagccggctgcatgcgaaaaagatatttccatccggctggct

SEQ ID NO: 60829 - DNA, 210 bp, Oryza sativa
  Clone ID: PAT_MRT4530_6231C.1
atgcagaagttacctgcagtgaagctctgggggggaggctttcagtttcagtacagacagtttcagtcaggaggaatggatgccggcggcatctcgaatcacccacacagaggcacgcagggcctcgccggtggtgcctgcgtcatggacaccggcgaatgcgtgtctatccaggcacagttggatgttgatctagccaagctcaattag

SEQ ID NO: 60830 - DNA, 419 bp, Oryza sativa
  Clone ID: PAT_MRT4530_62320C.1
ctatgcagctggcttaacagcccgcatggaaagatctttttcgcatgcggccggcttaacagcccgcatggaaagatctttttcgcatgcggccggcttaacagcccgcatggaaagatctttttcgcatgcggccggcttatgtcgaccgcatggaaagatatttttccatgcggtcccttaagccgcccgcatgcgatgatctgcgcgccaaaatttcccaagtcgccatcgccgtcgtccccgccaccgccggctcctccccaaagtctgcccgccccacgccgtcgccgcgcatctaggcgacgcctgcgccgactgtaggtcgacgacagcaccggacgggactcttcccgattgccatgacccattcgcgcaggaggaatgtatcgacaccaggtcgagcccgatgacgccgg

SEQ ID NO: 60831 - DNA, 1917 bp, Oryza sativa
  Clone ID: PAT_MRT4530_62321C.1
atggagcatgtggtgggtgcttcggaggccaccatgaggtctctgctgaccaagctcgggggcttactctcccaagagtacgctctcatccgtggcgtccggggagacatccagtacatccgcgacgagctgacgagcatgcaggcgttcatccgcgacctgagcggcacgccggagggcaaaggcgacgagcacgaccaccggatgaaggactggatgaagcagatccgcgacgtcacctacgacatcgaggactgcatcgacgacttcgcgcaccgcctctcccacgaccccggcggcgactacctgtgcggcttcgtcgtgtccagggtgtacgagatcctcacatggtggcctcgccgcgacatcgcctccaacatcgcggagctcaagatgctggcgcagcagatcggcgagcggcgcacgaggtacggcgtcgagaacccccaaaaaagatcgggagatgagaacaaatccgagctggtgggagtggaggcctacatgaaggagctgacgaaatgggtgacgaacgagacataccaagacggcgtgctgtccgtcctcggtttcggaggggtggggaagacaaccatcgccacggcactgtaccggcaactcggcgatcaatttgaccgccgggcgatggtcacggtgtcccagagctccgacgttgaggccatcttgagaagcatacttgaacaagtcatgccgcagtccaaggatggtcaggagctgcagggtggccacgcctcccagaagaagcttctacatcaggcagtcatcagctacttgcatcctctcatgcccaaggccctccgacgccgaagcagctccaactccaactccgacaactccaagattagagaggggaagctaacgcgtctcccgagagctctcaccctggatcgccagtatgaccacgatccgcaggacggcaacgatgctgccgccggctcatctgagacagtagtaacaacccctgcaacgaaaggcacggccacctccgatgaaaagcctactagtgtcattgctaccatacggggtgccttcaggccctgggatcgccgtcgccacccaccgcaggatgacaaaggtggtagcacctcaggctcagggaaggaggctattaacattcaaacaatgaacaagcccggcgaaaaaaacattcaaaccatgaagcgtgacggtctctcaaaattgctgcaggagcacctaaatcaaaaaaggtatttcctattaattgacgatgtgtggtctgccacaacttgggagcagatcagaaagcacttgcctacagataacctaagctacagaataatagttaccacaaggtttcaagctgttgctaccgcatgtaaaaggaaagaaagtgaccgcattcacaaagtggatgttcttcgcggaaaaaaacccgaaaaactcttcaatgaagtcgagtccgaatccagaatcagcaaagatggtgaacggaaagagatagatgatggtgaacagaaagagagagaaggtcaacagaaagagatagatggtgaacagaaagatatagtgcgtccccgcaggatctgggaaatgtgcagcgggcttccattggccattgtcaccatggctggtcacgtggcctgcaactcagacaaagatgagacacattggcttaatgtctgtaaatctctagttccagagtcgggaagagatatgacacaggagggtgtaaccagaatacttggtcattgctacaatgatatgcctgccgagctgaggacttgctctctgtacctgagtatattcccgaaaggcaacaagattagcaggaagcggctgacaaggcgatggatagctgaaggctttgtcagtgagaagcaggggcagagtgtggaggatgttgcggaggcatgcttctgttggaaatatagtcattaa

SEQ ID NO: 60832 - DNA, 148 bp, Oryza sativa
  Clone ID: PAT_MRT4530_62322C.1
ctgcgagtgtccaacgtctcatgaagcagttcgagaacatggcgttccgtgatggagagaacgtcggcgacttcgcaatgcgcatcaacgggctcgtcgccagccctgcgcgagcttggtgaggagatggaggacagtcgcgtcgtga

SEQ ID NO: 60833 - DNA, 1512 bp, Oryza sativa
  Clone ID: PAT_MRT4530_62323C.1
atggcggcttcagcttcatcttcttctccacttcacatcgtgatgttcccatggctggcattcggccacatgatccccttcctcgagctcgccaagcggctggcgaggcgcggcctcgccgtcaccttcgtctccacgccgaggaacgccgcgaggctgggcgcgatcccgccggcgctgtccgcccacctccgcgtcgtgccgctcgacctcccggccgtcgacggcctgccggagggcgccgagtcgacggccgacgccccgccggagaaggtcgggctcctcaagaaggcgttcgatggcttggcggcacccttcgccggatttgttgccgaggcctgcgccgccggccatggagaatccacccccaccgccgccgggttctcgaggaagcctgactggatcatactcgacttcgcgcaaaactgggtatggccgatcgccgaggagcacaagatcccatgtgccatgttctccatcttcccggcggccatggtggccttcgtcggcccgagacaagagaacctggctcacccacgcaccaagacggagcacttcatggtccagccgccatggatccccttcccctccaacgtcgcctaccggcggcgccacggcgcggaatggatcgccgccgtcttccgacccaacgcctccggcgtgtccgacgccgaccgattctgggagatggagcacgcctgctgccgcctcatcatccaccgtagctgccccgaggccgagcctcggctgttcccgctcctcaccgagctcttcgccaagccgtccgtccccgccggcctcctcatgcctcctcctcctcctgctgccggcgtcgacgacgatgacgacgatgttagcatggacgaccagcacatcgccatggcgatgcggtggctcgacgagcagccggagagatccgtcatctacgtcgcgctcgggagcgaggcgccactgacggtaggccacgtgcgcgagctcgcgctcgggctggagctcgccggagtccgtttcctctgggcgctccgcgcgccgccgtcggcgtcgagcgtaaaccgtgacaaatgcgccgccgacgccgacctcctcctcccggacgggttccggtcgcgcgtcgcggcggcgcgtggtggcctggtgtgcgcgcgatgggtgccgcagctgcgcatcctggcgcaccgggcgacgggcgggttcttgacgcactgtgggtggagctccatcttcgagagcctgcggttcgcgctcccgctggtgatgctgccgctcttcgccgaccagggactaggcgtgcaggcgttgccggcgagggagatcggcgtggaggtggcgtgcaacgacgacggatcgttccgtagggacgccattgcggcggcggtgcggcaggtgatggtggaggagaaggggaaggcattgtcgcgcaaggccgaggagctgcgcgatgttcttggagacgagggtcggcaggagatgtacctcgatgagcttgttggctacttgcagcgttacaaataa

SEQ ID NO: 60834 - DNA, 1141 bp, Oryza sativa
  Clone ID: PAT_MRT4530_62324C.1
gccgccaggctgccaaaatttcccccttcaccgcgtcgccaccgccaagtcctccccgccaccgccggattgtccccaagacctcccccttcaccgccaagtcctccgccggctcctccccgaagtcgtccccctcgccgtcgccgtgtcgccgccgccaggacctctccccggcccctcgccgtcgccagcgccaagtcttccccgccaccgccggctcctacccgaagtcgtccccctcgccatcgccgtcgccgccgccaggacctctcccccctcaccgcgtcgctgccgccaagtcctccccgctaccgccggctcctccccgaagtcgtccccctcgccgtcaccgtcgccgccgataggacctctcccccctcgccgcgtcgccgccgccaagtcctccccgccaccaccggctcctccccaagtcgtacccctctctgccaccgccgtcgccgccggcaatacctccccgccaccgccgcaccggctcctccagtcccaagtcccccgcaacacctgtggcactctagtcaggacgcgttgtcccattaatgtcaagttatgggaaacggtggacgacaacatcaagacacttctctggaatgagttgcagaagtattttgtgtaccctcctagatcagaggctgactgggatacgtttgttgcggatcatacaacagttgaagcattggctttgaggaaaaaaatgtccgagctcgccaagaagaacagatatccccatagattggggtcgagcggatacgctgggcacgtcgatcaatggcgggagaccgagcaaagatttacagcggccagcaaacctctgctggtagaccccatggcggaacgtggcaagaactgggaacacttctactcgttggcagctgaaaacccgacagcctttccaagtctcatcgtacctatcggccgcgctggaaagactaaggaggttgcaacgggtttagcgatacccggacgtcaattccacaacacggcaatccctgaggattacgcaagggtacatgtcgccaagagacataatcctgaccgcggccattccagcagcaggatcttcaactccatcctcatcgcaggcaaggaaagcttccgctcctgcaccaccgtcacctcctga

SEQ ID NO: 60835 - DNA, 359 bp, Oryza sativa
  Clone ID: PAT_MRT4530_62325C.1
atatttgtttggacccacttgttctacaaccaactggtagaatgtaaatggaaataggggacacattgactaaagaagtggatgttgtttgagtaggacaaaaatatagccttgaccacagttggctgctgaacgcctggcactgggagacaacttctattgttctggtaatattgttttaatcgccgaaatattaaataccattaataatgctgttgctcataattctactgttggcttgcaagtttgcatgtttgattgcctgttttggagtgcaacaggaccgctatgttgggaccctacacctgctattgacctggcatgattgcatgaaaaccttgtgatgaatgaatgaaacc

SEQ ID NO: 60836 - DNA, 855 bp, Oryza sativa
  Clone ID: PAT_MRT4530_62326C.1
atggcgtcgatgaagtatgatctatcgctgctagactacaagatgagattctcgctgtggcaagtcaagatgcgggctgttctggcgcaaacttcggatctagatgaggcgctggagagcttcgggaagaagaaaacgactgagtggaccgctgaggagaagcggaaatatcgtaaggctccgtcgctgatccaacttcatctatctaatgatattttgcaaaaagagatcgttgccgacctagtgtcgatggaggtacagtttgatgatgaagatttagcgctccaaaacagggagaagatgaaaggtatggttcagtctgatgcgtcgtcctctgagggcgaagcattgcagggttacttcccctatttgtctgcaaagtgtgcggcgacgcgggaggcgcggctagatcggcggcgcggtgtggtcgagggcgtggcacggtgcggccaaaaaatcgcgaaggcagcggaagacactactacagaagatgtaaagggtgccaggtgggaaagccccttcggtgccgcaccgctgtcgctgtcgccgggccgccgctgccgtatccccttctgccgccgggccgccaccgccatctccctcccgctagatctggtggaggggagggacccgccgccgggccgtcggaccgccgtcgcctcccctcacgccgccgacctgtcgccgccgcacccccttttgccgtcgcgccgccgacgccacctcccctcccaccagatctggcggaggggagggcgccgccgctgggccacagtatcccctcccaccaccgaccggccgccgacccaccgccgccgcagcatcccctcccaccgtgcacgccgattcagctga

SEQ ID NO: 60837 - DNA, 1227 bp, Oryza sativa
  Clone ID: PAT_MRT4530_62327C.1
cggcacgaggcctccccccttttttttttttttttttttttttttttttttttttttttttaaagagaataatatatgtattttatttccctaaagaatgatgaatatatatgattagcagttgctatcaatcttggctgcatggccaaaatacaatactctcctatggtaagctagctagaactgctaaccagtctcactcacacactattgcaaaacaagatgaacactcgctcaactgtttgatgatgaatatagaagctaacaaaatttgtaattactaataattaaacctttaatcactagctactttgctagtagtaatccgatcgaattcttcttcctcctcctcttcttcttctctcgttgcactgatccaaaaaagttggatttctggcaatggccaatcaggatttcattctacccgcctcatcctgctcgccgcgctgccgccttgtcacgccggatctgttgccgccggagccgcgcctccgcggtcatcgccgccttgcacgccatcgccgcccgcttctgtcccaggtggtaccactccgccgccgccgccgccgccgcggccttggcggcggcgacggcgacggcatcgtcgtcgtcctcctccggcgcccgcgccggctcgttcaggtccagcaccggcgccggccggacaatgtcggctgccgccgccgccgcctccacccgccgcttccgattcacctcctcttcctcctcatgctcccgctgccgcttcagcttgcgctgcatctgcttcaatccgtcattggtgctcctcgagctctgcagccggactctgtactcctcgatttgcttggatagatgcgagttttcctgcgacaagctcgcgacgacggcgcgctgctcctcaacccactccgcgtgcgacgccggcgccttcctgggcggcgccgccctcgccgccacgtcgtcgccgctgctctcgtcggggacgaggaacgcgagcggcgtgtcggggctggcggcggcctcgtgtcgccgccccacgtccgcgggcggcgccggcttcttctccccaggcgtcgtcctcggccggcgacatccccacgaggggatctcctcgcgctggacgcggcgtctgcggcggcggcgatggcgcgcgcgcacgaggtcggccaggtcgcggaggatggcggccacctcgtgctcctcctcggtgaacgcctcgacgacgacgccaccgctgctcgccat

SEQ ID NO: 60838 - DNA, 405 bp, Oryza sativa
  Clone ID: PAT_MRT4530_62328C.1
ctcttagcgcagaagacgaatctttgacacacccgatacctatgaaggatgatacagatcctcgggaagacgcacacgcgcgcttccttgagcctgtcattactgaagtcgatcagaacaagaacgagaagcggaacaagggcaaagagagtgtggaccaagaggtgggacggaataactcggagctgcttcggaccgaaggagtgtacctggaactcccagcgaagatgaatctctgcctggggatgtatgcgcagccttcgcagtggggcctccatagaggatgtgcacgagttccagcagtatattatagacgagttgcaacactcttgggctgtacatacgcaagaggctacctgtgattaatgaccaacggggacgctggccaggaggaggtccgggtgc

SEQ ID NO: 60839 - DNA, 371 bp, Oryza sativa
  Clone ID: PAT_MRT4530_62329C.1
gcatgtctccaggactttcacataacgtcagccgtcaacacacccactgtcccggctcagggaaatctttaacccagattcccatttcgggacacagcagcagtgttcgcagcatcttcatgcacaggggttacccacagtccacttaggatcaggcttacaccatgtgcaagtgccgttcacatggaacctttctcctcttcgcacttcaaagttctcatttgaatatttgctactaccacacaagatctgcaccgacggccgctccgcccgggctcgcgccccgggttttgcgcgccgctctagaggatccaagcttacgtacgcgtgcatgcgacgtcatagctcttctatagtcacgtattcatctg

SEQ ID NO: 60840 - DNA, 417 bp, Oryza sativa
  Clone ID: PAT_MRT4530_6232C.1
cactaaaaattagataaagcgatcggattgcatgatctttatacaatatcgctcataagaaatgcctctacgagaagcgacatcacggccacatcagccacgcagccaaggtgaccaaagaatgtagttgcctccctgttaacccctaacccctcttcactatacaccagaagaaacaaacacatggtaggctaagattattaatagatactacacatgacccctatagagaaagtacataaaatcctttaaaaactttaccgaagtaattcaaaaccgatgccactatatataaaaccctttgttggtgcgttgaactaacaatacaagagcaagggaatacaccaaggatgccatgccaattcacttttgggcaaccagaccattctgttgtaggaacaagtttctgcagtttct

SEQ ID NO: 60841 - DNA, 285 bp, Oryza sativa
  Clone ID: PAT_MRT4530_62330C.1
atggccacgggcggatctcacggcggcgtaaatcggtgttggaggtcgcggtggcggaaatcagcgctggaggcggccgacggcgagcgagaagctgaggcgatgctcccggcggcagtgctggaggtcgcggtgagcgaaaatcggtgttgccctgccgccgcgccctcttccctcgctcctcgcaatcaggcattgagcgatgggattagttcaaagacacaggacccacgattgcttctggccctgccgaccacccgtgtccgtgtgtatttcttctactag

SEQ ID NO: 60842 - DNA, 287 bp, Oryza sativa
  unsure (1)..(287): unsure at all n locations
  Clone ID: PAT_MRT4530_62331C.1
taacaccctcctggaatggaagcccaacacctcgngtgaagnatttgtgactttggttactcaaagtctgctttgctgacattcgaagccgaatctacagttggtactccagcatacatagcgccagaagttctttcaagaaaagtaatatgatggcaaggtagcaaacgtttggtcctgtggtntgacactgtaagtgagactgtcggttcataaccgnttgnaagatccaggtgatcccgangnaattccgccaaaacgatcagcanaattcttaggcgtggcaa

SEQ ID NO: 60843 - DNA, 536 bp, Oryza sativa
  Clone ID: PAT_MRT4530_62332C.1
tcgttaaccgagagctcgctagtcgtcgtcctcgaaacgctcgcggcgactccggtggctgccgcgccgccgcctccggccgccgtaccagcctcacctcgcttcgatggaggatggagtgtctacttatactgttgatgaggctcttatttccatggggtttgggaaatttcaagcatttgtgcttgcgtactccggaatggccaagatatctgaggcaatggaaatgatgcttttgtcatttgttggacagtcggttcaagctgaatgggagctttctgcgcaggcagaatctctcatcacaagtgttgtttttgtaggtatgcttgtaggagcatattcttggggcatagtctcagacaactatgggagaaggcagggttgggttcaatttcacagcccttgtaactggtggggctggtcttcttagtgcatttgcaccaaattacctttctttgatcgtgctgaggtttatggttggtgttggactgggtggtggaccagttttatcttcctggtttttggaattcattcct

SEQ ID NO: 60844 - DNA, 398 bp, Oryza sativa
  Clone ID: PAT_MRT4530_62333C.1
ccaaaataatgtcgcagaggcaaaacacgcggtatgtatatcaaacgctatacaaaagattcatgtgcatgaaatacatcacataaccacttttgtctttcagcgcaaaatcacattaatgcaggctatttttaactttcacacatctatctccacctgtaactgagacgacccacatgctataatgccctaacgtgtctagtactatacatattatccgcagattgttggaacaagggcaaaaaacatatttcttgtgttttatcggaaaaggaaactgcgacgtctgtgtgtttcctcaagagtttttgagataagacgaacttcatgtttatgttgtacctcccttgccaatcctgccatttatccaaggcccaaaaagaagatggaatttttgc

SEQ ID NO: 60845 - DNA, 2570 bp, Oryza sativa
  Clone ID: PAT_MRT4530_62334C.1
gtttgtcaacgtcccaagcgaccgagccaagcgcggcacccgccacactgtcacagacgcgacgcgctcccgctgcccgacgatgccggcggcggcggcgctgtccgacgacgaccgactggtcgtcgcacactgtgccgcgctgttcttgctacccgggttccagccgaagcagtttgccatcgccatgtcctggtactctggcgtcggggcgggcgcttccttccaggtgcagcacgcgttccactcgtacacctgcgccgacatggcgttaccgccatggtggttcaacgcgcccgagtggggcgtcaaggagcgcgcggcactttgaaaatgaaaagggagaagaaattattgttatagttccttgggatgaatggtgggcaatggcactcaaggattcgtcaaatcctcagatagcccttctaccactacatcctgatgtacgggccagattcaatgaaagtgcagcatgggactatgctcgaagcatggttggaaagccttatggctatcataacatgatatttagctggattgatacaatcggagacaattatccacctcctcttgatgcaaacctggggttggacctacgtgagatcattgttttaacagaaacacgtaggattatccacctcctcttgatgcaaacctggtgatggctgttatgtcaatgtggactaggttacaaccgctttatgctgcaaacatgtggaatgaagcccttaacaaacgacttgggactgaggggttggaccttcatgggatcattgttgaaactgaaagacgtgggatgtcttttgatcagttgctcaccatccctgagcaagatgaatgggtttacagtgatggtaaatctacaacatctcttgtctttattcttgcaagggaaaaggatgctggaatattcacgccttacactaagtcgattcaggtgaccgagttcactatacgcgacgcgtacatgctcaagattttcgaagataaccaggccagacttccaagctggtgcaacacagaatctgacaagctccccttctgccagatcctgggggagtacaggatggagctaccggagtacaacacaatagaaccgtatgccaaaatgaatgagaactgcccatctttacccccaacgtacaagcggccagcgcgttgctgacactgtgcccccacaactgaaagtaggatgttgtttgaaagtttatcatgtaagtaaatcatattgtatataggtgtttgatagatcgcagttttcacacgtaaggaaggtgaccctcaggtttctgcctgttacgagagctgttcttgagctcaggcatccaatatgaaggactgacctgtctaagaatttgctcacaacacagaactttgaaatgatatctactgaaaaactggctctgataagttttcggcttgaggaatcaaaccgattctagaataatttcagtgggataaatgcattctcagcattatgcaagataaaaaaagcgtggattacttgggagtggtttcatcaacacttcctggtaggcagatgagtagcacaatagttggaggccttgaactgcgccagagcaaggaagctatgttgagcctttctgcagctggacaatgggagaagcaaagggagacaaaccaggcaaaaatagatggtgcaagctgcaccaaaattagggaagccctcaagtctctgaacgagtacaaaaggacatgtgaactccatgaagtgagctactatgattccttcaagcttcagcgtgaagtacatgactttaatgcaaatgttagcaggttggaactagctggactctgggatgagatagttgaaatgctgcgaaggcgtgagctgccagatggtttcgaaagccgacaagattgggtgaatctaggaaccttgtaccgccggttggttgagcccttagacattgcaaactactataggcattccaagaacgaggacactggctcctacctctccaagggaaggccaagacgttacaagtacacccaggagtggcacgagcagtcgcagcgcatctccttcggttctagccttgagtcttgcttctgggcaatggctgaggaactccaggctgagattgctaacggcaaaacattcgaggatgtgagagatagagtagttaagcttgagagtgatgctcacggatggtccatgtctggaagtttagggaaggatatattcctgagccgttcttcttttgtgatttggtggaagacgctcccggagaaccacagatctgcatcatgcatcgcgaaacttgtgccctggtaagaaagctttacattatatggatagaattatttgccttcacaatgatgaggcaggcattcgtggcatgttgcaactactgccactgtaactgtataccatatgcatgaactttgtaaatatgctacttcgcgtttttgtatcctacacaatacaatcagttcaagttgaaccatttgtttcttgcatcatggctggctcatatgttggccaatgcggtcagcaaggttgtagccgcaagcgactgcctaggagtttgttcaggcattcggtc

SEQ ID NO: 60846 - DNA, 1425 bp, Oryza sativa
  Clone ID: PAT_MRT4530_62335C.1
ccggccgggacgcgccggtcggactccggtggtgatcgatcaatggcgaggctctcaacagctgcgtggccgttcctggccgcagtggcggcggcgctgctgtgctccgtcgacgcggtgatcgtcgaaggcctccaggttgggttctacaaccagacgtgcccgtcggcggaggaggccgtccgtgacgtcgtcacctcggagatcggcttggaccgcaccatcgccgccggcatcatccgcatcttcttccacgactgcttcgtcacgggatgcgacgcgtccatcctcctcgacgagacgccgtccggcgacgtcccggagaaggaatcgtcggcgaacggcttcaccctccacgggctgaggacgctggacgtggccaagtccaccgtggagtccatgtgcccgcgcaccgtgtcgtgcgcggacatcctcgcgttcgcggcgcgcgacgccgccgtggccgcggggatccccttctacgaagtggcggcggggcggatggacggcctgcgctccaacatggacgacctgccggggaacatgccgacgcccagccaccaagtcccgcggatgtcggagctcttcgtcaagcgcggcctgtcgcaggaggacctcgtcgtgctctccggcgcgcactccatcggcggcgcccactgcttcatgttctccaaccgcatctacggcttctcccagggcgccgacatcgacccggcgctggagccggcgttcgccgagaagctccggaaggtgtgcccgccgcggaaggacggcgacgacccggagcagtcgcccaaggtcagcttcgacggccgcacgtcggagaagctcgacaacgtctactactccgagctgctggccagccgcggcctcatgacctccgacgacgcgctcatcaaggaccccgagaccaagaccaccgtcgatctcttcgccggagacaacgccgtgtggcaggagaagttcgccgccgcgatgcagaagctcggcgccgtcgacgtgctcgtcggcgagggcaagggccagataaggaagcaatgccggctggtcaacaagccgtccaagcagtccaagcccacgtcgacgcggcagtccatgccggcgttgcggccaaagcgcaagaagcctcgcttgggcttgggcaatttcatccctggcttccacggcttcttctgacagaggtgaatgaaattaattaagaaaaacaagtactactccacttccctcccataggctcgctcctatggtttttctttttctttcttcttttttttttttgagagaggagcttttgctcctacggttactactacactctgctgcaactatatgttaaatttcttttcttaaaaaaaaacatgttgaattgcctaactctctgcttgtaagatatctacattcattcatatcgttggtttcatagct

SEQ ID NO: 60847 - DNA, 1442 bp, Oryza sativa
  Clone ID: PAT_MRT4530_62337C.1
ttatggagctgaagcagtaggaattggtagaaaaggtcctagaaaacgcatgagaaggagaacatgcgtgatgaactccccaccggtgctgagatgctcatagtggaaagcacccccgcaacgcggtgcaacatagtaaagcatctctagccaaatctcagatatgagtttccatcgttcagcttcattgccgatgctgaaaagctcggcggccacttggcatgcttgttttagcctgttgatcctgttggcgataaattttttccccaatttcaccaagagctctgtcatgtacaagctgggagttgacttcttcttcttgtttacttcggtggtgctatcctcggagtagtagcatatatctgtcgcaatgtgccagatgagcacagccgtggggaaatcgacatctctgccaatgctatcctgcaacttcgtcatacttgtctgttccaaatcttctgatttgcatctgtcgatccgcttctgaagtgttagctgaccacgggaactggcgaagttccagtcctctttaacttttccgaattctaacaatttatcgagcaccagctccttcaagtcttcagtaatggatatgtgtgttaaagtcgaatcaagcaactcaacaccacaagtattggaacactcactgatccatttatggtggcagcgaagacatctagaactattgcacactggacaatgaccagcaaggtaataaggagggaacgaaatgatatgtggcagggcacaatagtcaagtagaaggctcgacgtaggatattttttttgtgtacccacgatttcatatgccctgcggcggtttggattgtcataaaactctttgagcatggatggtatatcctttgctgctaaaatgcacttcacatcatcgcgtggagtgtccactgaaataacttcactttcagtatatccgatgttttctgcttcggtatgtataatttttgagcttgacttcccatccaatgttgactcaaatctttctttgacatattttttggcttcttcttctactctgcctttctcaacttcctgtagcacaaatttcaaatagtgcagggatgcagccctgagactccttggtctggcaaggataaggcagaaggtacgcccagtgtaccttaaacacccacagaggaacataagcaccacagcagcctgcagccggcggtctgtccaagatgatgtggagatgacgtagccagccacaactacttggatgaccaagttgagtaggtgccgcttccacaagtcattgtcctccttggagaaggtagtgaggttttccttagggttcgcccccgtccccagcaggcaacgggcagcctccctttcgtgccgcggtgaatccggaagccgatcaaccggacaccccggccgacccaactccatcacgcccaccctcgcttgggtacgtcggctag

SEQ ID NO: 60848 - DNA, 587 bp, Oryza sativa
  Clone ID: PAT_MRT4530_62338C.1
tatattccggatgcgtttgtgatcctgcatgaagttatgcatcaattagagagaccacaagactggtgtaaattttaaaatagattttgagaagacctatgacagagtaatctgacattacctgtatgaggtgttgcagaggaagaactttaatgacacttttgtcaagtggattaagaacatcaatgaggggggtaacgtagggatgaacatcaatggagaggcaggacctttctttaaaacctatagtgggcttaggcagggagacccactgtcacctattcttttcgatctagtaggggatgcactttaagctatactagaggaagcttgtaaaaatggagtgttggaagggatagttcctaatttagtggaacgaggcttgactcatcttcaacatgctgatgataccatcgtattcactagggcaacaagggataatgtgttggtggtgaaattcctcttattttatttctaagaaatgtcaggcatgaaaattaactaccagaagagtgaagtttatcatgaggaactaggtcctgatcttccaatatgcattgataacttgctgaattgtaaagtaggga

SEQ ID NO: 60849 - DNA, 637 bp, Oryza sativa
  Clone ID: PAT_MRT4530_62339C.1
tcaaacaccttcgatcactcgatcgagctcgtcgaccccagccatgtccggccagcctccgccgccgccgtcaccggcgatgccgtcgcagccgcagccgtttcgcttctggctcccgtataggagcaatgtggcgtcatcctctcggcagcaaccgcggccatcgtcagggacggcgccggcgccgccgccaccaactccggcagatcgtccgccgagagcgtcaccggcgccggcgcgggcaatgggggaagatatctctgtccatggtgagtcgtccgatgaatcggacacgatccctgtccagagcgtggactcgccgcggtggcgcggagctaggcggcggccgtccgtgccggacatggagctgacgctctcgaggtcgccacgcgccggcgaggaacggaccccgcgcgccggcggcgaaggcggcgaaggcaacgacaccaagatctccatctccgggttcccgaggtcgcgcctgttcgacggcgcgcgcgcgccgtaccggcgggagatcgaggacgggctcaagagccttgccacccgcggccgcgaggcgccggcggcgagcgcggacggcgtccaggggtaccgcgtcatcacgctggccggccacaacgtcggcgcgagcatg

SEQ ID NO: 60850 - DNA, 979 bp, Oryza sativa
  Clone ID: PAT_MRT4530_6233C.1
cccacgcgtccgctcatagtagcttagctaattaacacgatggcctcctcttcttccttgtatctcctagctgctctgcttgcgctggcctcatggcaggccattgcttttgatcctagcccactccaagatttttgtgttgctgacatgaaatcacctgtgagggtaaatggattcccttgcaagaacccaatggaggtgaactcggacgactttttcaacgcggccaagtttgacatgcctaggagtaccatgaacaaggttggatccaacgtcaccaacctcaacgttctaaatttcccggggctcaacaccctcggcatctcgctggcccgcatcgactatgcgcctttaggtgtgaacccaccacacattcacccacgtgctaccgagctcctcactgtgcttgagggaacactctatgttggctttgtcacgtctaacccaaacaggctcttctctaaggtggttcataagggtgacacatttgtgtttcctaaggcaatgatccacttccaaatgaatttagaccacaataaaccagcagttgcccagtcatcactcaacagtcaaaaccctggagttattacaattgctagtgcggtgtttggatcaaagccaccaatctctgatgatgttctgaccaaggcatttcaagtggaaaagaaggtgattgattggctcaaatctcagttctgggagagcaactactgattatctcatactgattctccctaatcaattgatgcaagtatgatatatatgaaacctgtacttcattgtagtatgtagaataaatgggcttttgtcctatcaaaaatgtcataatatgttgtacgtgtgctttcttgctcatgtttaataaatgttatacaatggaagtggtgcccttttcaaaaaaaaaatacaacagaaatgtaccaattaaccaaggcgataatatgatcattaattttgctacgtaaaaaaaacctcgtgc

SEQ ID NO: 60851 - DNA, 4774 bp, Oryza sativa
  Clone ID: PAT_MRT4530_62340C.1
cggatcggcagcgacgggagacacggaggggcaggcggcggacggcggacggcggcgcacgggggcgggcggcgggcggcggacggcggcgttgcggcgacggccgagcggaggcgactgcggcggtggttgcgggcgcggcgcataggggcgggggcggctgcgggcgcggcgcatgtgggcgggtgcgggggaggtccgggagggagcagcggcggttagggacacggaggcggcgatcgtgcgggacgcagaggcatcctcatccttgatgtgaatcggggctacgaagatgacgccggcgatgcggatcgagccagtaagaagctggcggtggcgagcgagccgacgaactcctcctccgggagggagcagcagctgcacgggatgcagaggcggttgcctcgcccgcctcgtccgcctgtccgctgttgcccgcctctccgccggcgctcgcctcgcccgcctcgtccgcctctccaccgccgcccgcctctctgccgccgctcgcctcgcccgcctcgtccgcctctccgcctcgtccaccatcgtccgcctgtccgccgctgctcgcctcgcccgcctcgtccgcctctccgccgcctcccgcctctccgccaccgctcgcctcgtccgcgcctcggccgcagcccgcctgcctctccgcctcgtccgccaccgcccgcctgtccgcgccatccgcgccgaccgcccccgcccaccgtcagtcgcaccgccgtatcctggtgaaatattgggtcacataatggagtacggattcaccgccaactacaaggtttggacctatcacggggaattcgccaatccggaagatgacgatgaagagttaagtttcgagatgaatgaggcagagaattttataatcgaagacatgtcgcgtgaaagaatgattgtcgatgtttccaccgatagtgatgatttcgatggtggttttgatttagaggatatgctacgccatgttgaaccagaggtgctagcgggcaggtcacgaggattggagaattggcaagcattagagaaggcatcgaaggatcttctttacgatgaaacgaagggatatgataaggatttcacagtcttgcgttcagtgcttgaacttctgagattgaaggctaaacatggatggtcggacacaaagtgtaccgatccagattctgataagggtaagcgcgggaagattccttcaatggtgatgtggtacctaccaattaaggaccgcctgaagcgtctgtactcaaacccgactgatgctgagttgatgagatggcatcaagagagccggaaaatagatggtatgattcgacatcccgccgacgctcgccagtggaagacatttgatgcaaaacacccagaatttgctaaggatcctaggaatgtaaggtttgcgttgagcactgatggaatgaacccgtttgtggagaatgacactgccccagtagcaagaggtggtacatacgtgtatgagataacaaagaagattaaggttgtatatggaaagggaaagaagaagacagtaaagaggaagaaagctgatggtgagaacggtactgcgtcgcctttcaagaagcactcaattttctttaaatacttagattactggaaggacctagagattcgacatgcaattgatgttatgcacctcgagaagaacgtgtttgatagcaccgttggcacattgctggacatcccgagtccgcttcagacatttgccgtcgagactgtatgccagcttgagatgtatttcccaccatcatttttagatatgatggagcatttgatcgttcacatcgtccctcagattattgaacttggtccattatacttacatcagatgtgggcctatgagcgttacatgtcgatcctcaaaggctatgtacgcaatcgcgctcacccggaaggatcaatgatagagggatacacaactgaagaggcagtcgagtgttgtatggactacataaaggatgctaatgccattggcattcctgttcatcgacatgaaggtagattgtctggaaggggtactgttggtaggaagcagttcttcgataatgattacaaaaaggtgtccgcggcacacaacagcgttcttcaacagctcgctatcgttgagccattcattgagcgacacctagaagaaatcaaagcctgcttcccagggcggtccaatgattggatatcaagagagcacaagcgtcgctttcctctgtggttgaaagatctaaacctgccagttggtgattctgtggaggaacttactttacaaagattggcatgtgggccttcaagtattgtcaattcatggcaaggttacgacatcaatggatttaccttgagtacgactacgaaggacatgaaaagcacctcacaaaacagtgggatccgtgtcgaagcgattgacacgagtggagaaaagaggtcgtattatgggaccattcaagaaatatgggaactggactatggcctaaacatccagatccctgtgctccgttgtgaatgggttaaagacacaataggggtttccgttgatgactacgggctaacgatagtcgatcacagtaaaacaggccacaaggatgatccatgggttttagcagaacgtgtggctcaggtgttttatgtgaaggacccttcagatgaaagaaaaactattgtcatatccggaaagcaacagatcgtcggcatcgacaacatcgaagaccccaatgattacaaccagttcgacgatgtaccattgtttactgatcttcctatgcgaattaagaaggttgagagaacaatcgatgaagcaaatatgtcgtacgttcgagcagatggtgttgccaaggctgccaaaatttcccaagtcgccatcgccgtcgtccccgccaccgccggctcctccccaaagtcgccccgccccacgccgccgccgccgccgccgtcaggacctctcccccctcgccgttgccgtcgccgccgccaggacctctcccccctcgccgttgccgtcgctgccgccaggacctctcccccctcgccgtcgccgtcgccgccggcaggtcgccgtcgccaccgcacggaactctcccccctcgccgttgccatcgccgccgccaggtcgtccccgccgccaagtcgtccccgctaccgccggctcctccccgaagtcgccccgcccctcgccgtcgctgacgccactgccaggacctctcccccctcgccgtcgccgtcgccgccgccaggtcgccgtcgccgccgcacggacctctcccccctcgccgttgccatcgccgccgccaggtcatcgccgccgccaggcgcttctagtgaagaaacgtggcgcacaccaagtgacccgtttccaatggaaataacacaagtcgccccccgcgatgatgatccggactacatacctatcgaacaggccatggtagtccgacgccgctcaaaacgtaaagccgggaggaacaggacagagcaagaagttgagatggacaccgctacgtctgcacctgaacgtacggagacatctacaagtgcaggcgggagtgggaaaaaaagacgtggtgagagaagcaagaataaattacccaaggaaacttacaacgtgattgctctcgatcaggatgggaagcccatcgagccaccgatagtgcggtccaagttcagcaacgcctgtggcactctagtcaggacgcgttgtcccattaatgtcaagttgtgggaaacagtggacgacaacatcaagacacttctctggaatgagttgcagaagtattttgtgttccctcctggatcagaggctgactgggacacgtttgttgcggatcgtacaacagctgaagcattggctttgaggaaaaaaatgtccgagctcgcgaagaagaacaaatatccccatagattggggtcgagcggatacgctggtcacgtcgatcaatggcgggagatcgagcaaagatttgccgcggccggtaagcccctgctggtagaccccatggttgaacgtagcaagaactgggtttgggcgcgcagcacaggctcagtgcagacaagtaccttccctgtggatagtataactggaccaactccgtgcagtctcgtcgtaccaatcggccgcgctggaaagactaaggaggttgcaacgggtttagcgatacccggacgtcaattccacaacacggcaatccctgaggattacgcaagggtacaggtcgccaagaggatccccactttggaacctcgtcgtataattccaaagttgatatcgacatacgacccaaaggagattgacaaggacaaggagaagttcatgttttcagctttcaggaattctgagaagagaaaagaacttgctcacgtcttgtcagactcccagaagtcagtactagcggcccaagatgaagtgcaatcctggttatctgccgatgtgcctgaaacttatgagtatggcaagccattcttgccaacttatcttatgaacaagctaccatgggaaatgagggtaatgcacgaatgtatgcaattccacgaagctgatagaactggagcaaaggttggatacgtcgatccaacaagaatatgcaaaacacaacacaccgtagagctgagacaggactgcgagcaattggttggcaagaccccggaagaaaaggaagaatatgtgaagacattgcacaagaggaagaagctagaagtagcaacatacttggcaatagcaatgttggcgcacgccgacaaagatgtcttaatggtcccctaccagttcacgtaa

SEQ ID NO: 60852 - DNA, 3921 bp, Oryza sativa
  Clone ID: PAT_MRT4530_62341C.1
atggagtacggattcaccgccaactacaaggtttggacctatcacggggaattcgccaatccggaagatgacgatgaagagttaagtttcgagatgaatgaggcagagaattttataatcgaagacatgtcgcgtgaaagaatggttgtcgatgtttccaccgatagtgatgatttcgatggtggttttgatttagaggatatgctacgccatgttgaaccagaggtgctagcgggcaggtcacgaggattggagaattggcaagcattagagaaggcatcgaaggatcttctttacgatgaaacgaagggatgtgataaggatttcacagtcttgcgttcagtgcttgaacttctgagattgaaggctaaacatggatggtcggacacaaagtgtaccgatccagattctgataagggtaagcgcgggaagattccttcaatggtgatgtggtacctaccaattaaggaccgcctgaagcgtctgtactcaaacccgactgatgctgagttgatgagatggcatcaagagagccggaaaatagatggtatgattcgacatcccgccgacgctcgccagtggaagacatttgatgcaaaacacccagaatttgctaaggatcctaggaatgtaaggtttgcgttgagcactgatggaatgaacccgtttgtggagaatgacactgccccagtagcaagaggtggtacatacgtgtatgagataacaaagaagattaaggttgtatatggaaagggaaagaagaagacagtaaagaggaagaaagctgatggtgacaacggtactgcgtcgcctttcaagaagcactcaattttctttacatacttagattactggaaggacctagagattcgacatgcaattgatgttatgcacctcgagaagaacgtgtttgatagcaccgttggcacattgctggacatcccgagtccgcttcagacatttgccgtcgagactgtatgccagcttgagatgtatttcccaccatcatttttagatatgatggagcatttgatcgttcacatcgtccctcagattattgaacttggtccattatacttacatcagatgtgggcctatgagcgttacatgtcgatcctcaaaggctatgtacgcaatcgcgctcacccggaaggatcaatgatagagggatacacaactgaagaggcagtcgagtgttgtatggactacataaaggatgctaatgccattggcattcctgttcatcgacatgaaggtagattgtctggaaggggtactgttggtaggaagcagttcttcgataatgattacaaaaaggtgtccgcggcacacaacagcgttcttcaacagctcgctatcgttgagccattcattgagcgacacctagaagaaatcaaagcctgcttcccagggcggtccaatgattggatatcaagagagcacaagcgtcgctttcctctgtggttgaaagatctaaacctgccagttggtgattctgtggaggaacttactttacaaagattggcatgtgggccttcaagtattgtcaattcatggcaaggttacgacatcaatggatttaccttgagtacgactacgaaggacatgaaaagcaccacacaaaacagtgggatccgtgtcgaagcaattgacacgagtggagaaaagaggtcgtattatgggaccattcaagaaatatgggaactggactatggcctaaacatccagatccctgtgctccgttgtgaatgggttaaagacacaataggggtttccgttgatgactacgggctaacgatagtcgatcacagtaaaacaggccacaaggatgatccatgggttttagcagagcgtgtggctcaagtgttttatgtgaaggacccttcagatgaaagaaaaactattgtcatatccggaaagcaacagatcgtcggcatcgacaacatcgaagaccccaatgattacaaccagttcgacgatgtaccattgtttactgatcttcctatgcgaattaagaaggttgagagaacaatcgatgaagcaaatatgtcgtacgttcgagcagatggtgttgccaaggacctctcccccctcgccgttgccgtcgccgccgccaggacctctcccccctcgccgtcgccgtcgccgccgccaggtcgccgtcgccaccgcacggaactctcccccctcgccgttgccatcgccgccgccaggtcgtccccgccgccaagtcgtccccgctaccgccggctcctccccgaagtcgccccgcccctcgccgtcgccgacgccactgccaggaccgttgccctcgccatcgccgtcgccgccgccaggtcgccgtcgccgccgcacggacctctcccccctcgccgttgccatcgccgccgccaggtcgtcgccgccgccaggtcgtccccgccgtcgctcggcgggagtaggaaaaaaagacgtggtgagagaagcaagaataaattacccaaggaaacttacaacgtgattgctctcgatcaggatgggaagcccatcgagccaccgatagtgcggtccaagttcagcaacgcctgtggcactctagttaggacgcgttgtcccattaatgtcaagttgtgggaaacagtggacgacaacatcaagacacttctctggaatgagttgcagaagtattttgtgttccctcctggatcagagaagaatctcccaccgtttacggattatggacatatatcccaggctgactgggacacgtttgttgcggatcgtacaacagctgaagcattggctttgaggaaaaaaatgtccgagctcgcgaagaagaacagatatccccatagattggggtcgagcggatacgctggtcacgtcgatcaatggcgggagatcgagcaaagatttgccgcggccggtaagcccctgctggtagaccccatggttgaacgtagcaagaactgggtcgccaaggtccatagcgaccacgtttccttggaactagacataccagcacctgaggggattgaacttctcggtgatgcagtgaatcagtttatcttatggcaccgcagagacataatcctgagcgcggccgttcttgcagcaggatcttcaaccccatcctcatcgcaggcaatgactgctgccgctcctgcaccaccgtcgcctcctgaaccaccgtcacctcgacatccgccgtcaccaccaccgcttaggaattctgagaagagaaaagaacttgctaacgtcttgtcagactcccagaagtcagtactagcggcccaagatgaagtgcaatcctggttatctgccgatgtgcctgaaacttatgagtatggcaagccattcttgccaacttatcttatgaacaagctaccatgggaaatgagggtaatgcacgaatgtatgcaattccacgaagctgatagaactagagcaaaggttggatacgtcgatccaacaagaatatgcaaaacacaacacaccgtagagctgagacaggactgcgagcaattggttggcaagaccccggaagaaaaggaagaatatgtgaagacattgcacaagaggaagaagctagaagtagcaacatacttggcaatagcaatgttggcgcacgccgacaaagatgtcttaatgatccccgaaatcccatatattgcacaacgattcaacgacactactatcttgaacgtggccgctgacctctgccgattcatccttcgtgatgtctgcaacgcaagaggtctcttctacgacaaccagagtgaactcacaatggacgacaaatttaaacctctcagagattctcacgacgaccacggttgttgtcatcattgtgaggatgaggccccgattgttacgatgatgtcagcaaccgttgtcctcattactcctttggttctcgcgcttttccctccatccattgag

SEQ ID NO: 60853 - DNA, 165 bp, Oryza sativa
  Clone ID: PAT_MRT4530_62342C.1
atgacgggcaagtacgaggcaagtcatgggctggttgcctggttccctcgtcccccgacccggccgacgcgacgcgccaaaagcccttgtcagcgcacggcgccgcagaagatccacggcgcattgggctacgacgccttcgccggcgccatatgcgggccgtag

SEQ ID NO: 60854 - DNA, 9993 bp, Oryza sativa
  Clone ID: PAT_MRT4530_62343C.1
atggagtacggattcaccgccaactacaaggtttggacctatcacggggaattcgccaatccggaagatgacgatgaagagttaagtttcgagatgaatgaggcagagaattttataatcgaagacatgtcgcgtgaaagaatggttgtcgatgtttccaccgatagtgatgatttcgatggtggttttgatttagaggatatgctacgccatgttgaaccagaggtgctagcgggcaggtcacgaggattggagaattggcaagcattagagaaggcatcgaaggatcttctttacgatgaaacgaagggatgtgataaggatttcacagtcttgcgttcagtgcttgaacttctgagattgaaggctaaacatggatggtcggacacaaagtgtaccgatccagattctgataagggtaagcgcgggaagattccttcaatggtgatgtggtacctaccaattaaggaccgcctgaagcgtctgtactcaaacccgactgatgctgagttgatgagatggcatcaagagagctggaaaatagatggtatgattcgacatcccgccgacgctcgccagtggaagacatttgatgcaaaacacccagaatttgctaaggatcctaggaatgtaaggtttgcgttgagcactgatggaatgaacccgtttgtggagaatgacactgccccagtagcaagaggtggtacatacgtgtatgagataacaaagaagattaaggttgtatatggaaagggaaagaagaagacagtaaagaggaagaaagctgatggtgacaacggtactgcgtcgcctttcaagaagcactcaattttctttaaatacttagattactggaaggacctagagattcgacatgcaattgatgttatgcacctcgagaagaacgtgtttgatagcaccgttggcacattgctggacatcccgagtccgcttcagacatttgccgtcgagactgtatgccagcttgagatgtatttcccaccatcatttttagatatgatggagcatttgatcgttcacatcgtccctcagattattgaacttggtccattatacttacatcagatgtgggcctatgagcgttacatgtcgatcctcaaaggctatgtacgcaatcgcgctcacccggaaggatcaatgatagagggatacacaactgaagaggcagtcgagtgttgtatggactacataaaggatgctaatgccattggaattcctgttcatcgacatgaaggtagattgtctagaaggggtactgttggtaggaagcagttcttcgataatgattacaaaaaggtgtccgcggcatacaacagcgttcttcaacagctcgctatcgttgagccattcattgagcgacacctagaagaaatcaaagcctgcttcccagggcggtccaatgattggatatcaagagagcacaagcgtcgctttcctctgtggttgaaagatctaaacctgccagttggtgattctgtggaggaacttactttacaaagattggcatgtgggccttcaagtattgtcaattcatggcaaggttacgacatcaatggatttaccttgagtacgactacgaaggacatgaaaagcaccacacaaaacagtgggatccgtgtcgaagcgattgacacgagtggagaaaagaggtcgtattatgggaccattcaagaaatatgggaactggactatggcctaaacatccagatccctgtgctccgttgtgaatgggttaaagacacaataggggtttccgttgatgactacgggctaacgatagtcgatcacagtaaaacaggccacaaggatgatccatgggttttagcagagcgtgtggctcaagtgttttatgtgaaggacccttcagatgaaagaaaaactattgtcatatccggaaagcaacagatcgtcggcatcgacaacatcgaagaccccaatgattacaaccagttcgacgatgtaccattgtttactgatcttcctatgcgaattaagaaggttgagagaacaatcgatgaagcaaatatgtcgtacgttcgagcagatggtgttgccaaggacctctcccccctcgccgttgccgtcgccgccgccaggacctctcccccctcgccgtcgccgtcgccgccgccaggtcgccgtcgccaccgcacggaactctcccccctcgccgttgccatcgccgccgccaggtcgtccccgccgccaagtcgtccccgctaccgccaggctcctccccgaagtcgccccgcccctcgccgtcgccgacgccactgccaggacctctcccccctcgccgtcgccgtcgccgccgccaggtcgccgtcgccgccgcacggacctctcccccctcgccgttgccatcgctgccgccaggtcgtcgccgccgccaggtcgtccccgccgtcgctcggcgggagtgggaaaaaaagacgtggtgagagaagcaagaataaattaaccaaggaaacttacaacgtgattgctctcgatcaggatgggaagcccatcgagccaccgatagtgcggtccaagttcagcaacgcctgtggcactctagtcaggacgcgttgtcccattaatgtcaagttgtgggaaacagtggacgacaacatcaagacacttctctggaatgagttgcagaagtattttgtgttccctcctggatcagaggtcagggggagagattacgcacttaaaaagatgggagatcgatggcgacagtggaagtccgatctaaatcgggattatgttcagaagaatctcccaccgtttacggattatggacatatatcgcaggctgactgggacacgtttgttgcggatcgtacaacagctgaagcattggctttgaggaaaaaaatgtccgagctcgcaaagaagaacaaatatccccatagattggggtcgagcggatacgctggtcacgtcgatcaatggcgggagatcgagcaaagatttgccgcggccggtaagcccctgctggtagaccccatggttgaacgtagcaagaactgggtttgggcgcgcagcacaggtcaagtctcggatgagggagacatactattcgagactccagacatagaagaagtgactactaatttgcagcagatagtcgagaaagaaagatcaggacagttcgtcccacggagggagagagatcagcttactgcggcgttggggacggctgaacactctggacgtgtaaggggtttgtcctcaaagacaagttggaaggtcgggtttccacaagacgcaccaagttataagaagagagacaaatacaaagaacaactatcggacaagatctatgcgcaagtgaaggaacacttctactcgttggcagctgaaaacccgacagcatttccaaggttattccctgatagccagcaacccacacaatccgcacagcaaacaactaatgtacccagcagtgtaggctcagtgcagacaagtaccttccctgtggatagtataactggaccaactccgtgcagtctcgtcgtaccaatcggccgcgctggaaagactaaggaggttgcaacgggtttagcgatacctggacgtcaattccacaacacggcaatccctgaggattacgcaagggtacaggtcgccaaggtccatagcgaccacgtttccttggaactagacatacctgcacctgaggggattgaacttctcggtgatgcagtgaatcagtttatcttgtggcaccgcagagacataatcctgagcgcggccgttcttgcagcaggatcttcaaccccatcctcatcgcaggcaatgactgctgccgctcctgcaccaccgtcgcctcctaaaccaccgtcacctcgacatccgccgtcaccaccaccgcttaggtcaccgcctcgccaacctacaccaccaccctccccttctcaacaaccgcctctcccgaccccgcaaccagttcaagcctctcccacctccccaactaaacagcatgctcccccggctccgccctcagttcaaacctctccacctacaccccaatctgctctggtagaagaagtgcacataccagatggtactacatccgaaccaaagtctaatactttggaacctcgtcgtataattccaaagttgatatcgacatacgacccaaaggagattgacaaggataaggagaagttcatgttttcagctttcaggaattctgagaagagaaaagaacttgctcacgtcttgtcagactcccagaagtcagtactagcggcccaagatgaagtgcaatcctggttatctgccgatgtgcctgaaacttatgagtatggcaagccattcttgccaacttatcttatgaacaagctaccatgggaaatgagggtaatgcacgaatggtatatgaaggcatctaggaaaggtctcggtttcataagcgtcgccgtcccggaaggcgctttcatgagtggtcctaatgggatattttttatctctttccaagacctttacgccctctacaagctagataaaatggacgttaatctcgttgcggctttctgtcttatgcaattccacgaagctgatagaactggagcaaaggttggatacgtcgatccaacaagaatatgcaaaacacaacacaccgtagagctgagacaggactgcgagcaattggttggcaagaccccggaagaaaaggaagaatatgtgaagacattgcacaagaggaagaagctagaagtagcaacatacttggcaatagcaatgttggcgcacgccgacaaagatgtcttaatggtcccctaccagttcacagaccactacatattattccttgtatatccgaaagaccaattgatcatatcattggaccccgcacactatgacaaggagacatttatggaattcctcactattttgaatttagcacacaagtactaccgcaaaagaggtggaccagtacatattccatcccagaagaagttatccgtcaggactggctggccgtgctacaaacaaccaccaggaaccaacttgtgtggttattacgtgtgcgagatgctcagagtaaatgggaggtacaaaacaaccagtaaccgaatccccgaaatcccatatattgcacaacgattcaaccacactactatcttgaacgtggccgctgacctctgccgattcatccgtcgcgatgtctgcaacgcaagaggtgtcacgcctgagtcagcaagctttgccgatactggatatgaccccccgccaaaaaaatggaaagggatttgccaggttggcccatcgtttgaggccataagttgcaaccggaagtttatcggtgcacggtggtacatcgatgacgagattctaagtagcatatccgataacgaggttctttctcctagggatgtcgaaggccacggcacgcacacagcctcaacggctggcggcaacatcatccacaatgttagctttctggggctagctgcagggacagttcggggtggagcgccccgtgcacgattagccatatacaaggcctgttggtccggttatggctgctccggtgccaccgtgttgaaagccatggacgacgctgtctatgatggtgttgatgtcttatcactttctataggtggtacaaaagaagatgtgggaaccctacatgtcgtcgctaatggtatctcggttgtctacgctggtggaaacgatggtcccattgctcagacggtggagaaccaatcaccatggctagtaacggtcgctgcaaccaccattgatcggtccttgcctgtggttatcaccttgggaaacggcgaaaagttggtggcgcaatcctttgtcctcctggaaactgcaagtcagttcagtgagatacagaagtacacagacgaggaatgcaatgccaacaatattatgaacagcacggtgaaggggaaaatagccttctgcttcatgggagagatgttgaataataagcagcagacatcataccctgatgtcaccacggcagtggcagccaaaggaggcagagcaccggacattgctgcaccaggggtttcgattttagccgctgctcagattccatattacaaaggtgtttcctaccatttcgattctggaacatctatggcttgcccccatgtagctgggatcattgcggtgctcaagtccattcatccaaaatggtcacctgcggctctcaaatccgcaatcatgacaacagactactccatcccgctcgctggcgtgcaccagcgatcgggagagcaggtctccggaacctctgcctttgacgtcctgcaccgggagaaggcggcaataaggcactgtgattttactatggctgattttgccgatgcactgaggccggataaattcaccggtgtgcattttaagagatggcagatcagggtcactctgtggctgacagctatgaaatgcttctgggtgagtactggcaaacctgaaggagttcttactgctgaacagcagaagcaattcgaggaagccactactctatttgtgggatgcattcttagcgttcttggcgatcgtctggtcgaggtgtatatgcatatgaccgatgctaaggagttgtgggatgcactgaatactaaattcggtgctactgatgctagcaatgatctgtatatcatggagcagtttcatgactacaagatggctgacaaccgttctgtagtcgaacaggctcatgagatacaaaccatggctaaaagtttcggtactgcactcaaacacaagagacaggaatactccgttgaggggttgatagcgtctcttgatgttgaggagaaagctcgggaaaaagatgccgcgtctaagggcgatggtgggcagtccagcgccaatgttgtgcacaaggcccagaacaagagtaaggggaaatacaaagctcagcagaccaccaacttcaagaagcagaagaagaacaacaacaatcctaatcaggatgagaggacttgctttgtgtgtggccaagttggtcatctggctaggaagtgtccacagcgcaaggggatgaaggcacctgcagggcagacttctaagtctgctaatgtgaccattggcaacactggagatggaagcgggtatggtaatttacctactgttttttcagttaatcaatctactaattggtgggttgatactggggccaatgtcgcacggggttccaccgtcctaatggggaatgggtcacatgcttctgttcatggtgttggcacggtagatctgaagtttacttcgggaaagatcgtgcagctgaagaacgtgcagcatgtcccttctatcgacaggaatcttgttagtggctcccgtctgactagagacggatttaagttggtttttgagtctaataaagtagtcgtgtctaaacatggatattttattggtaaaggttatgagtgcggaggcctgttccgcttttccctttctgatttctgcaataagtctgtgaaccatatttgtggcagtgtggatgatgaggctaatgtttggcattcacgtttatgtcatattaattttggcttgatgtctcggctttccagcatgtgtttaattcctaagttttccattgtcaaaggttctaagtgccatagttgtgtgcaatcgaagcaacctcgcaagcctcacaaggctgccgaggagagaaacttggcaccactagaactcctacattcagatctttgtgaaatgaatggggtgttgacgaagggtggaaaacgatatttcatgacattcattgatgatgctactagattttgctatgtgtacttgttgaaaaagaaagacgaggctctagactattttaaaatttataaggcagaagttgaaaatcaacttgacagaaagataaaaaggcttaggtctgatcgtggtggagagtttttctcgaacgagtttgacttattctgtgaggaacatggcatcatacatgagaggacgcctccctattctcccgagtctaatgggattgctgaaaggaagaactgcacactgactgacttggtgaatgccatgttggacaccgcgggactgcctaaggcatggtggggggaggtattgttgacctcaaatcatgtgttaaacagagttcctaacagaaataaggacaaaacaccatatgagatatggattggtagaaaaccatcactttcttatttgcgcacatgggggtgcttggcgaaagtcaatgtaccaataacgaagaagcgcaaacttggacctaagactgtggactgtgtctttctgggatatgctcatcatagcattgcctatagatttttaatagttaaatccgaggtactggacatgcatgttggtataattatggagtctcgtgatgctaccttctttgagagctttttcccaatgaaggatacacatagtggttcgaaccaaccctctgaaataattcccagttcaatcataccaccagaacaaactgaacatacacatgaacttgtctctgaggaggatgtcagtgaagctcctcgaaggagtaagagacaaaggacggctaagtcttttggtgatgattttactgtgtacctcgtggatgacactcctaagtcaatttcagaagcatatgcatctcctgatgcagactactggaaggaggctgtccgtagtgaaatggattccattatcgctaacgggacttgggaggtgacagagcaaccctatgggtgtaaacctgtggggtgcaagtgggtgttcaagaagaagcttaggcctgacggtactattgaaaagtacaaggctcggcttgttgctaagggctatactcagaaagaaggcgaagatttctttgacacttactcacctgttgctagattgaccacaattcgtgtgctactttccctagcagcctcacatggtcttctcgttcatcaaatggacgttaagacagcttttcttaatggagagctggatgaggagatctatatggatcaacctgatgggtttgtagttgaaggctttggagtcaattatgcgtatccatgtgtgtattatcgccatggtgggggtcagggagttattttgtgcttgtatgttgacgacatactgatatttgggacaaaccttgaggtgataaatgaggttaaatcattcttgtctcaaaattttgatatgaaagatttgggagtagctgatgttatcttaaacattaagctaattagaggtgagaatgggattacactcttgcagtcccattatgtggaaaagatcttgaatcgctttggctacattgatagtaagccttttccaacaccttatgatcctagcttgttgcttcgcaagaacaagagaattgctaggaatcaactggaatactcccaaatcattggctcgttgatgtacctggctagtgcaactaggcctgatatctcctttgctgtgagcaagttgagccgatttacctctaatccgggagatgatcactggcgtgcgcttgagcgagtaatgcgctatctgaaaggtactgtggaattggggcttcactatactgggtatcctgcggtactggagggttatagtgattctaactggatctctgatgtggatgagatcaaagccactagtggatatgttttcacactgggtggtggtgctgtttcatggaggtcttgcaaacagacaattttgacgaggtcaaccatggaagcagagctaacggcactggatactgctactgttgaggcagaatggctgcgtgatctattaatggatctgcctgttgttgaaaaaccggtgccggctatccttatgaactgtgacaatcaaacgacatgtgaaaagacgattgaagtctgtcaggaaattaagaaactccggagttataacgttggattacatccaaacagcgagaaacctggcagatcccttcacgaagggactatcacgaaatgtgatagacaatgcatcgaaggagatgggtttgagacccatgtgagttatactatggtggtaacccagtctatgtga

SEQ ID NO: 60855 - DNA, 183 bp, Oryza sativa
  Clone ID: PAT_MRT4530_62344C.1
atggctgatattggctcgcccgggaggtttgtggtgaggcagataattggaattctctgcggcttcatgaacgaaccattatcgggctgtgttctctgtcaacaatttgatgttatggcaccgtacactcaagtcacaaatgggcagtggcgtaatcttgatcctttgggtcatgggagctga

SEQ ID NO: 60856 - DNA, 364 bp, Oryza sativa
  Clone ID: PAT_MRT4530_62345C.1
ctggaattggcacaccatttacatttgatgggccacttggaatgatctgcataatccaaccagcctgaataaaccgcattaaactttagatgctcttagccccccacgcgcctttaaaagctcatttcgagtgaacccttcctctccggggggtttctgaagcccatgcaaggaaaaacattttgggatatataccgcaaagctgttcagccgacttacctagaccctagataggggtgtgtctcacacacatatgggcccgtcactggccccttttgctgagggttaaaccatggtctttccctttcacaggcccaatgactttccggggaaatcaaaatccttgtgtttaaaaccccccctt

SEQ ID NO: 60857 - DNA, 4233 bp, Oryza sativa
  Clone ID: PAT_MRT4530_62346C.1
atggagtacggattcaccaccaactacaaggtttggacctatcacggggaattcgccaatccggaagatgacgatgaagagttaagtttcgagatgaatgaggcagagaattttataatcgaagacatgtcgcgtgaaagaatggttgtcgatgtttccaccgatagtgatgatttcgatgagtgtaccgatccagattctgataagggtaagcgcgggaagattccttcaatggtgatgtggtacctaccaattaaggaccgcctgaagcgtctgtactcaaacccgactgatgctgagttgatgagatggcatcaagagagccggaaaatagatggtatgattcgacatcccgccgacgctcgccagtggaagacatttgatgcaaaacacccagaatttgctaaggatcctaggaatgtaaggtttgcgttgagcactgatggaatgaacccgtttggtgacttaagcagctcgcacagcacatggccagtccttctcacaatgtataatcttccaacatggatatgtcagaaacgaaagtacattctactcactatcctcatacaaggtccaaaccaacctggaatcgacatagatgttttccttgagcctttgatggaggacatggaggagctttggaaagaggggttacgactatgggatgagtttaagcgggagcacttcaatctacgtgcgatcatattcgttaccatcaatgacctacctgtaaacttttcattatctgggcagattaaagggaagactggatgtctgatatgtctggaaaaaacttcatacaaatacctgacgtcgtctttgaagacagtgtacatgcgacatcgacggttcctaccacaaagacataggtaccgtaagatggctagattgttcgataatacagtggagaatgacaatgccccagtagcaagaggtggtacatacatgtatgagataacaaagaagattaaggttgtatatggaaaaggaaagaagaagacagtaaagaggaagaaagctgatggtgacaacggtactgcgtcgcctttcaagaagcactcaattttcttcaaatacttagattactggaagaacctagagattcgacatgcaattgatgttatgcacctcgagaagaacgtgtttgatagcaccgttggcacattgctggacatcccgagtaaaacgaaggatggattgaagtcacgtaacgaccttaaggtatttgatcctttggaattaggtccgcttcagacatttgccgtcgagactgtatgccagcttgagatgtatttcccaccatcatttttagatatgatggagcatttgatcattcacatcgtccctcagattattgaacttggtccattatacttacatcagatgtgggcctatgagcgttacatgtcgatcctcaaaggctatgtacgcaatcgcactcacccggaaggatcaatgatagagggatacacaactgaagaggcagtcgagtgttgtatggactacataaaggatgctaatgccattggcattcctgttcatcgacatgaaggtagattgtctggaaggggtactgttggtaggaagcagttcttcaataatgattacaaaaaggtgtccgcggcacacaacagcgttcttcaacagctcgctatcgttgagccattcattgagcgacacctagaagaaatcaaagcctgcttcccagggcggtccaatgattggatatcaagagagcacaagcgtcgctttcctctatggttgaaagatctaaacctgccagttggtgattctgtggaggaacttactttacaaagactggcatgtgggccttcaagtattgtcaattcatggcaaggttacgacatcaatggatttaccttgagtacgactacgaaggacatgaaaagcaccgcacaaaacagtgggatccgtgtcgaagcgattgacacgagtggagaaaagaggtcgtattatgggaccattcaagaaatatgggaactggactatggcctaaacatccagatccctgtgctctattgtgaatgggttaaagacacaataggggtttccgttgatgactacgggctaacgatagtcgatcacagtaaaacaggccacaaggatgatccatgggttttagcagagcgtgtggctcaagtgttttatgtgaaggacccttcagatgaaagaaaaactattgtcatatccggaaagcaacagatcgtcggcatcgacaacatcgaagaccccaatgattacaaccagttcgacgatgtaccattgtttactgatcttcctatgcgaattaagaaggttgagagaacaatcgatgaagcaaatatatcggagagcggggagccaaaattttctaagtcccggctcccgcgaaaccctagccgccaggctgccaaaatttcccaagtcgccgtcgccgtcgtccccgccaccgccggctcctccccaaagtcgccctgccccacgccgtcgccgccgccgccgtcaggacctctccccctcgccgttgccgtcgccgccgccaggacctctcccccctcgccgtcgccgtcgccgtcgccgccgccaggtcaccgtcgccaccgcacgaaacgctcccccctcgccgttgccatcgccgccgccaggtcgtccccgccgccaagtcgtccccgctaccgccggctcctccccgaagtcgccccgcccctcgccgtcgccgaggccactgccaggacctctcccccctcgccgtcgccgtcgccgccgctaggtcgccgtcgccgccgcacggacctctcccccctcgccgttgccatcgccgccgccaggtcgtccccgccgccagatggtagtccgacgccgctcgaaacgtggaagtccgatctaaatcgggattatgttcagaagaatctcccaccgtttacggattatggacatatatcgcaggctgactgggacacgtttgttgcggatcatacaacagctgaagcattggctttgaggaaaaaaatgtccgagctcgcgaagaagaacaaatatccccatagattggggtcgagcggatacgctggtcacgtcgatcaatggcaggagatcgagcaaagatttgccgcggccggtaagcccctgctggtagaccccatggttgaacgtagcaagaactgggtttgggcgcgcagcacaggtcaagtctcggatgagggagacatactattcgagactccagacatagaagaagtgactactaatttgcagcagatagtcgagaaagaaagatcaggacagttcgtcccacggagggagcgagatcagcttactgcggcgttggggacggctgaacactctggacgtgtaaggggtttgtcctcaaagacaagttggaaggtcgggtttccacaagacgcaccaagttataagaagagagacaaatacaaagaacaactatcggacaagatctatgcgcaagtgaaggaacacttctactcgttggcagctgaaaacccgacagcctttccaaggaattctgagaagagaaaagaacttgctcacgtcttgtcagactcccagaagtcagtactagcggcccaagatgaagtgcaatcctggttatctgccgatgtgcctgaaacttatgagtatggcaagccattcttgccaacttatcttatgaacaagctaccatgggaaatgagggtaatgcacgaatgtatgcaattccacgaagctgatagaactggagcaaaggttggatacgtcgatccaacaagaatatgcaaaacacaacacaccgtagagctgagagaggactgcgagcaattggttggcaagaccccggaagaaaaggaagaatatgtgaagacattgcacaagaggaagaagctagaagtagcaacatacttggcaatagcaatgttggcgcacgccgacaaagatgtcttaatggtcccctaccagttcacagcacacaagtactaccgcaaaagaggtggaccagtacatattccatcccagaagaagttatctgtcaggactggctggccgatccccgaaatcccatatattgcacaacgattcaacgacactactatcttgaacgtggccgctgacctctgccgattcatccgtcgcgatgtctacaacgcaagaggtctcttctacgacaaccagagtgaactcgcaatggacgacaaatttaaacctctcagagagtgggagaaagaacatatgcaataa

SEQ ID NO: 60858 - DNA, 5073 bp, Oryza sativa
  Clone ID: PAT_MRT4530_62347C.1
atggatcggcaatggatgtacgctgaccggcggtccaaagagtttattgacggcgtgcattatttcttgagagtggccgaaactaacaagcagaagagttttaaatgttgtccatgcaataagtgtaagaatcagaaggagtattctgcatccaggactattcatttccacttgtttgagtcggggttcatgccaagctataattgttggacatcccacggagagcaaggggttgaaatggaagaagatgaagtggaagacgacaatattctagactttgctcagtacgctagatttgaaggaaatcaaacgggcgaggaggatagagatgctgattataacgacgttgcggatgatcttggtcagatgttgcaggatgccaaggaggactgcgaaagtgaaaagggggcccataaattggacaagatgttgtacccaggttgcgagtaggggcacaaaaagttggataccactctggagttcttgcaatggaaggcaaaaaatggtgttagtgacaaggcatttggcaatttattgaaactcgtcaagaacattcttccggagggaaacaaattgcccgagacaacgtacgaggctaagaacatagtctgccctctaggactggaagttcagaagattcacgcatgtccgaatgattgtatcctatatcgtggtgaggagtacgagaacctagaagcatgccctgtttgtaaagcactacgatacaagattagacgagatgatccaggtgaggttgacgggcagctaacgaagaagagaattcctgctaaggtgatgtggtatttccctataataccatggctaaggcgtttgttcaggaacaaggggaatgctagaatgatgcgttggcacgctgaagaacgtcaacaggacgggatgctgagacaccccgcagatggttcgcaatggcgaaacatcgacagaaaatttaaagactttggaaaggacgcacgaaacatacggtttggtttaagtacggatggcatgaatccttttggagagatgagtagcggccatagcacttggcccgttacgatgtgtatctataacctccccccttggctatgcatgaagaggaagtacataatgatgccgattattattcaaggccccaagcaacctggtaacgacatcgatgtgttcctaagaccactggtcgaagatcttagactgttgtgaaagaaggaaggtgtccccgtgtgggacgaagacaaacaggaggagtttaacctacgagcgctgctgtttgtaaccatcaacgattggcctacacatagcaacctatccggacagtccaacaaggggtacaaggcttgcactcactgtatggatgaaacagaaagtacgtatcttaagcactgtaggaaggttgtgtacatgggtcatcgtcgatttcttgctgcaaaccacccagtacggaagaaaggcaagcactttgaacataaggcggaccaccgtacgaaggccaaacatcgcagcgggaaaacaatgtttgctatggtgaaagatcttaaagtagtgtttggaaaggggcctggcagccagcctatagagagcgaagatggtcacgcggcgatgtggaaaaaaaactccatattttgggagttaccctattcggaattcttggacgtccgcaacgcaatcgacgtgatgcacctcactaagaacctttgcgtaaaccttcttgacttcctaggtgtatatggaaagtcgaaagatacactggaagcacgtaatgatctgaagcatatggaacaacgcggcgaccttcacccagaaccaaaggagaaaggcagccattacttgagtccagccagctacactcttagcaaggcagagaaggaaagtatgtttcaatgcttggagagcatcaaggtaccatctggatactccacgaatataaagcgagtaataagcacgaaggagaagaagttcacaaacctaaagtctcatgactgtcacatgttgatgacacaactgctaccagttataataaggggtatcctcccagacaatgtccgggcaacaataacaaagctatgttctttcatgaacacaattttgcagaaggtcatcgatccggataggttagaagcccttcagaatgatgtggtgcaatgtcttgtcagctttgagttgatatttccaccttcattcttcaatataatgacgcatctgctttgtcacctagtcaaagagatcggtattctcgggcctgtgttcctacacaacatgtttcctttcgagaggtacatgggcgttctgaagaagtatgttcgtaaccgtgctcatctagaggcaagcatcgccaaggggtatggaacagaggaggtcattgaattctgcgtagaatttattgaagaccttcgcctaatcggggtacctgaatcacgccatgaagggagactacagggaaagaggactctcggaaggaaagcaataatgacggtagacaacaatttattccgtaaagcccatttcacggttttacaagaatcttcattggtggctccttacatcgaggagcacttggctctagttcgcgccagaaacatcggtaagtccgatgcatggattacacgacatcacattgatactttccccgcatggctgcgacaacatctcatgggtaacgagacgattaaccagcaactggccttcctggcgaggggtcctgtcacgaccggaaataacccaacgggcgttccttacgtgcgtgtattattccttgtcccaggaggcaagattaagagcatgaaccagaacagtgttgttcgtatcgatgccatgggacacgatggtacaactggcacgtattacggtgccatcaaggagatatgggaacttgactatggacctctcaaggtccctctgttccggtgccaatgggttaggttgactggtggaggcataacgattgatgatagtgggatgacaacggttgaccttaacaaggttggatactcggacgaaccttttgtccttgccaatgatgtaacgcaagttttttacgtgaaggacatgtctagcaaaggaaagaagggcaaagggcctgacgagccgaagcgccacgtggttctcccaggcaaaagaaaaatcgtcggagtaaaggacaagactgacgaggattacgatcagtttgatgggcaaccccgccccgccgccgccacgccgccgggccgcgccacgccaccgcgacgccccaccgccgccgcgacacactgccgccacgccgccgctccgctgctgccacggccgcccgaacgtgcaaatatttcttctatgaatagatggctgatcacgatgacgaacagatactgtacgatacaatcgcagagggaagcagccagtactggaacaaaaaagaggggaacgaggatccaaaccagtacttgaacgaggaggggaacgtggagagggatgcagaggggaacgaggaggggaacgtggagagggatgcggaggggaacgaggaggaggaggctagtggaagtcatccctccgctggacagaagagggcacgcggacaacgaggtgccgcgaagaagatagagggtcggcacatcataactgaggtggacgcagaaggctgacctagtgccccggtagaagcagccaagaattttgtacgccacagcggttgggttgtgagagataacgtgcctgtcagcaaggtgtactggcgcagaactagagcacgcggggataatgaaagctttgtcccggaatcagagaaagagatgctgtggaccacaatgctcgagacgttcacgctccctgtgggtacggagaacatagtgaaacagtggactcttaagaaaatggtagaacagttccagagcttcaagggagatctgtacaagaaatacatcctgaagggactaacaccgaacttcgacgtattctcaaagctaagggatcattgggacgagttggttgcttacaagacaggacaacaagggcaagcgatgatggtaaaaacaaggaaaacgctgccaagaagaagtatcatcaccacttggggtcaggtggctatagcatcgcaataccgaagtgggaggagatggaggcaagaatgattgagaggggtatcgaaccggccaccgctaaatggccggatcaatcgaagttctggtactatgctcacggtggaatgcttaacccagttgatggctccctggtcttcagcaatcagatacgcgaggctgccagtcgactaacggatgcagtggaagcctcttctcagggcagtttctgacccgacagagagaaggacgagctgtcactcgccctacagactcccgagcattcaggacgaacacgagggaaaggcgtgattccctggaagattggattcaaggaggacatccacacgtacaggagtcggatgagaagcaagagagataccgaggcgaagattgcatatcttgagtatagggtatcgagctacgagctcagcatgcaagaggaggtggcccggaaggtggatgaacgcatggcagcacatcagtcacacgatccccagctgcacatacctcctccaatggtcagcccatcaggcaatcgtagcagctgcgcctcaacggggcaggtaggatcacagtgcatggacgccatgcaaacccaggacgaaaccacctgccctgttgatgagatcatgcaacggacaccatgtgagctgcatattcccttcaagaacttatcactcaaggtatgctcgaaaatggccatcccaacggaacatttcaggagacttaccactacaaacacgaattccagcaggatactcgaggagtcgaagttgaagctggtaggaagccgtgtacgaagacctcgaagttggaatacccaaggaggagacggtgagaacgcatctacgagacacaagccacgccattatactatagcgcaaggaataaataatcctccctgggcgacaagcggagtctcgtgcaccatctcctccggctccgccgtctcctcctgcaccatctccaccggttcctccgccacgtcctcctacaccatctcctccggctcctacgccacctc

SEQ ID NO: 60859 - DNA, 2868 bp, Oryza sativa
  Clone ID: PAT_MRT4530_62348C.1
atgtcgaacgataaggttccatcgaacgcaccaataacgcctcaagaaggtaacgctcatcaaaaatccggtagcaacaagcagcctgacgcttctagtgaagaaacatggcgcacaccaagtgacccgtttccaatggaaataacacaagtcgtccctcgcgatgatgatccggactacatacctatggaacaggccgataggaagcccgtcgagccactgatagtgcggtccaagtttagcaacacctgtggcactctagtcaggacgcgttgtcccattaatgtcaagttatgggaaacggtggacgacaacatcaagacacttctttggaatgagttgcagaagtattttgtgtaccctcctggatcagaggtcaggaggagagattacgcacttaaaaagatgggagatcgatggcgacagtggaagtccgatctaaatcgggattatgttcagaagaatctcccaccgttcacggaatatggacatatatcggaggctgactgggatacgtttgttaaagatcatacaacagatgaagcattggctttgagtaaaaaaatgtcagacctcgcgaagaagaacaaatatccccatagattggggtcgagcggatacgctgggcacgtaaatcagtggcgggagaccgagcaaagatttgcagcggccggcaaacctctgttggtagaccccatggcggaacgtagcaagaactctgttttggcgcgtagcacaggtcaagtctcggatgagggagacatactattcgagactctagacatagaacaagtgactactaatttgcagcagatagtcgagaaagaaagagcaggacagttcgtcccacggagggagcgagaccagcttacagcgacgttggggaccgccgaacactctgaacgtgtaaggggtttgtcctcaaagacgagttggaagatagggtttccacaagacgcaccaagttataagaagagagacaaatacaaagaacaactatcagacaaaatctatgcgcaagtgaaggaacacttctactcgttggcagctaaaaacccgacagcctttccaagtctcgtcgtacctatcggccgcgctggaaagactaaggaggttgcaacgggtttagcgatacccagacatcaattccacaacacggcaatccctgaggattacgcaagggtacaggtcgccaaggtccatagcgaccacatttccttggaactagacatacctgcacctaaggggattgaacttctcggtgatgcagtgaatcagtttatcttgtggcaccgcagagacataatcctgaccgcggccgttccagcagtaggatcttcaactccatcctcatcgcaagcaaggacagctgccgctcctgcaccaccgtcgcctcctgaaccaccgtcacctcgagatccggcatcaccaccatcgcttaggtcaccgcctcgccaacctacaccaccaccctccccttctctacagcctgcttttccggctccgcaaccagttcaagcctctcccacgtccccagctaaacagcatgctcccccggctccgccctcagttcaagcctctccacctacaccccaatctgctctagtagaacaagtgcacataccagaaggtactacatctgaaccgaagtctaatcctttcgaacctcgtcgtataattccaaagttgatatcgacatacgacccaaaggagattgacaaggataaggagaagttcatgtttttagctttcaggaattctgagaagagaaaagaacttgctcacgtcatgtcagactcccagaagtcagtactagcggcccaagatgaagtgcaatcctggttatctgccggtgtgcctgaaacttatgagtatggcaagccattcttgccaacttatcttatgaataagctaccatgggaaatgagggtaatgcacgaatggtatatcaaggcatctaggaagggtctcggtttcataagcgtcgccgtcccggaaggcgctttcatgagtggtcctaatgggatattttttatctctttccgagacctttatgccctctacaagctagataaaatggacgttaatcacgttgcggcgttctgtcttatgcaattccacgaagctgatagaactggagcaaaggttggatacatcgatccaacaagaatatgcaaaacacaacacatcgtagagctgagagaggactgcgagcaattggttggcaagacccctcaagagaagggagaatatgtgaagacattgcacaagaggaagaagctagaagtagcaacatacttagcaatagcaatgttggcgcacgctgacgaagatgtcttaatggtcccatacgcgttcacagaccactacatattattccttgtatatccaaaagatcaattgatcatatcattggaccccgcacactatgacaaggagacatttatggaattcctcactattttgaatttgtcgatccctagtcttctaactactgaaaaaacaattgttttcttcaaacagagcacacaagtactaccgcaaaagaggcagaccagtacatattccatcctagaagcagttatctgccaggactggctggctgtgctacaaacaaccaccgggaaccaacttgtgcggttattacgtgtgcgagatgctcagagtaaacgggagatccctgaaatcccatatattgtacaacgattcaacgacactactatcttgaacgtggccgctgacctatgccgattcatccttcgtgatgtctgcaacgcaagaggtcttttctacgacaaccagagtgaactcacaatggacgacaaatttaaacctctcagagagtgggagaaagaacatatgcaataa

SEQ ID NO: 60860 - DNA, 4597 bp, Oryza sativa
  Clone ID: PAT_MRT4530_62349C.1
atggagtacggattcaccgccaactacaaggtttggacctatcacggggaattcgctaatccggaagatgacgatgaagagttaagtttcgagatgaatgagacagagaattttataatcgaagacatgtcgcgtgaaagaatggatgtcgatgtttccaccgatagtgatgatttcgatggtggttttgatttagaggatatgctacgccatgttgaaccagaggtgctagcgggcaggtcacgagtattggagaattggcaggcattagagaaggcatcgaaggatcttctttacgatgaaacgaagggatgtgataaggatttcatagtcttgcgttcagtgcttgaacttctgagattgaaggctaaacatggatggtcggacacaagttttaatgatctgatgagtttgttgcgtgtgttgcttcctaagcctaactttgtaccatcaaacacgtatcaagcgaagaaactcatatgtcctttatctcttggtgtagaaaagattcatgcttgtaagaatcactacatattataccgtaaagaatatgcggacttggaatgttgcccaacgtgtggcacaagtcggtataaaatggggaatgggcccgtagattcagagtgtaccgatccagattctgataagggtaagcgtggaaagattccttcaatggtgatgtggtacctaccaattaaggaccgcctgaagcgtctgtactcaaaccctactgatgctgagttgatgagatggcatcaagagtgtcggaaaatagatggtatgattcgacatcccgccgacgctcgccagtggaagacatttgatgcaaaacacccagaatttgctaaggatcctaggaatgtaaggtttgcgttgagcactgatggaatgaacccgtttggtgacttaagcagctcgcacagcacatggccagtccttctcacaatgtataatcttccaacatggatatgtcagaaacgaaagtacattcttctcactatcctcatacaaggtccaaaccaacctggaatcgacatagatgttttccttgagcctttgatggaggacatggaggagctttggaaagaggggttacgactatgggatgagtttaagcgggagcacttcattctacgtgcgatcatattcgttaccatcaatgacctacctgcaaacttttcattatctgggcagattaaagggaagactggatgtctgatatgtctagagaaaacttcgtacaaatacctgacgtcgtctttgaagacagtgtacatgcgacatcgacggttcctaccacaaagacataggtaccgtaagatggctagattattcgataatacagtggagaatgacactgccccagtagcaagaggtggtacatacgtgtatgagataacaaagaagattaaggttgtatatggaaagggaaagaagaagacagtaaagaggaagaaagctgatggtgacaacggtactacgtcgcctttcaagaagcactcaattttcttcaaatacttagattactggaaggacctagagattcgacatgcaattgatgttatgcacctcgagaagaacgtgtttgatagcaccattggcacattgctggacatcccaagtaaaacgaaggatggattgaagtcacgtaacgaccttgtagagttgtccatatggcatgaccttcacccagtagtgctgccaaatgggaagaccgagattcctcctgcttgttactcgttgacacttgaagagaaaaaagccttctgtaaatgtttacaaggggttagagtgcctactggtttcgcatcgaacatcaggaagctagtatcaatgaaggatttgaccatttcgggatacaatgcgcatgactgtcataggttgctaacggtattcctaccaattgctataagggcagtcaaaccagtccatacaaagaaggtatttgatcctctggaattaggtccgcttcagacatttgccgtcgagactatgtgggcctatgagcgttacatgtcgatcctcaaaggctatatacgcaatcgcgctcacccggaaggatcaatgatagagggatacacaactgaagaggcagtcgagtgttgtatggactacataaaggatgctaatgccattggcattcctgttcatcgacatgatggtagattgtctggaaggggtactgttggtaggaagcagttcttcgataatgattacaaaaaggtgtccgcgacacacaacagcgttcttcaacagctcgctatcgttgagccattcattgagcgacacctagaagaaatcaaagcctgcttcccagggcggtccaatgattgggtatcaagagagcacaagcgtcgctttcctctgtggttcaaagatctaaacctgccagttggtgattctgtggaggaacttactttacaaagactggcatgtgggccttcaagtattgtcaattcatggcaaggttacgacatcaatggatttaccttgagtacgactacgaaggacatgaaaagcaccgcacaaaacagtgggatccgtgtcgaagcgattgacacgagtggagaaaagaggtcgtattatgggaccattcaagaaatatgggaactggactatggcctaaacatccaaatccctgtgctccattgtgaatgggttaaagacacaacaggggtttccgttgatgactacgggctaacgatagtcgatcacagtaaaacaggccacaaggatgatccatgggttttagcagagcgtatggctcaagtgttttatgtgaaggacccttcagatgaaagaaaaactattgtcatatccggaaagcaacagatcgtcggcatcgacaacatcgaagaccccaatgattacaactacccgcatggaaagatctttttcgcatgcggccggcttaacagcccgcatggaaagatctttttcgcatttcctatgcgaattaagaaggttgagagaacaatcgatgaagtaaatatgtcggagcgcggggagccaaaattttctaagtcccggctcccgcgaaaccctagccgccaggctggccaaaatttcccaagtcgccgtcgccgtcgtccccgccaccgccggctcctccccaaaattcccccgcccccacgccgtcgccgccgccgccgtcaggacctcaaccccctcgccgttgccgtcgccgccgccaggacctctgcccccctcgccgttgccgtcgccgccgccaggaccttctgcccccctcgccgtcgccgtcgccgccgccaggtcgccgtcgccaccgcacggaactctcccccctcgccgttgccatcgccgccgccaggtcgtccccgccgccaagtcgtccccgccgccaagtcgtccccgctaccgccggctcctccccgaagttgccccgcccctcgccgtcgccgacgccactgccaggacctctcccccctcgccgtcgccgtcgccgccgccaggtcgccgtcgacgccggacggacctctcccccctcccccttcccatcccccaccccaggtcgtccccgccgccaggcgggagtgggaaaaaaagacgtggtgagagaagcaagaataaattacccaaggaaacttacaacgtgattgctctcgatcaggatgggaagcccatcgagccaccgatagtgcggtccaagttcagcaacgcctgtggcactctagtcaggacgcgttgtcccattaatgtcaagttgtgggaaacagtggacgacaacatcaagacacttctctggaatgagttgcagaagtattttgtgttccctcctggatcagaggctgactgggacacgtttgttgcggatcgtacaacagctgaagcattggctttgaggaaaaaaatgtccgagctcgcgaagaagaacatatatccccatagattggggtcaagcggatacgctggtcacgtcgatcaatggcgggagatcgagcaaagatttgccgcggccgtgaatcagtttatcttgtggcaccgcagagacataatcctgagcgcggccgttcttgcagcaggatcttcaaccccatcctcatcgcaggcaatgactgctgccgctcctgcaccaccgtcgcctcctgaaccaccgtcacctcgacatccgccgtcaccaccaccgcttaggaattctgagaagagaaaagaacttgctcacgtcttgtcagactcccagaagtcagtactagcggcccaagatgaagtgcaatcctggttatctgccgatgtgcctgaaacttatgagtatggcaagccattcttgccaacttatcttatgaacaagctaccatgggaaatgagggtaatgcacgaatgtatgcaattccacgaagctgatagaactggagcaaaggttggatacgtcgatccaacaagaatatgcaaaacacaacacaccgtagagctgagacaggactgcgagcaattggttggcaagaccccggaagaaaaggaagaatatgtgaagacattgcacaagaggaagaagctagaagtagcaacatacttggcaatagcaatgttggcgcacgccgacaaagatgtcttaatggtcccctaccagttcacgtaa

SEQ ID NO: 60861 - DNA, 1745 bp, Oryza sativa
  Clone ID: PAT_MRT4530_6234C.1
tctatctcttttctccccttccttccttccgcctcgcctccccttcccctcctcgccgcctcgctcccctccgccgcgccgtcccgtcgaatcccgccatgccgaagggtgccaagaagcgcgccaagctcaagaagaagcagcagggggaccaccccgccggctccgatgacggcggcaacaacaacaacaacaaaaacaacgccgccgaaaacggcagcaatgactccagccgccgccgcgacgccgccagcgacggcaaccaccacctaccgtcgcgaccaaacgttcctcatgtggatgtgagtgaggactccatggagagctccgaggagatggtgacgccgagggccgccgcgtccgaggcggacgaggaggagaggaaggccgccacgtcggaggtgcccgtggaggtggtcgaggccggggaggaggtcatggtggacgccttgccgcccgaagccgccgcaggtgcgcaggagcaacagggtaaggcggaggcgcttgtggtggtgcaggaaccggaggtgaagcgcgaggagttggtggccaaggtgcatccgatgcatgacccggaaccgcagggcgaggaggtgctcatcgtggaggcggctgcggtatccgcggtgcaagaaccggaggtgaagcgcgatgaggtggtggtcatggagacggctgcgccgcctgcggtgcaggaatcggagacgaagagcggtggggtgttggtcaaggatgtggtggaggtgtcacggtctctgggtgcagctgatactacagaggtggcccggggacctgcagtggctgtggctgcagcagggcagcgggcaacatggtggaattgctgtggggtatttgatgcgttctctggttcggagagatagatcatggttggaacttggaagccaagaagacagtagacgcgaagttgttcaaagctgatggtaattgtaactagtctggtttatgctcatatgaatggagttgaagaatggataacatcgagctgatgtttctctctggcccatgtttctacaccgtgctgtgcaaagttacatccccttggttgtggttaatattctcgagtcgcgtagtactctgaaatctacacccttgtctattatcatctaggttatgttcatgtagcataagagttgagttgagtcgtcagcaaagaaattttgttctttctgtttcatacttatttttttttggggggggggggggtgtcatccggtttgcccccttctatggttcggtcaccttgaaaggagtaacgttgaaactatttaggtgttccattgtgtagtcttgctccgtgatagctcgcaggcacatcagactactcactatgaaaaagaaaataatgagacgtgtgggttacattcattgattctgctcacttccctgcccggtatgtgtcatcctgtcaaaatcctggcatggcatctatcgtgccattgttttcatggctccacatggtgtttgctatacgaattttatttagtaaaaccggacaatttgttcgttgaacaaaggggacggtccggaatgatagcgtctctgcagcggctacctcctaccggtgcaagaaagctacagccttgtcggcttgaacgtcacgtgcaaaaatgtagtagcagcatgaatatattagtagcatggtgatttcttattcttatacgtgtatttttgtctgaaacatggtactccagtaacatttaatgaaattaacgacgtttccttgg

SEQ ID NO: 60862 - DNA, 1242 bp, Oryza sativa
  Clone ID: PAT_MRT4530_62350C.1
atgccaaatttgggtgtaaacagtatgtttgaatgcttggaaagcatcaaggtaccatcaggatactccacgaatataaagcgaataataagcacgaaggagaagaagttcacaaacctaaagtctcatgactgtcacgtgttgatgacacagctgctaccagttataataaggggtttccttccagacaatgtccggtcaacaataacaaagctatgtgctttcatgaacgcaattttgcagaaggtcatcgatccggatagattagaagcccttcagaataatatggtgcaatgtcttgtcagctttgagttgatatttccaccttcatttttcaatataatgacgcatctgctttgtcaccttgtcaaagagattggtattctcgggcctgtgtacctacacaacatgtttcctttcgagaggtacatgggcgttctgaagaagtatgttcaatttatcgaagaccttcgcccaatcgggatacctgaatcacgccatgaagggagactacggggaaaggggactctcagaaggaaagcaataatgatggtagacaacaatttattccgtaaagcccatttcacggttctgcaacaatcttcattggtggctccctacatcaaggagcacttggctctagttcgcgccagaaacatcggtaaatccgatgcatggattacacggcatcacattgatactttccccgtgtggctgcgacaacatctcatgggtaacgagacgattaaccaacaactggccttcctggcgaggggaccatctggctcgatcgcaacattccaaggatatgagataaatgggtacacattctacacgagaaaccaagacataaagagcacgaaccagaacagtgctgttcgtatcgatgccatgggacacgatggtacaactgacacgtattacggtgccatcgaggacatatgggaacttgtctatggacctctcaaggacatgtctagcaaaggaaagaagggcaaagggcctgatgagccgaagtgccacgtggttctcccaggcaaaagaaaaatcatcggagttgaggacaagactgatgaagattatgatcagtttgatgggcaaccccctttcacggtgacggttgaccctagcatcctcctatcaaacgaagacaccccttactcacgtagcgatcataaggaaggaacaatagtgaggaggaagtacgtgcggtcaaccgtcaccgccgatgtattgccgtaa

SEQ ID NO: 60863 - DNA, 6648 bp, Oryza sativa
  Clone ID: PAT_MRT4530_62351C.1
atgtcgtatcgtgtagatcctcgtaccaacgtcccccaataccccacttatccagtctacgagtatcccctgtcgacaatgttggtccatgtccctcatgaggatataaggttttggaggaaacttagcaagaggttcaacctcttgatggatcggtcgtcatggatgtatgagatgcggagaacgcagccgatatttattaaggaagcatctaaatttattgatcaggctaaggagcatgctttgagggagaatatgacaaagatcttttgtccgtgccgtcattgcaagaatcagaaattgttggtagatcctggtgaaatattgggtcacataatggagtacggattcaccgccaactacaaggtttggacctatcacggggaattcgccaatccggaagatgacgatgaagagttaagtttcgagatgaatgaggcagagaattttataatcgaagacatgtcgcgtgaaagaatgattgtcgatgtttccaccgatagtgatgatttcgatggtggttttgatttagaggatatgctacgccatgttgaaccagaggtgctagcgggcaggtcacgaggattggagaattggcaagcattagagaaggcatcgaaggatcttctttacgatgaaacgaagggatgtgataaggatttcacagtcttgcgttcagtgcttgaacttctgagattgaaggctaaacatggatggtcggacacaagttttaatgatctgatgagtttgttgcgtgtgttgcttcctaagcctaactttgtaccatcgaacacgtatcaagcgaagaaactcatatgtcctttatctcttggtgtagaaaagattcatgcttgtaagaatcactgcatattataccgtaaagaatatgcggaattggaatgttgcccaacgtgtggcacaagtcggtataaaacgggaaatgggcccgtagattcagagtgtaccgatccagattctgataagggtaagcgcgggaagattccttcaatggtgatgtggtacctaccaattaaggaccgcctgaagcgtctgtactcaaacccgactgatgctgagttgatgagatggcatcaagagagccggaaaatagatggtatgattcgacatcccgccgacgctcgccagtggaagacatttgatgcaaaacacccagaatttgctaaggatcctaggaatgtaaggtttgcgttgagcactgatggaatgaacccgtttggtgacttaagcagctcgcacagcacatggccagtccttctcacaatgtataatcttccaacatggatatgtcagaaacgaaagtacattctactcactatcctcatacaaggtccaaaccaacctggaatcgacatagatgttttccttgagcctttgatggaggacatggaggagctttggaaagaggggttacgactatgggatgagtttaagcgggagcacttcaatctacgtgcaatcatattcgttaccatcaatgacctacctgcaaacttttcattatctgggcagattaaagggaagactggatgtctgatatgtctggagaaaacttcatacaaatacctgacgtcgtctttgaagacagtgtacatgcgacatcgacggttcctaccacaaagacataggtaccgtaagatggctagattgttcgataatacagtggagaatgacactgccccagtagcaagaggtggtacatacgtgtatgagataacaaagaagattaaggttgtatatggaaagggaaagaagaagacagtaaagaggaagaaagctgatggtgacaacggtactgcgtcgcctttcaagaagcactcaattttctttaaatacttagattactggaaggacctagagattcgacatgcaattgatgttatgcacctcgagaagaacgtgtttgatagcaccgttggcacattgctggacatcccgagtaaaacgaaggatggattgaagtcacgtaacgaccttgtagatttgtccatacggcatgaccttcacccagtactgctgccaaatgggaagaccgagattcctcctgcttgttactcgttgacacttgatgagaaaaaagccttctgtaaatgtttacaaggggttagagtgcctactggtttcgcatcgaacatcaggaagctagtatcaataaaggatttgtccatttcgggatacaatgcgcatgactgtcataggttgctaacagtgttcctaccaattgctataagggcagtcaaaccagtccatacaaaggtggttataacaaagttgtgctactttttcaatcgaatttcgcaaaaagtatttgatcctttggaattaggtccgcttcagacatttgccgtcgagactgtatgccagcttgagatgtatttcccaccatcatttttagatatgatggagcatttgatcgttcacatcgtccctcagattattgaacttggtccattatacttacatcagatgtgggcctatgagcgttacatgtcgatcctcaaaggctatgtacgcaatcgcgctcacccggaaggatcaatgatagagggatacacaactgaagaggcagtcgagtgttgtatggactacataaaggatgctaatgccattggcattcctgttcatcgacatgaaggtagattgtctggaaggggtactgttggtaggaagcagttcttcgataatgattacaaaaaggtgtccgcggcacacaacagcgttcttcaacagctcgctatcgttgagccattcattgagcgacacctagaagaaatcaaagcctgcttcccagggcggtccaatgattggatatcaagagagcacaagcgtcgctttcctctgtggttgaaagatctaaacctgccagttggtgattctgtggaggaacttactttacaaagattggcatgtgggccttcaagtattgtcaattcatggcaaggttacgacatcaatggatttaccttgagtacgactacgaaggacatgaaaagcacctcacaaaacagtgggatccgtgtcgaagcgattgacacgagtggagaaaagaggtcgtattatgggaccattcaagaaatatgggaactggactatggcctaaacatccagatccctgtgctccgttgtgaatgggttaaagacacaataggggtttccgttgatgactacgggctaacgatagtcgatcacagtaaaacaggccacaaggatgatccatgggttttagcagaacgtgtggctcaggtgttttatgtgaaggacccttcagatgaaagaaaaactattgtcatatccggaaagcaacagatcgtcggcatcgacaacatcgaagaccccaatgattacaaccagttcgacgatgtaccattgtttactgatcttcctatgcgaattaagaaggttgagagaacaatcgatgaagcaaatatgtcgtacgttcgagcagatggtgttgccaaggacctctcccccctcgccgttgccgtcgctgccgccaggacctctcccccctcgccgtcgccgtcgccgccggcaggtcgccgtcgccaccgcacggaactctcccccctcgccgttgccatcgccgccgccaggtcgtccccgccgccaagtcgtccccgctaccgccggctcctcccagaagtcgccccgcccctcgccgtcgctgacgccactgccaggacctctcccccctcgccgtcgccgtcgccgccgccaggtcgccgtcgccgccgcacggacctctcccccctcgccgttgccatcgccgccgccaggtcatcgccgccgccaggcgcttctagtgaagaaacgtggcgcacaccaagtgacccgtttccaatggaaataacacaagtcgccccccgcgatgatgatccggactacatacctatcgaacaggccatggtagtccgacgccgctcgaaacgtaaagccgggaggaacaggacagagcaagaagttgagatggacaccgctacgtctgcacctgaacgtacggagacatctacaagtgcaggcgggagtgggaaaaaaagacgtggtgagagaagcaagaataaattacccaaggaaacttacaacgtgattgctctcgatcaggatgggaagcccatcgagccaccgatagtgcggtccaagttcagcaacgcctgtggcactctagtcaggacgcgttgtcccattaatgtcaagttgtgggaaacagtggacgacaacatcaagacacttctctggaatgagttgcagaagtattttgtgttccctcctggatcagaggctgactgggacacgtttgttgcggatcgtacaacagctgaagcattggctttgaggaaaaaaatgtccgagctcgcgaagaagaacaaatatccccatagattggggtcgagcggatacgctggtcacgtcgatcaatggcgggagatcgagcaaagatttgccgcggccggtaagcccctgctggtagaccccatggttgaacgtagcaagaactgggtttgggcgcgcagcacaggtcaagtctcggatgagggagacatactattcgagactccagacatagaagaagtgactactaatttgcagcagatagtcgagaaagaaagatcaggacagttcgtcccacggagggagagagatcagcttactgcggcgttggggacggctgaacactctggacgtgtaaggggtttgtcctcaaagacaagttggaaggtcgggtttccacaagacgcaccaagttataagaagagagacaaatacaaagaacaactatcggacaagatctatgcgcaagtgaaggaacacttctactcgttggcagctgaaaacccgacagcatttccaaggttattccctgatagccagcaacccacacaatccgcacagcaaacaactaatgtacccagcagtgtaggctcagtgcagacaagtaccttccctgtggatagtataactggaccaactccgtgcagtctcgtcgtaccaatcggccgcgctggaaagactaaggaggttgcaacgggtttagcgatacccggacgtcaattccacagcacggcaatccctgaggattacgcaagggtacaggtcgccaaggtccatagcgaccacgtttccttggaactagacatacctgcacctgaggggattgaacttctcggtgatgcagtgaatcagtttatcttgtggcaccgcagagacataatcctgagcgcggccgttcttgcagcaggatcttcaaccccatcctcatcgcaggcaatgactgctgccgctcctgcaccaccgtcgcctcctgaaccaccgtcacctcgacatccgccgtcaccaccaccgcctaggtcaccgcctcgccaacctacaccaccaccctccccttctcaacaaccgcctctcccgaccccgcaaccagttcaagcctctcccacctccccaactaaacagcatgctcccccggctccgccctcagttcaaacctctccacctacaccccaatctgctctggtagaacaagtgcacataccagatggtactacatccgaaccaaagtctaatactttggaacctcgtcgtataattccaaagttgatatcgacatacgacccaaaggagattgacaaggataaggagaagttcatgttttcagctttcaggaattctgagaagagaaaagaacttgctcacgtcttgtcagactcccagaagtcagtactagcggcccaagatgaagtgcaatcctggttatctgccgatgtgcctgaaacttatgagtatggcaagccattcttgccaacttatcttatgaacaagctaccatgggaaatgagggtaatgcacgaatggtatatgaaggcatctaggaaaggtctcggtttcataagcgtcgccgtcccggaaggcgctttcatgagtggtcctaatgggatattttttatctctttccaagacctttacgccctctacaagctagataaaatggacgttaatctcgttgcggctttctgtcttatgcaattccacgaagctgatagaactggagcaaaggttggatacgtcgatccaacaagaatatgcaaaacacaacacaccgtagagctgagacaggactgcgagcaattggttggcaagaccccggaagaaaaggaagaatatgtgaagacattgcacaagaggaagaagctagaagtagcaacatacttggcaatagcaatgttggcgcacgccgacaaagatgtcttaatggtcccctaccagttcacagcacacaagtactaccgcaaaagaggtggaccagtacatattccatcccggaagaagttatccgtcaggactggctggccgtgctacaaacaaccaccaggaaccaacttgtgtggttattacgtgtgcgagatgctcagagtaaatgggaggtacaaaacaaccagtaaccgaatccccgaaatcccatatattgcacaacgattcaaccacactactatcttgaacgtggccgctgacctctgccgattcatccgtcgcgatgtctgcaacgcaagaggtctcttctacgacaaccagagtgaactcgcaatggacgacaaatttaaacctctcagagagtgggagaaagaacatatgcaataa

SEQ ID NO: 60864 - DNA, 3294 bp, Oryza sativa
  Clone ID: PAT_MRT4530_62352C.1
atggcgcctgcattggaaggggaactaccagcagcggcggtgtcggtggtgaaaccgcaaccagcaatacatcgggtactagaagaggctctggacttcgcacctgcattccaaaggaccatccttatattgcacatcaccacagacatcttcctcttgatcagtgtgcatggaggaaagaagaatctcgcccaactcctaatagacaaggaggaacagcccaaaccaatgatgccgatgaatatcagcagcgggaggccaggatatagtacccacaagtcgaggccagaattcgcaagtgatcttttctaccagaatataattctctctgacagaactagcttcaccttggtgcccgctaagtcgggtaatgagaaaccgatacagagaaaggatcagcattactacaccgaaaaccttcggatccggtataaggaattgattccagtattgaaagaacgggacaatgaggacttctctatgtcggacatgctggaacatatcttcatggcacggcgttatcaatgtatgcacaaggaattaccgtgccgggagcccgggacaaaagtttctgtaagattaatgaaatttcgaatggatgcaaaggtgcctaaaagatggatcggcaatagatgtacgctgaccggtggtccaaagagtttattgacggcgtgcattatttttttaagagtggccgaagctaacaagcagaagggtcttatttgttgtccatgcaataagtgtaagaatcagaaggagtattctgcatccaggactattcattttcacttgtttgagtcggggttcatgccaagctataattgttggacatcccacggagagcaaggggttgaaatggaagaagatgaagtggaagacgacaatattccagactttgctcagtacgctggatttgaaggaaatcaaacaggcgaggaggacatagatgctgattataacgacgttgcggatgatcttggtcagatgttgcaagatgccaagaaggactgcgaaagtgaaaagggggcccataaattggacaagatgttagaggaccacagaacgtcattgtacccaggttgcgagcaggggcacaacaagttggataccactctggagttcttgcaatggaaggcaaaaaatggtattagtgacaaggcatttggcgatttattgaaactcgtcaagaacattcttccggagggaaacaaattgcccgagacaacgtacgaggctaagaagatagtctgccctctaggactggaagttcagaagattcacgcatgtccaaatgattgcatcctatatcacggtgaggagtacgatagcctagaagcatgccctgtttgtaaagcactacgatacaagattagaggagatgatccaggtgaggttgacgggcagctaacgaagaagagaattcctgctaaggtgatgtggtatttccctataataccacggctaaggcgtttgttcaggaataaggggaatgctagaatgatgcgttggcacgctgaagaacgtcaacaggacgggatgctgagacaccccgcagatgcaaaccacccggtacagaagaaaggcaagcattttgaacatacggtggaccaccgtacgaagcctaaacatcgcagcgggaaaacagtgtttgctatggttaaagatcttaaagtagtgtttggaaaggggcctggcagccagcctatagaaagcgaagatggtcacgcggcgatgtggaaaaaaaactccatattttgggagttacccaactgggaattcttggacatccgccacgcaatcgacgtgatgcacctcactaagaacctttgcgtaaaccttcttggcttcctaggtgtatatggaaagtcgaaagatacactggaagcacgtaataatctgaagcatatggaacaacgcggcgaccttcacccggaaccagaggagaaaggaagccattacttgagtccagccagctacactcttggcaaggcagagaaggaaagtatgtttcaatgcttggagggcatcaaggtaccgtctggatactccacgaatataaagcgaataataaggatgaaggagaagaaattcacaaacctaaagtctcatgactatcacgtgttgatgacacagctgctaccagttataataaggggtatcctcccagacaatgtccgggcaacaataaaaaagctatgttctttcatgaacgcaatttcgcagaaggtcatcgatccggataggttagaagcccttcagaatgatgtggtgcaatgtcttgtcagctttgagttgatatttccaccttcatttttcaatataatgacgcatctgctttgtcacctagtgaacgagatcggtattctcgggcctgtgttcctacacaacatgtttcctttcgagaggtacatgggcgttctgaagaagtatgttcgtaaccgtgctcgtccagaggcaagcatcgccaaggggtatggaacagaggaggtcattgaattctacgtagaatttattgaagaccttcgcccaatcggggtacctgaatcacgccatgaagggagactacagggaaaggggactctcggaaggaaagcaataatgacgacaaggtctcgccaagctccacctcctgccagcacaagggcaacgaagaaggccaaagttgacaccaccaaaaacaaggagccgccgtacggttgcagtcaagaggagcttgacgcttatgtggcaggagaagtgaagaggcaactcaagcctcggagtcctgaaaagaagatacctatcgacccgagcgtgaagaatttcttcaagggaatgtccaccgcaaacaaggaggccttaaagcaatcggactatgaccgaacacttaggaaagcctattacaggaaatccaaaccagttcctcagcttggagaacaaccacaccaagtggtcgagccgttggtgaccggcgaagactttggcataacggatttcatttcggacaccggtctaaccatggctcagttggttggaggtgcaccaatcccgaaggcggaagtggcatacaagtttgaactcggtaaaccgcttgtcaggcctgagcagctgcagtccctaccgacacaaatgtacaaattccatgaatggtacatagaaataagcgccaatggtagagagatgttcggagcgaagatcagaaaccccgacttcttgcaaggagaagatgttctatggatccatttcaaggatgtcttcgatctgtaccatcgggacgccctcgacgtctctcttctgagcgcatggattttgtaa

SEQ ID NO: 60865 - DNA, 233 bp, Oryza sativa
  unsure (1)..(233): unsure at all n locations
  Clone ID: PAT_MRT4530_62353C.1
gacgcaaacatgtgtctttcaagtgacccaacaatagtaaacaataacccagactctaaaaagataacaaactagagcaaacgtgttcctgcaagtaacccaacactagtaaacaatagcnngnnnngnnnnnngnnntnnnnnnnnnnnncntnnnnncnctggncaaaccatgctccaagccgaagctaaacttggaacacatatcctacgctgttggataagtatatttg

SEQ ID NO: 60866 - DNA, 1602 bp, Oryza sativa
  Clone ID: PAT_MRT4530_62354C.1
atggaagaagatgaaatggaagacgagaacattccggactgggctcagtacgctggatttgaaggaaatagaacgggcgaggtggacggggatgttgacgataacgacgctgcagatgatcttggtcagatgttgcaggacgtcaagaaggactgtgaaagtgaaaatgttagtgacaagacatttggcgatttattgaaactcgtcaagaacattcttctggagggaaacaaattgcccgagacaacgtacgaggctaagaagatagtctgccctctaggactagaatttcagaagatccacgcatgtccgaacgattgtatcctatatcgtggtgaggagtacgagaacctagaagcatgccctgtttgtaaagcactacgatacaagattagacgagatgatccaggtgaagttgacaggcagccaacgaagaagataattcctgctaaggtgatgtggtatttccctatattaccatggctaaggcgtttgttcaggaacaagggacatgctagaatgatgcgttggtacgcagaagaacgtcaacaagacgggatgctgagacaccccgccgatggtgtatttgggaagtcgaaagatacactgaaagcacgtaatgatctgaagcatatggaacaacgcgacgaccttcacctggaaccaaagaagaaaggaagccattacttgagtccagccagctacactcttagcaaggcagagagggaaattataattcggggtatccttcctgacaatgttcgggcaacaataacaaagctatgtgctttcatgaacgcaatttcacataagatcattgatctggatagattagaagcccttcaaaatgatgtgatgcaatgtcttgtcagctttgagttgatatttccaccttcatttttcaatataatgacgcatctgctttgtcaccttgtcaaagagatctgtattcttggacctgtgtacctacacaacatgtttcttttcgagaggtacatgggcgttctaaagaagtatgttcataaccatgctcgtccagaggcaagcatcgccaaggggtatggaacacaggaggtcattgaattctgcatagaatttattaaagacctttgcccaatcggggtgcccgaatcacgccatgatgggagactacggggaaaggggactctcggaaggaaagcaataatgacgtgccaatgggttaggctaactagtggaggcgtaacgattgatgtcagtgggatgacaacggttgaccttaacaaggttggatactcggacgaaccttttgtccttgccaatgatgtaacacaagttttttacgtgaaggacatgtctagcaaaggaaagaaggggaaagggcccgatgagccgaagcgccacgtggttctcctaggcaaaagaaaaatcgtcggagtcgaggataagactgtcgaggattatgatcagtttgaggggcaacctcctttcgcgatgacggttgaccctagcatcctcctatcaaacgaagacattccttactcacgcagcgatcacaaggaaggaacagtagtgaggagaaagtacgtgcggttaaccgtcaccgccgatgtattgccctaa

SEQ ID NO: 60867 - DNA, 3494 bp, Oryza sativa
  Clone ID: PAT_MRT4530_62355C.1
ctattgggaattcttggacgtccgccacgcaatcgacgtgatgcacctcactaacaatctttgcgtaaaccttcttggcttcctaggtgtatatggaaagtcgaaagatacactggaagcacgtaatgatctaaagcatatggaacaacgcggtgaccttcacccagaaccaaaggagaaaggaagccattacttgagtctagccagctacactcttagcaaggcagagaaggaaagtacgtttgaatgcttggagagcatcaaggtaccgtctggatactccacgaatataaagcgaataataagcacgaaggagaagaagttcacaaacctaaagtctcatgactgtcacgtgttgatgacacagctgctaccagttgtaataaggggtatcctcccagacaatgtccgggcaataataacaaagctatgtgctttcatgaacgcaatttcgcagaaggtcatcgatcctcatagattagaagccctgcaaaatgatgtgaggtacatgggcgttctgaagaagtatgttcgtaaccgtgctcgtccagaggcaagcatcgccaaggggtatggaacagaggaggtcatcgaattctgcgtagaatttatcgaagaccttcgcccaatcgggatacctgaatcacgccatgaagggagactacggggaaaggggactctcggaaagaaagcaataatgacgttagacaacaatttattccgtaaagcccatttcacggttctgcaacaatcttcattggtggctctctacatcgaggagcacttggctctagtttgcaccaaaaacatcggtaagtccgatgcatggattacaaggcatcacattgatactttctccacatggctgcgacaacatctcatgggtaatgagacgattaaccaacaactggccttcctggcgaggggaccatctggctcgatcgcgacattccaggtatatgaaatcaatgggtacacattctacacgagggcccaagacatgaagagcacgaaccagaacagtgctgttcgtatcgatgccatgggacacgatggtacaactggcacgtattacggtgccatcgaggacatatgggaacttgactatggacctctcaaggtccctttgttccggtgccaatgggttaggttgactggtggaggcgtaacgattgatgacagtgggatgacaacggttgaccttaacaaggttggatactcggacgaaccttttgtccttgccaatgatgtaacccaagttttttacgtcaaggacatgtctagcaaagaaaaaaagggcaaagtgactgacgagccgaagcgccacgtggttctcccaggaaaaagaaaaatcgtcggattagaggacaagactgacgaggattacgatcagtttgatgggcaacccctttcacgatgacaattgaccctagcatcctcctatcaaatgaagacaccccttactcacgtagcgatcacaaggaatgaacaatatattggaacgaggagggtaacgtggagagggatgcagaggggaacgatgcggaggaggctaatggaagtcaaccctctgctggacagaagagggcacgcggacaacgaggtgccgcgaagaagatagagggtcggcacatcataactgaggtggacgaagacggccgacctagtgccccggcagaagcagccaggaattttgtacgccacagcggttgggttgtgagggacaacgtgcctgtcagcacggtgtactggcgcagaacaagggcacgcggggatgatgacagctttgtcccggactcagagaaagagatgttgtggaccacattgctcgagacgttcacgctacccgcgggtacggataacttagtgaaatagtggactctgaagaaaatggcagaacagttctagagcttcaagggagatctctacaagaaatacatcctgaagggactaacaccgaacttcgacgtattcccaaagctaagggatcattgggacgagttcgttgcttacaagacagggcaacaagggcaagagatgatggccagaaacaaggaaaatgccgccaagaagaagtaccatcaccacttggggtcaggcggatatagcgtcgcgaagccgaagtgggaggagatggaggctagcttgcttgaggggggtatcgaaccggccaccgctaaatggccggatcgatcgaagttctggtactatgctcacggtggaacgcttaacccagttgatggctcccttgtcttcagcgatcagatatgcgaggctgccagtcgactaacggacgcagtggtggcctcttctcagggcacattccgacccgacagagagaaggatgagctgagtcggatgaggagcaagagagataccgaggcgaagattgcagatcttgagtacagggtattgagctacgagctcagcatgcaagaggaggtggcaaggaaggtggatgaacgtatggccgcacatcggtcccaggatccccagccgtacattcatcctgtaatggtcagcacatcaggcaatcgtagcagctgcgcctcaacggggcaggtggcgtcgggaatggccatcccaacggacccttccgggacttaccactgcaggccgattccagcaggatactcgagggtcgaagttgagctggtggaagccgcgtacgaggacctcgagttggactacccaggaggggacggtgagacgcatctacgagacacaagccacgccatcatactatggcgcaagcggtacatcatccttcctgggcgacaagcggcgtcttgtgcaccatctcctccggctccgccatctcctcctgcaccatctcctccggttcctccgccacctccgcctccaccgtgtccgcctgcacctcccaagacaaggtcttgccaagctccaccgcctgcccgcacaagggcaacgaagaaggcgaaagtcgacgccaccaaaaacaaggagccaccatacgattgcagtcaagaggagcttgatgcttatgcggcagggaggtgaagaggcaactcaagcctcggagtactgaaaagaagatacctattgacccgagcgtgaagaacttcttcaagggaatgtccaaaacaaacaaggaggcgttacagatatcggactatgaccgaacacttcagagagcctatcacaagaagtccaaaccagtccctcagcttggagaacaaccaaaccaagaggtcgagccgttggtgaccggcgaagattttggcataacggatttcattgcagacactagtctatctgtggatcagttggttggaggcgcaccaatcccgaaggcggaagtggcatacaagtttgaactcggtaaaccgcttgtcaaacctgaacagctggagtccctaccgacacagatgtacaaattccatgaacggtacatggaaatgagctccaacagtagagagatgttcggggcgaggatcagaaaccccgacttcttgcaaggagacggggtt

SEQ ID NO: 60868 - DNA, 607 bp, Oryza sativa
  Clone ID: PAT_MRT4530_62356C.1
tcagctagtgactgtgtgctgctgaattttcttctctcgcattcctcctccttaccttgccctaggtcgagtcgacgcgacgagatttgcggcggcgatggctctcccggcgtcgagctccggcctcttccgcttcatctctccacggcgccgcccccagtccaccgacatcgccgccgccgccacctggggcgtcttcgccggcaccgccgccatctacctcgtccagccatttgactggattaagaaaactttctttgagaaacccgaaccagaggcataagtctgccaggcatatggaaggctgcaacttttgatacatttacgtttccgggatgatttctgagtgaagagaacttggatgaccctgcaaataatataaaagacagtcatgttcccttgtttgattttaatgtaggtttctcttgcatgtaaaccccaggaggggaatgatgattatattgagttatttctcatctcagcgaaacctttttcttggttttttctcatctcagcgaaacctttttcttggtttagcagtgttatataaattcgtggtcctgaaaaatattaaaaaaaaaaaaaaaaaaaaaaaaaaaaaaaaaaa

SEQ ID NO: 60869 - DNA, 1968 bp, Oryza sativa
  Clone ID: PAT_MRT4530_62357C.1
atggaagaagatgaagtggaagatgacaatattccggattttgctcagtacactggatttgacggaaatcaatcgggcgaggaggacagggatgctgatgataacgatgttgcggatgatcttggtcagatgttgcaggacgccaaggaggactgcgaaagtgaaaagggggcccataaattggacaagatgttagaggaccacagaacgtcgttgtacccaggttgtgatgacaagacatttggcgatttattgaaactcgtcaagaacattcttccggagggaaacaaattgcccgagacaacgtacgaggctaagaagatagtttgccctctaggactggaagttcagaagattcacgcatgtccgaatgattgtatcctatatcgcggtgaggagtacgagaacctagaagcatgccatgtttgtaaagcactacgatacaagattagacgagatgatctaggtgaggttgacaggcagctaacgaagaagagaattcctgctaaggtgatgtggtatttccctataataccacggctaaggcgttcgttcaggaacaaggggaatgttagaatgatgcgttggcacgctgaagaacgtcaacaggacgggatgctgagacaccccgccgatggccccaagcaacctggtaacgacatcgatgtgttcctaggaccactggtcgaaaatcttaaactgttgtggaagaaggaaggtgtccccatgtgggatgaggacaaacaggaggagtttaacctacgagcgctgctgttcgtaaccatcaacgattggcctgcacttagcaacctatccgggcagtccaacaaggggtacaaggcttgcactcactgtatggatgaaacagaaagtacgtatcttaagcactgtgtgtatggaaagtcgaaagatacactggaagcacgtaatgatctgaagcatatggaacaacgcggcaaccttcacccggaaccaaaggacaaaggcagccattacttgagtccagccagctacactcttagcaaggcagagaaggaaattatgtttgaatgcttgaagagcatcaagctttgtcaccttgtcaaagagatcggtattctcggggctgtgtacctacacaacatgtttcctttcgagaggtacatgggtgttctgaagaagtatgttcgtaaccgggctcgtccagaggcaagcatcgccaaggggtatgtaacagaggaggtcattgaattctgcgtagaatttattgaagaccttcgcccaatcggggtacctgaatcacgccatgaagggagactacggggaaaggggactctcggaaggaaagcaataatgacggtagacaactatttattccgtaaagcccatttcacggttctgcaacaatcttcattggtggctccttacatcaaggagcacttggctctagttcgcgccagaaacatcaacatgaagagcacgaaccagaacagtgctgttcgtatcgatgccatgggacacgatggtacaactggcacgtattacggtgccatcgaggacatatgggaacttgactatgggcctctcaaggtccctcagttccggtgccaatgggttaggttgactggtgaaggcgtaacgattgatgacagtggaatgacaacggttgaccttaacaatgttggatactcggacgaaccttttgtccttgccaatgatgtaactcaagttttttacgtgaaggacatgtctagcaaaggaaagaagggcaaatggcctgacgagccgaagcgccacgtggttctcccaggcaaaagaaaaatcgtcggaatagaggacaagactgacgaggattacgatcagtttgatgggcaaccccctttcacaatgacgattgactctagcatcctcctatcaaatgaagacaccccttactcatgtagcgatcacaaggaaggaacaataatgagaagaaagttttgtcattaa

SEQ ID NO: 60870 - DNA, 385 bp, Oryza sativa
  Clone ID: PAT_MRT4530_62358C.1
gactttttgactttaaagatgtgtgggtatgaaaggtttgatgtgatggaaaaggtttgaactagtttgtttttgggttacaaatattccgacccaaactggagaatatttgtcatatctgtggctatattgatagcctttagaggaatacgccacaccttttaactcagatgtcatcacacatggaagactacactcaccttcatcatgtgccctttctcctgtctatctttgcctaacgttttttcccccctttatctactatttttgtctaatgagaagcaacaacatacctctagtctaatgcctgcatgttaatagtctcaacctgctcggctagagggcatgtgagaactacattgccaaccatggatggacagcaagg

SEQ ID NO: 60871 - DNA, 2982 bp, Oryza sativa
  Clone ID: PAT_MRT4530_62359C.1
atggcgaaggcggcgaacacgatcgcggcgaggaaggccgagaaaggaatcgaaggaatgggtggccaccatagacgtgatggttgggaaccatcgtgcccgttgtcaaggagcgccgagaaggcgagggtttatcccaagtcaaactttttctctaagatggatcggcaatggatgtacgctgaccggcggtccaaagagtttattgacggcgtgcattattttttgagagtggccgaagctaacaggcaaaagggttttacttgtttttcatgcaataagtgtaagaatcagaaggagtattctgcatccaggactattcatttccacttgtttgagtcggggttcatgccaaactataattgttggacatcccacggagagcaaggcgttgaaatggaagaagatgaagtggaagacgacaatattccggactttgctcagtacgctggatttgaaggaaatcaaacgggcgaggaggaaagggatgctgatggtaacaatgttgcggatgatcttggtcagatgttgcaggacgccaaggaggattgcgaaagtgaaaagggggcccataaattggacaagatgttagaggaccacataacatcgttgtacccaggttgcgagcaggggcacaaaaagttggataccactctggagttcttgcaatggaaagcaaaaaatggtgttagtgacaaggcatttggtaatttattgaaactcgtcaagaacattcttccggagggaaacaagttgcccaagacaacgtacgaggctaagaagatagtctgtcctctagcactggaagttcagaagattcacgcatgtccaaatgattgtatcctatatcgtggtgaggagtacgagaacctagaagcatgccctgtttgcaaagcactacgatacaagattagacgagatgatccaggagaagttgacgggcagctaacgaagaagagaattcctgctaaggtgatgtggtatttccctataataccaaggctaaggcgtttgttcaggaacaaggggaatgctagaatgatgcgatggcacgctgaagagcgtcaacaggacgggatgctgagacaccccgccgatggcccaaagcaacctggtaacgacatcgatgtgtacctaagaccactggtcgaagatcttaaactgttgtggaagaaggaaggtgtccctgtgtgggatgaggacaaacaggaggagtttaacctacgagcgctgctgttcataaccatcaacgattggcctgcacttagcaacctatccgggcagtccaacaaggggtacaaagcttgcactcactgtatggatgaaacagaaagtacgtatcttaagcactgtaggaaggttgtgtacatgggttatcgtcgattccttgcagcaaaccacccggtacggaagaaaggcaagcactttgaacataaggaggaccactgtacaaagcctaaacatcgcagcgggaaaacagtgtttgctatggttaaagatcttaaagtagtgtttggaaaggggcctggtgtatatggaaagtcgaaagatacactggaagcacgtaatgatctgaagcatatggaacaacgcggtgaccttcacccggaaccaaaggagaaaggaagccattacttgagtccagccagctacactcttagcaaggcagagaagaaaagtatgtttgaatgcttggagagcatcaaggtaccgtctggatactccacgaatataaagcgaataataagcacgaaggagaagaagttcacaaatctaaagtctcatgactgtcacgtgttgatgacacagctgctaccagttgtaataaggggtatcctcccagacaatgtccgggcaacaataacaaagctatgtgctttcatgaacgcaatttcgcagaaggtcatcgatcctgatagattaaaagccctgcagaatgatgtggtgcaatgtcttgtcagctttgagttgatatttccaccttcatttttcaatataatgacgcatctgctttgtcaccttgtcaaagagatcggtattctcggtcctttgtacctacacaacatgtttcctttcgagaggtacatgggcgttctgaagaagtatgttcgtaaccgtgctagtccagaggcaagcatcgctaaggggtatggaacagaggaggtcattgaattctgcgtagaatttattgaagaccttcgcccaatcggggtacctgaatcacgccatgaagggagactacggggaaaggggactctcggaaggaaagcaataatgacggtagacaacaatttattccgtaaagcccatttcacggttctgcaacaatcttcattggtggctccttacatcgaggagcacttggctctagttcgcgcaagaaacatcggtaagtctgatgcatggattactaggcatcacattgatactttctccacgtggctgcgacaacatctcatgggtaacgagacgattaaccaacaactggccttcctggcgaggagaccatctggctcgatcgcgacattccagggatatgaaatcaatgggtacacattctacacgagggcccaagacatgaagagcacgaaccagaacagtgctgttcgtatcgatgccatgggacacgatggtacaactggcacgtattacagtgccatcgaggatatatgggaacttgactatggacctctcaaggtccctctgttccggtgccaatgggttaggttggctggtggaggcgtaacgattgatgacggtgggatgacaacagttgaccttaacaaggttggatactcggacgaaccttttgtccttgccaatgatgtaacccaagttttttacgtcaaggacatgtctagcaaaggaaaaaagggcaaagggcctgacgagccgaagcgccacgtggttctcccaggaaaaagaaaaatcgtcggagtagaggacaagactgacgaggattacgatcagtttgatgggtaa

SEQ ID NO: 60872 - DNA, 1484 bp, Oryza sativa
  Clone ID: PAT_MRT4530_6235C.1
tgatccaatccaaagccacccacttcttctttatatacctcccgcgccatctctccttctcccagctcgaatcggaggaccagctccgccgccgacgattcttgacttgccttcttctccggcggcgacgattcttggcttctttggttgattggtcgggcggagcagcggtcgaacagcttgcgggcatcaacaggcgaggcatggcgagggggctgtttgcgtgctttgggaggggaggggaggaggcggaggaggaagcagggaagaggccggcgctgcggcggcggaggacggtgaacctcaggtcgctgtcgctggaggacctgtcgcggacgctggcgaagacgaacctgcacgccttcaccctggacgagctcaaggcggcgaccaagaacttctccaccagcaacttcctcggcgagggcgggttcgggccggtgtacaagggcttcgtcgacggcgagctccgccccggcgccctcgagtcgcagcacgtcgccgtcaagtacctcgacagcgacggcgtccagggccaccgcgagtggctggctgaggtggtgtatctggggatgctgagccatcctcatctggtgaagctggtaggattctgcaaccaagatgatcacaggatgctggtctacgagtacatgccaagaggcagcctcgagaaccacctgttcaagaatcttcttgcttcgttgccatggtcgacgcggctgaagatcgccgtcggcgcggcgaaggggctcgccttcctgcacgaggccgagacgccggtgatctaccgcgacttcaaggcctccaacattcttctcgacaaggattacacggcgaagctgtcggactttgggctggcgaaggaggggccgcagggggacgcgacgcacgtgacgacgcgggtgatgggcacgcacgggtacgcggcgccggagtacatcctgacgggccacctgacggcgaggagcgacgtgtacagcttcggcgtcgttctgctggagctgctcaccggccgccgctccgtcgacaagcggcggcgcggccgggagcagaacctcgtggactgggcgcgcccctacctccgccgcgccgaccggctgcaccgcatcatggaccccagcctcgagctgcagtactcggcgcgcgccgcgcacgccgccgcgaaggtggcgcaccagtgcctgcagagcgtgcccaagtcgcgcccctgcatgcgcgacgtcgtcgacgcgctcgagccgctgctcgccgtcgacgacgacgtgcccatgggcccgttcgtgttcacggtcggcggcgaggaggcggcggcggcggcggccgggagtagcgccgccggcgacgccggcgacgacgagccggcgagggggagccggcggggaaagaagcacgtcacgtcggccgtgcacgcggagagcccgctgcgcgacggccggtacgcgagcagggtgaaacgaccggagagcccaccgagtgtgatctga

SEQ ID NO: 60873 - DNA, 1990 bp, Oryza sativa
  Clone ID: PAT_MRT4530_62360C.1
atggaagaagatgaagtggaagacgacaatattccggactttactcagtacgctggatttgaaggaaatcaaacgagcgaggacgaaagggatgctgatggtaacgatgttgcggatgatcttagtcagatgttgcaggacgtcaaggaggactgcgaaagtgaaaagggggcccataaattggacaagatgttagaggaccacagaactgacaaggcatttggtgatttattgaaactcgtcaagaaaattcttccggagggaaacaaattgcccgagactacgtacgaggttaagaagatagtttgccctctaggactggaagttcagaagattcacgcatgtccaaatgattgtatcctatatcgtggtgaggatgtttcccctaaaaaaaatgattggcctgcacttagcaacctattcgggcagtccaacaaggggtacaaggcttgcactcactgtatggatgaaacagaaagtacgtatcttaagcactgtcagaaggttgtgtacatgggtcatcgtggattccttgtagcaaaccacccagtacggaagaaaggcaagaactttgaacatacggcggaccaccgtacgaagccaaaacatcgcagcggtaaaacagtctttgctatggtaaaagatcttaaagtagtgtttggaaaggggcctggtagccagcctatagagagcgaagatggtgtatatggaaagtcgaaagatacactggaagcacgtaatgatctgaagcatatggaacaatgcgacaaccttcacctggaaccgaatgagaaaggaagccattacttgaatccagccagctacactcttagcaaggcagagaaggacaatatgtttgaatgctttgagagcatcaagctgctactagttgtaataaggggtatcctcccagacaatgtcagggcaacaataacaaagctatgtgctttcatgaacgcaatttcacagaaggccatcgatccggatagattagaagcccctcagaatgatgtggtgcaatgtcttgtcagctttgagttgatatttccaccttcattttttaatataatgacgcatctgctttgtcaccttgtcaaagagatcggtattctcggccctgtgtacctacacaacatgtttcctttcgagaggtacatgggcgttctgaagaaatatgttcgtaaccgtgctcgtccagaggcaagcatcgccaaggggtatggaacagaggaggtcattgaattttgcgtagaatttattgaagacatttgcccaatcggggtacctgaatcacgccatgaagggagactacggggaaagggtactctcggaaggaaagcaataatgacggtagacaacaatttattttgtaaagcccatttcatggttctacaacaatcttcattggtggcttcttacatcgaggagcacttggctctagttcgtgccagaaacatctcccaagacatgaagagcacgaaccagaacagtgttgttcgtatcgatgccatgggacacgatggtacaactggcacgtattacggtgccatcgagtacatatgggaacttgactatggacctctcaaggtccctctgttccggtgccaatgggttaggctgactggtggaggcgtaacgattgatgacagtgggatgacaacggttgaccttaacaaggttggatactcggacgaaccttttgtccctgccaatgatgtaacgcatgttttttacatcaaggacatgtctagcaaaggaaaaaagggcaaagggcctgacgagccgaagcgccacgtggttctcccaggaaaaagaaaaatcgtcagagtagaggacaagactgacgaggattacgatcagtttgatgggcaaccccctttcacagtgacgattgaccctagcatcctcctatcaaatgaagacaccccttactcacgtagcgatcacaaggaaggaacaatagtgaggagaatgtacgtgcggtcagaaa

SEQ ID NO: 60874 - DNA, 1320 bp, Oryza sativa
  Clone ID: PAT_MRT4530_62361C.1
atggtcacgcggcgatgtggaaaaagaactatatattttgggagttaccctattgggaattcttggacgtccttcacgaatataaagcgaataataagcacgaaggagaagaagttcacaaacctaaagtctcatgactgtcacgtgtggatgacacaactgctaccagttataatttggggtatccttccagacaatgtccgggcaacaataacaaagcaatgtgctttcatgaacgcaatttcacagaaggcaagcatcgccaaggggtatggaacagaggaggtcattgaattctgcgtagaatttatcgaagaccttcgcccaatcggggtgcctgaatcacgccatgaagggagactatggggaaaggggactctcggaaggaacgcagcaatgacggtagacaacaatttattccgtaaagcccatttcacggttctgcaacaatcttcattggtggctccttacatcgaggagcacttggctctagttcccgccagaaacatcggtaagtctgatgcatggattatacggcatcacattgatacattgcccgtgtggctgcgacaacatctcatgggtaacgagacgattagccaacaacttgcctacctggcgaggggaccatctggcttgatagcgacattccaaggatatgagataaatgggtacacattctacacgagaaaccaagacataaagagcacgaaccagaacagtgctgttcgtatcgatgccatgggacacgatggtacaactgacacgtattacggtgccatcgaggacatatgggaacttgtctatggacctctcaaggacatgtctagcaaaggaaagaagggcaaagggcctgatgagccgaagtgccacgtggttctcccaggcaaaagaaaaatcatcagagttgaggacaagactgatgaagattatgatcagtttgatgggcaaccccctttcacggtgacggttgaccctagcatcctcctatcaaacgaagacaccccttactcacgtagcgatcataaggaaggaacaatatgtgcaaagcatgaccagggaactaacctgtgcggctactacgtatgcgagtatgcccacttcctatcaacccaaatctacaccacacaagagctcgattgtattcacatgagggacaatctcccacacaaggattctatcacggctattcaagaacaactgatgagattcatcaacgaagaagtccttaatcccgagggtgaattctactacgacggatcgacaatttataacgtcggtctttcttcttttgacataacgccggcgtcgaagtcatag

SEQ ID NO: 60875 - DNA, 285 bp, Oryza sativa
  Clone ID: PAT_MRT4530_62362C.1
atggggtcgacgagggtggacgaggtgtcgacgagctcgccggcggccgctggcgcggacggagtcggcgactgcttggaccgcctgggcgagagcggcgtcatgtgcagtcgggggaggcggaggcgacgacatggcgtcgagcacacaacggcgacgctggaggcgcagaaccttccggtccatatccagctctaccagtttatagaaacacacccgggctcttcttggagtgggacggtggccgccgtcatggctgatgccatatctccgcgggagtactag

SEQ ID NO: 60876 - DNA, 243 bp, Oryza sativa
  Clone ID: PAT_MRT4530_62363C.1
atggccatgcacgaacctagccggccaccaccatcaccatccacggcaacgatacgctctggcggcacgcaggcagagcgttgcgtacgcgggtgggagagcgagcgaacgatcgatctccggcagcaagaagatggaatggcaaagcttcaatatgatgcccaggacggcggcggtggcgatggcgagttggcgacagtggtggcggcactacgcgtctaccgaactgactctggagtctag

SEQ ID NO: 60877 - DNA, 302 bp, Oryza sativa
  Clone ID: PAT_MRT4530_62364C.1
atggatgaggacaacgacaccgtggcggttgatggcaatggccggtgagcggtggtgagcggcgcttgaggcgaaggcactgcttcaggcctcgctgccgcatcatctgctttagatcaatgatgaagagatgtctggcccatggcgaacgaggtggacgtcgtgggaacgtttatgacagtgaggcggtgacaacagcaacgctgatctccatctttggctccgtcgccggatctggctcctaccgaggtcgcagcgaacttcttccgggatggaatatgtactggtccacctcttttgcg

SEQ ID NO: 60878 - DNA, 344 bp, Oryza sativa
  unsure (1)..(344): unsure at all n locations
  Clone ID: PAT_MRT4530_62365C.1
aaatagttaaattgcccctcacaacaccacctgtcgctgattccctgccgcatcttctcatcgccctcacgcccggccggccactccgccccgcgccgtctgtcgccgaagcccgtcaccatcgcgtcaccatcgcgtccgaccaccggcggtcaccaacccccaccccagcgactactatgccgtccacaattcgtcgctgccgcccgtaacctgcgggccgnggccatatagccgcgcaatcccccatccctatattnccgtngcgctgnctcgcatcttcagatcaacacgaccatttcttcagatcagagcgaagagttgnttcccattcttgggttcct

SEQ ID NO: 60879 - DNA, 817 bp, Oryza sativa
  unsure (1)..(817): unsure at all n locations
  Clone ID: PAT_MRT4530_62366C.1
cgggctacggcgccgagctgactctagcgagctggcaaaagccttattaccagcagttctgactaaactgatggctgccaaggaaaaacatctggaggtcctggttggccttgcttcgcagatatgcaacgccttacctgccgtgtgtgcaccattaatgctgggatccgatcccaacctactaacaccagcactcgttcagatgctagtcgatacactcaacgcccgcgagaagccgatccctgaatgccccaggatgagaagagcaatagtcgagcttgcaatttccatagtggaaatgtgtcctcccaaagcagctatcttcagggagaaggggatggtggaggcgctgtctaaggtggagaggacaccgtccagagtggagaattactggctctgcgatgaggggttggttttggagcgcggattgcccatgcctgatctagtcgccaaggcaaaacggctaattgactctgcgtctgcagttctccaggagatgagcgtggccaacgtgcatgaatgaaccatatgtgaatntttattattttatgtttggatcgaactttggtggggactggatgcggagagtttacntcttgactttaggtcacggacaagttcagggatagacgggagagtacgttttccccgctattttgagaatgagctcaaccacgtttttcccggctattctgagaatgagcttcaacccaaaatgcactgattagtaaatggtaaaaaaaanaannnannnnnnnnnntnnnnnnnnnnganannncctcgggggggggccgggcccagtcccccttattgaga

SEQ ID NO: 60880 - DNA, 2032 bp, Oryza sativa
  Clone ID: PAT_MRT4530_62367C.1
agccaccaaccttcaataccataactgagaagaccccttgctgacaacatgcctattgggctgcaagtcaacttaggagacggttactccgacttgaaaaccagcctaattacaatggcgcaggctagctcgttatgcggcaagcctgatgagcttgccagtgttcacctgcaacagttactcgagatctgtagcacttacactatgaagggagtcagcccagacgctatcagactccgcttgtttccgttctcgcttcttgggagagcgaaacaatggttctatgtcagctgtgcaacgggtggacatgtggaacaaatgctctacaacattcctctcaaaattcttcctgatagaagccctggaaaggctgcaagaatatgacgctgtatgccctcgtcacgggatggacgagtggctcatctacaaagcttctataatggactaactccctcatccctggctcacctggacactgctgctggaggagccttcttctccaagacggtcagagacgccatcaacttaattgagaagatggtctcgaacatgggttggagagaggaacgactccaaacccgtcaacgcggcatgcataccgtcaagtagacggaaatgctagccgccaagttggatcttctaatgaaatgactggatgatccggagaagaacaaacctcaaggcaccgttaaggctttggactcacacattacgtgtgaagtctgtggaacgcgggtcattccggaacaaactatcccgggacccatgaagagtcaatgttcatgaacaacaacggataccgtccgcaagtaggacaagggtggtattagctctacccgttctaccaaggaggtgacaacaacgttaacttcaataaccagccctccttatagtaccttgtttttgctcaagctaaaacaatagatgctttaagcaaaaagctagctgcaaatgataagttagctgctctcttccctgctaatgagtctgggaggattctggggcaacccaaaccctctctagaaaatgtgaaggcgatcactacgaggggaggaaaatccactcgggatccaccgtattctaacattgcaggaacaaggaggaatgacaaggaggcattcccatctaacactattaggaataagaaaactgcccaacaagaaaaggtagcaccgcaagattattgcgacaccaacttgctaccattcgctcattttgttgaaacaattcagaagatccatgttaaggtaccactcttggatgcgatgcaagtacccatgtacgctcactacctcaaggatattctaagcaacaagaggccactgccgaacacggagatggtgaaactcatggagcagtgtagcaatgctatactccatcgactactagaaaagaagaaagatctggggtgtcccgcaatcacttgcacaattgggatacaacacttcgatcaagccctctgcgacctttgagcaagcgtcagcgttatgcccaataaaatctttgactggctcaattttacggtgttggcaccaacactgatgcggctccagcaagccgactcctcggtccactacccatctggaatcgccgtggatgtgccagtcaagatctggaatttcttcatcccggtagatttcgtggtgctgaacatggattcagacaaggagacaccgctcattctggggcgtccgtttcttagcacgtagaagctaacattgatgttggggctgggagtatccagctttgcatcaacgggaaagaagagtagtttgagttcaggctgaggacggagctgtgctccgtggtgaagatcaaatatgggcaaaatccccataatatttaagaggtcgaagtgaagctgcctaagatggacagcctcattgcctttatgaagaacttcctccggaggcgggcgtcgctgcgtcgcccccgtcctaggagtgcacctggaaagctaggtgcgcaggctaaaaagcctatgacaccggctgcgaagaagccgcaggccacacctaagacaaaaaaggtg

SEQ ID NO: 60881 - DNA, 540 bp, Oryza sativa
  Clone ID: PAT_MRT4530_62368C.1
caacctccttcgaaagttcaaattacggcggtagaccacctacatcagtatggccacctgtggaacatgatacaaacgagtgcgcctcactgactgaacaaagggactccattacctagaagccaacgactagtggaatctactcggcctgcaaatccgcatatagattacaattcatcggggcagcaagaactatatacattagagcatctggaaatgttgagccccacctaaatacaagttcttctcttggctaatagttcaaaacagagtttggatagcagatcgactacaaaagagggggtgggcaaaccagctcctctatcctctttgccgcacttcggctgattcagctttacaccttctagcaaagtgtagaccatccaaaagcatctgggtggaggtgcaaagatgggaaaaaacatatctcaaactgtaataatgggaggattgcacatcgatggaggacttgtgatacaaaattacgcatgcggcccacagcccgaagaaagccttgaaatcagctttgggccgggttag

SEQ ID NO: 60882 - DNA, 363 bp, Oryza sativa
  Clone ID: PAT_MRT4530_62369C.1
atggggaagaagcaagacccggaggtgggaaagaagaaggacccggcggcggctacggcatggcgcggaggagcggcggcagcggggaggagctcctgccaggacgcggggaggaggaggagcgagcgaggaggagaggtgcggtcttcggggctgcgggtggatgaggagcaatgtcttcgcgcgtgcaatcctcgggtgccaaatcgtgaggtggaaaaagttgtgcgcggatggacggctcagattaatccggactaccacgctgccgtgcgtgccgcttccttctcgcccctcgttgcaccgccgccactcttgagaggccaagacgccgactccttctccgcccgccgtctcttgtga

SEQ ID NO: 60883 - DNA, 621 bp, Oryza sativa
  Clone ID: PAT_MRT4530_6236C.1
atggcggcgaggcgagtcgtcagcaccctcactacgctgcgctgcgccacccacttctcgtctgacgaatctgccgtcatcggttgggattgggatttggtagtgcgattgttggtgttcgtttatgttcagggtgtgccatttcttcagtccttcgatacatggaagttcataaggcgattggagccggtgatcatttgcttggggttttacgtgaataagatgggccaatgtgctttggataacgcccttcagactcagactcttcagtggtctcttgtcagaatgaagatctgttttttccccagcaaaccaacacctaaatggtgctgtgtgccaactgccgtaaggctcatccagtgctcgtcttttttgttacacacactatttcatggtcaacaaaaaccacaacaacaaccagctctcttgcagacgttgttcccagagaagattattttggctcttcttctacataggagtagtcaaaagctatttgtcatttctctggcttattcacagaaagcattcttccaactactgctgcaatgctgctgctactccactacaaacaaaactagggaaaaaagaagcaaggatgcatcatcagattgtgtgccatga

SEQ ID NO: 60884 - DNA, 408 bp, Oryza sativa
  Clone ID: PAT_MRT4530_62370C.1
cctgaagcacaccacaagtaccatgagtggaattacgaccttcatgactgtggactggagtggcatacatggatataaacactcttacatggagacacccgacttgtctgggcaaatgaaacaggtgaccttcaaaatactgaccatgatcgaagatataagctgaacccacgttacctctgattgcgcagcacatatggtgacgatggagaggcacctaacacgccaactatgcaatcacaacaaggtatatcctgcaaccaactataccagatgctcatgcacccctgatgatcaatttgttgacatacgccattgtacccggcgaatggacaaagggacggttgttcggtggccacacaagacgttccacaaagagccgccttgacccgatggaattgaacatgt

SEQ ID NO: 60885 - DNA, 273 bp, Oryza sativa
  Clone ID: PAT_MRT4530_62371C.1
atgcaggccaaggccggtggttcatgcttcacacttgctaccagattagctttggctaaccttgattttaacatcttactgggagatgagataaagctggatgatccggatggtcctgaccctgacagaaccgctgggacagtgtctctgcatcctactccagtcctcctccagactccagagcggcttcgtatcgcatcgattgcgccacatggagaggcatggagggctcgagcacgcagagctcatggtcaacgcggtgtgagcaggtag

SEQ ID NO: 60886 - DNA, 1514 bp, Oryza sativa
  unsure (1)..(1514): unsure at all n locations
  Clone ID: PAT_MRT4530_62372C.1
gaaacatgagtaggtaacagatagtgacannnnnnnnnnnnnnnnnnnnnnnnnnnnnnnnnnnnnnnnnnnnnnnnnnnnnnnnnnnnnnnnnnnnnnnnnnnnnnnnnnnnnaatgctacttcgaaatataaatcaatcaatgggcttgtgcaacggaactaggcttttgatagttcaactcggtgagcatcttctacaatgtgtcatattaactggctctaacattggcgataaaatatacattcctagaattgcactatgcactacgaatgtgaaatggccatttacattgcagaaaagacaattccctgttcgagtttgctactccatgactatcaataaaagccaaggccaaacacttgacaggggtaatagcatccatgcacatatctttcctcctcttacggaaaagtacaagcctctgcttacagaaggaaaagtctattacttacactcatacactgtcaagtatggaaataggttatacaggccagttcccaatgaaatgatgatcctatttactacttggactgaaattgaggaatgcattggtggccctgctggtttccctactattgtgtactccttaacatcttacaatgatgttccaaatctggttggcaatgttgatcgctttgttgatgttgtgggtgtcattactgagataactacaccgacaatgctacgtcccaagtcaagaaaagctgacagcttaaaaaaggacagttcaaatatgtgatgccaacatagggcatttaatttttttaacatgcctcccaccttttttttatgtttacacaaatagcaactctattttaaatgtcgctctttggggtgaacgagcactagcctttcaagctgaggatatatacaatgctggtaaaaaggaaccccagattgttctctttgttgggacacttgtcaaggactacaccaatgtaggcttggcgctgtctggatgttctgcatgcaagtggtatattaatatcgatatacctgagatagctgaactaaaaaagaagttagcaaagccatatggatacacgtacaagtgcggcagctgttcttggattggaatggcaacaccaagaacggctcaacgcctcgtgcggaagccaattgaagctttgattgacaaaataccagaaggttctaacttcatcccagatgagataacatgcttgcttgagaaacaattcgtctggaacgtcatcatcacagagagctcacttagaaactgcgaggtttcattccaagtgaacatcataatctcaggggatacttctggacagcctcttctacttatgtccccaacatcttcttagacttcatcagctatgatgtcatctggatcaagcagtgctttgttgtcaccaacaaaagtaattgaggttggttgttcttccccaccatccattgcaacagcttctccatctgtggcaattagcacacccaagaagcaggctttacagtcctcaacacctcacacgccaaccagcaagttctcttgt

SEQ ID NO: 60887 - DNA, 3313 bp, Oryza sativa
  Clone ID: PAT_MRT4530_62373C.1
atggtgtggaagagctggggcggcgtcgtgtttgcggttgcggcggcggcggcggcgctcctgtgctcctccgatgctgccgatgacgtggtctccgtcagcttctccaagacccctccccgcgtctccaggtcggcgtcggccgtcttcaccttccaggtcctgcacaccaatggatcaggcccgtgccaggattgcctcatcacctgcaaggaaggaggtggacggggagagggcgtgggagtgcggaagaaacagcagcagcagcaacgggacagcggtggtgagtacagtactcgtacgtacaactccagtaatgtggttaacaggcgggaaccttatagtagtagaaatgaaaatggtttggatgcagacacggttgctccgacggcgtccgtgaaggcggaggcggggttcacgagcggatccaacgtgtcggtgctcgtctccttctccgagccctgccccggcggaggcggattcacctgcaacgccacctactgccatctgagcgtgtacggtcccgggcgcgtggatccgtcgagtcttcaggtcctccgccctgccctgcaatactccgtccacgtcaccatcccgccggagttgctctatggccgcctcattctcgtcatggccaagggcttctgcaccgatgctgccggccaccacttcatcagaaccgccaactctaccttcaccctgcgcttcgacagacggagcgactcgatgaacatcggcagcagcatccctgagaagctgcttcagatcgagggcgccaccagggtggtggaagccaccaacgacgacaaggacctcagggtatacctctccttcgctgaacccgtcatgaattcttcctcccaaatcctcgccgctctcaccgccaccgatgccattctcacgccaaccaaccgaagcacgctcgggaatcgccgctttggatacctcgttaagaggacatccaacaccgccgttgtcactgtttcctgtgacgggaattccataatcagcagacaaggaactcctgtttcttcttcagagccatacacttttctttacggttacttccatgaagctagtaagagcatatacacagcgcagatacaggcggttgataatctggtttcggtccacgtcgccgagaactctgctcaggacgttgcaggaaataccaacttaccgtcagatcgtctggaagtgaggcattattctgttcctgcatcatcatcatcgatcgcgatcgtgacgacggtaatttttacagcaaccgcagcattcgccacgctgctgactgtttcaacatcgtcgctactggcatcaggtgtcatccagaggccgccttcttacctcgtatccgagccatcacgaaatctcttggtattcgcgctgtcgcgatggctgtcgataaatctgccggtggagtactacgagctgagcaaggggctggagtggagcatcccttacatgcgcctcccatgggaaggcccctctgccgatcctttcgtcggctactccaccatgcccgccatcgcctactccgagatgctcgaccgcaccgctctcgccgccgacgtcctccgccgccctcctgcagctccaggagttgcaatggccatgccgtcgacgtcgccattggacggcaagcctctcaccgccatggagtaccggtatctgttcgagaaccaggacatgaagcccgaggcgcagatcatcatgaagctgcaggatctggacggatggaagtacttcttcaggaacatcttctggctggccgtcatcgctgccgccttcctgctgctgcacgccaccctcctcctctacctcaagctgcgccacaggcacagccacacacacgtcggtgcgctcgtgttccccaggctggagctgatgctcgtcatcctcgccatgccctgcgtgtcccaggcgtcggcggcgctgatccgaggcggcacaacggcggggctggccgtcgggatcgtgctgacgggggtgctaacggcgttcctggtagcgctgctgctgttcctgtcgctgggcgtcaccacggggaggctgctgcagtacaaggaggtgcaccaggaggggcgggagtaccactggtaccaggagattgttcgccggacgctgggacccggcaagcgtggacagtggacgtggaaggaccccgcccgcaccgcctgcctcgtcaagctcggcccgctcttcgaggacctgcgcggcccgcccaagtacatgctctcgcagatcgccggcggcagcggcggcaagcgcgcggcggagcggatcatcgtgtccgacgacgagaacgaggacgccgaggcgccgttcctgcagaagctgttcggcatactgcggatctactacacgttcctggagtcggtgaagcgggtggcgctggggatcgtggcgggcgcgcacgcgtcgtcggaccactcgtcgcgggcgcacgccgtggtggtgctcgccatcgcctccttccagctcttcttcatggtgctcaagaagcccttcatcaagaagcgggtgcagctggtggagatcgtggcggtggcaagcgaggtgttggtgttcgccgcatgccttcggctggtggacagcgggggcagcgccgtggcggaggggagcggggtagggctggccatgctgacggtgttcgcggtggcgttggcggcgcaggtgtgcaacgagtggaacgcgctgtaccggcaggtgcggctgctgagctcggacaggaggtcgttcgtggagggcgcgaaggcggcgtgggtggggctgctgctgctggtgctgccgtcgtcggcgcttggagagcagctggagaagatgaagaagcagcaggagcagccggaggcagtggcactgggtggtggtggtggtggcacggagaggtcgtggctggggcagctgagggagatggccaaggcgagcttcagcaaggagggacagggaggggaggcggaggcgtcggggagcagagcaaagggtgggagccggagcatgtcgtcggtggcgtcgtcgtcggactccaaggcgaagggacccgagaactcgcattcgcagtggagctccaagtccaagggactctacaaggatcttgaggccatcttctccaacaggtagcagatgggtacggcagcagctacaatatatactatgttcttcgtgtatgtatatgtactagtatagcaatcaatcattcaatgtatgcaagacgatcaatccagcgatgaagctggtgatgtccctcttcttcccctgtccactacagagcaaccagagtgcacaacttcaccttaaaaaaaaaaaaaaaaaa

SEQ ID NO: 60888 - DNA, 380 bp, Oryza sativa
  Clone ID: PAT_MRT4530_62374C.1
aattaaaaagggggtttttttttaattttttttgacataagttttaaactgccccccatgaggagccctgattttttttttaaatttgaaccctttttttttttaaaactttttcaaaaacccccccaaggggggtaatggtcttggggcccccttatcccctgggggaaatcccttttttaaagggccctttaaaacccaacaaattttggttttgacccaatttcccttcaaagtaaaaacccccaacctgctggattttaactttttgccttttgccctaaaaaattttaatgtcctaataggaaaatttttgccccaccaacccaagtttttgccaaatttggtttttttttatttaaaaccccttttttttcaaa

SEQ ID NO: 60889 - DNA, 213 bp, Oryza sativa
  Clone ID: PAT_MRT4530_62375C.1
agggcggcggccaacctggcccatgcgccaccgccaccggtgcccaacctggcccgtgcggtgggggcaccgccggggaagcgaatcgaggtggtgagggagcgggagaacacacttctcttgttcggccgggccgccacgcacgccgccgtcgccttcgttgagttcaacgtccatcagtatggggatcatcggtgctaggatatacgcgag

SEQ ID NO: 60890 - DNA, 291 bp, Oryza sativa
  unsure (1)..(291): unsure at all n locations
  Clone ID: PAT_MRT4530_62376C.1
agcaatctgtataatatgctatgattatcaattatcatcaccactaaaaaaaaaaaaaaagaaagccaggtaataaactgatgtggaataaaggccaaggcaccctttctaaaagatacgccacgcgcgcgccacgacggcccgctcttntctctgctctcggcaccggtgaaaactatactgtggccgcctgtatacagcagagcgagagggcagtccccgtcgttcccctggtcgcgccgctagcagcacatccccgttacggcagttgggataatatctaataggcct

SEQ ID NO: 60891 - DNA, 108 bp, Oryza sativa
  Clone ID: PAT_MRT4530_62377C.1
atggccgacgaggtgctctgtgaacgccctcaaaatctcagccaaaaagcacattctcgccagggcgaagctaagtacatcctagggagttcctgggcactcggctag

SEQ ID NO: 60892 - DNA, 507 bp, Oryza sativa
  Clone ID: PAT_MRT4530_62378C.1
gtcgactctagaggatccccgctgcggtttctacgactgaacaacaacatgttccatgggcatattccaggctctatcactggactaagagatcttcgccatttgaatcttgcggaaaatcggttatctggaccaataccatcaggcgggcaacttgaaacactgtacacgtataacccattgatgtatagtggtaacaatggtctttgtgggtttcctcttcaaaggagttgccccggcaatagcacatcaaaggatggtgatctttctaatgaaaagcatggggatcagcagatacctgaactacattctgatgaccaaatgttcttcctctttggctgtggcgttggtttcgtggttggttcctgggttgtgttcttttctctgctgttcgtgaaaacttggaggattgcttattttcgcctcttcgacagtgtttatgacaaagtatatgtgtttgtggttgttaattggggtagcctaactggaatgaaagttgcaagttaa

SEQ ID NO: 60893 - DNA, 547 bp, Oryza sativa
  Clone ID: PAT_MRT4530_62379C.1
ggtggtttgaaggtacttgatccaattgatggtacacaaggtttctcgaaagtggatgatactctgtatgtggtatgtttctctatagttccattataatgttcatctttgaatagtattcatctgccattgatacatgctatgcagccatatttgttacatgtgcatgtgtacattcactgcaacaagcatatacaccaatatgaggggttatagttctgtgcacaacaaatttcttgtcatttcacaagcgtgggtcctgaatcctggatatttctgggcaccctttttcatgtcaagcatgttcaatttcaaatgattaccttcgttgatatcatatgtgtggccaggcttgcatctaaaagcataatcaaaattatgagcatttgctctcgcctctttattcttttacaacgttcactgaatgctggtgtgtatggattgaggaccttagaaatagaatagcccaagttcattgaaacgaagcatatgtagcaacatattgtcattgtctgttaactgcggttaagaattttagttcagtctt

SEQ ID NO: 60894 - DNA, 1170 bp, Oryza sativa
  Clone ID: PAT_MRT4530_6237C.1
ccacgcgtccggggagacccacattaattcctcgcgccccatccatccattcccctgccatgggctgctcgacctccaagctcgagccgaaggaccagctggacgcctcggcgccgtcccaccaccgccgccgcggctttgccagcgacctctttggccgcgccaccaggaagaaccaccacaatggtggcaagagcgggtgcgaaagtggcgacgccgccgtccccatggccggccggcagcatgaggaggagcagccgcggcaagggaagaagggcggccgtggcaagcgcgaggtgcaagcggggtcgccaagcttccggtactactgtgagaatgccgccgccgccgccttcggcgaacattcgaggtcaagcaccaacaacgcaaatatgatctgtggatgaactcctggaacttttatcaatgcagtgcgggcctacaaaagaacaaattatacccctaaggaatgagagatgaatcagatgggttattaatcaggagctgcaagcaaattaggcgttaaatccacgacctttttcgcctgttcgttgcttttcctcggctgttatatctccagggatcaaagatgaagaaaaaaaataacttctgatgatatatatgtcaagcagattcccaatcatggagagcataacgcactagtccctggagaattcatcgtagcagttgtaccaaatgcagtttgtacatgtaataccaacacgatgaatacaaattaattccagatcgatctcagaaacaagaagtcaaagtaaaaaaaaaataaaagttattaaatatttgtcaaagtgtgttttggagaccgtgttgctgtccaaaacgacttcctttacgagtatggagggagtagttcatgtgaagtcattttaccttagcaagatacaatcgagaatagtatgcatcatggaccatttctgtaatccgcaccaaacgtacctaaagggaacagatctgaagtaatcaagtaactgataaatgaacatattatatgacatttaagagaacagatctgcagaccgtgaactctggaaaacagctttccactaggacactttagaaaagatgtatgtattgtccgagtgcatgataaccagcatacattaagtaattaaacccaaatagtaacacacataagcacacccataaaac

SEQ ID NO: 60895 - DNA, 174 bp, Oryza sativa
  Clone ID: PAT_MRT4530_62380C.1
atgaggcggtgggctaggggtgagtgcagtaggcggtggcagccgggtagggcaagtgtgggaggaggcgacagcggcttagtgcgcacgatggtagcggtgggctggattcggtggagcggcgttttctggaaggagtcaggagtggagaaacacgtcctggcccgagcatga

SEQ ID NO: 60896 - DNA, 1185 bp, Oryza sativa
  Clone ID: PAT_MRT4530_62381C.1
atggtccaattagtaggtccaaaatcagtttttgacttcagctttgaagaaaggaacagaagatatgatgaagaaatgcatggcccgggtagcctcagttaccgtaggcacctgctggctgctgcactgttgacagatcgaagcattgctgctggctggcgacgacgacgggtcttggagaagaccttgtgccggcggtggtactcgtggccgcacagattggtggaatggtgggtgcaggactgcagggaggcagagcggctggcggcgttcttcctttttcacggatcgggggcggagcggtggagggagaggcggcgatggggagcggaggaggcggcgacaggagagggcgggcggcgtggtggttggcgccgccgcgggggtgggcggagatggcggatttgggcgggaggccgctggcccgactcactccccgcccttcacgacgcgctcgccaccgcccacaaggagcgccgcaagctcagacccatgttcaacgtcgtgccggggctcgacgggaagcccggctccgtctcgctcgagctcgggagcaagcctgggtgcttcttgatcgccggcaccagcgcgaaggtgcagaacttcgcgtccattcgggagcagcaggtcggcggatttgggcgggaggtcgtcggcgacggcgaggtcaatggaggaggcggtggcatgggcaccgacgcccagctcctctccgccgggtgccgcagccagggccacagccgccggagccgtgccaccgtcgctagagaggagaggggagagagagttgaagagagggagaaggggagagagagagaggaggaaggagagggggctgagaatgacatgtggggtccacggcggctagataatgggcttcttatgcaggagacgtcggagatagcggcagccgggccgcggcggaggcgaaagacgacgacggccatgtggcgagtgacgggggcagcggcagccaggccacacggcggaggcgaagtcggcagcgactgtgcggcgggtgacaggggtagcgacggccgggtcgctcggctgaggcagaagacggcggcgaccgtgcggcatacgtcggaagacggcgatggccaggccacgcggcggaagcgaaagacggtgacggccgtgcagtggacgacggggacagtggcggccagcccgctcagctga

SEQ ID NO: 60897 - DNA, 231 bp, Oryza sativa
  Clone ID: PAT_MRT4530_62382C.1
atggcatccatggatgatgtggatgatgaggatttttcaccacatcaagccacaactaaggagtcaatgaactctaaggatgatgtgaagttcatatgtgatggctaccagcgtgttgaaagttccatggaagaatacaagtccaagaaggtagaaaaaggacaaggtgagaaaaggaaggtgggcgaagggtttgctcctcgctggtatcttccatcgagaaaacaatga

SEQ ID NO: 60898 - DNA, 247 bp, Oryza sativa
  Clone ID: PAT_MRT4530_62383C.1
gaaaagattggaagttcaggaaaaatgttctgtccttattcaaactggtttatctttgtccctaaaatggcagtataagaatgttaatgaagacgaaaaacagtggtatgaaggttctgaaaggctagttgggcaccctttccttgtatacagccttgtagaccttcctttagaaaaccaaatggacccactaaaaattgaaatgagggcctggaagcaaattagttcaagtagccctgcaggctga

SEQ ID NO: 60899 - DNA, 108 bp, Oryza sativa
  Clone ID: PAT_MRT4530_62384C.1
ccttttcttacatggacaacgaaagaactccaaaagagttttactgtatcgtgagcttgcccagacagcacagcaccgagttgttgaccgcgagagatgtttcaccct

SEQ ID NO: 60900 - DNA, 333 bp, Oryza sativa
  Clone ID: PAT_MRT4530_62385C.1
atggcgaggcgacgacggcgcacgaccgccggcgatgaccggtggcgcggggagacggggaaggggaggatgaccacggcgactagagcggccggccggagttgggtggaaatggagagctcaccggcgtgcgagagaagcggcgcttcggcgacgattggcgacaaccaaatggtggccgaggtgcgggcgggctcggtgagcgcgacggcggcgactgcgcggcgcggcggtggctctagtggcggcgacgcgcgaccggagatgggcagcggcagcggagctcgggtgtggcgtggggagagcggcacggcggtggcgcacggaaagtga

SEQ ID NO: 60901 - DNA, 528 bp, Oryza sativa
  Clone ID: PAT_MRT4530_62386C.1
atgacagagggtgcggctagcggcgacgggcgcgacgacgaggaggccgcgacggtagcggaggggcacgaggccgcgcctgcagatctggccacccggcgaccagatcgggcgggcgagcttgcggcggtggaggcggagctcgcggcgaagggtcggcagcagcgggcgagcgacagctgcgacggggcttcgctccgtctcaccgcacaagggcagggggtactgccggcgtcgggaggaggaaaccgcccagatccgtgccgaccggccggacctggcggggcggttgccggcggtggggtactgcgttcgggtggcgacgtttggcgggggtggcggcggagtttggaggcgctggcggcggaggacgaggctgccagatccgtgccggatttggcggggaggcatccggcggtgcccggcgccggtgggaggatgtcggcgtttgctgggggacggtggagccggacgatgactggtgacagcggcagcttcttgtccagtgacggagggtgcggctggtag

SEQ ID NO: 60902 - DNA, 585 bp, Oryza sativa
  Clone ID: PAT_MRT4530_62387C.1
gggggaaaatccaccggggatatgatatgatttatcctcgtccaggggccaagacatgcctagggctggtagtgcttaaattctaggccaaactctgcaatccaattcaggccctataaaaatacaatagaaattctgaaaatatataatgggtagttaagggcatatttgctcagccctagccgccttggcttttcctatggctcaatccttgtcctcatcaatcttgttgagctttcaccgaagcttcggtagatacttattatcctgcttgcaaggaaatggcacgatgctctcttcttcgtgatgagagcgaaatcccccgcccaattcttccggagaaggaggaagagaaaaaggcgctcacggcgacggcgggggaagaggtggttagaacccttgatgctgtcgcttcgtcgtcgacggggagcggcggatcgatgagcgcgcctcgtcctccgcggcgatggaatccgtggctaggggtggggggaaggaggagaggcgccggcgtcccgcggggaggtttcaggggagcgcggcgcggaggcggcgccgccgggacgcggaagaggggcctcgtgc

SEQ ID NO: 60903 - DNA, 1847 bp, Oryza sativa
  Clone ID: PAT_MRT4530_62388C.1
ccggcccgggcctctccacaccaatgggcgccgcccaactcgcgaaggcggaaaaggaaaaaaagagagaaaaaaaaaggaagaaaaaaaaataaaactcgcgcacagcaaccgaatcatctgcctcctcctcaagtagtctagtcctcctctcttctccggagtctgcgtgcgatcgaagcagaggcgcggcgctcctcctcctcctccggctccgatccccatggcgttcatgcgttcccactccaatgcatcctccggtatgggggttgctcctgacatcagggacacattccttgagcttcagatgaagaaagcatttcgctatgttatcttcaaaatcgaggaaaagcaaaagcaagttgttgtggagaagaccggggcaacaactgagagttatgatgatttcctggcatctctcccagaaaatgactgcagatatgccctctatgattttgactttgttactggggagaatgtgcaaaagagcaagattttcttcatcgcctggtctccatcaacatcccggatccgtgctaagatgctgtactccacctccaaggatcgcatcaagcaagaacttgatggattccactacgagatccaggcaaccgacccaactgaggtagaccttgaggtcctccgggagcgggctcattaaggccctggccctgatgatcgatcacctgcgaatctcaagtcaagacgcaaattcatcctatcagtgatgctcccttgcgatactattgttaataagaaagatatccatgtttcctgtaaaacgtatccccaccatcatcatcatcatcatcgtttagccttgcctgcatgattctagctgcagatggagtgttgtcggagatttacccgtatgaggtctcagagcctgtaaaacgtatgaaacaccctctcccaaactcttatattgtggtattaatatggattactgggtgtggattgtcctaaaaaaaaaaaaaaaaaaatactaaaaaaaaaaaaaaaagacgcctcagggatggatcctagtccgcgacgccgccgccgccaccacgttcctgcagaatcctcgtgatcccggcgacaagattcacctgccacatctgcccgaggacctgccgagcaagtccacctgcgtcctctccggcaagccgacgatccctggttgcgtcgcgctgctcgtcgagccattcgccaccgtcatctggtaccttcacgtcggcgaggaagacggcgagtggacgaggcacgagtacgacatcggaacgcagccactggacccgcccatcgacggcgaggaccacgagaaggtgccgatatgctcgatcgccgcttgccggggcaagttctacttcaacggtacactctccgacatcggcgtgctcgagttctctccctccgccgctgcgacatcgacatcgccggtgttcagctccctcgagctcgccggagagttcgaggtcgtgtacagggcgaaggtattcctagtggaatccggcgaggatctgtacatggttatgctggtgtaccgcggctttcgctgcgacaagacgggctacgagacccgggtctacaggatggatttctccgagcagccgccgcggtggcgcacggccggtgacctcgccgtcggcgcgttcttgctgtctccgtggtatttcggcgcgacgtgttcggcccgtgagcttgggctgcacgaggattgtgtctacgcgttcgttcctggggatgatgaggtgcctacgtgcttgaagatgtccagcgtgaaagatggatgggatgatttcgttgatgttccagcggtacacagggcattgtggattctgcccactgatccatatatagtttag

SEQ ID NO: 60904 - DNA, 2062 bp, Oryza sativa
  Clone ID: PAT_MRT4530_62389C.1
ccacgcgtccgcgacacaccaaccaaaaatcgaatcgcgttcgagccatcgagccgacaaggcgacaacagccacaacgcctcactccccccaccccacgcgctccgacgagctccgatccgccgcccacctcgccgcccgccggcgatgagcaccgcctccggcgacggcggggacggcggcggcggcggggatggcgcctcgtcggccgcggggggcggcgggaggcggatcccgcccgcctcgtccatgccgtgggtccgcaacctccgccgcttcgtcggcacgggcgccggcctcggatccgaggccttgatggaactggaaacaaaaaggatactgcttgagattttcaaggagcgccaacggaagagtatggaagctggtgccattccaagtttttataagaagaaacctgaagatggatccattagcaatagagttcagaaattggcaaagtacaggtttctaaagaaacaatctgaacttctgcttaatgctgatgatcttgatgccatgtgggtttgtctcagagaaaattgcgttattgatgatgctacaggtgctgaaaagatgaattatgaagacttttgccatattgcaacagtatgcacagagcagatcggccagaagtgcaagcgtttcttcagcccttcaaattttatgaagtttgagaaggatgattctgggagaattgcaatcctaccattttatctttatgttatgcggacagtatctctcacacaagcgagaattgatatgagtgagcttgatgaggattctgatggtttccttcaacctcatgaaatggaagcatacataagagggcttatccccaatttggcacaactgcgtgatatgccatcagcatttgttcaaatgtactgccgcatagctgcacgcaagttctttttcttctgcgatccacacagacgagggaaagcatgcataaagaaagtattgctgagcaattgtcttcaggaacttatggaactacatcaggagagtgaggaagaggttactgatactgagcaggctgaaaattggttttccctgacgtcagctcagcgcatttgtgatatgtttcttgcacttgacaaagatacaaatggaacattgagcaaacaggagctcaaggaatatgcagatggcacattgactgatatcttcattgaaagagtttttgatgagcatgtacgccggagcaaagttggaggtggcaacagtcgtgaaatggactttgaaagctttcttgactttgttttggctctagaaaacaaagatactcctgaaggattgacatacctatttagatgccttgatcttaatggaaggggattcctgacaactgctgatatccatacattatttagggatgtacaccagaaatggattgaaggcggaaactatgaactttgcatcgaagacgtgagggatgaaatctgggacatggtaaagccggcagatcctctcaggatcgcactaacagatcttctatcttgcaagcaaggcgggactattgccagcatgcttatagatgtgcgcggcttctgggcccacgacaacagagagaacctcctccaggaagaggaagagcaagtggaagaggcctgagttctccagctgccgtgcaaccaacctggtaaactctcaaccgcaaggcactggcaattgctggtatctcgcaaccgcaaggcacgggcaattgcttgtaccactgtatgtgtgccattgtagcttacatagtgtattagaatcaagttcaacctgttcgctgggagacttgttgtaacctgtaagtgttccatttgtgtaaccggagtgaaatctgacatattttgagttgaacatggttttgtcgtgtcgaccagatgtattaccgcagggcttggttggatgcagaaaggaaagcctcagcctgtggaatttgtacgtctatgcgacaccacgcatgtaattcggtttgcaactgcaagtctatatacgcaaaaatacattgtatgccctttgatgcagtggttatttgtgcccttctccgtgccatcatgccgaattcctgcag

SEQ ID NO: 60905 - DNA, 459 bp, Oryza sativa
  Clone ID: PAT_MRT4530_6238C.1
atggccctcccctccgccggatctggggagggaaggaaggggaggggaggggagccagatctcggggggagagggcggccagctgccggatccgtgcgggggttggccgccgcccgcgggatcccgcgcaccgtcgccatgccgccgccgggactcgggaggagaggagagaaagaggggaaatttaaaggcaggatgcccgacatcgagcggggcgcaggacgcggtggtcgacgacgagcggctggtcaggaggccagatctggtcggccgtatcacagatccatcttcaccaggaccgccgacagctcctccatcatctcaccgcctctgactccttcccaccgccgtgttcctactcctagcgacaaggccgagggtagaagaagaaatctctggtgcgggagcagtgtccatgagtatgaggctaggcatgacatcgcccaacacagagcctag

SEQ ID NO: 60906 - DNA, 473 bp, Oryza sativa
  Clone ID: PAT_MRT4530_62390C.1
aggcaaaaaataaaaaaatttaaaccgctccccaaacaaaaccctgggattggtacatgcctacaagggtacaaaacttggtgaaaccacgggttggtggtaccctacatgcaaaaaaacgggcaggcttcacaaaaaaaaaaattagcccgccctcaaccataagggacaacctggcccccttaaaaacaatcaaaaaactggccaaaattgggggatgcgaacatacaaaccagcatctcatttaatttcatctcaacggcccgaagaaaccaaggaccttttttaaaaaccctgcttgaccaaaggttttggggggggaaaaagctttgggcttccacaaaccaattccggggcaggtgggggatttccgttaggaaccaattttggttttttgggggaaatgaaccgcaaaaccttgttcgcagccagcgccaaaaggtccgactccttgagccccctaatggggccaa

SEQ ID NO: 60907 - DNA, 480 bp, Oryza sativa
  unsure (1)..(480): unsure at all n locations
  Clone ID: PAT_MRT4530_62391C.1
tataatanggtcatgtatcaggttattgatatctatcgaacccgtcagggtcgtcantatgtgttgctgaatataccgagttcattcattgtcgtnttgtagtatgaccctntagtagcctcgagtgtcaagtcgaaaatttctgctttttgctgttgttatgtaggtccatataaggttcagggtgtacagtgagtaggttgtctagtaaaaattgagtatgtcgttggcaccacatacagtagtgccaagtccgtgtgtggcgctagtagtatagtagtagtagtagtagtagtagtagtagtagtagtagtagtacccattttggtaagtcccagtgaagtccagaagagggtgtgttgttgacagttgacacatcaaagaggaatattaataccaaagattttacatgttattatgattgttatatgacttaatactaattgacatctcctcttgcacaaaaaaaaaaaaaaaaaa

SEQ ID NO: 60908 - DNA, 505 bp, Oryza sativa
  unsure (1)..(505): unsure at all n locations
  Clone ID: PAT_MRT4530_62392C.1
accaatgctgatgatatgttgttttagtcgtctttaaacttgaatgattttagaagttattggatgagaccaacgttatagaagtttggatgcttgaacctgtgatgcctgataccccctagacttgatggaaacccggaggggagtgatggactgacaaattgatgttgtgtgtgaatgcaacaaactgtgccaatgaccccgctgaatgcgagctggaaatgatgtgacangtgggatggccccttcgtgatagatttcatatgcaagatgtgctcccccggcttacaagcttttggataggacccagaaattctttgcatggtttggagtcgtcacctggttatttttgtgtagctggaattggagtaggtgattgaanctttggctaactggattacctgtgtacnnttaggtagctaccctatgaggattatcccttttggcnggacacaatgaactccataatatcgtacctttatttgaaaaaaaaaaaaaaaaaaaa

SEQ ID NO: 60909 - DNA, 1084 bp, Oryza sativa
  Clone ID: PAT_MRT4530_62393C.1
atgggaggttaacaggcccatttatatcacctccccaccgagccaattgtgcacatattttcgttgaaggagctcaagaccacatcgtcgttgccgtcgccatcgcgcgggagagccatcgtgatgtgccttttcgtggtattatggcgatgttcccatacaactttgtgacagtggagtagattcgactgtatatgcattcgtcgatactagcctgaatgcaccaaggcatttattatgaacaatgtgctagggtggctacataatatgttcaaggtagatccgttgttgaaaatttttatcataaaagatgtgtggccggtaaggggcttgcatctactgggagttggagaaattttgtggctaaagtaaaggagaaagggtatagtctggcaatactggtgcagaagaaaatagatgtttttggaaccgcgagacaagctgcacggaggtggaacaatctcctattgtggtcgtggaagaagttagtgtttgtacgagtggtcaaggcaaagcaccgaaagaggttattgcactggtagagttcgttgtgcctgatagtaattgcccggccaatgaataggatgacgatgagtcggactcacctttggttgttgacgtaatggaggagaatgaggcgacagcggaagaggtagaactaaaaaacgaggaaacgaacgtacctgatgattgaacaaccatatcgatgagtcgtctgaggattaacgatggtttagatgaccactggcggtatggttgtaagcaggtgcagttcgacagatgtttcatgacaaagggtacctacattatgtcgtgaagaggtgggcatttctacagaggcgggattttagggtgaagatttcaaaataggatgatgtatgacatgaagtgcacaaggcctggatgtcccgagagagtgcatggttaaagccacaacatgacaactatgggtagcttcaagggttgagcaacatatctgtttgttggacaatacccctttggtatacaggatcatgatggctgcattcgtcacaaaaactaagccaagccaactcgaccggcggggccaaagccagccgctacg

SEQ ID NO: 60910 - DNA, 242 bp, Oryza sativa
  Clone ID: PAT_MRT4530_62394C.1
tgacttatttcatgaaactcgtgctgaggagaacatagattgttctgaaatgaaatttcgggattaggtgatggggaaagtattacaagctatggggggtgctgcctactgggcactactggacataccatttatgaccaatgttaggtgcggaatggttaggactaacattcctgatgataggtgtttagggcttgatatgatggcaaacatgcctgccaggttatcgtgactctgttgat

SEQ ID NO: 60911 - DNA, 240 bp, Oryza sativa
  unsure (1)..(240): unsure at all n locations
  Clone ID: PAT_MRT4530_62395C.1
gcgcgatgctatacctgagagctgagcaggcagacggagcggacatggcagcatcactacaagaccgaggacaccctgttgcagcctgacaagctcggcggtcagccctcctacgccgagctgccatcgcgcgcgtattcgcacgtcacctgagtgtacggcgtcgacagccgtgccctcgagcaggatcacgtgctcactgcagtgcgacatggngtaggtcgacaacaagtgcgccga

SEQ ID NO: 60912 - DNA, 257 bp, Oryza sativa
  Clone ID: PAT_MRT4530_62396C.1
acgagtgtgtgcacacgcattggaagagtaggcctccaaaaccacgcgctgttgcaacgtttgcacgaacgggcgggcgatcaggtttttggaagcgtaaggcgcgactactcactgttcgtcaacatctacttcaccttcaccaatatgtcgaacactggagacaccgccaccactggatacaagaaaaagagggctcccgtcaacatcaccgaaggtaatactgcctcaaactccagcggaggaccattcttggg

SEQ ID NO: 60913 - DNA, 448 bp, Oryza sativa
  Clone ID: PAT_MRT4530_62397C.1
taagcttgcggcgctacggcggtgacccgcggctacggcggcggcggcggcggctacggcgggggcgaccgcggctaccggacggcggcggcgggtaccggcggcggcggcggaggcacgccgcgcgtgctacacacgtgcggcgacggacgggccaccactgtgccacgggacctgctcccagggacggacggcgtgcggcggtggctaccgtgtggtgtgtggctggcggctacccgcgtgcggtgtgtggtggcggcgtgcggctggcgggtgctaccaacctgcggcgacgacccggccccactcgctcgcgacgtgccccacgcacgaccctactacggcgctagctcgcggcgccagactccacgcatcccacccatgactgcgtttatgctcccccctaccctcccactgcaatccaccgagccagcgtggtgcatcagtt

SEQ ID NO: 60914 - DNA, 492 bp, Oryza sativa
  Clone ID: PAT_MRT4530_62398C.1
gggcccaaatactaataaaatcttttgaccccaacaaaacaattaaaagggtaaagaacaaccctactccaacgggggaagcaagggggcaacatgggactataaaaattatttggaaacaaaaaaaaaacttaaagccttacacaaaaaaaatgggcaaacaaaaaaaagggatcccccaacaaatttcggacctaaaaaaagctaaagcccctgagccaaaaaaaatggttaaaaaaaccgggtttattccaaccagctcccgggacttaagggaacaattttttttcccaaagaaacaacgccaccttgagcttcctttaaacaaaaaggccggtggtaaacagccattggagggacaaaattccaaccggttcattatcgctggtatggccccaaaaaaaagacttccctttattgaaacccgccgctggtggtgtgggaacaaaaaaaggggccccctgaaaaaaaactttgggtggtggggaaaaa

SEQ ID NO: 60915 - DNA, 310 bp, Oryza sativa
  Clone ID: PAT_MRT4530_62399C.1
gcgcgacaattttctagttttatttaattcggtggcggacatgttggcaattcttataagtagatcggttgaaaggggtatgacacgaggagttgttccaaatttagttgataatgggttatcaatcctgcaatatgcagatggcactatactctttatggaaaatgatattgatgaggccaataacctcaaaatagtactaggtgcctatgagaaattatcaggcttaaaaatcaattttcataagagtgaaatgttctactttggtaaggccaaagaaagagaaaatgttttctctctaaggaggttt

SEQ ID NO: 60916 - DNA, 510 bp, Oryza sativa
  Clone ID: PAT_MRT4530_6239C.1
aaaaaaaaaaaggggactaatttttcatttggaagaaaaggacgatgtcccccatggggtgggcccaaatttaaaggggccctcagttcaaaatttaaaaatggtttggggttcatatttcaatcgggggagcaatgaataaactgggggggtataaacacactttggcgagctcctttgaaaaaaaagcccccagcacccccaagcatgccctttggtgttaggccttccaactccccaggacaaaattttgaactcaaaccaccccccaatggggcgctcaactaagctaggcaatcgtatcagctccccccgtggggggggatgttcctccaagggggcattgggcctcaaatcataagggaaattattttccctagccattttttcgaatgcagttgcccggaaaaaaataggggaactggcccattttctccaacaaataagcgggagggggaaccgctgaaaatgggctagggattggccccaacttggcaaggatcttttgga

SEQ ID NO: 60917 - DNA, 256 bp, Oryza sativa
  Clone ID: PAT_MRT4530_623C.1
ggatgcaaagctgatgcattctttaatctttacagaggagctccgggatacaagcatgctagaattaatctgtatacatacgtacgtacgtacgtacgtataaatatatgatgtaataacttaatatatagattttcctaacttgacaaaaagaatcggcgcaactaataattgaggagaaagaatttggcagctcgagaaattaaccggcctgcagtcgagcgatcgcctagctaaattaaccaagcagccaagg

SEQ ID NO: 60918 - DNA, 188 bp, Oryza sativa
  Clone ID: PAT_MRT4530_62400C.1
tttgggttttataaacgctatcccccctaactccagcttaatgaccatttcttagaaaagccgttagctatgccaaaatggctacagcgccggacgcagagttcttcacaaaaaacaccacatgccccataaaccaagcgtgtaccaacgatgcacctacaggttcatcttttagcagtaacacacac

SEQ ID NO: 60919 - DNA, 1151 bp, Oryza sativa
  Clone ID: PAT_MRT4530_62401C.1
aatttaaattattataaaccacattaatttacttaatctgatgttatctagctatcttacacgttattttttttgcggggtttcacctatttaatgcacgactcttcattcttccacacaagattcggtttttccctgctcctatttcagcattccgctaacgaatgtctatcatcccaaagctttcggtgggttaggaattgctgacctcaggttggtagggtttgccctgcgagtttgttggctttggctccagcgctcagggcatccttactaggacggcctaaaggccccagccaagcaagccgtttctgacatgtttcaggcatccaccttcttcgtgcagggtgatggtgagtcgattcttttctggtctgcccactggatcaatggccgctcggttgcctccttagctccagatcagtggccgtgtggttcgtgcacagttgcttctggcctggcgaacaacacttggatttttgacatccacagcgccctcactgtcccggtcatctcctagtttcttcttgtctgggacatggtgcttcacattcagctttcgtcgggtgtcgggaatcgtcttgtctggtgttggacgagtgaccagcactactcggcgcgttcggtgtaccaggcattcttccttggccagcacttctttgcttgtgtcaatcttctctggcacgtgaagggccctactaaatacaaattcttcctctggtttgcatttcagcagtgctgttgaacggctgatctcctctagaagcgtggcatcaatagccactcggcttgccccttttgcgctcaagagcttgagacggcaaaccacatcctcctcgactgcgtgttcgctcgtcgagtctagttacgggtgctgtcacctcttgggtggattgctctcccccccccccaaccccgtggcagctggctccaggactggtagccatcttctagggcttgtttacctgatcacctccgtgccagcttcgaccccctggtcctcctggtctcttggcagctgtggaaggaacgtaactctaggatgtttgactctgcgctctcttcggtctcagtagttctagagtcctttcggagggtcggctgcgtggtcattagcgggcgttgcttcctttggggacttgttgggagtg

SEQ ID NO: 60920 - DNA, 160 bp, Oryza sativa
  Clone ID: PAT_MRT4530_62402C.1
cgcattctcagccagtttaggatgttttacaggctggatgaaggttgacactgccatattattagtctgctgttaatttttatgtgggcggcttgcttgcatggactcacgaccagatgattaatcacattgttcatgcggcccacagtcgcggaacatg

SEQ ID NO: 60921 - DNA, 207 bp, Oryza sativa
  Clone ID: PAT_MRT4530_62403C.1
atggctccggcgcctcgccacttgcccgttccaccacccaacaccgtgccgccgcttcccatgactatctctctaagcccggcgacctcctccttcttgccccctccccttcccattcctcccaccctcaccccacctagagagacgctaattcgtcagtcctctggtggagtttgggttgttgcaggcaccggagaagaaaaaaag

SEQ ID NO: 60922 - DNA, 376 bp, Oryza sativa
  Clone ID: PAT_MRT4530_62404C.1
agttaaattttttttttttttttttttttttttttttttttgcacaaaaggacaagcaagtaatgtcatcataactgatacaactcaaattccacgaaacagaaccactgttttacatcctgaatttttacatgcctacacaatttacagatgaagcaaaatcagatctagagagacaagttcattttggcattaacaggcagacggctaagcatgaacgggactggattagtaatatcaagcactcacgcatgatggctcaatgatgctgaactgcaaccatcacagggaatctaatatgacggagaatacagtaacatggttgaaaatgggcacttgacgggcatcatcagactaagcaagatgtgcatttgat

SEQ ID NO: 60923 - DNA, 369 bp, Oryza sativa
  Clone ID: PAT_MRT4530_62405C.1
atgaggaggaggagcaactgcggcatagcttgggctgtggcggtgtgcaggcggtggatccgtcggcggctggagggacttgcgggttggcaacgacgtgtgaccccgcgccaacaagttctccagcactggctgcctctcgccaccgtcctccgcgcctctctcccgcgtgctggcgagctccggcgcggcacagggcaccgttccctccctctacgcacgcaccgtcaccgctcgtcctctgtgcgccggcctccttcctccgcgtgcgtgatgccaccgcccaccctccgcacaccggcgagctccttcaccacacagggtgatgctcgtcctctgcgcaccggcctccttgctccgcgcgtgtga

SEQ ID NO: 60924 - DNA, 1886 bp, Oryza sativa
  unsure (1)..(1886): unsure at all n locations
  Clone ID: PAT_MRT4530_62406C.1
gcggaggggcgccgccgtgacccggtcgccacccccctgcccgtcgtcggcggcgagaaacagaagtacagaacagagaagaagagcgagagaccgagggaggaggaggagagagaaggcgaggcgcaaagcgcaaatggagctctgcgtccgcgcctcctcgcttctgctcggcctcctgctccagctcctttcctcagtggacgtggtgtcggcggcgcagaaatttggtatcaactatggccagatcgccaacaacctgccggacccgacgcaggtggccggcctcctccagtcgctgaacgtgaacaaggtgaagctctacgacgcggaccccaaggtgctgatggcattcgccaacaccggcgtcgagttcatcatcgccatcgggaacgagaacctgcagtccatggccggcaaccccggcgccgccaggcagtgggtgacgcagcacgtgcagcccttcctaccggccacgcgaatcacctgcatcaccgtcggcaacgaggtgttctccggcaacgacaccggcatgatggccagcctcctgcccgccatgaaggcgatctacgccgcggtcggcgaactcggcctcggcggccaggtgaccgtgtcgtcggcgcactcggtgaacgtgctcgccaccagcttcccgccgtcgtccggcgcgttccgggaggacctcgcgcagtacatccagccgctgctcgacttccacgggcagacgaactcgccgttcctgatcaacgcgtacccgttcttcgcgtacaaggcgagccccgggagcgtgtcgctgccgtacgtgctgttcgagcccaaccccggcgtgcgcgacccaaacaccaacctctcctacgacaacatgctgtacgcgcagatcgacgccgtgtacgcggccatgaaggccatggggcacacggacatcggcgtgaggatctccgagaccgggtggccgtccaagggggacgaggacgaggccggcgccaccgtggagaacgccgcggcgtacaacggcaacctgatgcagcggatcgccatgaaccaggggacaccgctcaagcccaacgtgcccatcgacgtgttcgtgttcgcgctgttcaacgaggacatgaaacccgggccgacctcggagcgtaactacggtctcttctaccccaacggctcgccggtctacgccatcaacaccggcgccggtggcgtgtcagggcggacggggccgttcgacccgtactcggcgcagatgttctcgtcggcgtccagattggcgatgacgtctgggatgggggtagttgtcctactcggcgcattattcctctgagcttcctcccagtctctgagttgtcatttcattcagagccggccgattgcatgtgttcgtcctgacagcaaggtcccttcaggctttgagagctccttccaaaccaacggcaaccagccactgtcgagaaccatcgaaagctttcctcgagtcaccaccactgctgctacaatccaaatagagtaggaagctgttagataaacctggtgtactagctagcttgaccatgtccttgttattgctaatcggtcagtcacgtcactttgaaagaactgaaggctctcaattctggacgaagtggctgtaactgtctttaagcaacggcaagttcatgattaggctcatagaattcattttgctacctttcgttttccgttttattggtggggttactgtatctattcatctagattcgtagcagattttacacggaattatagctacagatgaagtatatgtggtgtgtcatttgttacatttaaatacagagatacgattttttgtctgaaaaaaaacggctcaatgtggtacagaatgttcttnatttaataatttaatttaaaattat

SEQ ID NO: 60925 - DNA, 341 bp, Oryza sativa
  Clone ID: PAT_MRT4530_62407C.1
ccttgttgcgcgtatcaaaatatatatggcaagataaaaagctctcgttcatttctgacaatcagaactcatggaacactgcaggaagaaggagtgacctacaacggatctttggacctgggaagcgggctgttagactgggaccacttaggaaggcacggccatagccttattacagaacgtggggcttcaaccgtggttaacttaaagcaaacagcaggtcaaacacaccgagggaaacaaggggaatggttgatcagtgagaaggagagcaaggctaaacaacgagttatgcccaccgaaaactggaagaagggttgatggaccgcagtacagggtat

SEQ ID NO: 60926 - DNA, 542 bp, Oryza sativa
  Clone ID: PAT_MRT4530_62408C.1
ccaaagaaatctatgatgcaagattccctgtacaaatgccatcgccaaattggaagataatctggaactgtcgggcgcctttgaaggtaaaattgttcgcttggctactggtccgaaacagactgtcgacaaggatgaatctatcaaaaaagaaaattgttcaatcagcttcatgtgcaatctgtagtagcggggacgaaacaacaaaccacttattcctgacttgcccgtttgcgataaacttctggtcaaaagtgcgaattcagccagctatccaagatgtgcaactctttcatcggctgagcaattcaccgttactgccgtcgaaacacctccatgtcttctacatcttatgcttttgggcgctttggaaccataggcatgatgtggtcttcagagggcagcaaccatctttagctgcttgtttacaccgagcgataagtgaagcaaccctttgggcagaaacactagctgtgcaagatcgacatgtaatagatgtctggaaacatcttttctcttccgcacttcaaactctgaatctg

SEQ ID NO: 60927 - DNA, 4655 bp, Oryza sativa
  Clone ID: PAT_MRT4530_62409C.1
atggcgagcttgccggaggcacccgtaccaccggagagcgcacgcatgggttcacccccgccatcccattccccttctcctcctcctctccaaggagacccctccctaccaaccgacgctcctccaccggagccatccccccaaccccaccatgccaccccgatcccgccgccgtctccaggtcaggccaccgaggggtggcccagggcggaagaaccgcaacctccgatcggtgggacccccggtgcggcgggcccgccggcgccgccttcgttcttcccctcgctggagctgggtacctcggcggcgccacctgcgctcgaagccgcggcggcgggggcggggcagcccggctccccttcgccgtgtcctcccgctgagccggcggccgagttctaccccgggtcggcggcgtcatccccttcttcctcctcgtacgaaaccgcggaggatgactcgccggcgtcgccgccgcccactcctccgccactggtcttatgcgcctcgccggattcatcctacaccgagtcctcccctacgcgcgatcgcttcggcgacgaggagggctcgcacgccgcgcccgagccgccgccgccgccgacgccattggagggcgggccagatgcatcctccgccgagcccgcggcaatggcgtcccgtgcgcgcgaacccatgggctcgcgcaccgcacctgaaccgccgacgccgccattggagagcgggcaggaggggtttcagcagcagcagccgcatccaccgcctacaactcatccggagtgtgatagctcggagcctgcggagctgccgcttcctcccactagtccggctgaaatcgcatacacatcgccagattcagtcgaggtcgatgtagtagcggtgtcgccagaggaagctcctggttcaacggttgcaatggaggtaatgtacggggagactgatacctcagctgtcagtgtgtctccggtattggggagtgcggagacagatgcagccgagatcgatgtaatagcagggatgcaagaagaagctcctggttcaacggttgcaatggaggttatgtacagggagaatgataccgcagcagtcagcgtgtctccggtattggagagtagggaaccagatgtggccgagggcgatgtagtatcaggtgtgcaagaagctcatggttcaaagttttccatggaagtaatgtacagggaaactgatgccgcagcagtcagtgtgtctcctgtattggagagtggggaaccagataaagccgagaacgatgcagtagaagagatgcaagaagaagctcatggttcaaggtttgccatggaggcaacgtacggggagcctgatgcctcagcagttagtgtgtctccagtattggagagtgtggagccagatgtaactgagattgatgtagtatcagagatacaagaagaagctcctgattcaacgcttgccatggaggtaacgtctggagagactgataccgcagcagttagcgcgtttccggtattggatggtggggatccagatgcagctgagaaaaatgtagtagcagggatgcaagaagaagaagcacctgattcaacgcttgccatagaggtaacgtctggggagactgatacggcagcagttagtgtgtctccggtattggagggtgtggatccagatgcagccgagatagatgtagtagcagggatgcaagaagaagctcctggttcaacgcttgccatggaagtaacgtacagggagactgatgccacagcagccagtgtgtctccagtattggacagtggggatccagatgcagctgaggttgatgtagtagtagggatgcaagaacaagctgctggttcagcgcttgccatgttggtaacttacggggagactgatacctcagcagtcagtgtatctccagtactggagagtggggagccagatgcagcccagattgatgtagtagcagggatgcaagaagaagctcctggttcaatgttggccatggaggtaacgtacagggaggttgatgctgcaacagtcagtgtgtctccggtattggagagtgtggagccagatgcagccaagatcgatgtagtagcaaggatgcaagaagaagctcctggttcaaagcttgccatggaggtaatgtacggggagactggtaccgcagcagtcagtgtgcctctggtattggagagtagggaagaggggtcacttcaagaatcaatgcagagaccatcttctcccacaatgaacattgagcaagagtcaatgcagagaccattttctcccacaattggcactgagacaagttcgccagagatggctcctgctggatctgagaactgtaaagtatcatggttgccgttgccccctcctacaccacttggcgaatcaatgccctccttgccagtcgcagctgcccccaaggttttattggtgatgccggaggaagcggttgagtcagtcccttcatcggaagctctggatgttgaaaaacctgcctccatcacacaggctgagcccagctcacctaatacgccaccgccaggatttgagaattttaagtcgtcatggttgccgctacccacgactcctcccccagttgaaaccactgatgtcttgccagatgtggtggttaccaaggcagtggaagcacccattgaggaagtgtctaggccattgccagctttggaggtgacaaacatggagtcagacactgtcctcagtatcttgcccacaacagtcttgccaacaggggggcctctggggctgctgcaacaaccactattgagacccccttctccagtggtgcaatctgaaccatgtttgcaaaatgagatggcacctccagggttcgagaattttaagtcatcatctgaaccatgttcagcagaggagatagcacctccagggtccgataatttcaaatcatcatctgaaccatgtttaccagaggagatggcacctccagggtttgaaaattttaagtcatcatctgtaccatgttcccaaggggagatggcacctccagggtttgagaattttaagtcatcatggccaccacttcccactctgccccaaactgtaccagatgcagccgcagcggatgctttggcagcaacagtggaagaagcagctgggccaccacctgcattggagttggaggcaatggatgtggacatggatgccatacatccaccaccgctgccttttgacagtggagtggagtcattgcaaaagccactgccaagagcaccttctcccataatgcaagaagcgccctgttcaccagatagggcaccgccagggtttgaaacctataagtcatcacagttactgctaccatctccatctctggcacaaaccacaaatgtgcgacaagatcaatcggtaactgaacctgtgtctgtgatagaggaagcccctcagctactgcactcagtggaggtaatgggtgtacatatggatgcagtacctccattgctaccatcatctgaaagtggagcagatgggctatctccgcagcaattcgcgcaacctcctcctgcagaaaaggatacaacaacctgtttgccagatatggtgcattcaggatgtgacaattcagagccctctcagcttctgtcactgcctgctgttatttctccagttcagaccccagatggcttggctgatgttcctgccattgacagggttgcagtggcattggaagaatcgcctcagcgaccgcttgtatcaggggaaatggaagctggcacagtgcccattcggtcatcaccactgaagaatatttctgaggggtcactgccacaactagaatcagagtcacattctcctacatcacaggctgcagatagcttactagatgcatctgactcaaagtctgtggctgtggcctcagaggagatgtctcagctaccacttgcatcgcaggcaactactacagaccttgtcagtacaactgcaatgcagccacaatctgagggtatagtggatgagtcattgcagcctcagcatccaccctcttctaccgcacatgattcaccttgtttacaggactctgtgccattggtgccaccaccaccttccccttacctaaataaagaagtaggtcaaatggtatgtggaagctgccgtattcttcttgcttattttagaggtgctggttatgttcactgtacttgttgccagacaatgaactatgtattggaagctcatgaagttggtaaggtgcattgtggacactgtgcgacattattgatgtatccttttggtgcgcctgctgttaagtgctcgttgtgcctctttgtcactgaaattggagagcggaatgttcgccgtcggttatcaatcgagcaacccacaagaactaactcatcagggctagctgaagcctgatcagttctggtcccatgtacccatcggattccaagaaagcttcaaatgctaatgtggatgaaaggaacagaatgttcgcccttcgtcatgaggtgtgggcatgaaagttcaagatggtatggacaagccaaagtgtacaaggatagcgtttttttttttttcattgatgtacacaggaacggtgaccttgttagtacgactagatctcctttgaaagggaaaataaaagaaaaatagttcgattcaaaaaaaaaaaaaaaaaa

SEQ ID NO: 60928 - DNA, 942 bp, Oryza sativa
  Clone ID: PAT_MRT4530_6240C.1
atgactgttataccccctgtgagtaaatcactaagcagttgtgtgaatcagtgggcagccgtgtattccccatctccagcacggcctagcgagtggcggtggcggcgcaacagcagggtgggcgcggcaacggcgacctctggccggcatgcaggaggtgcggcggcgaccgcgggtcgacgcggctcaaccacgggccagcacggcggcggcgaccgttggccagcacgcaggaggcgcggcaacagccgtgggtccgcgcggctctaccgcgggccagcgcgacagcgacaaccattggccggtgcgcagggaggtgcggcggcagcgcgaagaagaggcgcgaccttggtcaggaggcccgtcggcaactgcgggcctgcacggtccggcgcgacggggagctcaggactgggtgagtacggctggggaagggaaggcgtgaaggggaaggttggcgcaggggctgttaggggccagcggtgctggaggaggcatagatgcagcagggcaaacgtgagggaggccggtagccagcggacggagcggcgatgggtgggtggcgggcccacgcggcagcggagtggcgggaagcggagcggcgccgagcggcgggtggagtgggagagcgagctcgccgtcgccaacccgggcaacgtcatcgcctcaacctactacgtgaggacgtgggagcgcgacgccggcgcggaggcggacgcattgcgggaggagctacggagcctgaaggccgagctcgagctcaccgagacgaaggtggcggcggcgggcgcgctggcagagaaggcgcgggaggcgtacgagcgcggcagggaggacatgaggtgcgcggtagattcctgccagaatgaggtaaaagattgcgcctactactccatccgttctattttaactgcagctatgagttttcatgcccaactttaa

SEQ ID NO: 60929 - DNA, 368 bp, Oryza sativa
  Clone ID: PAT_MRT4530_62410C.1
ttttttttttttttttttttaataggacgccaaaaacaacagcgctcttaattacttccgatcaaaaacagaaggagaactgatgattcaggggtagctggagtaaggaatccaggttacaggaagggacaaaacgaaaagcacatagaacaaaattattccactccacccgttctcaataatcaccgggccctaataagtaataatgcatgcaacgtcagtaacacaaacgtttccgtcacacgtacgccctcacatgagaagacagttaattagcatttggacaaaacctctccaccacgatcgactgatgcagcaaaacacttggaatcattgtgcattgtgcctgcatgctgcagccagctgcg

SEQ ID NO: 60930 - DNA, 2735 bp, Oryza sativa
  Clone ID: PAT_MRT4530_62411C.1
atggcgagcttgccggaggcacccgtaccaccggagagcgcacgcatgggtcaggccaccgaggggtggcccagggcggaagaaccgcaacctccgatcggtgggacccccggtgcggcgggcccgccggcgccgccttcgttcttcccctcgctggagctgggtacctcggcggcgccacctgcgctcgaagccgcggcggcgggggcggggcagcccggctccccttcgccgtgtcctcccgctgagccggcggccgagttctaccccgggtcggcggcgtcatccccttcttcctcctcgtacgaaaccgcggaggatgactcgccggcgtcgccgccgcccactcctccgccactggtcttatgcgcctcgccggattcatcctacaccgagtcctcccctacgcgcgatcgcttcggcgacgaggagggctcgcacgccgcgcccgagccgccgccgccgccgacgccattggagggcgggccagatgcatcctccgccgagcccgcggcaatggcgtcccgtgcgcgcgaacccatgggctcgcgcaccgcacctgaaccgccgacgccgccattggagagcgggcaggaggggtttcagcagcagcagccgcatccaccgcctacaactcatccggagtgtgatagctcggagcctgcggagctgccgcttcctcccactagtccggctgaaatcgcatacacatcgccagattcagtcgaggtcgatgtagtagcggtgtcgccagaggaagctcctggttcaacggttgcaatggaggtaatgtacggggagactgatacctcagctgtcagtgtgtctccggtattggggagtgcggagacagatgcagccgagatcgatgtaatagcagggatgcaagaagaagctcctggttcaacggttgcaatggaggttatgtacagggagaatgataccgcagcagtcagcgtgtctccggtattggagagtagggaaccagatgtggccgagggcgatgtagtatcaggtgtgcaagaagctcatggttcaaagttttccatggaagtaatgtacagggaaactgatgccgcagcagtcagtgtgtctcctgtattggagagtggggaaccagataaagccgagaacgatgcagtagaagagatgcaagaagaagctcatggttcaaggtttgccatggaggcaacgtacggggagcctgatgcctcagcagttagtgtgtctccagtattggagagtgtggagccagatgtaactgagattgatgtagtatcagagatacaagaagaagctcctggttcagcgcttgccatgttggtaacttacggggagactgatacctcagcagtcagtgtatctccagtactggagagtggggagccagatgcagcccagattgatgtagtagcagggatgcaagaagaagctcctggttcaaagcttgccatggaggtaatgtacggggagactggtaccgcagcagtcagtgtgcctctggtattggagagtagggaagaggggtcacttcaagaatcaatgcagagaccatcttctcccacaatgaacattgagcaagagtcaatgcagagaccattttctcccacaattggcactgagacaagttcgccagagatggctcctgctggatctgagaactgtaaagtatcatggttgccgttgccccctcctacaccacttggcgaatcaatgccctccttgccagtcgcagctgcccccaaggttttattggtgatgccggaggaagcggttgagtcagtcccttcatcggaagctctggatgttgaaaaacctgcctccatcacacaggctgagcccagctcacctaatacgccaccgccaggatttgagaattttaagtcgtcatggttgccgctacccacgactcctcccccagttgaaaccactgatgtcttgccagatgtggtggttaccaaggcagtggaagcacccattgaggaagtgtctaggccattgccagctttggaggtgacaaacatggagtcagacactgtcctcagtatcttgcccacaacagtcttgccaacagaagggactgagggactactgcaacaaccactattgagacccccttctccagtggtgcaatctgaaccatgtttgcaaaatgagatggcacctccagggttcgagaattttaagtcatcatctgaaccatgttcagcagaggagatagcacctccagggtccgataatttcaaatcatcatctgaaccatgtttaccagaggagatggcacctccagggtttgaaaattttaagtcatcatctgaaccatgttcacaagaggagatggcacctccagggtttgagaattttaagtcatcatggccaccacttcccactctgccccaaactgtaccagatgcagccgcagcggatgctttggcagcaacagtggaagaagcagctgggccaccacctgcattggagttggaggcaatggatgtggacatggatgccatacatccaccaccgctgccttttgacagtggagtggagtcattgcaaaagccactgccaagagcaccttctcccataatgcaagaagcgccctgttcaccagatagggcaccgccagggtttgaaacctccattgctaccatcatctgaaagtggagcagatgggctatctccgcagcaattcgcgcaacctcctccccagatggcttggctgatgttcctgccat

SEQ ID NO: 60931 - DNA, 300 bp, Oryza sativa
  Clone ID: PAT_MRT4530_62412C.1
gcgcgccgcaggcagccggttggtggggaaaagatggtcaaaaaggaaggctgctgaagattggctgcatttgggctcttaggaatcgatatgtgcctgcagaaagatcggtcaagattattcctcacggttaatgctgcactggctgttcatttggttaaattttgcttgatagcagtaggatgtttagagctgccagcttcaggcttccgtagtgccgtgttcaagaaatcagtgtgttgattctatgactgaaatagtttgcaagacatggatagtatatagagaaaatgtcgctgc

SEQ ID NO: 60932 - DNA, 312 bp, Oryza sativa
  Clone ID: PAT_MRT4530_62413C.1
atggatcaagaagaacacttcaagatcaagccgtccaaattctggaatccaattcggccacctgctactgtgctaaattcaaatggccgccaaatgagcatacgagctccattttgggtccatgagtacttgatagaaagctcacgaagtcctctttccaacggatctagccttgttccaaaattctatcacagtcgacagcaattgcaaaaacaaggaatagagttgatctgcaatggcaagatcaacaacccacggagaggtgcatcgatcgctaaggcgcaacataacgtcttgtacagttgtagttga

SEQ ID NO: 60933 - DNA, 223 bp, Oryza sativa
  Clone ID: PAT_MRT4530_62414C.1
ccacgcgtccggaggcgagggtcatctcgggatcgcggagctggatgcggagctggaggccgagcggggcgccgtggcggtggccgtctgcgacgccatggcgaacatcctccgcctgcagcatagagaaggcgcaggccagtgatggaggcgcgccagctaaggcgctacgcctaggatgggctctggcacgacgccgtctatgtcctctggctccgctgac

SEQ ID NO: 60934 - DNA, 291 bp, Oryza sativa
  Clone ID: PAT_MRT4530_62415C.1
ggggagaggcgggcggaagggcaatggacagctgcgccggggtgggccggcaatcaacgcgcacgcagggcgcccgaaggtggacgggatacgggagaggcgggcgtacgcggtcatggacggaagcgtcggggggaggaccggggacggcagacggaggcgcgcgtccggagttggagcggccttcggaggaggacgggaaggaggaccaatagagaccgaagagggaggcaaccgcgggggaggatgcggccgtttggccaaggcctttatagagaggcagacgccggg

SEQ ID NO: 60935 - DNA, 145 bp, Oryza sativa
  Clone ID: PAT_MRT4530_62416C.1
taggggcctcggagcggttcagctccaatgaaagcccacgtcatcagcagcacgggccgggcccatttccctttcccaagcaaatttttgcggtcatgggcccaacgtttggtggttttccttgtgtggaggatttgaagatcac

SEQ ID NO: 60936 - DNA, 619 bp, Oryza sativa
  Clone ID: PAT_MRT4530_62417C.1
cccacgcgtccgagcagattttttccagtcatttggtctgggagccatggaaaaccaatgtagcctagatctggcaaacacagctctaccccacacagggagcacacagtatgcttttcagaagcagcaaagggatctctgggaggataatactttccagtataacgacgaacaaagccaggaggatgcggtttctgcaccgaatttcgatggtcagttgcaagcagcagatcacacagagatcgagttctagatgatcaatgataacagccaatgatttttgtacatagaaagcatgaaaccagttgcaaagtgaagctcctaagctaactgttcttcgaaatttaggcccgagggaactgattcatttttcatatgctggatgtacggctacttgattcttctcatatttgtgagacaaatatgatctacaaaatagtaggttatgtactagatatggtgcaaatattacaagcaccatctctcttccagtatgtacgagccggctggtaatagcctggtattgccatgatacagtgtactgttgattttgtcttgaaatgaaaaggtatgtgctatttcaacaaaaaaaaaaaaaaaaaaccggggatccactagt

SEQ ID NO: 60937 - DNA, 552 bp, Oryza sativa
  Clone ID: PAT_MRT4530_62418C.1
atggccatcgtctccgtcacgactgccaccgccgcagctggcgttctcattctggttgtcgccgctggagcagcagcggccgccggagcacgtcgtcaccacgtcgtcggaggtgacccggggtgggcggtggcctccgacgtcctcgcctggtccgcggacaggctcttcaccgtcggagacaccctctggttcgcgtactcggcggaggacggcggcgtcgcggaggtcggcggcgaggaggagttcgagtcgtgcgacgccgggagccccgtcaggatgtacacggaggggctcagccgcgtcgacctcggcggcgaagggtcgaggtacttcgtcagcgccgacccggacaagtgcggcggcgggctgaagctgcgcgtcgacgtgcgggctccggtggctggtacgacgccaccgccagggtcgtcgaggaagggcgaccgagctgccgctccggcgcccgcgccgttggcgtccagcggcggccgcggagtcgccacgtcgcggacgtgcgttatgctgtgctgcctcctgttcctggccatatga

SEQ ID NO: 60938 - DNA, 741 bp, Oryza sativa
  Clone ID: PAT_MRT4530_62419C.1
gccaatctggagaaggtggtgacggcggcggcggcgggcgggggtggggagctcacggtggaggagaggaacctgctgtccgtggcgtacaagaacgtcatcggcgcgcgcagggcgtcgtggcgcatcgtgtcctcaagatgaagggcgactaccaccgctacctcgccgagttcaagaccggagccgagcgcaaggacgccgccgacgccaccctcgccgcctaccaggccgcgcaggacatagccatgaaggagctgtcgccgacgcaccccatcagactgggccttgcgctcaacttctccgtgttctactacgagatcctcaactcgcccgaccgcgcgtgcacgctcgccaagcaggccttcgatgaagctatttcggaactggatacccttggggaagaatcctacaaggacagcaccctgatcatgcagcttcttcgcgacaatctcactttgtggacttctgatatgcaggacgatggaggtgatgaaatgagggatgcaaccaagcctgaggatgagcactagctaaagatcctagtgacagtcgtctgtctcttaaccgctgggggtagttatgatgcttgtacaaggaccattttcttgtgtcctttcgtcgggtctttgcttaccctttgtttacttatattgctatcgccatcctcatgtattatttggtactttcctgctggaatctgctcgtgtgtgggagagtgccctcagccctttactagga

SEQ ID NO: 60939 - DNA, 233 bp, Oryza sativa
  Clone ID: PAT_MRT4530_6241C.1
ggccgcccctttttttttttttttttggagagtggcacggtccaatcactaataggaccatccagggtaggcatgaggtgcgcatacccagagacacagacattcgaaccacaccatattaaatcctaaaacgtgacagaactttgagtgaacctgagcgacacaccataggaaaatcgtgcaaaggataggcggactgggtaacatatgaggactgctcagagcgaacaagc

SEQ ID NO: 60940 - DNA, 1404 bp, Oryza sativa
  Clone ID: PAT_MRT4530_62421C.1
tcactcaaaatttcctcttttccttgcggaggtgcggttcaccctcacaaagttgcttggatcaatgacagcttgaggaagctcatgggagacacctagccatccactatcatatgtcatgtagccgttactcacatagttgaacttgataggtgccaaagaagttcgagccaaaaccactaggaatttttggccaacacttaaacaccttgtctcatcgatcgtttgaacaccaggatttttgacccgaaattgtcccaaactaatatggtcaggtgggtgagcaggaaatacctgccccgttttcacccctggacggtggccatcattttccaccatctccatgcaagtctcagggccggtagccttcgctgcagctagttcccttgcgcggctcactgctgcaggaccgcttattagaacttccagaggcatcaccctctgatgccttcctttttcccttactaccactgctctgagcatactgtcctttgatggagacagcgccggtggtggaggagtgtacgctgctgtgagctgctcgacatcaatgggctgccactgaacgggttgttgcggcgtgccttgggcagccccagcgacggcggaatggttgcggacaacggtgcgcatgctaaacaccgcatgatgaagatcaatgtgcttcaggggatcgtttttgaaggctatcacacccttcctcacctctagattcaatctgaataacttggaacagccagcaagttcatctggcagtacggatatagtgttgtttgattcattgagttctgacaactccaggcaactggcaagactagctgggagatctgtaaggcgattatttgagcagtcaacctgtgatggcagtaaatgagtaactccaaaaacttgatagcagcatgatccttcagcagctggatcatttacaaatgtacttggcaccccattttggctttcccaccagctttcgtcagtgacaatggctgaagtaagggggtcccggccttgtccggttgcctgcgattcaagccacacccacagctggaaccgcttctttgcactgccccagatgtactccaattgcccttttgtcaccttcttcctgcacttggtgaacattttcttcgccaagttctcccatgccttgggtttgggggagttcgaggtgttgttgtatgccgccatctccgtacagagggcattggcgatgtgcacgacgtcgtcggctagagccttggcggtgcccgtgtccgaggcgaccgactcggaggagccctcgccggactccagagtggatcggcggatagcgattggtagaggtgacgtggttggaacaatctccctttccaaggcagggtgtgacagctcaacctctcctttccgcttcttccccctcgcctccat

SEQ ID NO: 60941 - DNA, 553 bp, Oryza sativa
  Clone ID: PAT_MRT4530_62422C.1
ggcgggaaagccccccaagaaaaaaaccccgggcctattagggtaggccttagcccccccctccccaagggccccaggggccaaaagggcaaaaggcccctttttttggcaaccaaaaaccccgggggggcccgggggaaaaaaaacccggggcggggccttcaaacaacaaaaagcgggcgcattttcgcccccccccccgggggattcccaggtcatccccccccaaagggggcccagggagccgggcccgaccttcttggcccggggggagacccccggcccccaaacataaattcccaacaaaggaaccaagggggcccccttcgttcccaaggggcccggggtagcagttgttcccacggaaagcttttttgcccttttatccaaaggtggccccccccctccaaatccttggaaagcagcccctttggcgcccattttttttaccagggcccaaaaggaaccaaaacccctatcaagggcccacccaagtttggcaggggggggaccaccccccccccgcctgaaaggcgggggggtcttccaaaaa

SEQ ID NO: 60942 - DNA, 2436 bp, Oryza sativa
  Clone ID: PAT_MRT4530_62423C.1
aaggtagccaccagcggcaagctccgtgggagcttccggcttcacattccgcccgtggccgcggcttccgcccgctcggctggccgcggcggtcgcaccctcctcacgcgcgctcgaggggaggctgcccaatgccgatctaggagagcgccccgtttccacggagaggggcgcgacggccttcgaccgcacgcctggtttctactctgtcaaggaggggtggggtatacaacctccgaggggtgcttcttgcgccaaacgaggacattggttcaaccgcaacacaagcgagtattgaagttcaacgtccaagcgagcactagccttcaacggaatactgaataatttcgcccgaatacatagtggttatgaaacagagaaaggacttgggttcttttgcattgattggatcatttcaatgactggtgagcacgccattcgacatctcagtggaacctcacaggcctccccagtgctcggtaacaaagagtgtcgccggaggctattggggattggtatttcgagagaagctatgaagtgaaagaaatcgactgcgactatccgtgtaaccccacatgtagcagccagctgcctaaatgattttacattgggctggacccagactaccacccttccctgaatatttatgcaggcttatttgatgaagcagcagctgcagatcatctttcaccatttgttctgtgaacaactaatagccatgctttgctgataatcagacgcctgtaataagtcaaacagtggccatctcgggtgaaaaggaattactacgaatacttcatatttcagtataggcaggccacaccagttctcggtaacaagattgtcgcggaggctattggggattggtatttcgagagaagctatgaagtgaaagaaatcgactgcgacttgctatattctgaaacggagggtgtatctcaataccggacgtcgtcgctcaaccaaaaacacgcgtcgacggagaaatgctgcgacgttgatgccttgatggcacagtggcacagtagcagtgacgctgcagaaagattgaccctggctcgcctcgatctggaccgcgctatctggatcgtacggctgtcagcggccgagaatggccagtgtctcaccctcgccggattccaccacctctcgggcctggggcttgagcaaaaccaaacccagcgtgcaagccgtgcatattacgacgaaagtgttcagttaagttcacaagactacggcgacagatcacagatcagatgtgacggtagccaagcaagtcggtcacttgtcgacgaagcgacgacttcgtcagcgtggaatccctgcagcatatgtgcttcgccgaaactcgacgtcaacggcgggttctcactttctcatcactataaatactcctcctcctcctcctcgtctcgctgtcccagcgagatcgaccacccagtccaccacccacctcgtacgtgttctgtccacacacgcgctgcggctacgggcgagatgccgatcctcccgcgtcgtcgatatgcggagcccttgctgctcctgctcctggcagccgttgcccgctcaacggcagcggcaccggacgtcgtcgagctgatcctcctcaccggcgctcaggagaagggcgcagtgtgcttggatgggagcccaccgggctatcacctgcagagaggctttggctccggtgaacacagctggctcatctatcttgagggaggagaatggtgcgacaccatcgaaagctgttccaaccgtaaaacgaccgagcttggttcatccaaattgatggaagcgcaagagttcgaggggatactcagcaataaccaaacagtgaattctgatttttacaactggaacaaagttgtcataaggtattgcgatggagcatcgttttcagggaatgcggaggctcaagatcaggatgggagcacgctccacttcagaggattgcgcatctggcaagcagttcttgatgagctcatggaaaaaggacttgcgagtgctaaacaggccttactttctggatgctccgctggtggtctagctacactactgcactgcaatgattttcatgcacgatttcctaaggaggtttcagctaaatgccttcctgatgctggaattttccttgatattgaggatttatctgggaagaggctcatgtggtccgttttcaatggaactgttcagcttcagaatgttagtgaagttttgccaaaggattgtcttgcaaagaaggttcgaacagagtgcttcttggccactgagcttgtcaagagcatcaccgctcccacgcttattgtgaactctgcctatgattcttggcagactatcgccaaggctgttggggattggtattttgagagaagcaaaacagtgaaagagattgactgcgagtatccatgtaatcccacatgtaaacttacgggataa

SEQ ID NO: 60943 - DNA, 404 bp, Oryza sativa
  Clone ID: PAT_MRT4530_62424C.1
gcacgaggcgtttctccccaatcccaccgactaggcctaagacggcggcggctgggagcttccccagcgggcggtgatccgtcgacgacagagggtggaaggcttacccgccttcgatcaaggctgctagggctggagacgcctgccgctgaagacgtcgggagagtgggggggccgtctcggaagaagcgcaagagggtgcctccggcggcggtggaggaggcagcggcggcaggagggggtggagtccggcggtcgcctcgtgtcttcccgacgtaccccacgtctggcgaagcgagtgatgttaatcgttggattttggagatggagagactctccaaaatcccacttcctccgggtactgtgattccttgcactcgtaggaggaagccaaaagacattta

SEQ ID NO: 60944 - DNA, 303 bp, Oryza sativa
  Clone ID: PAT_MRT4530_62425C.1
atgaagcatacctgcccccacttcgccgagcacagggcggaacgtgggggcaccgccgcccgtccgatcggatgtgaccggtcacaatccggtcatgcccgattgacgcaggtcaatcgggcagcgccgcacgtccgccctcaccgcattaaatgtggcgaggggcggttggggcaccgcgcattgatggcggtccagcttcgaccaccacctcactcactcccccaccacgtggcggccgggcgagggcctcagggcgaggcaacctgtcacacccagaaattctcgaaccagaatttctaa

SEQ ID NO: 60945 - DNA, 516 bp, Oryza sativa
  Clone ID: PAT_MRT4530_62426C.1
gtggacaatggttctgtaaccctgctttgcactgaggagcaggaacaactatacaatggggactgctatatcatacggtatagctacatcgaagacggaaaagactatcatttgttctttgcttggtctggactgaacagcataaatgaagatagagttgcagcagcgtcactaatgtcaggcatgattgattcagtaaaagggcatgcggttgtggcacaagtattcgagggcagagaaccagaaatgtttttcctagtattcaagtcattgatcatattcaaggggggcaggagtatggcatataagaacttcgtttctcagagaagcgatgcaaacggatggtaccagaaaaatggggttgctctattccgggttcaagggctgaaacatgattgcatacgagccattcaggttgatctggctgcaagttcacttaattcttcgcattgttacattttgcaagctggtggttctttctttacctggctaggaagcctttcttcaccaagtgac

SEQ ID NO: 60946 - DNA, 451 bp, Oryza sativa
  unsure (1)..(451): unsure at all n locations
  Clone ID: PAT_MRT4530_62427C.1
caaatnaccaaactatactactgctcgacacggttcgttttttttcaccgacccaagaagcagagaaagaagcttcgttaatgggcatgtcgcgccgctggtcccggagcagcaggcggcggcggaggacggcggggcggtgctggatttggtgcccgtgagcagcgttaatggcgggggcgtcgccaagaacctgccgcagccgctgcggatctcggatctgtcgccggcgccgatgcacgggtcgcagctgcgcgtggcgtaccagggcgtccccggtgcgtacagcgagaaggcggccgggaaagcgtacccgggctgcgatgccatccctgcgaccagttcgangtggcgttctcggccgtggancttttgatcnccgaccgggccgtncttcccgttgaaaantccttggcggcaaatccaccgaaataagactcctgttaagaac

SEQ ID NO: 60947 - DNA, 342 bp, Oryza sativa
  Clone ID: PAT_MRT4530_62428C.1
atctgagagcttcttgtactgtacagatgtgagctcctcaacacaagctctctctctctctctctcaaatcaaagcatttggcgcaaatccgccattgattctgtatcaatctctactggaagtttactacgggaccacggcgacctccttgggatcattggcagggaacacgtgctcctccgactgctcgtcgacgtcgtcgccgtcgtttccaagggcggcggcttcttgctgctgctgccgccgcacgacgtggctccacctgacctggaagaggtagacgaactccatggccgacacctccacggcgaggagccccgtacaccaggttacgctcctcc

SEQ ID NO: 60948 - DNA, 270 bp, Oryza sativa
  Clone ID: PAT_MRT4530_62429C.1
gtggcccttccatatgctgaacctcttgttcactttgctttggtatgtgggaccaaatctggacctgcacttaggtgttactcgccaggaaacatcgataaagaactggtggaagctgcacgtgatttcctaagaaatgtaggaattgttgttgatcctgaagccaaggttgcatctgtaagcaagattttgcgatgttaccgcatcttactacaagagtacaaggttaggtgtggctttgtgggaggcatgaagaccattgaaggctag

SEQ ID NO: 60949 - DNA, 1047 bp, Oryza sativa
  Clone ID: PAT_MRT4530_6242C.1
atggcgtcgtcgcccgccattggcgcgcgcgagaagaagctcgtcaggatctcggatttcctactcctccacgacgacagcgacggtgcaggcggcgccgaccacgagctgctgcggcggcggcgtcgtcgtcgtcgtcgtcaggaggatgaggaggaggaggttgtggcggcggcggcggcgcaggtggcctcgcctccttcgccggggacgccgcggctgcggatcccgggcttcacgtgcgcgcgcttacggttcgtgagtttccgcggcgggaggggaggacgtcgcgacggcggccggaaggaggagctcgccgccgagaagagcgaggccgcgtcgtcgtcggcggatgaggcttcaggacgcgaggtggcggcggggagcggcagcggcagcggcgcgtcgtcgtcggcggcgacggcgacgacgacggaggcggccgccgggttggggctcagcctgctgttcctcctggcaagaacgtccgccgagctcaacaagatggccgaggtgcgcgcgcagatggaggcgctcctcagcgagatgagagacgaagctgccatctgcaagcgcaacatcgccgccgccgcgcgccgcgagcttcgcaccacgtcgtcgtcgtcgtcgtcgatctcgactcgtctcgcttcgggatattcgtcgaacacctctagcgccggccgtgcggcttcctcgccggcggccaacggcgaggtcgagatcaagaagccgctgcaggaagaggagtggtcggacgacggcgagttcatcgagctggagggagggttcggcttcgtcgccggcggcgacgaggaagacggcggcagcggcggcggcggggtgtccggcgtggagctggagaggaggctgcgcgaggtgcagcacgagagggacagggagcgggtggcggagctggagtcggcgctgcggcgggcggagcggaggctgatggagaaggagatggaggcgcggctgtggaaggacacggcggagctcgcgctgcagcggccgccgccgccgccgctcgccggcggccggcagtga

SEQ ID NO: 60950 - DNA, 184 bp, Oryza sativa
  Clone ID: PAT_MRT4530_62430C.1
acgcttcgtacatgcacatcaagtgatgatcagagggctactctatcctactcacagtgagggcaatggcctccaggacggcaacatgcttacctaggtatcaggagcgataattatttcaccgccactcctcccccagtatcggatagctggggagtacagagtagctgctcaacgcagtcat

SEQ ID NO: 60951 - DNA, 325 bp, Oryza sativa
  Clone ID: PAT_MRT4530_62431C.1
gggggggcggggttttttttgacggggaaccggggggggggaagcgggcatcggcccccgtcgcagatcacactccgtcgggcgggcggggaaaccacagaggcgtgagacggagacctagggagcaggaggtgcgaacactgcagattaaccacgggggggggggagaacgaaaattttttttcggacagcctggcacacgagggcggaaggatgctggggccggaagtgccccccgcccgaaggtcatagccggggggagttgggtctcccggcggcggcacgggccaagagatgagggctccagggggggccgggacccacc

SEQ ID NO: 60952 - DNA, 243 bp, Oryza sativa
  Clone ID: PAT_MRT4530_62432C.1
atgaagagagaaggctacattggcggagagcagacggccggagttgagaaagaggagcagagggagcttacaggatataaaccagcagatgagagtaatcgtcgatgccgccatcgctcaccgacgcccgtggccggccatagcagtgctcgtgctttagctgttcgaatcgacctcaggctggccggccgtcgtctctggacgggatgggagcagaaggagcacaacgacgaacaaagttga

SEQ ID NO: 60953 - DNA, 291 bp, Oryza sativa
  Clone ID: PAT_MRT4530_62433C.1
atgtcgccgggcctagtgacgcccatgagcaagattgtggatgaggcctccagaacttggtggaaaaacatggaccagggactcacctgggatgttggatttgtggtcgcgcgattgggttccttagggttgaggatgatggcattctatgcaagaagcgcaactgggggaaccattgaatccaataaagaggatcatgaatcagcgtccccactctccactagaggaggaatgacgatggctcatggagaaggagcggcggtggtggtgcgtggatgtgaagagtggtag

SEQ ID NO: 60954 - DNA, 379 bp, Oryza sativa
  unsure (1)..(379): unsure at all n locations
  Clone ID: PAT_MRT4530_62434C.1
taattaaaaggtggntggagggtatcccaaacaaaaaccaatttnaaaagcangtaccnatgggtaaatgaaatgcaancctcnttgaaggcacctacgctaaanattatgtattgatttantnggttgncccgtaatgatgggatgttgagtaccatgcgaaattaatgacatcatggtaaatagagtattactgtccttttaccctctttttttgtttcccaattttcacatcatagtcactgcttctcttttttcttcaaaaaagaaatctgacaatagttagaattatttgtattgatttaagggggaacatcattttgtctttgaatgaggagggcagaacagcatttcctttgtaaaaaaaaaaaaaaaaaaa

SEQ ID NO: 60955 - DNA, 1623 bp, Oryza sativa
  Clone ID: PAT_MRT4530_62435C.1
atggagaacatgcagtatgctgaagaactagtcaaggaatttcttgtgttcagaggcttcacgagtactctgcaatcgtacgagtcggaattgtctaccgagatcgggaggaactttcaagtagacaagatcctagatttggttttctcggtgtatataccaaagtaccaattggataggttgcaaggtctgtttaccttttttaagcagtgcttcacttcacctgcggatgcggagcttttctcggctctcattaaattggagctgtcggtgttacggtattatgttgtcaatgcattgaaatctggaagacaagacaaagtagttgaattcttcggtgctaatggcaattatctgctgcagaagcgtgaagactggcaagcatggtttgctcttctcaaaattagcactgaaaagaataccattaaatgcctaaagaacgacataaagcaactgaataacaaattatcagagctacaagcattgttagagatgaaggagactgaaatatctcagttgagaaggaatagtactggtgttgatttgggcaacatgaatgttcccaacactagtgcagctgactcttctcttgaaggacaagatatgccaggagttttcgaagaatcctcagcttcgagaagcgctgcacagggttttgattcacagtcttcgagctcagtgaaatcttctacaagagatgagaaattgcacaaatcttttcaaataagcaatgcagagaacgagcagattttggtgacagaggatgactttccagaagtgaaagtggattttcaggaaacatttttaggccataacagttcaattagctgctgtcgattttctgcatctggatcaaatgttgcaagttcttccgttgatggtacagtgagaatctggacatatgattcctcaacaccatcatccaaaaatgccactatatactgtgggtctgaagtcagtgctctttcttgggaatgcagatctgaccgcttgctgctcataggcacagctaatggtggcattaaagcttggaatgctgatgcaaagagagttgtttgcgacctcagtacatcaaaagactttcccagtgtgttagatttgaagtgtagccctgtagaacctgtgtttgtctctgcagctgcatctagacggcctggatcaactatatttgacagaacaggatttgcttccttgactgtatggcatatgaaaacatggaaacctctgatcactggatggcctgcccatgattcccctgtcagctctgttcttttcgggcctgctgaaactagtatatttagtttgggctcagatggaaagatatttgagtggagcctgcacaatcaaggccagattctttggtcaagagattgcagtaggttttgcagtccagagagctttagcaaacgcatgcatgagatatcattggattctgatggcaagaggctgttggttacatcgggtcttgtccgggctcctatatatcaggtacaaggccatgaaagtgggctgaggacacttgctcatagtgcatctattacaagtgtggattggcacccgacgctaccaatgtacattactgggtctgcagacaactctgtccgggtcacatccattgtatga

SEQ ID NO: 60956 - DNA, 1134 bp, Oryza sativa
  Clone ID: PAT_MRT4530_62436C.1
atgtggccgtgcttgtctccccgggcggcagtgctcattgcgctcctcctcttgccggcggccatggcggcggcggcggcagaggccggcggccacggctatgatatgaagtccatctactccgggcccaaggtcgtgcccgttctgttgggcccgcgcggtgttctgcccggagagccttgccttagaccaccggggggggagggccctcaccccgatgtgtccaatggtgttgatgcttcttgtgaagccctgaaattctgggcgtcgccgagtcccttgcacagtcgcgaagtctgcgcgtatccgcgtaacgcgttcgaagaaagacatgtgccggcccggacggtggcggagtgcgcagcgaggaagaaggcggcggcggcggcggagagcgtgtgcgggcggccgctgggggtgcagttcgaccggaggacgggcgagatgtacatcgcggacgcgtacctggggctgatgagggtggggcggcgcggcgggatggcggaggtggtggcggcggaggccggcggcgtggcgctcaacttcgcgaacggggtggacgtcgaccaagccaccggcgacgtctacttcaccgatagcagcaccacgtacaagcggagcgactacctgctggtggtgctctccggcgacgcgacggggcggctgctccggtacgagccgcggacgggcaacgtcaccgtgctcgagtccggcctcgccttccccaacggcgtcgccgtcagcgccgacggcacccacctcgtcgtcgccgagacggcctcctgccggctgctccgccactggctccgcggcagcaacgccggcgccaccgaggttctcgccgacctccccggctacccggacaacgtgcgccacgccgccgccgacggcggccgcggcgcgtcgtactgggtcgcgctcaaccgcgacaaggcgtggaccgtgaacggcacgacgccggcgtccgtggccgccgtcagggtggtcgtcgacgacggcggcagcaaggtggacgtggcgctgcgcgggttcggcggcgccacggtgagcgaggtggtggagcggaacgggtcgctgtggttcggctccgtcgacacgccgtacgtcggcttgctcaagctcacctcgctctag

SEQ ID NO: 60957 - DNA, 211 bp, Oryza sativa
  unsure (1)..(211): unsure at all n locations
  Clone ID: PAT_MRT4530_62437C.1
ttctcctccccctcccggttcggttcggtacggnacggctccggttcgatccccggcnnttccttnggttcgggggttggtgggaaagcatggcggcgacggatgttgagtaccgctgtttcgttggcggcctcgcctgggtcaccgacaaccgctccttttaaggcgcctttttcacctacggggagatcctcgagtccacgatcatcaa

SEQ ID NO: 60958 - DNA, 344 bp, Oryza sativa
  Clone ID: PAT_MRT4530_62438C.1
ggggggttgaattccccatatatattaaaaaccttaaaaattaaaaaggcatactaaattttggttttcaagcctttttttaaaattttttttaaaaaaggggaaaaaaccccaccatttttgggatttggggatcgattttaaaaatatgcatgggggggtacacaaataacggggggacgcatgcatgagctaggggaaattttatgggggaaaaataattaatatggatggaggacaagggggttaattatagctggggcttgggggaaatgggaagggccccggtaacaaacgggttgactttgttttggggggccttgagcccgaggttgggttcaagt

SEQ ID NO: 60959 - DNA, 538 bp, Oryza sativa
  unsure (1)..(538): unsure at all n locations
  Clone ID: PAT_MRT4530_62439C.1
naaanaggatccnggtnngatggcaggtccccnaanaccttnagagtttctcttcttgtccagggggatcattgaaaaantatantggggngtnaanagggcntgaacctggacgatatccttttnggggngcaaatttccggatttttttnttnggngggaaanatgcgntnaanatgaatgntcagaagacgtttcttcttcggaagaagaagccantntccaagaagaagctgaagagggaaaagctgaagcagggggtttttgcacccggagagtgaagagatttgtcagttnaccaangtnanngattttatcctgagctttttttgcanganaagaannatcagctggagcggcagngttnacagnaaanatgtnatgtagaagctttntcctaagtggttaanatttgtattananccctnatttgagcaatttgttgaacagcactnccaaaaaaaaaaaaaaaaaaaaaaaaaaaaaaaaaaaaaaaaaaaaaaaaaaaaaaaaaaaaaaaaaaaaaaaaaaaaaaaaa

SEQ ID NO: 60960 - DNA, 235 bp, Oryza sativa
  Clone ID: PAT_MRT4530_6243C.1
atattgactgctgatggaaagacgccactggaacccgtgtgttctggatggaataactgaccataggctggggatatttgggagggaggaccgatgaggcgccacgccaggctgttggttgataagttgccatgtgctgatgactgaccagatccccggcataggaccgtcactggctactcccgtggcctttgctgaaacatgctgatctgccccctgaaatgtgttggtgtcc

SEQ ID NO: 60961 - DNA, 213 bp, Oryza sativa
  Clone ID: PAT_MRT4530_62440C.1
atggcgaccaagggacagaggtcgatggggttgctgacggtgagggaggcgacgatgggcaccaataagaacgccatggggagcttcgtgctacacaacgacatgtgggagctcaggtctggcactaaccccggtgccatgctatggtccatgaagaggaagacggacgaggagaagaagaagagggatttggggtggtgctggcgcggatga

SEQ ID NO: 60962 - DNA, 224 bp, Oryza sativa
  Clone ID: PAT_MRT4530_62441C.1
ggagtctagggttatcgcgctccctccctccctccggtcccatggcggacaccggagcggcacagcctccgccgccgcccctgcgggcgcccgccgccgtgccggagaccctgcgccggctcctcgcgctggtcactgacgtactggcgggctgcttcctcgccgcgaagcgactgacgcgaagcttctgccggggcgctagaaccttctagtaggagtgtggg

SEQ ID NO: 60963 - DNA, 1725 bp, Oryza sativa
  Clone ID: PAT_MRT4530_62442C.1
atgctgcggcggccgctcgccggagctccgcccgcactcgccgtcggcacctctctctccgacgaaggccaagtgagcagcggctcgctcgtcgcggccgtggaaattaccatgatgacgccgggatcgtcctcgacttcggtgccgggagatgaggccgacgccggcaactgggatgcgggggtggagacggcggcgcggctggaggcgatggttcatgcggaggacgaactctcggaggagcagattcaagccaacaaccagacacaggaagatgagctgctggcactacaggccatctatggtgatgatttggttatcttcgacaataaggacggccttcgatttttccagatttctctgcactatcaactcgccggtgacatccgagtttacctgaatgtctgccccaacgggagaacagaaaccggagcagaaaacgacgacgacgacgacagtgaccgactcttgtatgcttgcagcctgcagcatctgcctcctgttgtgctagcctgcctactaccacgtttatatccgagtcaccgtgccccctacttcgtggtcgccgcgaagtggctggacgagccggaagtttcaagcttctgctctgttcttgatgagatctgggcagagcagcctgcagggcaagaggtggtgtacaaatgggtggactggctgagcacctcttcctggttttgcattgcttcagatgatcagattgtatttggaccagatgcagactcggctggtggtgatgaccgggcaatcggaagaagctgctcccttgattctatgatccctctaattcaacgttacagcaaggagagatcacatgaaattttcgctcgaagaatccatgagtgcggagtctgtctcagtgaaaatacaggcagaaacttcatacagctcccatgcagccactccttctgcgtcaagtgcatggagacgcagtgcaggatccacgtgaaggaagggagcgtggcgaggctgacatgcccggacacgtcgtgccgccggccgctgccgccggcgctgctgaggggcctcctcggcgacggcgagtacgcgcggtgcagcgccgcgtgcgtggcggccggcgacgacgcccagtgctcgaggtgcttcttcaccttctgcgccgtctgccgggagcggcgccacgtcggggacacctgcgtctccccgaaccagatgctcgacatcatgctggaacggcagaaggagaagaggccgttggcggcgccgtcgccggacagccaggcggtgtcgtcgaagaggaagatggaggagcttctgagcctccgcgaggtgatgcgcacgtcgaggcagtgcccgtcgtgcaagatggccgtgtccaagacggccggctgcaacaagatggtgtgtagcaactgcggccgccccttctgctaccgctgcagcagggccatcaccggctacgagcacttcgctggggagtgcaagctgttcgagagcgtcggcaaggggtggttcccggggcaggcgatgtggatgaacctcgaatacgactacgacgagatcgccgagatcgggacgccctcgtggatacgggctatcaggtatccctgccctacctgcggcgccaagcgcaccaagtcgggcaacaatgaccttctaacgtgcagaggatgccgaacccattactgcgcgctgtgctcgaagaaggtatggagcatcgccgagcactatgggccagcagaatga

SEQ ID NO: 60964 - DNA, 565 bp, Oryza sativa
  Clone ID: PAT_MRT4530_62443C.1
cggcacgggggagagctccagattggaatctcgagagagggaggaagggggaaatggcggactgggggccggtggtggtggcgacggtgctgttcgtgctgctgacgccggggctgctgtgcacggtgcccgggagggggcgggtggcggagttcgggagcttccacaccagcggcctcgccatcatcgtccacgccgtcctctacttcgcactcctcaccatcttcctcatcgccatcggcgtccacatctacgccggctagctatgtactactcctttcactgattgattttggtggattggttggttgtctggtgaattggggatctcgcgtgtgtgtttgctgtactagatgtcatactgtcatgtcaggtcgcttgtgttgtactagtacggcagaatcaaagggtgtgtagtaattctcttttgttcatctgattagtactagtactactaatttggtgctgtactactgtgatattgtttcagtgtttttggttgtactagctaattagttgcatcaaaaaaaaaaaaaaaaaaaaaaaaaaaaaaaaaaaaaaaaaa

SEQ ID NO: 60965 - DNA, 227 bp, Oryza sativa
  Clone ID: PAT_MRT4530_62444C.1
aaataaaaacactggttggagatatataccaagaaggggctatctcaatctataaggaaagataaaaagtacttgatcattactgatcatcataaaataaagtgcacttcatgaacaaggaatgacctaaaatggctacttcaacacaagaagaatatggctagacaaggtacacaaaagtaagcaaggccattgcccatatctttaacgttggcctctatcaggtg

SEQ ID NO: 60966 - DNA, 855 bp, Oryza sativa
  Clone ID: PAT_MRT4530_62445C.1
ttttttttttttttttctcctcttctaacttaatacaaaagacacatctttattctataaaggtcgggaattggtagtggaggtgggggtggcagaaccaacaccaccactactctcttttataaggagtgtagatgagtcggggtaatttgttcctaaatcacatcttggaatatgaccttgtcgatgtggctatcaattgtctcaggtgagcagtaggcgacatagcagaagctcttcaccacatggagaaacgtctcccgggttagtctgttaatagcgctgcagccctgtagaacgcgccgagtcaattcctgcatctccaaatccacttgctggtctatctcctcaactttctccgtactttccccattctcctgggcaagaaccctcctggaaagtttgcagcagatggaggaggtgagctgctcgagctgggaatactcccaaaggtccggtctttgcccggtcaaaacatgccgtcctccaaaaatctcgatggcacgaaccaacaatattgccgtgtccccttcaattgactcctggctgctctcctttgcagtccatgccatcaaccactgcttccaagcttcacgaagactgccagaataagcgtcgtcaaaaggaacaaggctgataagctcttcaagattgctggtcgaattttttggtcccccgattctcctgaagtgagaggagacggcatcggcaagcaacgctacgcgagcccatccaagacgttccgctgctcgggttgcctcgaagatgttggctgaagctaagaagtaggatgtcatcagtgtagtctgtggatcagtccctccaaacttctccagattactcctcaagtaccac

SEQ ID NO: 60967 - DNA, 334 bp, Oryza sativa
  Clone ID: PAT_MRT4530_62446C.1
ggcgcgcgcgtgcacccgcgggtgcgcacgcggctgtcgagtggctcctcggcggtgcctctttgcccctctccccctccgtggccggcgtcaaccacggccggcgacgagagcaagtcccagccatcgtcgttgtcgtcgctctgcttaacgtgggcgacgccgccgatggcggtcgtgacgaaagcggtattgaaagacagtggtgatcgtaggggatcccgcaaaggtcgtggcgggggggtggagtcttcccgtccctgtgtgacgggggcccaccagccattggactgggcgcccccgatcagggcgcgggtcaaggcccccttgagcc

SEQ ID NO: 60968 - DNA, 320 bp, Oryza sativa
  Clone ID: PAT_MRT4530_62447C.1
aaaacccccaacccccttttttggaaaaaccaaaacaaaaccccccccagggggggaaaggccccaggggccccttaagcccccagggggaaacccaattttaagggggaggttaaaacccaaaaaaccttggctttgggtttggcccaaatcccccccaaaagaaaaacaaaaaaaccgggggggtggaaacctggggccctttggcccaaaaaattttaaatccccgaaggggaaactggggcccccccccccggagcttgggccaaacttgggtttttcccaataaaaaagccctttttgccaaaaagggggttgcc

SEQ ID NO: 60969 - DNA, 216 bp, Oryza sativa
  Clone ID: PAT_MRT4530_62448C.1
tggagatcccgagatcgtttgacgcttcaaaactcgccaaattgagaaggtaactgaaatggaagcaatattaacggggtagaggtagatcgtgccagggacctcgtggaattgcggcgtcgcaacgcaacctcctacggcgtatggtatcgcacggacagtagcacactgatcccaactctgatatatacggcgtgcaaatgcgctgccaagtga

SEQ ID NO: 60970 - DNA, 1068 bp, Oryza sativa
  Clone ID: PAT_MRT4530_62449C.1
atggagagctgggtccgcgcggtggtggaggctatccactcatctcgcgcccaggccgtcatctacctcgccggcggcgcctcgcaggcgctcgggtggctgctgtccgtgcccggcgcgtccggcaccgtcctcgaggtcgtcgtgccctactccatggcctccatggcgcagctgctcggcaagatgcccttgcagttcaccagcaagcaggccgcagaggacatggcattggccgcgttcaaccgcgccctcaagctttctggacagggtttacggagcagagaggaagaagataaagtttcaagctactttctgctcaaggcaattgcagacggctgcaaagttcctgcaaccattcagtcagatgttcaagaacctgaacttccaaaagaaagcgtggaacaatttgatgaagaccaagaactccagcaagttattgatgggcaagtctgcatgaaagtgtatcacttttctgattcaatggataaaaacttcaacaggaaaataattctacctggttcattcaatcccctgcatgatggacaccttaggctgttagaagttgcatcaagcatgtgtgatgatggtcttccatgctttgagatatcagcaatcaatgccgacaaacctccactatctatcgcagaaatcaagcgccgggttgagcaatttagaaaagtaggtaggaaactccaattgatcgatggttttgttcttctttctgatgcagggaagaatgtgataatatctaaccaaccatacttttacaagaaagcggagctatttccaggcagtgcatttgtaatcggtgcagacactgcagctaggcttgttaatcctaagtattatggaggtgattacaatagaatgctagagatacttctcgaatgtaaaaacacaggtacaacatttcttgttggtggtcgaaatattgaaggagttttcaaggtccttgaagatttggacattccagtcgagttaagggaaatgtttatctctataccagaggagaagtttcgcatggatatttcatctacagatataagaaaaaaacaagggccttga

SEQ ID NO: 60971 - DNA, 279 bp, Oryza sativa
  Clone ID: PAT_MRT4530_6244C.1
atggaccgagctgccgtgccggtgaagagggtgtggctcggcctcgccgcgcgcctcggcctccggcgaaccagcgggctggggaagctgaagaaggaggtgaggacgtgcgagtaccacgacgtgcacatcatgtgggagatgctgaggaagacggacgcgccggtgcccatggcggagaaggaggccgccgccgccgcggccgtcgcggcggccgccggcgcccggaggaggaaggcggcgtggagacggttcctctactactgctgcgcgttctaa

SEQ ID NO: 60972 - DNA, 650 bp, Oryza sativa
  Clone ID: PAT_MRT4530_62450C.1
cacgcgtccgctcgcggctgcgcgatggagagctgggtccgcgcggtggtggaggctatccactcatctcgcgcccaggccgtcatctacctcgccggcggcgcctcgcaggcgctcgggtggctgctgtccgtgcccggcgcgtccggcaccgtcctcgaggtcgtcgtgccctactccatggcctccatggcgcagctgctcggcaagatgcccttgcagttcaccagcaagcaggccgcagaggacatggcattggccgcgttcaaccgcgccctcaagctttctggaccaggtctacaagtaatggggtgttggcttcactgggtcactggctagctcacgtccaaaacatggtgagcataggttctatgtgtcaacacgaacacaaaattgcctcaggacatcacatgttacattgtcaaagggtttacggagcagagaggaagaagataaagtttcaagctactttctgctcaaggcaattgcagacggctgcaaagttcctgcaaccattcagtcagatgttcaagaacctgaacttccaaaagaaagcgtggaacaatttgatgaagaccaagaactccagcaagttattgatgggcaagtctgcatgaaagtgtatcacttttctgattcaatggataaaa

SEQ ID NO: 60973 - DNA, 386 bp, Oryza sativa
  Clone ID: PAT_MRT4530_62451C.1
agtgaagggtaaagatacagcgcacaaatcgcgcttaaggcgaatctttgcataaacgaagttaacatgttgagttacaatgtaaagaaaaactcgttccaacactgtgctagtccattgatgtggaactgacatcaacacgacctgggtatacatgcttccaggcacaacaataagtttgcagatccgagcacaacgccattcttatttcggatgaaaattacggtcggaagaaataaaacaaccaagatcagcagcaagcgttgcctcactttgtccaccagtgaaggaaatccttgcgcctgttgatcttcttttggagctggaggacaccatacagtaaagcttcagcagttggagggcattcagtgacgtaaatgtccaca

SEQ ID NO: 60974 - DNA, 444 bp, Oryza sativa
  Clone ID: PAT_MRT4530_62452C.1
agtttgcaaaattctttatgaatggaaccgtgcggggtgacgtacttttcttgagcacatccagcagtagcatcttggaatcagtgaagaactgtgtatacgtttcatacctcagtgtgcaccacaccccaagaatggccgctcccatctgggtagtgctaatcttgctctgcctgcctgagatgataccatccaggcagttcatgcattgctccgatggcatgccctgcatgcactgcactagcccatacaccgactgtcctgtctcctcaaacctctgtttgcctactgcatacctctctggtcgactcactgcagcatcagtaagtgcacgcagcaccttggtgacaagatcctcaaattgcttagccacagaagctgtcacagcattcaggttagtattcacagtgcactccggcacatttgtgaagctggagataaaat

SEQ ID NO: 60975 - DNA, 780 bp, Oryza sativa
  unsure (1)..(780): unsure at all n locations
  Clone ID: PAT_MRT4530_62453C.1
tatagcataatacaagaatatcaccagagagctataatatagcatcatataatctanagcanacgtanagcacacaataccatagcacaatcancacaacatacataagcacagataatatatcaccaacacaaacaatatacacacaatagagagcacacaatagagactcccagtagtacgagcacgtaacaatagactcgcananacagtaagagagcaataggagtacacatcccaccaccgcacactagataacaatagatacagcacancacaaaatagagcagccacacatagcaacgacacgcacctagtaaagcaatagcanacatacanacgagcaatagactngcncatcacgatagcacaacatagatagaggcaacnccacgatataagcnccaaagactagactagccaaagacagccaatagccaaaacacacgatataatatatagtagcataggaacatcagagagcaaacaaacaagactgactagaacgactgagcagactagcaagactagcccaataacaatagatagccaaaacaatagaggacccccatagatacaaaacatatccccaaaacatccatccatatcccatagatagagatatagtatagtatagactccaaaaccgattaggattacaatgtacctctacgtaataangagtgttgcatactctcgtgtgcaaacactcgaaataagaaccattgaataaaatatcaatcattttcagacatagcaaaaaaaaaaaaaaaaaaaaaa

SEQ ID NO: 60976 - DNA, 248 bp, Oryza sativa
  Clone ID: PAT_MRT4530_62454C.1
atgatcttcccacgggataaaataaatacgataccattggaatactctaaggtgaaatgctacaatggtatatccatgcgcttgcggatgaactctgtaaccataatataccagaaatatttctgcgccattgttgggaattatatttcttgtaatgccgttaagaaataccaacaagcaattctggcgccgttggcggggaagattcatgcatgactggtttcaacttgccggaaaactttaaagaa

SEQ ID NO: 60977 - DNA, 570 bp, Oryza sativa
  Clone ID: PAT_MRT4530_62455C.1
aaggataaacagaggctttatcataattaagtagaaggactggacacaacatagcaggagaacaatatatggcaagcaatttattaaaagaattcatcttcctattagacctacccaacaaaataaactcaccgtcctttcttgcgggacctgattcggttcccaccaagaggcgacgcgcgaaaactccactggtatatgcggtgagccaccgctcccatacagcatttaaagcacctgcttacttgatagactgctacttgacaacctctgaatgcacaatattgcatcagtagtgcattacaatgcctgtacacgggtaacatcccgcagcgcaaggtcatacattatctagcaagcgtccttcacaggcaatatggcttgcccatgaaataagacttgccttctcaaactctgacatgggagaagccgcctctcgtagtgggcggagtccagaactaagaactaacatcaaatcgccaaagctgcaattgtcaccattgctctgataaaggtccaccaccaccatattcaggtgcaacatatcatactgctgcactcatgcttgga

SEQ ID NO: 60978 - DNA, 342 bp, Oryza sativa
  unsure (1)..(342): unsure at all n locations
  Clone ID: PAT_MRT4530_62456C.1
accgtttcctcgccgtttgcacggccctcccctcgtcgtctcgtctcatcctcaacgccaccaccacccaccctgcactcccccttctttattcccccgcacatgccattgccatcgccattgccaacctcaccctgctcctctccatctcctccctctccattgtcaactcgcctcggttccttcatgtcgccggcgacgacggctgagtagaggtaacagcggcggcggcggcgatggaggggaggtgggtggtggtgtttttgggggtntgtgtcgtgtcgtcgtggggngggccgtgcncccggcgcgggctcggccggtcgcgtgggtcggcccggg

SEQ ID NO: 60979 - DNA, 419 bp, Oryza sativa
  Clone ID: PAT_MRT4530_62457C.1
ttttgggtttttttttttttttttgttttttttttttttttttttttttttttttttttttttttttttattctatattcaatatgattgtaattaaaggaaggtccaattttttatagaaaaaagaaacaaaaggggtttggacaaagaaaaatacaaaaacttcaatgaaaagagaaaccaaaaggggccggggcaccctgagggaaagggccctccccaagggccaaaaccctgacggacacgggggggaagggccattctacttacccccagcgggaagatttccaaaactagttacaagaaaggcgaggatgcccaaagccatcgatatgggatggccacgaacacaaacacggaaccgggatgtggagggccctaaactttgggcaaacccaaaggtgggcccggggggggaa

SEQ ID NO: 60980 - DNA, 528 bp, Oryza sativa
  Clone ID: PAT_MRT4530_62458C.1
atgcggtgcccccaggcggcggcgctcgcaggcggcagcgaggcggcgctctcgggcggcggcgcggtggtgctcgcaggcggcgaggcgatgctcccgggtggcggcgcggcagcactcgcaggcggcgaggcgatgctcccgggcggcggcgcggaggtcccccggcggcagcggcgcgtggccctcaggcagcggcacggggttcccaggcggcgggcccctccaactcccgcgtggattccagcattctgccacctctctggcccctacgcgtgtggatctgccagtggcagcgacgccagggcggatccggcgccccctccccctcccgcatggatctcgccgccactactccaccctgcctcacgcgaggatccgtcgattacttcgagcgacgaggataagtacgatgacaacgacaacggcgaggggcggcgaatctggtggcaccagccctcgttgactgttgttgcgtcgaggatgatgacgacgccttggaagctagggtttctgctggcgtggtga

SEQ ID NO: 60981 - DNA, 390 bp, Oryza sativa
  Clone ID: PAT_MRT4530_62459C.1
atgcgccatcccttcctgagccagctagccaccagcaccgccaccacctcctggcaaggcaacttgccacctctgccatcccaactaggttggcaccgcgctcagccaccccgcaccggatctgcaaccgcctgctcgctggtcgccctgaacctagggctccatcagcggagctgctactgtcgcccccccctgtttggaaagccaccagagctaccactattgactttgcctcgatccgggccgcagtcgcgccaggttgagcaccgcccgtgtgaccgcctcctccccgctaccccagtagcgacctcctcgctccaactgctcagctccgccgtcctccgcccttgtcgcgcctggatctctctcgctcgggcagggagagtgtga

SEQ ID NO: 60982 - DNA, 1264 bp, Oryza sativa
  Clone ID: PAT_MRT4530_6245C.1
ttttttttttttttttcctgtgaaggatcactgtattttgtttcacttcctgattttacttttacaacgttattgaaagacattgcattctgcagtttagcttttgtcttttttttttttttagtacaaatacgaatcaacgttttgatttccaatgtgcaagaaacgcatgaacagctgcatgttaaattggcaaaaaaatacttgccttgtaacaatctaaatagtagtattctttggttcggaaaaacttctctagtgtagtactactactgtaagtaacttgcaagatttgatggcccgggatgtatcaggtgtgagaaaactaatctctggctgcagaccagcaaaggaaaatctccactgcaatgcgacgcgccagccccagcagctgatcaaaattaccaggcaggcaggaactgcacccaggaagaggaagactcaaatgaaacatctgacaaatgatctgttgatcaccagcattgtgatacttgtctcgatagcttggtatctgtgcttgtttcgaggacgaaattgcattagtttctccgctcagtttcattaaactttgcaacgcgatccccattaaatagtcactcatacaatatccactatggtccaccatggtcactcaaaacagcttcaatggctgctaggtgcaaccattcatatcttccgcagggttaaatgttaaccatggttctgcaagtaacccttctggccaccatgcagcttatacgacccatcaacagtgactgcatacagcttaggtaaatcccttatcaacatcactcagaaaagggctcagtcatgttctgcttttgtccaagtgatcgcgactcaggtgcttcactcagtaaagcaaaaaaatacagtttcgcattgcatctcaaacattcatttttcatattgcagggatagatgagaccatctatccatcccttgttatttcttgcatgactatctgctccattaaccagctgctcagaggtaattgaatcatgaactgcagttggaagataccctcatttttcatatttcagtgataggcgggaacatttgagtatctgatgatgccatcttgtgtccctcagatttcttagcttcactgtattcaatataaaatctagctcgaccagctcaatttgatccattaacctgcacctctgagggaattgaatcatgaactgcagttggaagatgtctttctgttttgcaataaaagagctgtggtccggtaaattgcatccgggagaattcattg

SEQ ID NO: 60983 - DNA, 367 bp, Oryza sativa
  Clone ID: PAT_MRT4530_62460C.1
ttaacaatactacccgcactctgcttctctgttgctttctctagatgagcattctggatacgacgtactacagcggtagggtcagctctgcgctgagcagagacgaggtagaggtcgaccccgacggcatcagcggaggagaggaagccaatcggcccgaaacggaaggcgacggctacaagtgtcttgcacagcaacaagtcctgcatgatggtcgaagagccgacagcaacatagaacagtgactctgctcatgctgtggcatctgcaaatgctgaccacggcacgattgctgctaccaagctgaccatacatcatactttgaaaggcgccacatggacagaatgatctgcccgtggaactggaa

SEQ ID NO: 60984 - DNA, 412 bp, Oryza sativa
  Clone ID: PAT_MRT4530_62461C.1
tttttgtttttttttttttttttgcagggagaattcagcagggagaactgtttgctgtgaaattatggggggtttgctcgtcttacaggcaaaatggggaatccccacacaatccatgaaaatcatttagccgttgcacttctgtttgcacaaaccggctaaattaaaaacttctccattcagaaaaactagaacgggaagcatgttttccttcctttccctaccaaaacctgaatctccatccaaaagagggaggagtcgctttcctgcaccaccactcaccagcactactactactacttttagtcatctactgccgattttcaccaagccaagagggcagaagaaacccggagaatccagcattatgagctcctcccctcctcgatctcctaatcgatgtagcccctcc

SEQ ID NO: 60985 - DNA, 1511 bp, Oryza sativa
  Clone ID: PAT_MRT4530_62462C.1
tggcgcgcggataatttgctcctagacctttgctgcttctcccctgtcgataaagccgaccacactgctcgcgtccccccgcgccgttcttttcggagattccgctcgcgcgcgccgccgccgccgcagccgcccgccggggagcccgggacgaggatggaggtcgtcgtggcgaggcagccgaaggcgaagaagcagataaacctcttctactgctccgagtgcgaggagctcgcgctcaaggtcgccgctagctccgacaccatccatctccagtccatcaactggaggagcttcgacgacgggttccccaacctgttcatcaacaacgcgcacgacatccgggggcagcacgtggcgttcctggcgtcgttcagctcgccgtcggtcatcttcgagcagatctccgtcatcttcgcgctgcccaagctgttcatcgcctccttcacgctcgtgctgcctttcttccccacgggctccttcgagcgcgtcgaggaggagggcgacgtcgccaccgcgttcaccctcgcgcgcatcctctccatgattcccaagtcccggggcggcccgaccagcgtcgtcatctacgacatccacgcgctccaggagaggttctacttcggggacgacgtcctcccctgcttcgagaccgggattccgctcctgctgcagcgcctccggcagctccccgatgctgacaatatcaccattgccttcccggatgatggggcgtggaagcgtttccacaagctattgctcaacttcccaatgactccgagtttttactttgggctgtttgattataaggttgtctgcgcaaaggttcgggaaggtgacaagaggatagttcgaattaaggaggggaatcctgaaggccggcatgtggttattgttgatgatttagtgcaatctgggggaactcttagagaatgtcagaaagttttggctgctcatggtgctgcaaaagttagtgcttacgtgactcatgctgtttttcccaagcagtcgtatgagcgcttcactcacactaattccgctgggtcagctgacaagtttgcgtatttctggatcactgactcctgccctcaaacagtgaaagccatcaaccaacaacctccatttgaggtgttgagccttgctggttcgattgcggatgcccttcaaatatgaactttgtttttggtaatgggctactcccatttttcctaaatgttagagttcactttcagctccagtaaaaacaaataatgtggagtgagttatcttaattatggctttggcctgacgtcttcataaacatctcaatatgtgatggtaaaataaggcatttgatgctcataaaaaaaaaaatgagcaaagcgcacacaatcactgctttatttcctgacatgtatactactggaggctgagcacatctgcacaagtgctcgttttttgtcttgctcccgaaaaaagcgcttatttctgtcttaatatggatatgactgtttattaaaactcatgttttattc

SEQ ID NO: 60986 - DNA, 162 bp, Oryza sativa
  unsure (1)..(162): unsure at all n locations
  Clone ID: PAT_MRT4530_62463C.1
caaaaaagacacatattcattcaatcaaagagtaatccatcttgaaattccaantaaagattcatcgatgtgatgaggagtccccgagtaaaacgaagatatatcatatatngactgattggtaaanccaagtatatctcgtaggtaaccagtattataaaa

SEQ ID NO: 60987 - DNA, 456 bp, Oryza sativa
  Clone ID: PAT_MRT4530_62464C.1
gacaggcccgggtaatcttgggaaatttcatcgtgatggggatagatcaattgcaaattgttggtcttcaacgaggaatgcctagtaagcgcgagtcatcagctcgcgttgacatacgtccactgccctttgtacacaccgcaccgtcggctcacatacacgattgaatggtccaggtgaagtgttcggatcagcaggcgacagggggcaggttcgccgcaccacacagacgtcgcgagaagtccattgaaccttatcatttagaggaaggagaagtcgtaacaaggtttcacgtaggtgaacactgcggaaggatcattcccgtgaccctgcccaaccagccgcgaacgcgtcacaccaggcccgccgagcgtcgcgcgcgaggcgaccgagccccccggcccgcacacagaacccagggcccccgcggcttcaaggaaaaaaaaaaaaaaaaaa

SEQ ID NO: 60988 - DNA, 321 bp, Oryza sativa
  Clone ID: PAT_MRT4530_62465C.1
aattcggcacgagcttacctctctctctctctctctctctctctctcttctcctttccctctcctcctctwcccaccaccaccaccgccgccgccgcctgattggtggtaatcggaggtggaggtgggcgtkatgatctctacaggcagcggctcgtagtcggcggcgtcgtcttctgcgtcgtcgtcgggggtgagggtggcgggcatggcgaaggttgcgggggaaggccgggtccgggtccgggcgccgcggcggcgcggcagacgagsaccahgtggaggvsccgcgcscaggagaggwtctacgggccggcgcctt

SEQ ID NO: 60989 - DNA, 249 bp, Oryza sativa
  Clone ID: PAT_MRT4530_62466C.1
atgccccaaactctatataagaactttataaataaggcaaagagaatctcatctcctcacagttccttgccagcggatcttagtgcccttcaagcgccccttgcggctgtgggtaagaacgaacatcgttctagccagctagtgagagtttccccattgatctttgatctggctaatcaattttcaggttttttatttccttcaatgccgctggtgcatagtcagacttgcaggggcagctcaatcaag

SEQ ID NO: 60990 - DNA, 267 bp, Oryza sativa
  Clone ID: PAT_MRT4530_62467C.1
atggcgggcatggtagtcagcaattcactggcagttggtgaagatgaagaggtggccaagcatctccttgaccaggcgaagggagagaagactcacgggacaccggcaaagacaatgctccaccagtcctcagctgtggggaagccatggccgaggacacctgaacctatgaaggacatggagaggctagcggcggttgctacagtccctaacggcgtcgaaacatcgtcgaagaatggaagagacagcaatgcttacctttcatag

SEQ ID NO: 60991 - DNA, 1428 bp, Oryza sativa
  Clone ID: PAT_MRT4530_62468C.1
atggcgtcctccccgcctccatcgacggcgtcccccacctcctcctcgccctaccggaagctcctccactccttgatttactgggcggtgcagcgctgccggatgtcggagtcgccgtgccggctcacggtctccgtcaagcgctccccggaacccgctggttcctcgcccctgcgtatatctgtttcagatactggagttgggagcaagctggaggagttcctggagctagatgcattggcgcgtgagacccccgtggagaaatgggatggtaccctcttaatcacaactacaggaatcgatgacaaagctatttatcgttatcaatttaatcttcaagaagacacatcttcaagcacaagatttaccaagctagtgaccactggaactgaagtatgcctttgcctgccaactgaagctgatgttgatgacttaatattatggttggttggttttgtccgcaagatattcgtgctaagagcatctaatttagcatgtgagctctttgttgcgcaaacagacagtgctggatcaggagacgtttgtctgtcacaagattctgatgatgtccatatttccattaccacatcaagtattgaccgtctagtttctggccttaaagattatgcactctcacatgctaacacatctgacaggtgtgaagcatgctacatgaacagagatcgcctgaagattggaactggaacagcaaaatatgtagacaaaagaaaagctaaagggcaacttgttgaagtagtgataatgcttgcacctacttcatctgatttgagctgttggatgacaaattgttcatctacacaggttttgcattttgtagagttcataccatgtccaatctcacaatcctccctcagtgcgctgatgagcatagactggcaaagctacgctactgctgttgatgaatggaagagctctcaacctgaaaggcatcttctaagaaaggcacttaagtctgcattgtttggattgaaagcagaccatgcagaagactttctcagctgccatggccagaagaacaactttcatatagaaagttttcacacgaaacgcaccgttttacggtttgaaaagcgtgccatgagtatccaaaagttaatccaacctaaggttcgcgagtatgtccctgatctcgcagaatcgatagctggcttaatcttatcatccaatgatcaagagttccaagatgagtgcatcgctcttctcggcctaggctcagatcaagatctcacagaaggggcggttagatcctgcatcggtgagaagatgaaccgtatcgtagagatgaatgacaccaaggagaacgtagagcacaacgcaccttatctgttcgagtgcgagaggttcgatgaagattatagcctactggatgaagacgacccagatgaggatatgattttcgatttctag

SEQ ID NO: 60992 - DNA, 562 bp, Oryza sativa
  unsure (1)..(562): unsure at all n locations
  Clone ID: PAT_MRT4530_62469C.1
actttaaggtggaacaggagggttccccgccctaaggtccatttcttgccccacaggcgggaccagatcatcatgggcccagacacaggcgtcagaacngaggtggggagtatacacatgcgcttattttgtctcgaggncttccatgcagactcaacaccgtcttggtgaagagaacaacccccgccagaatctttaaagatgacgacaggngcatatctgccncaggctgcaccagttcctgccattgtgcncngttcgtcggacacacgcacaggtccgtatacgtatggaatttatggcgctaattaggaatgaggaaagatacgatgntncactgtgaacaccgtgtgcacggcggcagcttcacgaggttcacgaattcggaactctcttcacgatcatgaaaccgactcgataggagtatggaggcctgcaagattaaattgggattaacccaccaaatagggggataccaaagttcatggaaacgtttcgatttgatcagctatgcttgattgatcctcttttgttgctcgattaaaaaaaaaaaaaaaaaaaa

SEQ ID NO: 60993 - DNA, 501 bp, Oryza sativa
  Clone ID: PAT_MRT4530_6246C.1
tggcaggctgttcacggactagctgtacctactgtttttttcttgggatcaatatcagcaatgcagttcatccaacgataaaccaaattccaactatagaactatgacacaatcaaacccgaatgaacaaaatgttgaattgaatcgtaccagtctatactggggtttattactcatttttgtacttgctgttttattttccaattacttctttaattgagagaaagagagagagtagtaagaattctcttatccccatttggaaggataccatccttataactatccatgactgtttttgtctctagcatgaccacttgataaaatgtggaggaaagtaggggaaatggccgatactactggaagaattcctctttggctgataggtactgtaaccggtattgctgtgattggtttaataggtgttttcttttacggttcatattctggattgggttcatctctatagtaattggagggaccaggttgtaaaaaaaaaaa

SEQ ID NO: 60994 - DNA, 375 bp, Oryza sativa
  Clone ID: PAT_MRT4530_62470C.1
atggagtttctaagtgtcaagggtgtaaaaagggctatgttgttggccatttttgtagtcgtggctatgatttatttgtgttgtgcacaagctccgctgccgctgctctcctccacgcgcgagggcgacgcccgcccgtccaccaacgccgcctgcctcagacgcttgtggtggttcgccggcactgccacttgcccacacatcccgttcccagaggactactgtgagccgactgagccatgcaacaacataacgtgcccgcagctatgcgggaagaacgcgcgggcgtactgcaagccaggtgagtctgtgtccagctgttgctgccacaagcagagcaacggggacgtgcgccgcctcctgctctccaaatga

SEQ ID NO: 60995 - DNA, 222 bp, Oryza sativa
  Clone ID: PAT_MRT4530_62471C.1
gcgacaagggtttattgcttcgtgcacaaggttcctgtctgcggcgaatgcatccgcttcccggagcatcagttatgcgtggagaactatcgtcacagtatcaatgacgatgtcctctggtggtcacagaagctggatagtgacccaccttctgtgatgacagccatttcgttattgcagccaggcagtgacgagaaacaggctgttatcgtcataatgtaa

SEQ ID NO: 60996 - DNA, 450 bp, Oryza sativa
  Clone ID: PAT_MRT4530_62472C.1
atggcgcctgcccacggtcggcggctggccagcaaaggcggcagcggcaaccacgccctcccctccgccagatccggcgggagggcaggcgcaatgggggcaaaggggatgggcacctggttgttcttgttcttttctgatggggcagatgggatggagacttgtgggtggagccgtggaggcgacaagggtttattgcttcgtgcacaaggttcctgtctgcggcgaatgcatccgcttcccggagcatcagttatgcgtggacaaatgtgccaaaaaccaaatgtgatatctgttggttgcttgcaggagaactatcgtcacagtatcaatgacgatgtcctctggtggtcacagaagctggatagtgacccaccttctgtgatgacagccatttcgttattgcagccaggcagtgacgagaaacaggctgttatcgtcataatgtaa

SEQ ID NO: 60997 - DNA, 495 bp, Oryza sativa
  Clone ID: PAT_MRT4530_62473C.1
gaagaagaagaagaagaagatcgtcggaggaggaaagaagtcggaggttctagatcgcgagggccgccctttttttttttttttgcaaaaaaagaggactgattgatcgattacaaggagtactaacattaacatacaagtgagatgagaggagaggagaggagaggagaagaggcaagaactgagattaattaacgtccctaagagctaattaattaaggagtacgtacgcaggcagcaagaagagggggattaatcacacacgaggaggaattggaagaggagtaggtggagcttggagaagaagaacatggcgattgattaaccttgccttcttggattgcgcggcggcggcggcggcggcggaggaggagggggtggtggtgggggccagcggcgcacggcggccccccgctccccgcccccctcgccctgggcgctgccgtcggcgctggcgaaggtggtgagcgtggtggtggtgcttgcccctcgtgc

SEQ ID NO: 60998 - DNA, 360 bp, Oryza sativa
  Clone ID: PAT_MRT4530_62474C.1
atggagacggccgccggcgacccgttcgtttggtgcgccttctacggaggggcggcaaagcttggacaactacagcaagttctaagtggtcaccacatccacctagctaacccctcgcgcaacgcccgatgttgcctctacccctactcgttagcggttgcggtggaagaggatgggagaagtcttcattttgtgcggctgaagactttcacttatggctttggttgcctcaacctccaccttgtggaggccctgtttgggtccgtgcatccaaggcctcatctcctgcagctagcggtggtttcttcgtgctcgccgtcgttgctttcgccgatctgggcgtccatatcatggggatga

SEQ ID NO: 60999 - DNA, 357 bp, Oryza sativa
  Clone ID: PAT_MRT4530_62475C.1
atgtcactgacaaagacttcatccatcaccgccaccatccctcgcggcctcgccggcgatcaaatcgcctgcacggctggttccggtagccgttctccatcttggatgctcaagcgggcttggggtcctgaagaggcggcgccaattattttcttctcctccccttccgttctctctcgtggtcccacggcgttggcagaggccagggtgcctcaaccctcaagagtcaagaccctatgcgcctcgcgcagattgttggtgaaggggctcgagaatgaatccgggaagtgtgccatgccatcagccagaactgatccttctaaatcaaccgagctaccagaacaaccaatgttgtag

SEQ ID NO: 61000 - DNA, 167 bp, Oryza sativa
  Clone ID: PAT_MRT4530_62476C.1
aattgtcgaatctaatattggcaaattgttaaatttcccggccgaatttaaggtcgatccattttgctttaatgattacagtcagccactgtgctaccctacaaaatcaagttgtgtcctacaatggacatatacattgggtatccgtttggagctctaatgcaaaa

SEQ ID NO: 61001 - DNA, 819 bp, Oryza sativa
  Clone ID: PAT_MRT4530_62477C.1
atggaggctgtcgcgtcgccgccgctcctcgcctccttcttcctctcccctcctcatccaacgtcggcggttgcggcggcgtgctgctcccggcggaacacctcctgcgcccacccacccagccctggaggcctcgaggccgccgtcgcggaggtcaaggctgcccccgaccccgtccctgcactcatcagtcttcagtggtttccatgttcaatcaggcgaggagggcctcctgcaattgattacatagatcgtcgttgctttcttcaatctatctccaatgtttcttcaatctccatggatcgtgtgattgaagctagcaggggcaggcaggccaccaatgccaacgcgatgctcagcagagtcgatctcctctgcgagatattcagatcggagaatctttgcgtccttgttctgatttgcttgcattgtttcctcaattgtttgaccgtgaggcgcgggtggagcgagtacgtgcagcagccggtgctcccggcgaacctcgccaacgtgctcgtctgcttcaacgtcgccctcgctcccggcgcgctcatgactaccttcctcatccaccagggtgagatgacgcgcatggttaccattgctgacaaagctcgtcttgttaatggtgtgtgtggtgtgggtaggcgtgaggccgtcggtgattggcgcgttcagcggctcgtcggcggcggtgctcaccgtcaagtacctgccacggcggtggtgcgttctgaacccgaacgtgacggacgacggcgcctccctcacattctgccctgccgggcgccgcggcggctcgtggacgaccggcagtag

SEQ ID NO: 61002 - DNA, 238 bp, Oryza sativa
  Clone ID: PAT_MRT4530_62478C.1
catctgtcgagggagtggtgctgtggtggtggtggtcatggactcattgggcatggccgcctcgtccgagccaaaggcatgtgaagcgctcggagtcagagagaccagggctgggctggcgtctgctcgcttcccgagagaaccccttgtgaagattcgagccaaccccttcccccttcctcttctctctctttttctctcgcttctcctcttctttaaagcatggaccagcgcctag

SEQ ID NO: 61003 - DNA, 1829 bp, Oryza sativa
  Clone ID: PAT_MRT4530_62479C.1
tcattggagacaccccgagacaggaaaaaatggagacgggacggcataggtcacagagcctgggatctgcagggctcgcgttccacgcactcctctgctcgtcgttgctgctcaacgccgtcttcttcgcgcaccacctcctcaggtcctcgccgacggcaacgccggagcggctcggcgacgggctgagctgggcgctgcaggcggccagggaggccgaggccgtggccgccgccgactgctccggccacggcaacgtgttcctggatggcgtcaccggcgaggatgggcggcccgggtgcgagtgcaaccgctgcttctccgggccggactgctccgtccggacgcccaactgcaccgccgacgccgacagcgggaacccgttgttcctggagccgtactggagacggcacgcggcagccagcgccgtggtgttctccgggtggcaccgcttgagctacatcaccaccggcggccgcttccattccgtcgagctcgatcgccacatccggctgctgcacagggccgtcggcaacgcggtcgtcgacgacaagtacttggtcttcggggccggctccatgcagctcatcaacgcgttggtgtacgcgctctcccccgacggcaacgccgactcgccgccggcaagcgtcgtcgccaccgtgccgtattacccggcgtacaagtcacaaaccgacatgtttgacggccgggagtacagatgggacggcaccaccgctacgtggtcaaacaacggctcgcgaaactccaccaaaggcttcatcgagttcgtcacctcgccgaacaaccccgacaccgcgttgcgcaagcccgtcctcgccggctcgtcggcgatcgtcgaccacgcgtactactggcctcacctgacgcacatcccggcgcccgccgacgaggacgtcatgctcttcaccgcttccaagctctccggccacgccggcagcagattcggatgggcgctgataagggacgagaaggtggcgaaaagagcactttcgtacgtagagcagagcatcatgggcgcgtcccgggacacccagctccggatgctgaagatcctaaaggtgatactggccaacctgcacggcaaggaggacatcttcgccttcggctatgacgtgatgaggagccgatggcgaaggctcaacgccgtcgtgtcgcggtccacccggatctcgctgcagaagataccgccccagtactgcacttacttcaaccggatcaaagagccatcgccagcctacgcgtgggtgaaatgcgagtgggaggaagacgtcgactgctacgagacgctgctggcggcggggatcatctcgcggtccggcactttatccgaggccgaagctcggtacacgcggatgagcctcctcaaggcgcaggacgacttcgacgtgctcctggagaggatcaccgaattcgtcgatgccgaggagcacggcagagctcccggtggctccagctccatgtgaaaatcgtgaattgggaccgggacaaaagctttcgtctagctggcttcgatggccactgtgccggaacgatcagctgctagctgattgtaggcaataaatacaaggcaacgtggaaaatcaagactggaatgatcagctacgcgttaatcgttcattcgttcgctgtcgacctttcgacggacaggtgtaattatgtggatctacacaatcaattaggtggacactatgtgattatgtttgcagtgactaataattgagtatgtaaataaatgaagatcatacatgttactgattcagcactcgtcattcttggaatcaaagggccaaaaaaaaaaaaaaaaaaaa

SEQ ID NO: 61004 - DNA, 640 bp, Oryza sativa
  unsure (1)..(640): unsure at all n locations
  Clone ID: PAT_MRT4530_6247C.1
cttcccccccccctttcggcagtttagtagctcaaaagctccttcaaaaggtactactagctttcaccctggcacagtctacaatacagacactttctcaaaagtggagactactacaattaaatccttccaccgtaggatcaagttagctgactaatagccctacaagaggagctatatgggaacataccaaagaacatcatcctttcctcgcaaaatagcattgtcgaaagaaagggcggcagctcaggatgatgcaaagagacattcatctatcgatggatagtccatcatttcgctgctaaactcttagatcatcataccagttactttgtagtccggatagtatcattgcgtcactgtagtttagtaagtcaatgctactcagtcctatattctcaagggagacacncgtgaagtggataactgggttaagtcctcaggcagagaagccaactctgtgctgcctatgatacttggctcttgcgaaggacgcaaacttcttttggctgntcgttctgatcaaggcaacaatctttaatgctgggcaacccgtccacaccggagacttcaggtcaccgtaattcgaggtcaccacactgtcgcttaagttgaacagaaactgaatccactgtacatg

SEQ ID NO: 61005 - DNA, 843 bp, Oryza sativa
  Clone ID: PAT_MRT4530_62480C.1
ggaaaaagggtaaggaaaccagcgagcgatccagggaggccgtagcccgtagcgaccatgtcgattgctccgtcgagctcgctccgtgccctggtcgcccccatcctcccctccgtctcctcctcgccctctgctcgcccagggctccgcggagtggcggcaccggtacagcacgcgcgggcgcggcggcggaggggggcggcggtcgtggcgcgggcggcggcgctgccgtcggacgccgagtggctggagcggctgccggagaagaagaagccgctgtacacgcacagcctgccgtgcatcgaggcgtggctgcgcagcatcgggttctcccagacccgcgaggaccgcgccgtctgggtcgccgagatgcccctctggcacgcccgcctcagcctcgacgtcactgacctccacatcaggtacttgaagagcggccctgggaatcttgacaaggacgtagagaggagattcagctatgcccttagcagagaagacatcgagaacgcaatacttggaggaccttaatctcatcaggccatcagaggctcaagattaggagttcttgcaggatcttagcatttgggcagcgcagtaggtgcatgctctttcatgagtgactaagaaaagctctgccctgctgctgattggtcgttcgacgtccatcaggaaggagctttgcttaagttcccttcagtcatttgtacaagagaaaattaattatgtatctcaatttcatttgtaataattcaatgtgcttaaggatgagacgtccagctgataatttggcaatttatttaagctgcaactactgttgagtagtactccagcagttttagctat

SEQ ID NO: 61006 - DNA, 538 bp, Oryza sativa
  unsure (1)..(538): unsure at all n locations
  Clone ID: PAT_MRT4530_62481C.1
cccacgcgtccggcgcttcctcgccctgctcccctggctcatcctcactgccggcttcctcaagcgcagtcgtgcctacggccccgctggcgctgggggtgtagcagctgcggtgtctggcatcatcatcgttggccgccgctacgacgagccgcccatggccttcaccgtcgcacgcctggtggagaccttcataggcctcgcctgcatcatcgtggccgacctcgtcttccagcccgccgccaggccgtccaccaaggccacggcacagctcgaccgctgcctcgccgcactcaaaggctgcttcagtcggggacgacagacgacgaccaaagtgaaggtgaaggcggtgcaggagcaggtggccctgctggagagatgcgtggcagaggctgccggcgagccccatttcccgtggtcgccgccgttcccggcgagctgctaccacaaggtggcggngagccttggcaggatggcgcagctgctctacctctacacacaggcacatccaactccaataccagcagcagacgaggat

SEQ ID NO: 61007 - DNA, 113 bp, Oryza sativa
  Clone ID: PAT_MRT4530_62482C.1
gcacgagggcgagtctgtcggcgacgtgtgctgcagtggacgatggcggagctgatgcgaaacccagggggtcatgcagaagtgcacaagatgagtgtccggcgagcactcgc

SEQ ID NO: 61008 - DNA, 252 bp, Oryza sativa
  Clone ID: PAT_MRT4530_62483C.1
atgtcgccgatcctggaagaccagacaaggctttcgcttaagattccctcaaagagggcaagcaccccactcaaaactcggcactacgacaggggcaacaaagaccactgtgtcttccatgattccggcaaggaactccggctatcgcgggacaatccttacgactgcagcaaccaccaccaacttcaccgccagcgcagagaaaggtacaccagggcgagcagaagagcaactaagaagaagcgatggtga

SEQ ID NO: 61009 - DNA, 483 bp, Oryza sativa
  Clone ID: PAT_MRT4530_62484C.1
atggttgtctataatagacaccagctcgcgccctttgtctatgatatgcatttagattgtgttacctaacgattgctgcccgaccttgccctctccaggctctaatcgatttggactgttgtcggcatttcctatcatcctatgcatccactatcttgccccttctgcgaatctgtcagctaatagaatttgatatgcattactacttaaactgtcggtacatcatctaagttctgctcagatgtttcacatattatatgtatatgtagctgatatatatgaagcccctgatacctcttctctgctcttggtttcctactcattgttagttccacattgatgatatgtacagaggaattggcatcttcttgcagctgccacttgctaattgttgtgcttctatttgttcatatggttgttcttatgctgtcttctctcggagataataaacttggtcttctgaatgctcactgtatcatttat

SEQ ID NO: 61010 - DNA, 388 bp, Oryza sativa
  Clone ID: PAT_MRT4530_62485C.1
aatgaccattaattgggatttttaattattggttttttaatgttataaaaaaaatttaatttattaaaagtaattatatattattaaaaaaatggaaacaagaaaatataaatttataaatttgtaatatatttattgatgattattagtatataggtttaaaggctacctataagactaaaacctgactgatgatgaggtatagcaaaagttaatgataaaccccgaatgatataagtagaaactggaaattaagtaccggttacctgtaggtttactaaatattactataatgatgtatattaaaagattgttataattatggtaatagcttagttttttgtgaaatttttatttcgtttaaaatttaataaaaaaatatgaatta

SEQ ID NO: 61011 - DNA, 797 bp, Oryza sativa
  Clone ID: PAT_MRT4530_62486C.1
ccacatctgcaaactacataaagtcaggggatctgtttccctataaaccatccatgagctttaatactcatgcagtttattttttgaggagcatagaagcacttctctttaatttgttcaatgattagtactaatgaaccctgacttttcatcaatcttttcctacctttcctacagtgtactaaatttatttatctccattcttagcttggcaaaccattttttttgttattaattaataactaatatcctttttattcctagcgtgattgttaaaaaaacatatcgatgatgacttagttattccagtagtaaagcgtggggaatcacctagttggtttgatggctacaaccttcattgggtggtgagcttgcttctttacaaacttaatttcagcagctatatatagcatatgttttttctaacattgggcacactataggaaaacttgcttcttgaagactacatggttgggtgagattatattgaagacattcaggatatatgtgatgattttgaggatgttaactcggcttagcagcaaataaaggcatgaacttttatgacttcttcgtcttcacaacacgttttgctttagccaatatagttgagctttaccatattcaaaatccaaaaggccctcggttcaacagaaaccacaaaccactttgtgtataacctcatgtcaatccgtaatgctccatgaagagtgatatctacagaaagcttcactgccgagaatatttgtaacatctgaaaacaaaaccagagtgctttctccgatatcataaaaata

SEQ ID NO: 61012 - DNA, 552 bp, Oryza sativa
  Clone ID: PAT_MRT4530_62487C.1
atgggctgtgagcgcctgggcgaccttgctgtggatccggcggcgggcggtgagtggcgagcggctgggcgacctcgcattggatccggcagcggcggctcgtcctgtgcggatccggtgtcggtgacaacggagggcaatgggagcagcggatttgatggcggcggcgcgcggtggagccgggagctaggacgccgatgcggatccggcaaggaggacggctgcctcgggcagcggcagcggcgccgcctcgtgcagatctgccgacaacggtggcaggctagggcaagtgaagggacggctgtggagatggcgtcacacccgcgcgtgggaggagagggcctcgccgtcgttggagctcgtcactgctgtccacctcctccccatccctacgagtcgccatcgagcttgtcatccccatctagcgacgaggaggcggcagcagctgggtggatctgtgtcgcgtctgctcaacccttcgccgtgccgccaccgagcttgaggggagaggggacatcgtcatcagatgtcatcgctgccgacaacaactaa

SEQ ID NO: 61013 - DNA, 1131 bp, Oryza sativa
  Clone ID: PAT_MRT4530_62488C.1
atgtggaggccgctgcgtcctgcttcaacggcggctagggacttggatcaggatgctcatcgcccggaatgggacttggatcagtcgggtattggatcgatgcgccatcgggtggttcctccaataggcgtcgatggttggaaggcacaaggtctgttcatcggtgagcaagtcaccgatgaggaggtctgcacagatggtacgcaatcagtttatttcactgacctcctagtaaatgatgttgatgaatctcaatttgccgcacctactagtgatccaatctccaatggagctccaacagctgccaagatttctcagggtaggaccaaaaatttcactactcaggaggacatccttcttgtgtcagcttggctgaatgtgggcatggatcctattcaaggagtagatcaatcacaaggcacatattgggcaagaatacatgaatatttccatgccaacaaagagtttgagtcaacgcgttctgaatcctctttattgaatcgttggtccgcaatacaacatgatgtgaatattttctgtggatgtatgtccagaatagaggctaggaaccagagtggttccagagttgatgacaagatcgcaaatgcatgtgaattgtttaaggaggaagacaagaagcataggaagtttaacttgatgcattgctggaatatcctgaaggacaagcccaagtggatggacaatcggaagaaagttggatgtgccaaaaaaccaagcaataagaaacagaagacagtggcaaattcaagtcctacatcagttgaacctgctgatcttgatgtctattgttctgatgctcaaccatctgtaagaccggatggaaagaaggcggcaaaacagaagctacgacagggtagaaccatagaagcagtggactatctgatggaaaagaagaaagaagctgatgttgtgagagagttgaagaaagaagagatgtgcaagaaagcctttgctctgcaggaagagaggtgcaagagagcctttgctctgcaggaagaacggaacaaattggagagagaaaagtttgagttccagaagaaagaagctgagaaggctgagaaggtggaagaggagagaattctaggtttggatttgagcacaatgaactaa

SEQ ID NO: 61014 - DNA, 165 bp, Oryza sativa
  Clone ID: PAT_MRT4530_62489C.1
atggccgccggctacttgctgccgttcgtcgatcatcgcctcccactacgcgggtacaggtcaagcaaatccccgaggaagccccttcttccgccgccctcctccccatcccttgctcccaggtcctcccccgcgcggttttgctgccccggcatggaggttgag

SEQ ID NO: 61015 - DNA, 629 bp, Oryza sativa
  Clone ID: PAT_MRT4530_6248C.1
cggacgcgtgggcggacgcgtgggcggacgcgtgggccgctgttcgtctcgtcttgtagtttgcagaaaagagacaactatttttgctttcctctctgtactttttattttcactgtagtatggaacaaagcagcgtgtgagcttgttgttcaaaaaaaaaaaaaaaaaaaaaaaaaaagaaaaaaaaaaaaaaaaaaaaaaaaaaaaaaaaaaaaaaaaaaaaaaaaaaaaaaaaaaaaaaaaaaaaaaaaaaaaaaaaaaaaaaaaaaaaaaaaaggggggggccgttttaaaggaccaaattttacttccccgtgcttgcaacgaaaaattttttttttggggcccccaaaataaatttcatggcccgggttttaaaaacgtgggaatgggaaaaaccttgggttccccaaattaaatcgctttgaaaaaaatccccttttccccagtggggataaaaaaaaaaagcccccccccatccccctttccaaaaatttgcccaccttaatgggaaaagggacccccccttttaggggcccttaaacggggggggtgggggggtttccccccagggggccctttccttttgcaaggcccttagcgcccgttcttttggttttttcccttt

SEQ ID NO: 61016 - DNA, 367 bp, Oryza sativa
  Clone ID: PAT_MRT4530_62490C.1
tttggtttttttaatattttgggttttttttttttttttttttttttttttttttttttcttaccacattattaacatttttagattataatttctgaaaaaaacataagggggggccaaagtccacttcatttaaacaataaaacccattattacattataaagggcacctccccatgcaaaaaaaaaataaacaaagttaacaacaaaaaaacactttttaaaacttcccaaaaaaattgacctcaagtggagaaaaacaaaccaggaaataggtgaccatggaaaaacaaaaggaagtccttatggggaaagccaaaaaaaccccccattttttgggaaaaaaagccccaatccccaaattaag

SEQ ID NO: 61017 - DNA, 558 bp, Oryza sativa
  unsure (1)..(558): unsure at all n locations
  Clone ID: PAT_MRT4530_62491C.1
ccccctcgacccttgcgntccgaaaaattttttaaaaaaaaaaaaaaacagtttctacgccatcaaaaaaaaaccaaactaacaaacacaatacatacaacaaaataaactctaataaaaaaacacctaaataacaattaaactagcccccccctttcaacaataaccccacctaacaccctccnncccttccccattcttttttacnctcttttcttgcttgcttccccctaaactcacatctaactttccttataaatacccaccctcaccaattgaaaaacccatcattttcccaaccttaatccccattcaacccctccccttttccccacttttaatcacaccaaaaatcccccttccacatcacctttcccaatacattccccacctcactaccaaccggtccccccccttttttccctcccttaatccccacgttctttcgtgtttcccccccaacttcccattacattgccccctccctaatccccagttatttntnttcggtcccttnccctcaaaacactttattccggttttcccccacaaacttaa

SEQ ID NO: 61018 - DNA, 837 bp, Oryza sativa
  Clone ID: PAT_MRT4530_62492C.1
atgccgggaggcgaggccaagctatccacaccatctgcacggagagtggagtgttggcggcacttcgaaaaaatgaaggtaatggtggacgatcaacttgtaacacgtgctacttgtaaacattatgggaaaactttgtctgcatcttctagttcaggaacaggacatctcaaccgacaatatttggcgcaccttaaggataaagcaatggtgggagcaaggtggaacacaacatacctcatgttgcgtcaaccgaaagggtatgaggaaataatttctgttttcatcaattcattgcactttagaaacaatgatattgataaggatggtgatggtgatgcaatgagtcttgattattttgaagcttatcaacatgctaaagatgagttgttcaaggttttccgtctgtaccaaactaagctaagtgttgctcgtcaggtgcctgaggaaaccccacaaaaaaagcaaagcaaatcaagtgcaatgaatatgtggaagaagatcaggggcaagaaacaagcctcctcatcaggtagtaggtcaaattggaatccagatgcagagcttaaccattacctcaacaccaatcacacaaaacatgatcgaacattggatggtgaaaatttcgatctccttgagcggtggaaagagaaagaacgaactcttcatgtgctagctcactttgcacagggcgttctattggttccggtttcctctatctcttcggagcatgcatttagcgaggttggaagaattattgaagaacagaggtcatgccttgcacctgacacagttgaggcaatattttgccttaaagactggattaaagcatattaa

SEQ ID NO: 61019 - DNA, 1857 bp, Oryza sativa
  Clone ID: PAT_MRT4530_62493C.1
tcctttgtgcttttttttaagaacttaaccaaaatagaattgagtcaattgacaagattggtagggatgttctcccgctgttctctggaaaacaaaaacagtattgagttctctacacagtaagcggctcagtctacaactctacagtgcttactcaactagattcatatcaacgtccatccagaacaagtccaacaatgcactacacaagtctgctcaggatgtggcaacttcaaaccttgcaccagtttcggaaacaaaatttcagttctattttctctaaacagtgacaccgtttggcacaagtcgtttacggccttgtcatttcccctttgaatctaggacttactgcgctccagcagcagctgtcccccatgacatgtgtgcatattcacaatattcacgtcctcggtattagcatacaacagccacactgaaaattagctggtttagttgatcttgggctttggccgccttggtcgtagaagaaaccagagcagcagaaaaacagccaagaaagcaggaatcgttgtcaagtctagctgcacgtcgacttttctttcacgagtacattgcacacgaatagcgcctttgagcaagttgtgctcgcttaacctctgtagctgatgttggagaatggcagaatcaagatatgtatggactgttgacttagagaaaccattaaccaacagaagtgggactgcagctgcacgacgcgccattgcaaatgccataatcaaggctggatcctctgataacgacaacatgtgttgactgaacattggcttctggaattgtagtagcacagaactaaggccctctgtgactgattttacattaacaggcaactgctttatgttcctgactttctcttgtgtcacaaagtacaactgaaacaacaacttatcatagtaatggtgagccctatgagaaacagaaggagcaattacatgcctcatagagccccataacacggaaccaaggtgtgcgaggaatgaatcacgagccacagtgtaactatgatgttcctctggaacatctttaaataagttccacttttccatcctattcaatgcatcaagagctttcttcttattaatatcatccgaatctccagtattgtaaccctccagttcacttttcagatcatgccttctctcatcaagttctttgcaaagggcaagctgtacccttcttccaacacaatgcttgaaggcaaaaagttcgtatacatcaatctctgccaataggatatctactgcatggtaattctgctcgccaaaagatgagaatctctctgattgtatcttgtaatttagcttcagcctcttcttctgtaacttctgcaacagccccaatagtctttgcaacattgggtagactaagttcagtacgaacaccgtccccaccaacagcagggccccaggcaaatggccctgcactcagatcaatgaaagcaaatctgtctctgccaatccacatatccgtaaggcattcagcatgcagacccttcaaatcactggacttgagtgcactctcaaatatatcatgcaactcatccttagagggagtatcatctttgctctttccttccttcaacagctcaaaattgcttaaggcttcctttcacttctttgaccaatcccccatatccatattgtcagttgttgtccacgaaaatgatgataaaggatgactctcatacaagggtcttctgttgactcccttttcaatatctgattcatagatggagataagtaccaaaaggaaaataactaaaggagctactgcatgttgcagctcatcctcttcctcaaaaccaaatttaacctttggcttatcatcgagagggttaac

SEQ ID NO: 61020 - DNA, 2372 bp, Oryza sativa
  Clone ID: PAT_MRT4530_62494C.1
cccacgcgtccgctttatcatcattttcgtggacaacatctgacaatatggatatgggggattggtcaaagaagtgcaaggaagccttaagcaattttgagctgttgaaggaaggaaagagcaaagatgatattatttatgacaaagctgtccaggtattacatggcaaaaaggatgagttgcatgatatatttgagagtgcactcaagtccagtgatttgaagggtctgcatgctgaatgccttacagatatgtggattggcagagacaggtttgctttcattgatctgagtgcagggccatttgcctggggccctgctgttggtgggggacgtgttcgtactgaacttagtctacccaatgttgcaaagactgttggggctgttgcagaagttatagaagaagaggctgaagctaaattacaagatacaatcagagagagattctcatcttttggcgagaattaccatgcagtagatatcctattggcagagattgatgtatacgaactttttgccttcaagcattgtgttggaagaagggtacagcttgcccttggcaaagaacttgatgagagaatgcatgatctgaaaagtgaactggagggttacaatactggagattcggatgatattaataagaagaaagctcttgatgcattgaataggatggaaaagtggaacttatttaaagatgttccagaggaacatcatagttacactgtggctcgcgattcattcctcgcacaccttggttccgtgttatggggttctatgagtcatgtaattgctccttctgtttctcatagggctcaccattactatgataagttgtcgtttcaactgtactttgtgacacaagagaaagtcaggaacatgaagcagtttcctgttaatgtaaaatcagtaacagagggccttagttctgtgttactacaattccagaagccaatgttcagtcaacgcatgttgtcattatcagaggatcctgccttgatgatggcattttcaatggcacgtcgtgcagctgcagtcccacttctgttggttaatggtacctataagtcaactgtccatacatatcttgattctgccattctccaacatcagctacagaggttaagcgagcacaactcgctcaaaggaggacactcaaatcacaggtcaacattggagattccaatattctggttcatacatagtgaacccctattattggataaacattatcaagccaaatctctttcaaacatggttgtagtagttcaatcagaagttgattcttgggaaagccacttgcagtgcaatgggaggtcaatcttatgggatttgaggagaccagtaaaagctgccattgctgcaactgccgagtatgtatctggtttacttccttcacatctggcttatagcccagctcatgaaactgcaacagaggactggacttggtctgtgggctgtaatcccttatctattacttcaaaaggctggcaactttcggagtttcaacgtgatgttattgctcgtaactacatcattactgcagtggaggaatctatacaaatcatcaattcagcaattcaacaattgattacagaaaggacaagtgaacgaggctttaaacttttcaaggctcaggagagagtgctggttgaaaagtataattctgttgttagcttgtggagaagggtttctgctatgtccaaaggattacgatatggtgatgctgtaaagcttacttcaatgctcgaggaggcttctcatggatttgctaatgctgttaactcaaccatttcaagtctacaccctgtgcaatgtactcgtgaaagaaaagtcgacgtgcagctagacttgacaacgattcctgctttcttggctgtttttctgctgctctggtttcttctacgaccaaggcggccaaagcccaagatcaactaaaccagctaattttcagtgtggctgttgtatgctaataccgaggacgtgaatattgtgaatatgcacacatgtcatgggggacagctgctgctggagcgcagtaagtcctagattcaaaggggaaatgacaaggccgtaaacgacttgtgccaaacggtgtcactgtttagagaaaatagaactgaaattttgtttccgaaactggtgcaaggtttgaagttgccacatcctgagcagacttgtgtagtgcattgttggacttgttctggatggacgttgatatgaatctagttgagtaagcactgtagagttgtagactgagccgcttactgtgtagagaactcaatactgtttttgttttccagagaacagcgggagaacatccctaccaatcttgtcaattgactcaattctattttggtttggttcttgagacgg

SEQ ID NO: 61021 - DNA, 196 bp, Oryza sativa
  Clone ID: PAT_MRT4530_62495C.1
atgtcccaagaagctgcagattcctttgatgttcacaggaggaggaaactgatctataacatctattttagcacgatcaacttcaattcctcgttcggacactcgatgcccaagaactatcccttcacggactatgaagtggcacttttcccaattaagcaccaggagcgttacatagtccgaaggacatcctacg

SEQ ID NO: 61022 - DNA, 335 bp, Oryza sativa
  Clone ID: PAT_MRT4530_62496C.1
ggggcttaaaaaaaaggtaatggggtaaaaaaaaaacgggaaaaggaaaaactggaagttaaagggggccctagctagtttttggaaggattaccccaaaaaaaatgccaaaccccaggggtaaaaaatttttaaatgggaaaaaaaggaaaaggggggctggatccccaacccagggtatttagggaaaaaagttgaaaacggggggatccaaacaatggggttggaaaaaagctttttgggggccttcctggggctcccgggtttccagggccaagggagaccttcaagggggaaccccggaaaaaaaaacccaataaaaccccctttggggg

SEQ ID NO: 61023 - DNA, 555 bp, Oryza sativa
  unsure (1)..(555): unsure at all n locations
  Clone ID: PAT_MRT4530_62497C.1
atggcccgcacgcaacacttcatatgtgaaaatcgtgatttttgcgtgctggtggtgcccccacacaaccctagatccgccgcactccactgccaccgccgcgccggccgccaccgctggatcctggcgtggggagggcggcgccgctcccggccgcctcctcctcgtcatcgtcggtggctgcatgaggtggggagggcggcgntgctccagccctcctcctcctccacctcgtcagcggtggcgccgctcccgactgccgcctcctcctcctcgatgtcggcggcggctgccgcgccgccttcaccagcagccgcgacaggcgcctcctcatcggcgcgcggcggcggcgccactcctggcagcctcttcctcctcctcttcatcgtcggcggcagcctccgcgctgccgcctgccggatccgcccttccctccggcagcaccgccgcggacgcccctcccctccactggatctggggagggaaggaatgggaggggaggggaggggagcagatcccacgtggggtaaggccagctgcccgccggatccgtga

SEQ ID NO: 61024 - DNA, 435 bp, Oryza sativa
  Clone ID: PAT_MRT4530_62498C.1
atgaatttgttgccatcatcgaaggagacggctgaagacccaagctctcccagaaacccgagcaacctaagctctcccccgtccccgccacagcggccaatgctgcaccgctctcgccgaagccgagctcggggagccccttctatggcgataactggcacaaccccgccaagtctaacctgtcctcctcccttctccccacggtcgccgtcgacagcccgctgggtggcgagcaacccgagctctcacgtgcctgccgtggcagccgatgtcgttgctgctgacgccgtgtcactcccgccgaagccgagctcaaggagccccttctacggccacaactggcgtgaccccattgcatccaacccgtcctccaccccgcgaaagaagatgcacgcccatagcgcacggtgcggatcgcggatcaacgatctgtag

SEQ ID NO: 61025 - DNA, 184 bp, Oryza sativa
  Clone ID: PAT_MRT4530_62499C.1
ttcacctgtgggtgatccgttttgggatgtggtcttagtaggagggattctttgatcaaaggaatcccttctttgtaattgtaaatatttcttcttagtgaaatgaagcacaattctccagtgcgcaataaaaaaaaaaaaaaaaaaaaaaaaataaaaaaaacaaataccaaaaaaagaaaaa

SEQ ID NO: 61026 - DNA, 1950 bp, Oryza sativa
  Clone ID: PAT_MRT4530_6249C.1
ttttttttttttttttaatgcatggattcagccctttatttggtttattttttatttggtttatatacatgctcaacgaatcaagtggaataataatacaagaatggttgattggaataatacaaggcagtgttgggtggatgagggagacgatcagtgcgagtgcgggacggcgagtctcttgacggtataattcttggcaaaggcggcgtacaccacaaagttgatggcgctgatccccgtccagagccagaaatagtagtccagatggccgtcgttgaggtcggcggggagccagcccttgttcgaggtggtggtgacgacggcgacgatggagacgacgagggagttgacgtagtagcccagcgagagcgccaggaaggagaaggccgagcagaggctccgcatcgacacgggggcctccgagtagaagaattccagctgagcgatgccgcagaagacgtcggagcaggccaggatgacgaactgcggcagctgccacgcgatgctcaggttgccgccgtccctgacgctgcgcagccgccacgtctccagcacggccgccaccgccagcgccggcaccgccagcaaccgccccacgcccatccgctgcagctgcgtcagccccgcggggttcccggtgtagcgcctggcgatcgggacgaccaccgtgtcctggaacaccacccagatcatcatgaagatgacctcggcggagttgagggatgccgccgggacagagaaggatccgatcttggtgttcatggcattcccctgctgcacgaaggtggtggccgtctgacccaaggaagccgcgtacagcacgctggtcacccatatcggcagcatccgcagcagaatcttcacttcctccacctgcgttaccgaacactgcagccaccctccacccccaccctcatccttatttatctcttccacctcctcaaaaaccactgccgccttatctaaccacctgaaaccatcagtatgtgctagtttgactgattgtccattgcttaaatcagcatcatccccttcatacaggagtgcgttatcggcaggaacctccagttttctcttcttaaaagaggcaacaaaaaccattacaacactcttgagtgggcttccactgggaagctggaccttgtacactggtgttcctgccaaaaaggcaactgtggcaacaacaaggcatattgaggagatgccgaatccgagagaccaagcaacattttgctgtatccaaacgacgacagtgcccgaaatgaacactccaaggttgatagcaatgaagaacaagctaaagaaagattgcttctttttactctcttcgaggtttgaatcgttgtactggtcagctccaaaggggagtaatgctgatttgacacccccggtgccaaccgaaataaggtagagcgcggtgaagaagacaaaatactgaaaccctgttgcaggaggacatgagctcccattgcatggagcaggttgtagtgatgggatgacagcagaggcggtaattacaagcaacccaataagatagaaaactgtagagatggcaatggtcttgtactttccccagtatgtatcagccaagaaggctccaagcaccggtgtaagaaaagtggttccgttccatgtatcaacattggctgcgttagaggcggtagttccatggaggacggttccaagataaacgaccaagttgagggagatgccagcataggcaatgctctccaagaattcaaaggccaagataagagcaggagccttccagttgaaggggggcttggtatagtgctgattggatgcggaagcctggtggtggagcagcggcagttgggcatctccgctctccatgcccatcttcttcttcttcttcttcttcttcttcttgctcctctcctcacctcctcctcgatctcggatcatctgtgggtgccgaattcctgc

SEQ ID NO: 61027 - DNA, 273 bp, Oryza sativa
  Clone ID: PAT_MRT4530_624C.1
tcggtcagtcttcgactacgactacgtctacaagatcgtcgccgagcttctgccgagcgcatcatggcgaacatggcggacgacctaaacaaaacagaaggcctcgactgtatacagtcataaaagaagacgtgatgctagtacagacaaccgatgggcgcttatcactgagctcctgaatatggacagctatgacctggatgagttatttgacaggcacgaaccgagaagggtgcagagggctaataacaggaataccatggttatcatgat

SEQ ID NO: 61028 - DNA, 770 bp, Oryza sativa
  Clone ID: PAT_MRT4530_62500C.1
cccacgcgtccgcccacgcgtccgcccacgcgtccgtgaagaagcacaatttcctttaatgacgaggaccgtttctttcctcactctccaggtgagatagctgatacgcccaacattggcctaaaagatgtcgccggggatcggttgaagctacactcttgctctgcctcggtctcccgtaacccgaaaaggttggttcttcccctacaacccctacctcttcatctgttgacgaatagaggacgacaaagatctctctcgcaaagaagcaagaaatgtaagaatgaaacaaggccatggaaagtccgaatatcgtggatggacgttggaatcggccagctggtaatggcttcgatcttcgtggggtcagtcttgatcgagatgctctgtatgaagttcttgaatttgaaactgcctgcaagctggtattaatctcaatgagagagacttgttggtcatgtcatcaagtacattcctcgcggctacccgccaaaagaaaggtagcagcttcacggatcccaccccccaagcagaagggggggaaaaggagttgctttttcttcgctggattgagtaaagaaaagaagaataaaagatgaacatgatactattgctacttctttattaaacttacaccgaaaatacaagtcagtaaaaaaaacagacccaaccttaaacttcaactaccccttgccctcccacctgtaacccttctttctaattccaaaaaggaagagcgcaccaaaacaaaaaagaataaagaaaaaaaa

SEQ ID NO: 61029 - DNA, 1101 bp, Oryza sativa
  Clone ID: PAT_MRT4530_62501C.1
atggcggcggcagtgctctgctttgtcaccctcctcgccttctgtttcttggcgccggcggcgttgatgttggggtattaccacggctcgccggagctagtcgtcatcggctcaggttgctcgaggcttgtggagacgaactcgttctttgcgcaggacatcaaggcaaggacggagggagggtcgccggagaatgggttggtgctctacgggatgccggtcgctccgcctctcggcgtcccagccgcttggtcggaggctcgccgcgccgtcgtaccagccaattctcacatggaatgggtgtatttccttaacagaggatcggagatagaagtagcttacagcgtcaggagtgaaactgaatcgtctcgtccaatctgcatgatcattgcgcgaggcaaagaaagcttcttgcaatgggctgagaatccatcagcaaatgagaccacattatcttggcacttggtgcacggaaatggaacaatcaagcagactatcaatctctcttcagagtacttcattgccttgggaaactttaacaatcaggatgtaacgggactgaattctgatggtcattatgtgaagctgtcatatggacctcgctggatagtgtacatcatcggattagttctgttggctgttgcactgctgatcatgtacgatatactgaacatgctgttcggtcccgggcctggaggaggagacgcgagagcctcgctgctgtcgtcgtcgtcggcggcggcggcgagcaaagaggaagacgacgcgagcctggggtcgtcgtacgactccgtctcgcacgacggcgacggggaagacgacgacgacgacgtagaggaaagaggcggcggcggcggcggcggcgaggggcggcacctatgcgtgggtggcagaggaggacgggagctgcccgttgtgccggaggaaactgaagaaagtgaggaggatcttctccgtctgagctgtccgcgagctcaagcatggggtttctccgaaccagtggagtggagacgagagaaaaaaaaaggaatggacgcccaccgtggggctcgaacccacgaccacaaggttaagagccttgcgctctaccgactgagctag

SEQ ID NO: 61030 - DNA, 312 bp, Oryza sativa
  Clone ID: PAT_MRT4530_62502C.1
atgatgatggactacaacaacggtggcgctgggacaaggcgagctagaggaagtgcgtgtgagtcacgtcttctcgcaaagggggtggtggcgagggttgctagtgaagttgggcgtggtactatcatggaaaccaaattttggtccaactcgacgaagaagatcctggccgctacgcaagtcgacccctctcgtctccgccttcacgtgaacccacaccggctcggctcagctcagatcggctccagccgtcagccggggaagcctcggctctggcccccctcctcctccgcatcgcacgcgacgctgacg

SEQ ID NO: 61031 - DNA, 585 bp, Oryza sativa
  Clone ID: PAT_MRT4530_62503C.1
gcacgagggcaactactgctgatctaatcatatgccagtgcactggacactgattgggatttctattgttagttgttttaaccattgctatttactaaaacaattctcgataattagagtattagacatgttctaatatctacaggataccttgtcatttttattctgtatccaccattgggtgtgactgtgatcatgtaaacctcttcagtttgggtattataagttcgtaagttgacaagtaaacctcagaaactaaagtatggtaggcttggacaattgtttggttaatggaatgaaacctactagaaagctgtcaatatatctataaatttattaattgttatgtttgcaaaaagtaagttttgtcaaattgtaaatttgatgagaaaagagtacatgctactataactctccttttactcctgtaaactgatccataggtttgcaaactaaaataattaccacaggacaaatattgtacctaagatcttttcagagttgtgctgacttggtgccaaaacagagtgattttcatgattgcacttaatttttacagcagtgtgcaataaatatgttcatgat

SEQ ID NO: 61032 - DNA, 1140 bp, Oryza sativa
  Clone ID: PAT_MRT4530_62504C.1
gatccccgggctgcaggaattcggcacgaggatttgctcttgaatctgcttccaaaccatcgattcatcatccatctcttccagtcgttccttcgcattctcctggaaaaaaatcagaaaagaaaaaggaaaaatctcttgtactctcctcgattctgcaatttttgtttggttgtcccaacaaaaatcccccaattctccccaagaacaggagcacacgaccctgttcctgtcccctagatctgcgtggaggcggcgagaaaacctcaatccggcacaaggggcttgtggttgataccccggagcgccgtctaattccaatcttggtagctgccggcggtgcttccggtggtagacgaggagatggtgccgtgggaagggtatgtgagcgacgagacgatggggacgttcgcgcccatcgcgctgtactgggtgtacgccggcggctaccagctggtgctgcaccggcggccgctggagcggtacaggctccacacgcgggcggaggaggaggagaagaacctcgtcgccctccccgccgtcgtccgcggcgtgctcctgcagcagctcgtgcaggccatcgtcgccatgatcctcttcatggttacttcagatagttcagcagttgtagttcagccacctatcatcatgcaagctttccagtttttggttgcaatgcttgtcatggattcatggcagtattttgtgcaccgctacatgcaccagaacaaattcctctatcggcatatccattcacaacatcatcggctgatagttccctacgccattggggctctctacaaccatccattggagggactccttctggacaccgtgggtggtgctatctccttcttggtctctggcatgacaccaaggacttccgtgttcttcttctgttttgctgtcctcaagacagttgatgatcactgtggactttggttaccgtataacatcttccagtccttgttccaaaacaatactgcctatcatgatgtccaccatcagcttcaaggctcaaagtacaattactctcagccttttttctcaatctgggacagaatactggggacccacatgccctacaacttagtaagacggaaggaaggcggttttgaagcaagaccactgcgagactag

SEQ ID NO: 61033 - DNA, 386 bp, Oryza sativa
  Clone ID: PAT_MRT4530_62505C.1
ggcggctatcccctttcacactttttttaggttaaaaggcaaaaaaaatccaatttatttagattaaagggagggcttggccaaccccattatggaaaggcttttccgaaaaaaattaaaaactgtaccagccttttaatgggtaaaagtaaatggccgaaagcaaatgaccgaaattaagataggagtccattaaaaagggggggaattcaggcacttcatagtcgatagtccgcttagccggggttctggattccaagaaaaaatcccttcatggctgggatgggggggtcctccagaacgggggggtactaactggaggggtaaaagttcaccagtttcgggggcggtttaaaccaggccatgatgttcttgacatggggggg

SEQ ID NO: 61034 - DNA, 494 bp, Oryza sativa
  Clone ID: PAT_MRT4530_62506C.1
ctcaacctctgcataaggttctgcaaccccaaaagtctcactagggccataagtttgagtaggcacagagggttcagcaccatcagtagatggaataggtggcacatcaatatataaccccttaccattgacacatatatactcttccacattatcaaacacattaggcaatgtcccatatgcttctttggttgcaggttcagtagaaactgtcacttcagatacaaatgctccttgcccatgcggtggtgaagggcaagcaaggggcttggcgccgacgaaccgaaaccggtggtgaagggcgagtgaagactgtgtgtcgttcttgggccaccgatctacgtgtggttggccaagagaagtttgtgaaggccggatctcgcctccgcaaggaaagagatacccttagtggaaggaggagtgcatttgtgcaacctcacgaggatagggttgaaaaagacccggctctttgcgagcccctcaacggagactag

SEQ ID NO: 61035 - DNA, 420 bp, Oryza sativa
  unsure (1)..(420): unsure at all n locations
  Clone ID: PAT_MRT4530_62507C.1
cccacgcgtccggtcacccgccttcgccgacaaaaccctagacccgccccttcgtctatcgtcttccgttacatcccntctccttcccaattccctttattctcttctttagctagagacaatcatccatcttgtgccccatgtcgccatattttagttgaacactttacactgtagtatccgagccatcataaatcatctcggattgattttgccttatttaatagaagcttattagtgttgtcgtcaaatcctttttcatttccgtttagtatagtttctgctcggacgttccgcttatcactaactgtctcaccgtagcgtttttatctttctcttttacctgtgagaagtgttttacaactgttgttctcagcctattgtctttcgtgtgaggcttttttgctacctttatttgtt

SEQ ID NO: 61036 - DNA, 410 bp, Oryza sativa
  Clone ID: PAT_MRT4530_62508C.1
ccctcttgagttgggatcgttcgcagatgcgacaacgatgtcaacctccgctcttgcacaacacacactatagcaaatcggacctatgacaaacttatggagtttgcttacacttgccatgattttgatgcgttccaaggatcatccgctgtggaagcatgaacgtgtactccttgcagctgtgattttggtgagggctgttatgacgactatggctgctattgcaagctagggattagggtgtaccagcacaactaatgttctagctgtgatgtcgcgcgcacacaacaggatagtttgcattcgctctcttaatgagcactccaaggatacatgtgctggtcgcaatgctgtcatcgatgacatttggaagccctgcactgagtttgataacaacactctactctata

SEQ ID NO: 61037 - DNA, 324 bp, Oryza sativa
  Clone ID: PAT_MRT4530_62509C.1
atggcgcagaaatacttgtggtatattatggttatagatttcatccgcaagcgcacggatatatcattgcttgggaaggagagcagcagcagaggcgagctcactggccggcgctacttttcggcgatcccgacggcgaacggcgcctcctcggccgacgcaaccaaaagaagaattgtagaggaatttcttgcgaacccgccgaaggtagtttcgtcgccggggatggacggaatcgacgccggcagcagtgcgagcggcgacggtctgaatagaggcgagtatggagaagacagcccggcggagaggatgaactccgggtag

SEQ ID NO: 61038 - DNA, 116 bp, Oryza sativa
  Clone ID: PAT_MRT4530_6250C.1
acaaaaaggcatccctggtttcaattcaacagaaggtcatcttctaggtgcaccgttgccgttctagaccattctattgccctgcaacctttgcactcatccactcatatttatca

SEQ ID NO: 61039 - DNA, 219 bp, Oryza sativa
  Clone ID: PAT_MRT4530_62510C.1
atggtgacgcgcggcgttgggatggcgagcgcgacgacaacagtgcgcggcgcgggcggggctcgaggcggtgatggcgacggcggtgacgcgatagcgcagcagtggcgcggggatcaaggagcgaagcaacggcgcgcggcacgtctgagcgacggcgacggcgacacgatggggtgcggcggcgcggggcgcaaggcagcggcgcggcagggctag

SEQ ID NO: 61040 - DNA, 1320 bp, Oryza sativa
  Clone ID: PAT_MRT4530_62511C.1
ggaataggttgcgccgacaagtgggccccacctgtcggtggctcaaaggaggtcggcgcacggtggactcagtccacgcgcgcgctgcccgcgggcgcaccacgtggggggccgcggtggacggggaggacgaggtggcgccgacgtggcgccacagggcagcgacgccaggcggcacgaggagagccacgtggacggcccatatcgccccgaagggggatggggtggccacgggcgagcgggagccggctcaccgaccggccggacggggagccacggcgcatggcccgatgatcgccggcaacgaccaccggcgcgacggcatgtgcgggaggcggcagaaagaggggaaagggagaggagatggagggggtcctcaccgaggggcgccggtgacggaaggacgacggaaggcggctggcggagctcgggcggagggaggcggcgctgctccggcgatgggcggcgcttgggaagaaactgacgagggtggccgcgacctgcggaaggggaaggagggattaaggaggggaggaccagagcggtgcagccaaaacaatggccggcagcgacagtactaggtggagctcaccttgagtgatggggatggggtttcggtgacgattcacggaggatgagcggtggccgggcttgcccttgggacggcgaagccggtggaggtggttgcgcggcacggcgatggctaggacggcagtggtggtcggctggagacggtagaggcggcggtggctcggttttgcagtagggcggcgtttcggccggggtggggcttgatgcagcgaagccgccggcgcaagcggcgaggtgcggcgtcaactagcgcggcgacagcggccggctgaaggttgccggcgagcggcggcgatggggagcggcgtggggagagcgggagaaggcgagggaagcgccgacgaggaggggaaacgagagaagggagcccgaggatggattttataggctcggggagggaaaaacgttgccgggcgtggcggatttggggcggcaatgaccagcgacgtgggtgacatcatgggcgaagtggagctcgatcccggcacgatttttgggggaaacgtggggagagtgtagaggaggtggatgggaaccgatttcatgcggtttgggcgtgagggcgtgagcgggaggagccggaatcggcggcgatgtgggcggcatggcggcttcggcggtttggatgagggaggctggaggtagaggaagggtctgacaagcgggtcccgcagccccacttgtcggcctgaggggagggaggaggcgcgcagggaggcaaagcagact

SEQ ID NO: 61041 - DNA, 733 bp, Oryza sativa
  unsure (1)..(733): unsure at all n locations
  Clone ID: PAT_MRT4530_62512C.1
ctcggtaccccttttattcgtcggttatttctttcgctgattaccttgattattttaacattaattgtttataacattttattgcgtgatccattaaatcattttatggatttatatggtattcaagcttattttagttatgttatggggctattacacggtgattttggtattagctatagtaatggtgatcctattgctaatcaaatcctgaatgtatttcctgctacaatttccctatgctttgccgcattatttgtatctgtgattatcgggattccgctcggatttgttgctgcgagctttcggtataatgttgtaggcaaattactcgctattgttagcgcgttcagtttagctattcccgtattttggttagcgattatggcgttatattatgcagcgagtaatgattggcagattgctgcggttggagaattgcacccaatctatgaaatttcattagtgacaggttttcggctgttagatattttcttagcagattcgccgtataaattgaaaatgatgcagagtgtattacaccatttagcattacctactttgattttagctttgcctgctacgcttgaggtcattcgctttacacgccaacgcgcagaatatgttatgaagccaaattacattaaagtggncaagaacgcgttgttggtcgccttataaaatttgttggaacatatttacgcaatacattaccctgcttgattccatgatc

SEQ ID NO: 61042 - DNA, 387 bp, Oryza sativa
  Clone ID: PAT_MRT4530_62513C.1
ggagggaagaaagtgatcacagaccttcatagaggggccatggaccactccaggcttacagagatgaagaggcaacgtggcggttacactggtggggaggctcgggatgagtataatcgtgatcctcaccgtgcctattaacagcctatgggcacaagccagaggatatggaaggaaacgttagggcccaagccgaggaaactgccgaactgggactaatgaaacccttgcccagaaatttggtgaggctgtcagcattgaagtgatctgttaccgccactggagaaaacgagcaagaatatgtgccacaatctgatgaagtcgagaaacacaacgagggtgaatgctatgaagaggaacataaggaaccttgaaacaagagatgac

SEQ ID NO: 61043 - DNA, 399 bp, Oryza sativa
  unsure (1)..(399): unsure at all n locations
  Clone ID: PAT_MRT4530_62514C.1
attttacaatactttttatttaattttttttttttttttttaaattttggggncacggggatatttagggaaagggggggattttttctttaagggaaaaaagcattatttttcctgcctttatcaaaatggaaaaatttccaaaaccaggccccaatgaaaaaggcgtcaacttcgtgaattatttaagggggggcccaacaacaaacctaaatggaaaagcgttgtttttttcagggctaaaaatccattcattcttcaaggggggctttctttttcttttaatatttcaagctttgggcgccaaaacctttaagggattaaagatactggatcttgggaacaacgaatacaagaacctgacaccggcgggtggaattttaaagttttttttttttt

SEQ ID NO: 61044 - DNA, 2721 bp, Oryza sativa
  Clone ID: PAT_MRT4530_62515C.1
atggcggcgaatgggcgggcgtcggtgcggcccgtggagaggcacggcgcgccgccccgccccgccgggcgctccagagtaagagttgctgtaaggctccggccgaagaattctgaggacttagctcatggcgcggacttcgatagttgtgttgagttgcagcctgagtgtaagaagctgaagctaaagaaaaacaactggagctgtgaatcatataggtttgatgaggttttcagtgaaaatgcttcacaaaaacgtgtatatgagagcgtgttagaaggatataatgggaccgtgatggcttacggtcaaacaggtactggcaagacatacacagttggtcggcttggaaatgacgacccttctgaaggtggaataatggtcagagcattggaacatatcctttctgtcatgtctttggagacagatagtgtggcaatatcatttctccagctttacttagaatctgtgcaagatttacttgctccagagaagactaatattccgattgttgaggatccaaaaactggtgaagtttctttgcctggtgctgcaaaagttgaaatcagagatcttgaacatgtttttcaacttctccaaattggtgagatgaatcgtcatgctgctaatactaagatgaacacagaatcatctcgtagtcatgctattctcattattcatatacagaggagttcaagaatagaagatggaagtaatacctctcttcctaatggtactgacaacctttttcctgataatttaccgcttgttctcaagagcaagctcttgattgtcgaccttgctggatcagaacgtatcgataaatctggaagtgaaggtcacatgattgaagaagccaagttcatcaatctgtcattaacatctctaggcaaatgcattaacgcgttagcagaaaatagtcctcatataccaacaagagattcaaaacttacaagaatactgcgtgattcatttggagggactgcaaggacttcactcattgtgacaataggtccatcttcaaggcatttctcagaaacttcaagcacaattatgtttgggcagcgagcaatgaaaatagtgaacacgataaggataaaggaggaagttgattatgaaagcctatataagaaggtagaacatgaagttgatcatcttacgtcagagatggagaggcagcaaaagcttaaaaacagtgagaaaatgcagttggagaaaaaactgaaagaatcagaagcatccttgaatgatttaaaagtgacctctaacatgcaaattgagaatatggcgatggaaaagcgtcaattggaatctacaatcaagagattgatgctggaccttgagaaagagaaaggcaaaaataatattttatctgagcaaattattcacttagaaacatcattggatgagaataagcaaaaacagcttgagaacatctcaaacacaaatattcttgccgatacaactaaatctcatgagaagaaaataagagaattgctgaagcaacttgaagatgaaagatcacgttctgctagcatgaacgaccatttaaatgtactacaacagcaactgagtgatgctcagaattattttcagaaaaatatagcctgtgaattggagaagcagctctccagaaccactgaagaatttgccagtcaaataagctcactcgaagaaagaattgctgatctcatatcagagaaggagttggtgtatgaagagctgaaatctactcaagaaaagatgcaacaggagatgagacatagacagggccttgaagatgaaattctaaggttgaaacaatctttggctgataattgctctgaagagtctaaagcattatgtggtatggttagatcaggatctggattaggtagtgtgccttttatgtctaagtcaggaaaatccagagagttgctatctagccagagaagtaacatatcaaagatatttgaagaagtcggtcttccaaatgtcctggctctgttgaagtctgatgaactagaggtgcagatccatgctgtcaaagtagtagctaatcttgctgctgaagacgttaatcaggaaaaaatcgttgaagaaggaggactggatgctcttctgtcacttctagaaacatcagaaaataccacaattcatcgagtcacagctggtgctattgctaatttggcaatgaatggatcaaaccagggactaataatgaacaaaggaggagctcgattattagcaaatattgcgtcgaaaactaatgatccccaaactctgcggatggttgctggtgcccttgccaacctatgtggaaacgaaaagctgcatgttatgttgaaacaagatggcggaataaaagcacttctcggaatgttccgaactggacacaacgaagtcatagctcagatagcacggggaatggctaattttgcaaaatgtgaatcccgagtaataagtcaaggtcacaggaaagggagatccctcctcatcgaagaaggtgttcttaattggatggtggccaattcatccgcgttttctgcttcaactcgaagacatattgagcttgcattttgccatttagctcaaaatgaagataacgcccgtgacattattctaaccggagggatcaaggagctccttcgcatatcaagggaatcatccagggatgatacgcgtaacttggccaaaaaggcattaaattcaaatccagcttttttcaaggagatccaatga

SEQ ID NO: 61045 - DNA, 161 bp, Oryza sativa
  unsure (1)..(161): unsure at all n locations
  Clone ID: PAT_MRT4530_62516C.1
gttcagacacacacncactgacacanacatatatacttacatntaaatacagatanatataggtggntagctacctgtatagtttatacattagctagcgtatgtggtgttgttgatcatcgatcgccggcgacgacagggagagntcgatccacgatggg

SEQ ID NO: 61046 - DNA, 279 bp, Oryza sativa
  Clone ID: PAT_MRT4530_62517C.1
atggaggagaacgacaacaccgtgatggttgatggcggtggccggcggtggttgaggtcctacatttgcacatcatgctccatgtggctgaccacagaggatagggtggagtccgccggtgatcgaggttgtttgctatctatttttcttttgctcgtcatctctattgacatgaacgagaatgtttttgcatttttttcgtgcttgctagatgatggatggctgctactgcgcaacgtcgagttcatctatataccacaccgctacatccttctatga

SEQ ID NO: 61047 - DNA, 406 bp, Oryza sativa
  unsure (1)..(406): unsure at all n locations
  Clone ID: PAT_MRT4530_62518C.1
ttttgtttttttatttttttttttttttttttttttttttttttttttttttttttttttttttttttttttttttttttttttttttttttttttttttttttatatatttttttttttttttttattttttttttttttaaaanngggggggtttttnnnaaaatttttttngggatttaaaaacaaaccttttttttttttttttattgaaattaaagtttggggtttggatggtaataggtttttccttttgtgagattgaaataaagttacagtttcacataacataagatttttacgcataaaaattaaagcctgggcccccttatcagaaagattactcccattaattttaattgccttactggccgtttttctttgggaaaacaaattcctttaattc

SEQ ID NO: 61048 - DNA, 735 bp, Oryza sativa
  unsure (1)..(735): unsure at all n locations
  Clone ID: PAT_MRT4530_62519C.1
ggaataggtggcgccgacaagcgggccccacctgtcggtggctcaaagaaggtcggcacacggtggactcggtctacgtgcgcactgcccgcgggcgcaccacatggcagccacgaggtggccacggcggacggggaggacgaggtggcgccgatgtggcaccacagggcagcgacaccaggcggcacggggagggccacgtggacggcccaaatcgcccctgtagggggatcgggcggccacgggcgagcaggagccggctcaccggctggccggccggggagcgacgatgcacggcttgatggtcgccggcgatgaccactggcgtggtgacacacgcgggaggcggcggaaaaaggggaaagggagaggagatggaggggttcctcaccgaggggcgccggcggagctctggcgaagggaggtggcagtgatagggatggggtttcggcgatgattcacggaggatgagcggtggccgagcttgcccttgggacggcaaagccggtggaggtggttgagcggcgcagcgacggctaggacggcagtggtggtctgctggagacggcgtatggtggtggtggctcgggcgtgtggtgnaagtggcactaggcggttgttttggaaaggtggagtggcggctggcgtgcggcaaggtgtggcgaatgtggtgnaggcggtggtgcggcatgaggtggctgggnncgccgacttgagactgaattcaaaangacg

SEQ ID NO: 61049 - DNA, 468 bp, Oryza sativa
  Clone ID: PAT_MRT4530_6251C.1
cgtacgcttggttgcatttttgttggcggcctttttttttttttgggggggagcatctaaaatattggatactcaagcactatatggagacaacgcacactagtgtagtgtgcagaggaacacattgatggaagacagaccgttatctgcgctttgcaaagtatttgaacattaggaatgacgcccgttatgcaccgtagtataaggccggttctcgtggggcgaggccgagtacaatggtaggggatgacatgaccagcataaaccgggagaatgaagttttggacatccaaggaggtatggacctatttacggaattgtggaccccctgtgggcccgaaaggtcctgggcggagaccttgcaattctttacaagcattgcatggacatgagggccttcaccggggtggtttgtgagcgggtccatcttttaacaagaccaccatttttctttcaagaattttaatg

SEQ ID NO: 61050 - DNA, 705 bp, Oryza sativa
  Clone ID: PAT_MRT4530_62520C.1
ttgtcgcgtgggctggagcaaaagcaaattgcaggtcattgttggaacagtggcgtttggaatgggaatcaacatgccagatgtcaggtttgtgattcaccacagccttagtaaatctatggaaacatactaccaggaaagtggaagggcagggagagatggactaccttcagaatgtattctgtattatcgacctgttggaccttgtaagtatgatgcaatgatgcattcaacagtagttttgtacattgaaatttctatgactgtaattctgtatcgccattgtaatttgatgttgagctcttatggttgccgacaattttgtgaaccgtttctttcaacagctggagcaaaagcaaattgcaggtcattgttggaacagtatgcatccaccccccccccctcgtctatgcccccctctcctctctctctctctctctctctctctctctctctctaacattcaagttttgtattaatttatgtaggtggcgtttggaatgggaatcaacaagccagatgtcaggtttgtgattcaccacagccttagtaaatctatggaaacatactaccaggaaagtggaagggcagggagagatggactaccttcagaatgtattctgtattatcgacctggtgatgttccacgccaaagttcaatggtcttctatgaaaactgtggcctgcaaaatctttatgacataa

SEQ ID NO: 61051 - DNA, 626 bp, Oryza sativa
  unsure (1)..(626): unsure at all n locations
  Clone ID: PAT_MRT4530_62521C.1
ctacgtgcgcactgcccgcgggcgcaccacatggcagccacgaggtggccacggcggacggggaggacgaggtggcgccgatgtggcaccacagggcagcgacaccaggcggcacggggagggccacgtggacggcccaaatcgcccctgtagggggatcgggcggccacgggcgagcaggagccggctcaccggctggccggccggggagcgacgatgcacggcttgatggtcgccggcgatgaccactggcgtggtgacacacgcgggaggcggcggaaaaaggggaaagggagaggagatggaggggttcctcaccgaggggcgccggcggagctctggcgaagggaggtggcgttgcttcggcgacgggcggcgcttaggaagaaacggacgagggtggccgcgaccttgagtgatagggatggggtttcggcgatgattcacggaggatgagcggtggccgagcttgcccttgggacggcaaagccggtggaggtggttgagcggcgcagcgacggctaggacggcagtggtggtctgctggagacggcgtatggtggtggtggctcgggcgtgtggtgnaagtggcactaggcggttgttttggaaaggtggagtggcgg

SEQ ID NO: 61052 - DNA, 1412 bp, Oryza sativa
  Clone ID: PAT_MRT4530_62522C.1
ggttaaaacttatttacattgctgggctgcgcaaataaaccagctcttgaaatggttgtacaatctagcatccatgtgaggcatatacaaaagatttttttttattttttttttgatcaagtagaaccatggcattacattatcggcaacggcatcaatgtagtttatagaagtttaaaccttttatctatttgaagaacactctatgaggcttttatgattaagaagtagaacaccaacatcacactatcagtatcgacatctacaaagttcacagaagtttaaacctttttatctgcaacatttgaataacttcatattttgaagtgctcgataagagcattgctcgcaagctctcgtttaaagaaggtccccaaaaactcaggcatagtaaaattcctgtactttggagggttttccgaagaaaccagctctggcaatggtccataaaaaactgagtcccctctcttgccaggattgtagaagatggcacttgaaactctggcttcttcatgtgaattcattactacccggtgttccacgctcttgtacttatcattagacattatctgcaataggtccccaacattgatcataagagcgccgggcacaggcttcgcatctacccagtagctctccccatcctcgttcgtgtgcttcacctgcaggccaccgacatcatcctgcgcgaggatggtgagcacgacggggtccgtgtgcgggacgacccccatggtgcgctcgggctcagggcacaccgggtagtagtggcacaccatcactctcccctcgaggcaggaggcctcctccagcgcgtcggcggcgaggccgagcccctcgcagagcagcgccatgacggcgcgggacacggcggtggcgtgcgcgtcccagccgacgacctcggcgcggcacgccgccgggatgcgccccgtgtcggggcgcgagggcccgaacgtgacctcgatggtgtcgcgccagctcgcggcgccggaccggtacaggtcgaagttggagaagtagtccaccccgccgtccacggagcggccgtagtgcgcggcgcgctccgtggccgggagttcgttgaaggcgcgcgtggcggcgaggagcccgtcggtgaagccgggggggacgagggcgtggtggttgacgaggtagaagaacccccactcgcgcgcggcccccgccgcggcctcggcggcgagcggcgcggggagggagaggtcgacgacggggatggagacgccgggtggagcgagcgggacggaggcgtaggggtcggggtggcggaagatgtccgggacggcggagacaccggactcgacgaggccgcggacgccggtgcgtgtctcgtcgaaggccttgacgagggcggcgcggcccgttgccgcggcggcggcggcggaggacgccat

SEQ ID NO: 61053 - DNA, 696 bp, Oryza sativa
  unsure (1)..(696): unsure at all n locations
  Clone ID: PAT_MRT4530_62523C.1
ggaataggtggcgccgacaagcgggccccacctgtcggtggctcaaagaaggtcggcacacggtggactcggtctacgtgcgcactgcccgcgggcgcaccacatggcagccacgaggtggccacggcggacggggaggacgaggtggcgccgatgtggcaccacagggcagcgacaccaggcggcacggggagggccacgtggacggcccaaatcgcccctgtagggggatcgggcggccacgggcgagcaggagccggctcaccggctggccggccggggagcgacgatgcacggcttgatggtcgccggcgatgaccactggcgtggtgacacacgcgggaggcggcggaaaaaggggaaagggagaggagatggaggggttcctcaccgaggggcgccggcggagctctggcgaagggaggtggcgttgcttcggcgacgggcggcgcttaggaagaaacggacgagggtggccgcgacctgcggaaggggaatgagggattaaggaggggaggaccggagcggtgcagctgtggagctcaccttgagtgatagggatggggtttcggcgatgattcacggaggatgagcggtggccgagcttgcccttgggacggcaaagnnnnnnnnnnnnnnnnnnnnnnnnnnnnnnnnnnnnnnnnnnnnnnnnnnnnnnnnnnnnnnnnnnnnnnn

SEQ ID NO: 61054 - DNA, 440 bp, Oryza sativa
  unsure (1)..(440): unsure at all n locations
  Clone ID: PAT_MRT4530_62524C.1
nnttntttttttttttttttttttttttttttttcaaaacaaccgtgttatcctgtccatagtgaataaataaaagttcccatcgagccataaaaaatgctgaaagagacggcccgtttgcctttattgtaaggcttgtagcattggatcgaacgaattgtcctcctaacagcgacgcaattctcccaaatctgccgtttcattcgtccattagctgaaaaagaaactctacaatctatctataaacagaaggttaggtccctgtgtctaaattttctcactgatgcctacaggtccggagtaaaatttgccgcactttggacatggactgaaccaaaactttgcagatgcaggcagatttttgcacaaaaagtcaagagtccacataagctactccacggttactagctacaaaggcaggcactttggctttttggcac

SEQ ID NO: 61055 - DNA, 496 bp, Oryza sativa
  Clone ID: PAT_MRT4530_62525C.1
cgagataagaaggatactacatgttacacttcatattgtatactatacattattcctctcgacttaaaataatacacaagcttacatgtatggatgtaatgcagttccgcttgtcactatgtacacgcatgatatgtttatgccagcttgattccttcgtttatacaagaaagcatggtaatccgtaggagaacatcggcttggtagcttcaacaatctgccacacggattcagcagacaattgttctttgcatcaatcacaattgacattcagattgtccctgtatatctcgtcgtggacaaaagaatattcaaattaaccatcatccttcttctccagatacaccggggttccctaggcaacaaaaattgtctcggacccgaatataccaggtcccaagtcaaatattcctctcacatttccccccactttaagttgtttcttgccactgatcttcggtttaccatgtcaaacaaattttataaatgcctgcta

SEQ ID NO: 61056 - DNA, 3164 bp, Oryza sativa
  Clone ID: PAT_MRT4530_62526C.1
cccgcgtcggcatacacacctctgttctccctcctttgcttcgttcccataccaattaatcaaccactttcacctccacatggcctaagaagccataatcttctattgacgtctgcatttgcacggcggtcgccagcgattgggcacgacgggcatggcgtcccgccggcatgtcctgattgctgcacttattatggttggggttctcgaattcgccaacgcagacaaatacaagccaactgagtccatacttgtgaactgtggttcagacaaggagggccaggacatcgacggcagaaaatggctttctgataaggacagtaagtggctcatcgacggcgagaagtcatctatcatggcaaatgcagatttccaagatccctccctcccatcgccggtgccgtatatgacggcgcgggtgttcaccaaggagaccatgtacaacttctccgttggggaggagcgccactgggttaggttacacttctaccctgcgtcctaccacgatctgcccgccgagaacttcttcttctcggtgtctacatccaccggcatcacgctgctaaagaatttcagcgtgtacatcaccgccaaagcgctcagccaggcgtacatcatcagggagttcacactcccaccatcaacaactggctccttgtcgctgatcttcacacccacggcgatgaacaatgcgtcctacgcctttgtcaatggcattgagatcatctcgatgcccaacatcttcagccaagcagcagcgagtgttgatatcgccggcaacgaggtgagcaccactgacagcagcctgcagactatataccgcctcaacgtcggtggttcatacgtggctccgacaaatgattctgggctgtcacgtgactggtacgacgacacgccatatatctatggtgccgcagtgggtgtgacctaccaggctaatgacactgtccagatcaagtaccctaaaaatgaccctgatgcagagtacgctgcaccggcaagcgtatacctcaccagccgatcaatggggcctgacccgaaggtgaacaagaactacaaattgacgtgggtgttcgaggtggatggcaacttcacctacatcgtcaggctccacttttgtgagctactgctctccaagccgaaccagcgggtgttcgacatcctgatcaataacaaaaccgcccagtccggggccgatgtcatcgggtggggaggtcaatttgttccagtctataaggactacgccacaatcatgcctggtggtgctggtgacaaggtcctgtgggtacagctgatgcctaacgttgggagtgggtcagagttcttcgattctcttctcaatggactggagatcttcaagatgagcgactcttctggcaacctggccggtccgaatcccgacccttccaagttgcttgaggaagctgagtcctcagctcaagggaagttcaagtccaagcctagcaacctcaaggccaccgtgatcggcggtgctgcaggtggcgctgccgcgtttcggattgttgcggccatctgcatcgtggtgtatcaatcaaagaagaggaaggtgctaaataacagtgcatcccactcatctggatggctgccagtgtatggtggtaactcgcacacaagcaccagcaaatcgtctggtggcagaagcgccgccctgatcaacccaaacatcacggccatgtgccggcacttctcatttggagagatcaagtcagcaacgaagaactttgatgaatcactggtgattggagttggtgggtttgggaaggtgtatcggggtgtggttgacggtgacaccaaggtggctatcaagcggagcaacccgtcgtcggagcagggcgtgctggagttccagactgagatcgagatgctgtccaagctgcgacacaagcaccttgtctcgctcatcggctgctgcgaggacgagggcgagatgatcctcgtgtatgactacatggcgcacggcacgctccgtgagcacctgtacaagggtggtaagccggctctgtcatggaagcaacggctcgagatcacaattggcgccgctcgtggacttcactaccttcacaccggtgccaagtacaccatcatccatcgtgacgtcaagacgaccaatatcctcgtcgacgagaagtgggtcgccaaggtctctgattttggcctgtccaagactggcccgacggccatgaaccagacccatgtcagcaccatggtcaaaggaagcttcggatacctcgacccagagtacttccggcggcagcagctcacggagaagtccgacgtctactcgttcggtgtcgtgttgttcgaggttctgtgtgcacggcctgctttgaacccgagccttccacgggagcaggtcagcctcgccgaccacgccatgagctgccagaggaaaggaacccttcatgacatcatcgacccgttgctaaacggcaagatcgcacctgactgcctgaagaagttcgccgaaacggcagagaagtgcctggccgaccatggcgtggaccgcccgtccatgggcgacgtcctttggaaccttgagttcgcgttgcagatgcaggagacatttgagaacggcgggaagacggagggagcagacagcacgagcgacagcaccaccacttctgtggcggacagcatggctgccaacgccgcagcgctgtcgctgatcagcgaggatatggacgaggaggacatcgctaacagcgtggtgttctcgcagctcgtccgcccaactggcaggtgagatggatcgatcgatgggcatgggaacgagttgtattattcggcggggatggtaggtggaacaggccatgcgtgcataccgtttgtttgggactgggatcgatttactggtgttgaactgttcgtatgtacgtaacatgggagatcaggatatgtgtacatgtgttgcattattcttgatttattatttgattccattctaaaaaaattaaaaaaaaaagtaatgaaaaaagagagaagaaaagttaaaccgctagttttttttttatttgagaacaaaacagctagttcagaattcagattgcaggtcaaaggctactgtgcttggataagagagaaactggggattgtctgtatatattttgccatttttttctccatcaacgtcagttttttttctt

SEQ ID NO: 61057 - DNA, 1925 bp, Oryza sativa
  Clone ID: PAT_MRT4530_62527C.1
gatcctcgacaagctcctgtcacaggcctggctgcgggagcagcacgagctcatcaggcagctcgtcgggtcgtccaccgacctgatggacaagctgctgcagacgctccggtgcacggggacccgcgaccgcggcgttcgggagcacgccgcgaggatcgtggcgcacctcgccggcgagatcacgctcgccaggttcccgcaagggatccggtgcatatactcgctgctcaccaccccgagaaaccagcagcaagacgacgacaacgacgacgacgacgacgacagcgcccagtcctccgatcactacaagaagctcatggtgcagggcctcgtcatcctccacaagctagccgccgcggagcacaaccggcggatcatcatcaacagcacccagggacggcagctgctctccatggccatggcgcccgtcagcgccgacctgctccaccgcatcgaccacgaagcgtggaacgacatcgtcgcctgctcgctgcagctcatgtgccggctcgtcaccgcccccggcgagaccggcgacaagctgcgttcccaggtgctgaacgacaaggacgccatcggcaccatggagaggatcctcaactgcgacggatgcaacgagaagaggctctatattctcgccattaacatcctcacgcagcttcccatggcggcgaagaacaaggtggtggacgaggcttcgagcatgagcgtcgagagcagaaggaaattcaccaagctacttctactcatctataccgacgaagagaaggacgcctttatgagacaaatggcaggtgaagcattggcaatgctgtccgaacgaagcaagagcgacgccacaatcatcttgaaagcaagtgacagcactctcaaggacctcaccgcaatgctcttggatgtaaatagcaacagaggatacagaatatgtgcagctgaaatcctggagcatctgtacattcgatacaccaagcaagatggctatctcaacaatctgacggaagccatgaaagatgtgttgccaaaggtgctcggagaaatttttcttgtgtcatggacgcataaagaaaagcaaccaggaatgacagaacaaggaacagagggagttaatttctcggcacaaaaagctgacattgaaagtcaagatcccgttgcttgtcaacatgaaaaggttaaagaggaaaacgaaaaggttaaagaggaaaatgaaaaagttaaagagcaagatgaaaaggttaaagagcaaactgtggatatgaaactttatgcagctttactgtcacttagtgaggcaatatttcaaagattggtcaatgatgataaagatttggctgaactgactgataaaattgccccaggaggaggcactgcatttagcttcgccggaaagctcaaggagatggtagaaggaaacagtgaacaagcaacagccaattgcctgagaatgctgaagattactaccaggatgatcatatcattgataaatctcaatggagccaaagtcggagcagacctggagagcttgatgcattctctgttaaaagcttcagaaaagatgttggaactggagggcttcatgattttctctagcagcgatcgtaccgaaagcacgaatcctgccaacattctcgcttccctcgtgaaagaagcacaggagcttctggagaagaagaggcaggcacaaactacacccgctccatcaatggagaccagctgattgagtagacagactatcacacgatcgtatgctgatctgcagactgttgcagtaatccctggaaactgtcaccgtacaatccctgaaaactgtctctgtaatctgtatgtgtgctgaaacttatctatcttgtcattgtcccatctatttcaaaactttgaagttgaactttaccacaactgttgagctttaaaaaaaaaaaaaaaaa

SEQ ID NO: 61058 - DNA, 1258 bp, Oryza sativa
  Clone ID: PAT_MRT4530_62528C.1
ctaaatgcaattaggaacttggtgcaaaatcgatctacatatcgaattaaatactcccgtatttctattatatatacagagagctcagttcatttgaatgatcatcatttcatgtgtactcgtattatcgcacccacctatattattcaaatattttaatattttataaaataggttaataataactggaaacctgtagaggaaaaaattgaaaagaagttggggtgttggtaggggaaactcctggcaataggagggagggttgctttgattaactctagcattagcagtgtcccactttatatgatatctctatactctcttccttgtggagttagagaaaaaattgattttatagaaggagattcctgtggcaagaagatcaaggtattaggaaatatcatctagtgcaatggccagtgatctgcctccctaaagatcagggagggctggggattttagatttagatgtaatgaataaagctctgttggggaaatggctgtggaatatggagaacacagaaggtttgtggcaagacatgctaagaaacaagtatttgaaaaagaaaactctgactcaaatcaaacataagaatggggattctcacttttggtctggtttaatggagatcaaagagctgttcttgagattttgtgacaagaaggtggaaaatggggagagtaccctcttttgggaagatagttggtgtgggggggggggtaaacctattaaagagtctgctccagatctttataacataaccttgacaaaaaatgtgactgtggcagagatcaaaaggagagggttaggctcaatcaaattcaggagagacctaaatgcagttaaatagagaaaatgggctaatattggtagagccctggaatttgttagtctaactaatgaaaaagacagactgatttggagactgtctaacaaaggtttctctgttaaatctttctacagagctttgatattacaggggatcaattatccctaaaaaaatgtggaaaatcaaagcaccacccagggtgaaagttttttcctggctggttctaagaaatagtattcttacaaaagataatctgttcaaaaggggttggaggaagggctcgattaaatgtcaattctgtgacaagagtgaatccatccaacatctgtttttagattgtgagggagacagaggaaaaatgcagtggggggcgcagctactaaggcaggtagcaaatgagatctttcactcaaaatttggatggaggg

SEQ ID NO: 61059 - DNA, 440 bp, Oryza sativa
  unsure (1)..(440): unsure at all n locations
  Clone ID: PAT_MRT4530_62529C.1
ggtaggacagtcgcaaagatcttcggattgggtaacatgaacaacctctgaacgaacggtttcgcactgaagattgcggtctaataaactttggccctgccagtcctgaagacggggagatattgtagacatggtaccaatggtggtggctggcaaccactatagacctgtagaaacaccacctgtccagttggggatgtccatgttgatgcccgcttagtggccagggcgaagagtcactcatgttcattagcaggacggagggagccaagctgcactggcgcctgaatctgcactaccttggattgacccatgggccgacaagtagacggcctatgagtgctgancaaatgaaccagctgtcnttaacggagtctaactagtagagcatgcttcagcctcatggttggagcccagccaagcttctttttgatgagcgt

SEQ ID NO: 61060 - DNA, 726 bp, Oryza sativa
  Clone ID: PAT_MRT4530_6252C.1
atggagcagcagtctctcgtgctgccaagtgacaagtgcaacaataatcgttcacatagggaaaacaaaaaagaaagcatgatcggcggcgccgccaggccaccgacaccgccggcggtcgtcgacaagacgatgtgcgccgcgtgcgacatcctgaagctcctaccgacaggcaccgtgctggccttccacgagctggcgccgtccttcaccaaccacggcggcgcgtgcggcgcggccagccggtacaccaccgcggcgctcatcgccgcctgcaccgcgtcctgcgtgctgctctccttcaccgacagcctcgtcagccatgtcgacggccgccgcctctactacggcgtggccaccctccggggattccgcccgttcaacttcgaggggacgcgcgaggagatggaggagaggttcggcgacctcccggggatgaaggtcagggcgctggacttcgtgcacgcgcacgtctcggcggtcgtgttcgtcgtcgtcgcgctcggcaacgccgacgtgcagggctgcctcttccccgacgccggcactggcttcacggagatgttcaggaacctgccaatgggattagggttgctggccagcatggtgttcatgatcttccctactaccaggaagagcatcggctacacggacatgatgccgcacaaggaagactacgggaaaggaggtaataatattcctggccagaccacgccgtcggtgtga

SEQ ID NO: 61061 - DNA, 2003 bp, Oryza sativa
  Clone ID: PAT_MRT4530_62530C.1
cgcttcaacggaaaaaaaaaggggtcgcgtctcctcgtctcgtcgcctcttcctccttccaattcatctcgtcctctctctcgtaactcgtaaagagatctcgtctcgcctcgggaatccaaccattgccggcgaagtagagatcgggagggcggcgccatgaacaggggcggcggcgtcggcgtcggcgatgagagcggaagcgactacgagagcggcggcggcatgcggaagccgctgctgatgcacacggggagctggtacaggatggggtcgcggcaggggagcctcaccggcgcggggacctcgtccatggccatcctacgcgagtcccacgtctccgccttcctctgcacgctcatcgtcgcgctcggccccatccagttcggattcacggggggcttctcctccccgacgcaggacgccatcatccgagacctcgacctcaccctctccgagttctcggtgttcggatcgctgtccaacgtcggcgccatggttggggcgattgccagtggtcagatggccgagtacattgggcgcaaagggtcattgatgattgctgcaattccaaacatcattggttggcttgccatctcctttgcaaaagactcatcgtttctttatatgggacgattgctcgaggggtttggtgttggtgtcatctcttatacggtgccagtttacatagcagaaatatcacctcaaaacatgagaggtgctcttggctcagtgaatcagttatctgtaaccgttggtatattgttggcatatttgctcggcatgtttgttccttggaggcttcttgctgtaataggaatcttgccttgcactgtgttgatacctggcctattcttcattccagaatccccaagatggttggcaaagatgaacatgatggatgattttgagacttctttacaagttctgaggggatttgagactgacatcagcgcggaagtgaatgatataaagagagcagtagcgtcagcaaacaaaaggacaacgatccgttttcaagaattaaaccagaagaaataccgcacacccctaatactaggaattggcctacttgtactgcaacagctaagtggaatcaatggaatattgttttatgcaggtagcatcttcaaagcagcaggtctcacaaacagtgacttggctacatgtgcacttggtgctatccaggttcttgctacaggagttacaacctggttattagacagagctggccgacggatcctccttatcatctcttctgctgggatgactctaagcctccttgcagttgctgttgtatttttcctcaaggatagcatttcacaagattctcacatgtactacaccttaagtatgatctccttggttgctcttgtggcttttgtaatcgccttctccttcggtatgggtgccattccatggatcataatgtcagagatcctcccggttagtatcaagagtctcgcaggaagctttgcgacgctcgccaactggcttacatcctttggaataacaatgacagcaaacttgatgcttagctggagtgctggagggacctttgtgtcctacatggtcgtgagtgctttcaccctcgtgttcgtcatcctttgggtgccagagacaaaaggaagaactctcgaagagatacaatggtccttccgctgagccttgtggtcttcgaaaatatggccattttttcaagtacaaagggaaggattgatttgcgcatttgcaaatcttgtgtattctatgttccgagtcaagtatactggacaaaaagcaaagtattctttctgttcatatattcttgtacaacattgtttcacgtattccagatcgacttgcaaaggcttttgtgcagtgacacactcgtgatctcatcctaattgcttttcctttttgtcttgagcggctgcatgagcatgatcaatgtaaaatatgagtatactctcaggcaaaaaaaaaaaaaaaaaactcgagactagttctctctctctctctcc

SEQ ID NO: 61062 - DNA, 831 bp, Oryza sativa
  unsure (1)..(831): unsure at all n locations
  Clone ID: PAT_MRT4530_62531C.1
gcgttatgtgcgacggcggcgtgtcgtgcctggtggtccgcatcctggatgatcagggacgaaaccatttactggagatcacgctgcctatgaactacccttcaagtcctccttgccttgtggcagatgttccttatctaccagaattacagtggtcaaaaggctcaagactaaaagatgttgtctgccagttccaagagcacctgaagatattgcaagattactggtctataatggatgacattgataaggtcctttgggttgttgatccaacaaagccaacctttgctatgtctcatcgccgtatagctttaggtgatgattgctatcttttactacatgttaatgtgcgaaagcccagatcattaccagaggttcgcttcctgggaacagatgggaaactggacagactgataactaattggacaaaatattgcaaaaagtgacaagaaattccatgaaaacctgtcaactgtcttggatttcgctttgcctccaccaccttcagtcaacatcgaagatgacgagcaagttgattgtggaatatgttatgccaagcatctgccaattgatgatgaacttgggactcacagcgggggcacgacagattacacatgtgaaaacccgagctgcagcagagctttccattctgtctgcctgagagactggttacgcgcgattactacaacaaggcagtcgttcgacgttctgtttgggaactgcccctactgcagcgaccctgttgccgtgaagatcaccgaccgctanaacagtcttcagaggcagatttcagctgattctaaccactcgtgagaccatactaactagtca

SEQ ID NO: 61063 - DNA, 328 bp, Oryza sativa
  Clone ID: PAT_MRT4530_62532C.1
tcgcccagctctaatacgagctcactatatgggaaagctggtacgcctgcacggtaccgtgccggatattcccggtgcgacccaacgcgtgccgaagcccttggatgctccctctgttgggctgggtgaggagttggttgactggctgacaactggcttgacctgattgagtgaactgatgatgaatgtaatgaatgtatgaattggccaatggcatgaaaggtgcccagtgtgtggttggtggatgctgacctgatggatgtgtctgagtgaactgctgctgggtgtgtgtgtgtctgggaggtgccggacctgattaagaagacat

SEQ ID NO: 61064 - DNA, 491 bp, Oryza sativa
  Clone ID: PAT_MRT4530_62533C.1
ctgcgggaccgatcccggaattacactgggtcgacccaccccatcccgttttgatttatagggttttggatgtttattctctgggacgatcgaaaaaatgaacgagggggaggtgcaccggacgcggattttctcaaagatttgaagaccaacaataaggcaagccactcttcgatcatattgctcctagtttataaaatgtgttgattgcaaatttgcatgtagttgcattattttccgtaggaacttgttaaacttaacccttgtcgctccaccacagcagtacctcgatacttgcgctctttgggcgtaggtatccttttgcaccatttgtttatgtcaggtttatatatggttatcgatgtggaaaaacttgggttgtgaaaggtttataaaacccgactcggggagtcggtgactttgaaaacaaaaagggtttatgggagaaaacttgcggtgcgaatcctctcctgtgtgggttggttttttag

SEQ ID NO: 61065 - DNA, 721 bp, Oryza sativa
  unsure (1)..(721): unsure at all n locations
  Clone ID: PAT_MRT4530_62534C.1
tgaggactcaaaatacaagcagaaatctcctgctgaatccncaatgnaaataacttctgagacgaagttgcctacagttctcagaaggaaatatcctgatacactcaaagatggttttgttgtagccttgagaacaaaagataattcagggttccatgttgcaagacagagacttgctggtggtggtggttggatcccacgcgtccggtcaaatgctacaaacagggaccctgctgctcagttcctagtcactttcaaaaacaaggataccatgggattacgttccttcgtcgctggtggtaaactattgcagattaataggaggatggagtttgtgtttgcaagtcatacatttgatgtttgggagagctggatgctggaggggtccttgttggagggttgcaaacttatcaattgcagaaattcatcggctgtattggacgtctgtatcgagatccttgcagctgcgagtgaagaagatggagttactcggtggctagattaggccgctggggacagaaaaatggactgactcgttcttgttgcttggtttggtttgttgccaactctctttttctgcctaaagtattcaattttcgcttttgtagtacaggaaccttgtgggcacagagtgtatgattgtacgtgttgtcttgctaaacctgaccttcaacactgtagtaagttttgatttttatcaanaaaagaaganaggagnnaa

SEQ ID NO: 61066 - DNA, 2382 bp, Oryza sativa
  unsure (1)..(2382): unsure at all n locations
  Clone ID: PAT_MRT4530_62535C.1
cgggctgcaggaatcggcacgaggaaaagccccctcggcccggagacgggaggcccgcaccaaaacccccgccacgcgacgctctcgatccgagcgccgagagggagccgcagggatggcccgctcggcggcctccggcggcggcggcgggggccagccgctggtggtgtcactgaactgcctcgacgacccgtcgctggagcaggaggggctggccggcgtggcgggggtggagcacgtccccctctccgccgtcgcctccgggcgcgtggaggcggccgcggccgtgctcctgccctcgctcgccttcctcccgcgggccgcgcagcggcgcctccgcccgtggcagctcctgctctgcctcgggtcgcccgaccgcgccgcggacgccgccctcgccgcggagctgggcctccgcctggtccacgtcgacgccaaccgagccgaggaggtggccgacaccgtcatggcgctcttcctcgggctgctccgccggacccacctgctctcgcgccacgcctcgtcggccccggccgctgtcgccgctgggtggctaggctccgtccagccgatgtgtcgcggcatgaggcgctgccgcggcctcgtgctcggcatcattggtcgatccgccgccgcccgctgcctcgccactcgcagcctcgccttccggatggacgtcctctacttcgatccgcgccattcggctaatggaaaagcaaagcggccttccattgtatttccttctgccgccaggagaatggatactctcaatgatttgttggcagcaagtgaccttgtttcactgcactgcacattaacaaatgacacgatgcatatacttaatgctgactgtctgcagcatgtaaaacctggagcattcatagtaaatactggaagttgccaacttatagatgattgtgcactcaaacagctattgattgatggtacaatagctggttgtgcattggatggtgctgaaggtccacaatggatggaagcgtgggtaagggagatgccaaatgttttaattcttcctcgaagtgcagactacagtgaagaagtgtggatggaaataagagagaaagcaatcacgatattgcagtcctttttctttgatggtgctgttccaagtagtgcaatatctgatgaagatgaggaaattagcgaagctggaaatgaagatgatcagctagaagaaaaggttagcagttcacaagttttttattctgagcagcagacagatgaaagtcagttaaaaatggagtacgaaaagaggagagccatatcccagcataaagagcctcaagcatctgctagatctcaacatattgtcccccgatcagaaggaaggcgcagccgttctggaaagaaagggaaaaagagacctgctcgccgcagatctcaacagaaaacagatgaattatctgctgtagagagtggcagtaattattcctcacgcagagatgatgatactgcaatgagtggaagggaccaggtattgagttccagttcacgatttgcgtctcctgaggactcaaaatacaagcagaaatctcctgctgaatccccaatggaaataacttctgagacgaagttgcctacagttctcagaaggaaatatcctgatacactcaaagatggttttgttgtagccttgagaacaaaagataattcagggttccatgttgcaagacagagacttgctggtggtggtggttggatccttgatatcgtgtcaaatgctacaaacagggaccctgctgctcagttcctagtcactttcaaaaacaaggataccatgggattacgttccttcgtcgctggtggtaaactattgcaggttttatacctctacttgtacaagttgcactgttcaagcagattcacccaaccaaaaattaataggaggatggagtttgtgtttgcaagtcatacatttgatgtttgggagagctggatgctggaggggtccttgttggagggttgcaaacttatcaattgcagaaattcatcggctgtattgcacgtctgtatcgagatccttgcagctgcgagtgaagaagatggagttactcggtggctagattaggccgctggggacagaaaaatggactgactcgttcttgttgcttggtttggtttgttgccaactctctttttctgcctaaagtattcaattttcgcttttgtagtacaggaaccttgtgggcacagagtgtatgattgtacgtgttgtcttgctaaacctgaccttcaacaatgtagtaagttttgatttttttctcaaaaaaaaaaaaaaaaaaaaaaaaaaanaaagggcgggcctctatagggttcagctctacgatgcgtggtatgagcgtttatgtctttatatagtgt

SEQ ID NO: 61067 - DNA, 279 bp, Oryza sativa
  Clone ID: PAT_MRT4530_62536C.1
atggcgagcgtctgcgctgttcggccaccattgtcactcgcttccccctcctatccgcgcccgacgcagacggagccacctaaccgcggcgccctccgccgctcgctgctgactggttccctctcccgccgcgtccaccaccgctcgttgtcggccaaagtcacactgccgcgcccgcgtccgctcgcctccaagcacagagagaaagcggactccgtggatccccggacaggatcgctgcatctgcacggcaaccagtactctaataaatgcaactag

SEQ ID NO: 61068 - DNA, 247 bp, Oryza sativa
  Clone ID: PAT_MRT4530_62537C.1
atggcaatttcccccgcggggccaagtcccctgcagggacccgcccttacgggggcaggggtgggtgtgatttttgacccgcgggtgcgtcagggcggcaggccggcggcggtgcacagggcgcggcaggaaagcaggcgcggcgaggttgcggcggccggcgagacaggcaagggtgcggcgaggggacaggcatggccggcggtgaggttgcagcgcataggcggcgattcacagagagttagag

SEQ ID NO: 61069 - DNA, 1568 bp, Oryza sativa
  Clone ID: PAT_MRT4530_62538C.1
atgggggtggcgctcaccctcgcgctgaccgccatgtggcctccgccgcggctcgcggcccccgccactggtggtcacgtgaccgtcacggcgaggaagccgcggggtcggcggctcagcggtaaatacaccaccaccaccaccaccgcttcactcggctgcggctccaagccaaacaacatccgcggcgccaccgccgcagccggcggagggagcaaaatggaggccgccgccgccgtcgccccctccggtctccgggcgagcttcctcgacgtcctcctcagccgccgtcgtaacctccaagtggctctcacggtggagcccgggagcccggtgaagcgcccgctgtaccaggggaggccgccgatggggcggagcgaggccatggaatcgtgcccgaggaaaggggtggtgaactccaaggagaagttggttgaagaaaatttctacctgattactgagtcaggtgaacaagggcgtgtacctgtgcttcttctgaaacttaacgatacaacccctaaaagaaaaccagttattgtattcctgcacagctcatataaatgcaaggaatggctgcgtccactgcttgaggcatatgcctccagaggctacatttctgttgccatcgattctcgctatcacggtgaaagggccaacaataacagcacttacatagatgcactaaaatcagcttggaggaatggggatgcaatgcctttcattcttgacacggtgtgggacttgataaagcttggagatcatctcagtgaacgggaggatgttgatccctgtaggattgggattaccggtgaatcacttggaggaatgcatgcatggtttgctgctgttgtggatacacggtatagtgttgttgttcctataattggtgttcagggatttcgatgggccatagataataacaagtggcaagctagagttgatagtatcaaacctctatttgaagaggcaagaattgatctagggaagagtgaaatagatacagaagttgtagaaaaggtgtgggacaagatagcacctggtctggactcacaatttgatgcgcccttttcactccctgtaattgcaccacggccacttctcctcctgaatggtgctgaagaccctcgatgcccagtacttggtttacaggaacctgtttccagagctgctaaggcttatgaagaagttggttctgcagataagttcatgttcattgcagagccaggaattggccatcaaatgacagcgaacatggtgaaggaagcaagtgattggtttgatcgcttcctttagagggttatgtatatgttccgaatactcttattataccacatcgtgagggaaaggcatactctacaacaagttgtctcagtttataattgcttatattgaatatatgactggaatcgattcaatttcatcaccatctaatttgtagtctacataccctaataattgccaaaggagaaacattttgtagcatgtaggcatttcacagtttgagaatacagaagttgggaggaagattatttaaaaaaaaaaaaaaaaatgagaaaaaaaaaaaaaaa

SEQ ID NO: 61070 - DNA, 303 bp, Oryza sativa
  Clone ID: PAT_MRT4530_62539C.1
atgcggagacaaggatttagacaggttcaggccctctcaatgagagaccgccaccgtctcgagccaccgcaacccctagtgccgcctgcgtcgacgggggccgccgtagcccatagtgccaccggcgccgccggaagccgccgtcgtcctctgtcgcagcccctagggctgccggcgccgatgagagccgccgcagcccctagggccaccaacgccaacgggagccgccgccatcctctgccgcaacctctagggccgccggcgccgacgggagccgccgccgtcctccgccgcatcctctag

SEQ ID NO: 61071 - DNA, 414 bp, Oryza sativa
  Clone ID: PAT_MRT4530_6253C.1
atggatgaacacaaagctcaagtgagtgtgagagaggtgcaaggggtgtatgcaattgaattgggtgccaagagagcccccttgctgctggtgggggagtatttatactcacccaccaaaactagccgttgggggcgaaatcccccaactttgtgctctgccggtctgaccggaggtatgtggccagtcagaccgtgctactctgcaacggctagaaaactagccgttgaaatgctgtcagagggccccatcggcctggccgggggccggtctgaccgctcatgtgccgccggtcagactggccctatgcgacgatcagaccgccatcttgcggcctgtcagaccggccatggcacgccagtcagaccgccactatgtggccggtctgaccgtccctggtcaggccgaacccag

SEQ ID NO: 61072 - DNA, 301 bp, Oryza sativa
  Clone ID: PAT_MRT4530_62540C.1
gtctcacaagataccctatgcttgatcgagcccatcaaatagtgacggaggtggtggaatatgctcgacaaattacaggcaacgttttagaaatactatctcaacaactcaaatgactttacaaataagaagaatatcctaacaccatataacactgacatgggcgaaataagagtattgccaccaaataaaccagatcctgacccgtacgactaatattagactaaagcgtttagaacagctcttgcaatagaccttatactctgtggacgaccaaaacactgacaaaaacttcatcaag

SEQ ID NO: 61073 - DNA, 1970 bp, Oryza sativa
  Clone ID: PAT_MRT4530_62541C.1
atggctagccgtgtcgcttcaccctcaccaaaatctatggcttcagaatcagacccaagcatgatgttagctatcacttcgaatatggagcattctcaagcaaataaccagtcagtttcagttcttggtccagtggctatcttttgggatattgagaactgccctgttccaagtgatgtacgaccagaagatgttgctggaaatgtccggatggcattacggctacatcctgttgttaagggtgctgtgacaatgctctctgcatacggtgatttcaatgccttcccaagaagactcagagagggatgtcaaagaactggagtcaaacttgttgatgttccaaatggaaggaaagatgctgctgataaggctatactggttgatatgtttctatttgcattggacaatcgtccaccatcatccattatgcttatatccggtgacgtggactttgctcctgcattgcatatacttggtcagcgtggatacactattgtcctggccattccatcctcagttactgtatcttcagcattgagcagtgctgggagtttcgtctgggactggcctagtcttgctcgtggtgaaggtattgtggcccctagatccatagggcgccgctttgccgatcctccaggatatcaacatggtgggaattttgggtcgttccctgacacgcagaatgaagaggaggccattgtctacatgggaacttcaagaaatgaatgcagtggtagaactaccagcaaccagatatattgctataactcttctcaaaccactagagaaccatccaaagctttctatacagttacagatgggaactgtggcacatcatcaaggtcacataatttagcatgtagtttgaatgaaggtccagatgtagaccaaggtttgccagatgagcggtcatggtgggttcgtcctggtgatcttcaaggtttgaagggccaattgttgcggttgtttgagttatcaggtggatctgttccacttgtccgtgttccttcagaatatctaaaactctttggaagacacctctatgtatcagaatatggagctgttaaacttattcatctctttgaaaagcttgctgactcttttgtggtcatagggaagggtcatagaaaggtgatttgccttcgaaattctggtgatagtaacctgaagaaatattcaaccacaccaattattttgaaaaaggaaaatagaggtggttctattcttgatgaaagcactataggaacaggtcagcagttgggcagctcatcagatgatttctcagaggatgaacggaacattaacccagatgtagatggagcatatgccttcgatagccatctagacaatttcagacaggagattcaggagcttcttgtctgttactcttgccctgttccactgggtaatttcaagtctctctatgaacaacggtacaagaagactcttatctatgagagctttggtgtcgatggtctggaggagctagttgagaagtcacttcagttatttagatggacaagtatgctccagaaacactccttccatgccactgtacgccccatccgaattcagtgttctgaaggtgttgagaagttatatgaattgggtgttcttcagtctccacaggagttggtacaggtgttctccacaggagtctccacccttgatcttctataaactaatttatgcagacatatttgtgtgcatactttcccagacattttctaatgtgcgtgctttcttgtcataaagtaaaagaaacatcattattctttacatatgaattggatatgtgatataaaaaaaaaaaaaaaaaaaaggcaatctcacttttgcagctagtattatatctctgtatttctggagcatacttgtccatattccataaacagttggattgtcttgacctgtgcgtgttgtcaaattttcattgattgtacaatctttaaattaaaaaaaaaaaaaaa

SEQ ID NO: 61074 - DNA, 345 bp, Oryza sativa
  Clone ID: PAT_MRT4530_62542C.1
cggacgcgtggccaaagcttaacaaggtggaatttttttcgaccttacttgaacaaacaggacctaaatggcaaatggattttggggatttggaatccatccaggtttggcaacatgctttaatgtatttggttaaggaaggaatgaatgtttcaaatgccttaggcccctggccggaggtttggtcattttttaagggggtacaaggcagggttaaaatagcattcctaactaaagtcttggttggggaaggtttggaaatggtggcaggcttaacatgggggggtaccagggcattacaaccattggcaaaaaaaataaccgacttaccaccacttaaaggtt

SEQ ID NO: 61075 - DNA, 1777 bp, Oryza sativa
  Clone ID: PAT_MRT4530_62543C.1
atggccgccgggcgggccttcctccgcgccgccccctcctcgctggccgccggcgccggacgcttcgccttcgcgtgcccgacggcccttcccctcactgccgccgccgcggcggcgaccgggccacaccgtcgcggccgcggccgatgctactgctccgcctccgatgcgccgccgccgccgccatacgtgctcaccacgccgctctactacaggttgctggataagagggtcgtatttattaccggaacagatgagcatggcgagaaaattgccacttcagcagaggcttgtggtagaaacccaaaggatcattgtgatacaatttccaattcatataagatgctttgggctgatctagacatagagtatgacaagtttatccgcacaactgatcgtaagcatgaggcagttgtcaatgacttctattccagagtgctagatagtggtgacatatatagagcagattatgaaggactttactgtgtgagctgtgaggagtacaaggacgaaaaagagcttggggaaaacaaatgttgcccagtgcatctaaagccttgtgtaccaagaaaggaagacaactatttctttgccttgtcaaaataccagcatcaactggaagatctactgacaaaaaatcctaattttgtacggccatcacatcgcttgaatgaggtccaaggatgggttaaaagtggattaagggacttctctatttcccgtgcatctgtagagtggggtattccggtgccaaatgacaccaaacagacaatatacgtgtggtttgatgcattattagggtacatttcagcattactagatgatggggagaaggcaagtttacaacaagcagttgaacgtggttggcctgcctccctacacttgataggaaaggacatattgcggtttcatgcagtatattggccagcaatgttaatgtcagcaggaataagtgttcctgatgcagtttttggtcatggatttttgacaaaggatggcatgaagatgggaaaatcattaggcaacacacttgaaccaaaggatctggtaaacagatttggagtagactctgttaggtacttcttcttgcgggaagtggaatttggcaatgacggggactattcagaggaacgctttatcaatatagtcaatgcgcatcttgccaacaccattggaaacctcctcaatcgcacacttgggctgctaaagaagaattgtaaatccacattagcttttgactcgattgctgccgcagatggaatttcattaaaggataatgttgaaaacttggtggacaaggcaaaggatcagtttgaaaatcttttgctgtcatcagcatgtgaaactcttatggagattggtaacttaggaaacttgtacattgatgagcaagcaccatggtcttgtttcaagcaagggggtgagagtgctgaaaaggcagcgaaggatcttgttattattttggagactatgagaataattgcaattgcactatcaccgatcaccccaagcctttctttgaggatttatacacagcttggtttcacagaagaccaatttagaacattgagatgggaggataccaaatggggaggtctaaaggcaggtcaggtaatgatggagccaaagccagtttttgcaaggatagaaacagagacggacgagaaagatcaatcaagttcgaaggcaacaaaaggcgggaagaagaaggcaagaagtcaaggacttgtggaagcatgagtcaagtttgtgatggtgtacatagcataaactacct

SEQ ID NO: 61076 - DNA, 1394 bp, Oryza sativa
  Clone ID: PAT_MRT4530_62544C.1
gcgcccacgcgtccgatattagcagccagaatagttatgccatatgattggcacagaaaagaatatacctagtgttcgccggtgagtgtacaactacaagatctgcgtttttttctagctagctctagctagcagatgaagtatctggtgttcagcgctgctccaagcaaattaggcaaaaaccatggcatccaaacagatggtacatatgaatcgaggccaaggggaaacaagctatgctcgaaactccattcttcagaacgctgaacagaacaggatgaggccgctgatagaagacgccatcgccgacctcgtatgcagcagaagcatggtgatcgccgacctgggctgctcatccggcccgaacgcgctcgcgctcgcgtcgatcgccgtcgacgccttccgccgccggtgcctcgcgctccggcggccaccgccaccggcggagctctgcgtactcctcaacgatctccccgacaacgacttcgccacggtggtgaagagcctcgtggagttcaggcgaaacaacggcgacgagcctgtcctcctgaccggcgtcgtgcctggctccttctacgggaggctcttcgccgctgaatccctgcatctcgtctgctcgtccaacagcctccactggctctccgaggctcctgaagatctgaagatgaacggaattccggcatacgacgttgacgcgaacgtgaggagagagagacgagccgtggtcgttggggcttatgcacggcagttcaggaaggatttcatggcgtttctgaagatgagggctgtagaactggtcccaggaggccgaatggtactctcacttgcaggcaggcgatctgttgatctcgcctccgaactcacgcacgcatgggaatccacagccatgaccctaagtgacatggtcactatgggtgtgattgacaaagaaaagtttgaaacattctacatgccgatttacggaccttccgatgaagagatcagacagatcatccaagaagaagggtccttcttgatacgggagatgcaggtacctgaactcacgagtggtgcgtacagcgcgctgatcacctcggcaagggtagcaagtatgctgagagccgcattcgagcccataattgttcagcattttggaccgaccggatgcgatggaaaagaagggatcatggatgagttcgtgaggacggcggagcgtcggtggagcttggagggcagcttgcaagacgagcttgcacaaaaccctcgaggcgttctgcttgtgtccctcgagaagaagccgtcatgaccatccggtagattataattataattatgtaactgctaccttctgtcgacagtaaatccattcttaaatctggtagattttataccactatattggccgattttagttc

SEQ ID NO: 61077 - DNA, 1701 bp, Oryza sativa
  Clone ID: PAT_MRT4530_62545C.1
ggccacccaaacgccttcgccttcgtcaacggcatcgaggttttctcctcccccgacctctttggcagctccaacccgatggaggtcaccggcgacggcagcggcacgcctttcccgatcgacgccggtactgctatgcagaccatgtaccggctcaacgtcggcggcaacgcgatctccccctccaaggacacgggcgggtatcggtcatgggaagatgacacgccatacataccctttgcgtcattcggggtgagctacgcgaatgacaccaatgttcccataaattaccctgacagtattccgcagtatgtggcgccggcagatgtctactctacggcgcggtcgatggggcctgacaacaatgtgaatttgcaatacaatctcacctgggcaatgcaggtggatgctggttatcagtatctcgtgaggctccatttctgtgaaatacagtctgggatcagtaagatcaatcaacggacatttgacatctacatcaacaaccagactgcttttagtggcgctgatgtgattgcgtggtctactgggcttggcattccagtgtacaaggattttgtggtgttccccatgggttcagggcctatggatttgtgggtggatctacatccaaatgtcaaaaacaagccacagtactataatgctatcctcaatgggatggaggtttttaagttgcagcttactaatgggagccttgctgggctcaaccctgtccctagtattgtaccaacagcgtcgggtggaaattctgggaagaagtcaagtgttggtccaattattggaggagtgattggaggtctggtagttcttgcacttggatgttgctgcttctttgtgatctgcaagcgtcggcagagagcaggtaaggattcaggaatgagtgatgggcattctggttggttgccgctctcactttatggcaactcacacacttccagctcagccaagtcacacactactgggagccatgcttcgtctttgccatccaacctgtgccgccatttctcatttgtggagatcaaggctgcgacaaacaactttgatgagtccctcctccttggcgtgggtggttttggtaaagtttaccgtggagagattgacggaggagcaaccaaggtggctatcaagcgtggaaacccattgtctgagcagggtgtgcatgagttccaaacagagatcgagatgttgtcgaagctccgccaccgacatcttgtgtcgcttattggttactgcgaggagaagaatgagatgggcctcctctaggactatatggctcacggaactcttcgtgagcacctgtacaagacccaaaatgcaccactttcttggaggcagcgcttggatatctgcattggtgcagctcgtgggcttcactacctacacactggtgcaaagcacaccatcatccaccgtgatgtgaagacgacaaacatcctcctcgatgagaagtgggtagccaaggtttcagattttggtttgtccaagactggtccaacaatggatcatacgcatgtgagcacagttgtcaagggcagttttggttatcttgatcctgagtacttccgcaggcagcagcttactgacaaatctgatgtctattcttttggtgttgtactgtttgaggtcctatgtggggatcctctagagtcgacctgcaggcatgcaagcttgagtattctatag

SEQ ID NO: 61078 - DNA, 513 bp, Oryza sativa
  unsure (1)..(513): unsure at all n locations
  Clone ID: PAT_MRT4530_62546C.1
ganaaggangaggtgttccgtcnaanatnggcaaggtgaggggcgttcttctcgcncaatgggcaagggggaacatcaacggcangtccacntctaattcggggaagcggcganaaaacntngactggtcncccaaagccntctgatctcnccnccgccgccnccgcaaanccccncccnccccgcggcgggaagaacaaaaccgaacnggtggttcncggaanttccacacccaacngngancggcgggatctcccccgggcccaactgggcggcnctgttccncnnccgtggggcaccccntcanccaccaanaaagtttgcccggaattataccnggaggcccactccccacngngaaaggntacatctccccccgncnaattcncccgccatccancgcccccccncccggggaaaaccctccccccnccnaaagaaagaactaccccnccccttccggcgtnnttcnaaccctaanggnaacngggtcntccccccccccccaaaact

SEQ ID NO: 61079 - DNA, 621 bp, Oryza sativa
  Clone ID: PAT_MRT4530_62547C.1
atggaatgggtcataatcgccatcagggcccaccggtcagcctcctggccaaaggagagggcaggaggtggggcccagggttcatccgaaccaccaccggcgcctctgatcttggccttccacgttaaactccctcagaaaatgagtcttccatttatcaaaactgagagcaacattgttaaaaatgaggttccccagaagtgtcggcccgacgttcggcatcggcgggtacctcaacggcggcggcttcgacctgatgctgcggaagcacacagcctcgcctccgaccacgtcctcgacgccaccatggtggacgccaaggggaggctcctcgacagggccaccatggaggaggacctcttctgggccatccgaggcggaggcggcagaaacttcgggatcgtcttgtcctggaagctccggcttgtccccattccggccaccgtcacggtgttcaccgtccaccgctcaagaaaccagtccgccaccaacctcctcatcaagtggcagcatgtggcgtcgtcccttcccaacgacgccttccttcgcgtcgtcgtgcccctgtaccgtgtgccggcctcgtcgccaccatggccgacaccttcctggagctcaacgtga

SEQ ID NO: 61080 - DNA, 1590 bp, Oryza sativa
  Clone ID: PAT_MRT4530_62548C.1
atggcttccagaaaatccatatgcaacaagggtgtgttcgaggagaaggagatcagagagattgagaagatacgcaaaacgaggaaagtaccgacggtcagggccggccctggccctatgcagccgaggcgaccgctgggggcccatgatggcaacaggttcagtactgtatgcaacttccccgatgatctcctcccgtcgctcggtgctaccgctcaccagcctcccaagctcaggaaatacctcgtctcgccttatgacccgcgttacaaggtctgggaaacatttctgatcatcctggtggtgtactcggcgtggatctgcccgctggagttcgcattcctgaggtacctgcccagcgcgccttttgtcgtggacgatgtcgtcaacgggtttttcgccgtcgacatcatgctcactttcttcgtcccgttcgtggacaagaagtcctacctcctcgttaacgatccgaagaaaatagcagtcaggtacctgtcgtcttggttcgtcttcgatgtatgctcgactgttccattccactccatcagcctgctgttcaacgagcacgggcatgaccttggcttcaagtttctcaatgttctcaggctctggcggttgcgtcgagtcagttcgatgtttgcgaggcttgagaaggacatccggttcaactacgcggtgatacgctgcacgaagctcatctcggtcaccctcttcgcgatacactgcgccgggtgcatcaactaccttatcgccgacaggtacccggacccgaggaggacatggatcggcgccgtgatgcccaacttcagggaggacgggctgtggatccggtacgtgacggccatgtactggtccatcacgacgctgaccaccacgggctacggcgacctgcacgccgagaacgccagggagatgctgttcggcatctgctacatgctcttcaacctctggctcaccgcctacctcatcggcaacatgaccaacctcgtcgtccacagcaccagccgcacccgagactttagggatgtggttcaggccgcctcagaattcgcggcgaggaaccagctgccgcagcaaatagaggagcagatgctgaaccacatatgcctccggtacaagaccgatggcctcaagcagcaggagacgctagacgtcctcccgaaggcgatgcgatccagcatttctcactacctcttcttccgggttgttcaaggagcctacctgttcaagggagtctcctcaaggttcatccagcagttggtaacagagatgcaagcagagtacttcgccccaaaggaagacatcatactgcagaatgacagcccatcggacttgtatcttcttgtatccggagcagtagacattctggtattcctagatggaacagaacaggtttacaggagagcagctgagggagaactgctaggggagataggtgtactgtgcaacaagccacagtcgttcactttccggacgacaaaactatctcagattctgaggatcagtaggaccaagctgttgggtatcatccaggagaacagagaagacggcgacatcatcagaagcaaccttcagcaagtgaacgtataa

SEQ ID NO: 61081 - DNA, 248 bp, Oryza sativa
  Clone ID: PAT_MRT4530_62549C.1
gggggggcacaaaaaatcccttttttttgaccagtaaactggtcccgggggttaaaaccaacacttacacatgtaataatacatgctggccaatggttttttcccaaaactaataaaactttgcaggcttaaacaaagacaaaacagacaggttccaaagttcacagagttcaaactgttgacagataaccaaccaacaaaaacatgcagaccacgtggggcaaattgcaaaaagatcgatcgaccga

SEQ ID NO: 61082 - DNA, 123 bp, Oryza sativa
  Clone ID: PAT_MRT4530_6254C.1
ccgagaaaaagcggagaactgcaggggttcgagggaagatgcgacacgctgctgcgtatggacgtcaatgggaggagcgaggaggcaacagacggggcggcagcgctgcctccgcagctttga

SEQ ID NO: 61083 - DNA, 352 bp, Oryza sativa
  Clone ID: PAT_MRT4530_62550C.1
attcataaaatacttaaggaaacactccctcaaccttgcctttaagttttaatgaataaatggaattaaaaacaattctatccttctccaactcaaaacaatcacacctcaccatatatacattctaaactctggatcattcaaactcttaaaacaaccttatggtgttttaagaaactttaaaattatcttaattaacaccattgtacacaaaatgaccaatatttcctacacctcattgcttcttaggatctacatctttcattctttatactactaataattctctctcatccttcccattacccgacacaaactaaaccttcattttcagagtctaatcataaacatt

SEQ ID NO: 61084 - DNA, 445 bp, Oryza sativa
  Clone ID: PAT_MRT4530_62551C.1
gctaggatgaccgtattaatggccaatccgaatgttattaagatagaagataaaaagggttacaagtatacaattaactagcctactgaaaattatataggctcgctgcctgggctgctgctatcacattctatgtatatttgtatggtgattcaaatctgaaaaaaaaaaaaggtgcagtgagctagcagccaaatgacaaatgagatgcagatacttctgattaattaatccatacacgacgactgggttgtgtgcactaaacaaatcaagttgctaaattcgcttgagcaattacaataaattacttaatcatcaacctagtatatgatttaaaattccggaagctaattaaagtactagatgcatatatgctccacaaggctaggtaagttcggaggtgaacggacggggatggggatggtgatggggagggttcttaact

SEQ ID NO: 61085 - DNA, 230 bp, Oryza sativa
  Clone ID: PAT_MRT4530_62552C.1
aaacactcatctagcataacccttagcgagattcatatatagatgaccttcacaacactattaattgcaccagtgttcaccttttccatacaataggaattttgatatccaatctgatagtaaatatgattattacaaaatattcattacattgatcccacacaatccacaattcattctttttcaacatcctgctcatgttctaacaggaaaacattaaacacaatatt

SEQ ID NO: 61086 - DNA, 284 bp, Oryza sativa
  Clone ID: PAT_MRT4530_62553C.1
tgaacataatagagtcaaatacctattttctttgtagggaaagattagagagagggacttggtgtcatgcagccacgaggggatgtctcacttgtcaaagttttctaaacctccaccatttgtgttatggtaaaagtataaacttttacagctcaggtgtattccatgaaggctagtagaatcacaaaatatgtattacagcaacagatgcccaactgagtgttgaagcagaagttactgctacatggactaccccaatcactccattgtatgaaatccccatg

SEQ ID NO: 61087 - DNA, 294 bp, Oryza sativa
  Clone ID: PAT_MRT4530_62554C.1
atggttttgagagtcgtgctcatgacaattaaggaccggttcgcgagctactgtttgcgccagactgagaagtggcgagaagtccacgggggtcgctggggagtccatgcctctggtttttcagggggtgattatgatccaggaaagggtgaggacgatggcggcggtctgacggtgtactgcgggcgtgaggtgacggacagcgaccgggacgacgtcaacagggagaagaaggctggagcggtgattggagccagtggagcggtggtggagctaatggtggtcgtggcatga

SEQ ID NO: 61088 - DNA, 3076 bp, Oryza sativa
  unsure (1)..(3076): unsure at all n locations
  Clone ID: PAT_MRT4530_62555C.1
aaactaaatccttcacgttttactgcgacagaacagaaatagaggactatagcacaaaagacaactgagtactacaagataacgaacaggcactgccaattnnncaattttctgaaattctgaaatgcctgagaattgtacaggtgactatactgctattacttccccaatgtataaggtcacagtgcaacttaaataagtaattaagtaattttcttgattgatatcgaatcactaatcagctgtatttacctatgtcccccttacagttatgatatataagggcaattctagcaagagacctccgcctttgctttccaacaggagtcacttacattgacgtattttctggaaccttgccattttcatgcacatgtttattaggctactcctatttcgctggagaggtcttgacactgactgtatatcctgaaatcaaattgataagcaattgctcgaaacggatctcgattccctgttcctgcttgtgagccatcagccttacatggcatggcttgcacgacgtctagcatccccacccattcgtagtttctcctttatccagatcaacacttctaccgtcctccagctggagaagcgcatagattgtcctcgcaacctcatacttaggcttcccagtaacagtctcaccgaatgatgtaatccctccattctcggctcttgatgagagggcgtcgatgatttgctctccataagaaccgatatcaaaaggtgggtttctatccagatgtgaccgacacaaatcttcaaggctttcatgcgcatccatgctatcctgtgtaccttgagctccatccaatgttgcatcattattcttatcagggtatgttggtatgtccatatcaacatccatatcacagacatcatctggcatatctggctcatgaatatcaaagtcatttacaccaatatccggctcatggccatccttcaaatctccaaacaggtgactttctggttctccatgttcaagtgacctcataagcttttcgtacagaggaggaggttcaggaacatgatgtgtttcctgctgagatagatgtactttaaaggatgcaccatccatcttttccataggaaacagagatgcaataatgttccttttgggagcaccaatgacctgccttgcaaaactttttactttcctacaagtcctgatctttaggttgccaggttcatggggattcaatggcctccatggatcatcatcatcatcagaatcatccacacacccagcgtctgcatcatctgggtggggcatgtcattatcaggaaaatcatggtcagcagggtgaacagaccaatgatcatcatttacatttaagtcatcgatatgttcttgggtttgatttgcattcatttcttgagattggtcgggattgctctcctgagtttgatctggatttccctcttggacttttccaggggtaggtctacgaccggtgcccccagatcttccatttggggaacagaaaacattggttcggcttttagaccgtgcagagctgcccctgccagcgaatatatcttctttggcagattgttttccttgcaaaaagtcagaaacagctggtgcatcacatggatccaacaggaggaaatctccgaaaaagccacatgttgctaaatttttttttagcaagtcatctcgatcaatattgttatccaaagtggtccttgcttccactgggacatcatctagccctgaaaacacatcatcttcctcattcggtactgtgctacgatcactttcattagcttgagctgagctattttcctgatcttgcctggaatgtttcagatgtttaacacaatttgcagccaaattagaaaaagaacagcatgtggtaggatcaatggaacagtacgttaaattatgatatgagcagccattagaggaatctctgttaacatggctaacaaggtataaaataggtcttttatccttcaataccctagtatggtcgtaatttgcattgaacctttcatttttcttttgcgagagaaattccagcgcgttgagcaccaaggtgtacaaatactccaccttgcggctgtaaacctggactgatccctgcagtagtagtgcagcttcggcgaagttgacggaatgggccccgtcctcgccgctgatctccccggagcagatcctgaggaggtactcctcgaggctcttggccacgtccacctcccagttcgactccgggtcccggttcgcctgcaggatcgggaacctcgccccgctcgtgctcccctcccctcctcctcctccgccgccgccgccgccgccctccatgcctcccctcctttccaccaaaacctccacgctcgccgctgtcgtgctcgtagttctcacgctgattgcatcctctgcgccagccaccacgacttcgttcgtccgcggcggcggcggcggtgccaacaaccatactatcctgcagtgcaagatcctgctcggcccagacatcattccgcgcctctcgcgccagagcgtgctcttcctctcccgccccgcaatgccgatcgcttcccccgcctccccgacggccacctcaagatcatcctctatatccacaaccacccctaatacttccgcctcatcatcgacagcccctcccacatctacaacatcaaggaggcgcctgagcacgccgtgggtgtactccgccgagatgccgtcggcgtccaccatcgccggcagccggaacttcctcgcgaagctcctccggccaccgccgcctccgccgtcgccatcgccaccgtcatcaagctcggtgcggatgacgaggtacatcgcgtcctccacctccaccctgatctcctccttcctcacaccggggaggctggcggagtagaggtgcgcggcggcggtctcctcccagctgacatggctgcacctctgcgccgccgccgccgtcgccggagacggagacgacgacgagaggaggccgaggagattctgccaatggtgccactgccacgggtggaccgggcgccggaatcttgggcgctcgtgcacctcctcctcctcctccatggggtagtaataatccat

SEQ ID NO: 61089 - DNA, 1855 bp, Oryza sativa
  Clone ID: PAT_MRT4530_62556C.1
ctttatccatcctttctttctttctttctttcctaggcctaatcttacataaattattcacacggacaaatctagctaagcacaaggtatgccgccggcgccgtcgcaggagcaaactaagctggcgccggagaagcagcagcacatctccggccatggcgagcaagccgtccggtaccatggatggaaggtcatgccgtacgtcatagggaacgagacatgcgaaaggctggggacgatcggcacgacggcgaacctgctggtgtacctcaccaccgtcttccacatccccagcgccgccgccgccaccctcctcaacgtcttctccggtacctccaacctcgcccctctcctcggcgccttcctctgcgacgcctacctcggccgctacgccaccctcgccgccgcctccatcgcctccttcctcggcatgcttgtgctcaccctcaccgccgccatcccatctctccaccccccaccttgtgcctcctcctcgtccacgtcgtgccagggccccacgcaccgccagctcgccgcgctcctcgcctccttcgccttcctcgtcgtcggcgccggcggcatccgcccctgcaacctcgccttcggcgccgaccagttcgacccggccaccgccgcgggccgccgcggcatcgccagcttcttcaactggtactacttcaccttcaccatcgccatgatggtgtccgccacgctcatcatctacctccagagcaacatcaactgggccatcggcctcgccgtgcccaccgcgctcatggccctctcctgcgcgctcttcttcatgggcacccgcctctacgtccgcgtccgccccgagggcagccccttcaccagcttcgcccaggtgctcgtcgccgccgcccgcaagaggcgcctccctgccccggcgtctcctgccgacgacctgttcgatccgccgcaccggagcaagctggtggccaagatcaagcacacggaccagttccggtggctggacaaggccgcggtggtgacggcggaggacgcggtggtggacggcatgagcgcggcggcggcgaacccgtggcggctgtgcacggtgcagcaggtggaggaggtgaaggtgcttgcgcggatgatcccggtgtggtcgtcgtcgatcgtgtactacgtgatgctgacgcagctgggcacgtacacggtgttccaggtgatgcagtcggaccggcgggtggggaggtcggggttcgaggtgccggcggggtcgatggtggtgttcaacatggtggcgctcacggcgtggctgccggtgtacgaccgcgcggtggtgccggcgctgcggcgggtgacggggcgtgaggaggggatcagccagctgcagcgcatcgggatcgggctggcgctgtcggtggcgacgatggcggtggcggtggcggtggagcagaggcggcgcggggcgggaggagggtcgtcgtcgtcgtgggcgtggatggtgccgcagcaggcgatggcggggctgtcggaggcgttcgcggcgatcgggctgaacgagctgtgctacaaggagtcgccggagagcatgaggagcgtggcgggggcgctgtcgccgctggcgctggcggtggcgagctacgcgagcggggcgatggtgacggcggtggagcgggcgacggggtggctggcgcaggacatcgataagggccgcgtcgacctcttctaccttgtggtgggcgccatgtcggccgccaacctggcttacttcgtggtctgcgcgctctggtacaggtccaagaacatcgccgaccacggcggcgttgagcttcttcagaccagctccaagcacaacgccgacgcgccgccggccatggcggtctga

SEQ ID NO: 61090 - DNA, 162 bp, Oryza sativa
  Clone ID: PAT_MRT4530_62557C.1
atggcggccgcggcgggggactcgtcggagccgaaggcgagcatcggcgcgggcagctgctggtcgccaccatccacctcggtctcggaatcggtccgattggctccgggagtcgtcgtcttccttgaagggagattctaccgtgtggcttacttggagtag

SEQ ID NO: 61091 - DNA, 1776 bp, Oryza sativa
  Clone ID: PAT_MRT4530_62558C.1
atgacttgtcacgtctggaaaaaatcaagagtgatacagatagcatacgacagtgagtacactcgttttaaatttgtcatgctagcggtagcgggggcaaagggcaataagaaggagtctgatagaaggagtaagaaggacaggaatcaagacagttccatttatcaattacccaagatgattgacgtgaggacgcatgcacgtgacggcactgtttcgaccgaaaactgtttcccacgttgccgttttggaggcccacgatttccgtcaatatccatcaccccctacctcgcgtttttcatccgagagaacgccacccccaaccagtctctcgactcccttcgatcccctttcttcctccccctgaatcggcggtcgtcgagatggtacaagctggccggcgtgctcgctgcacgcatcgtccttggcgcgcgtggtcgtacatcccgtgtggcacagaagtggcgagattcgttgcaagaaggaggcaaagctggtggtgtgctcagctgccctctatttgaggccgagcctgtgggtgcgccgatggagacaagggggaagaagcggaagcgagagcgcgagctgttggccatcccatcctctccggctcgtgttcaatccccttggatacacctcccaccctgtatccgggcacacaagctggagtcggaagcggtcatcgatttcgtttgccgagtgagccctgcaaccgccgttcgttcgctgaattgggacatcgtccgcgacggtgattccaccaagctcacagcagcgtacagtccaccattgccacctccgtccgcaccagcgagtgcagtgaggggtaagggaaaaagggctgccacttctactgctgcctcagaggggtgttcaaagaagtcccgcggcaactccgccggggaagcccttgaaaggcttgtatcactatggatggagtcgatggagcgcctggctagggcgaaggttgaggcgaagtctaaaggttcagaggcttgcatggagttggtggaagctgatggtcaccctgttcccggaccggtttggcacgctgcggttcgagtgttcacctatccgcactactgctcgtgcttcatgaaactcccgaccgctgaagctcgttctgtgtacatcttgatgatggcccaatcgttgccagcggtaccatggtcacagggcacaactgggtttggaggttggcatggtggtgctggttctagtgctccaggacttggagagcaagattggagcgaggaggatgatgccataatcaacgtgctagcctgcagtcttgagctcaatcagagagctgcacgacgagttccggttcagactggtattagttggatgctggagacgatggcgaatccgaggcaatgcaaggccatgttccgattgaaggctgagcagatacatagtttacatgatctcctgagtagtaaataccaccttcacggatcatgggaggtatgtggtattgaggcacttgggatgttcttgtatatatggcaggaaatcgtccaaacagagacaccaacaaccggctcagtgcacgatcaaagggttttgaatcaagcaatacaatattatctagacaatttccccaggttatcgcaaagaaagtatttacttgcggactatggatttcctagtagaatgggttttttgacaccgtacccacatgtacggtaccacagggatgttcttggtggagtccgtgcaccgcaaccagttggacaggaagagacatttaaccatcgacactcctcattgtga

SEQ ID NO: 61092 - DNA, 525 bp, Oryza sativa
  Clone ID: PAT_MRT4530_62559C.1
atcctgaggttactctgaggatcgcctgggaggtgagcaagttggtggaggtggccatcattgatttccatttcgaccaggagctaccgggggaaaaggtttaccacatcaatatgaccagcaactctggcattaatcccctagtaattaacctcgaccaggaagggggcggccccaatctgcgggccattgagctggccatgctattcgccaaaaccctacggttgggcagtaatcaacagggcaaactactagatgcgttcaaacattgctatttccgtcggggcatctcccaggaatccccccagagttggttgaaagtaccccctaacttttctgacttggaagctttgctggaggaaatggccgaggaagacaaggaagcggaaaagctgagactaaagctattcaccatgtttgagtacggcattttcaacaaaacccagcccccctatgaaaggttaacccgttggaatcttgccaaactttcccccaattgcaggcgatccccgggtaccgagctcg

SEQ ID NO: 61093 - DNA, 416 bp, Oryza sativa
  Clone ID: PAT_MRT4530_6255C.1
atggatgaacacaaagctcaagtgggtgtgagagaggtgcaaggggtgtatgcaattgaattgggtgccaagagagcccccttgctgctggtgggggagtatttatactcccacccaccaaaactagccgttgggggcgaaatcccccaactctgtgctctgccggtctgaccggaggtatgtggccggtcagaccgtgctactctgcgacggctagaaaactagccgttgtagccctgtcagagggccccatcggcctggccgcgggccggtctgaccgcgcatgtgccgccggtcagaccgtccttatgcgccggtcagaccaccgtcgtgcggccggtcggaccggccagggcacgccggtcagaccgccactatgtggccggtctgaccgcccctggtcaggccgagcccag

SEQ ID NO: 61094 - DNA, 1189 bp, Oryza sativa
  Clone ID: PAT_MRT4530_62560C.1
aggggttggggtgcaggtggccagggatggcgagcacggcggcgccttcgaccgggacggcgtcgccgcagccgtccggtggctagcctgcaatcttgagctcaatcagagagctgcacgacgagttccggttcagaccggtatcagttggatgctggaaatgatggcgaatccgaggcaatgcaagtccatgttccgattgaaggccgagcagatatacagtttacatgacctcctgagtggtaaataccacattcatggatcatgggaggtatgtggtcttgaggcacttgggatgttcttgtatactatggcaggaaacggtccaaacagagacaccaacaaccggtgggtccgctcgagctcaacagtctcgatctattttaaccgagtgttgaacgctatgcacgtgttggctgggaatatattgaagcctgttgatcccaacttcacgtacactcatcctaggctgcttgaaggaaacaaattccgaccattctatgactcagttggtgctgtggatggcacacatgtgtccatcgtggcatcagtagccacgtctatcgaaaacaggaaccggcaccatgtgacgacgagaaatgttctagttgtatgtgatcacgacggtcgagttatgttccttgatactgaatagccaggctcggtgcacgatcaaagggttttgaatcaagcaatgcaatattatccggacaattttcctaggttaccgctaggaaagtatttacttacggactccagatttcctagtagaatgggttttctgacaccgtacccacatgtacggtaccacatggatgttcttggtggagttcgtgcaccgcaaccagttggacgggaagagaaatttaaccatcgacacttctcattgcgaagtgttattgaaacaacatttgggatcgttaaaaaacaatggaaaatcctcaaagaaataccacataacgacgacgaccgagttcacacacgcatcataaaagcagcttttgctctacacaatttcaggaaggatagtcgcgatgtgaactaccggcataatcatcctttgtacaacaataatcccattgtacagaagcatccatcattcagtcatatgtactacgcaacaaatagggagcaagctatgagagcattgcgtgactgcattgccgatgttgtctacaatcacttgaga

SEQ ID NO: 61095 - DNA, 109 bp, Oryza sativa
  Clone ID: PAT_MRT4530_62561C.1
tcgccgcagaggcaggcgctccgcccggccgcatcggcgctgtctccgcctagctcagttgcctcagaggctgccactctgcccggccacctcggcgccgtttccgcag

SEQ ID NO: 61096 - DNA, 1394 bp, Oryza sativa
  Clone ID: PAT_MRT4530_62562C.1
tcatccccagggcggcgaccaggcgagcgcgccaccgccaacctcttcctctcctcccctccatctcgctgccactcgagcggccgccagcaaagccggggacgcaatgatgacggtggcggggctccctacctcctctcgcgggcccggcggcctagggcagtagactcgctgctccggggtcaggacttgctcagcatcttcagggccaaggactacgacgccaccgtcgagttctactaggcgcaaagagggctggaggaggaagatctcttgtgctcggtttgacatgaggtagcagcgcgccttgtgcttcacaaggcgcagctgtccttcttctccggcgacggcgacgacttggacagccatgaggaggagggcgaagcgcgtgggcatattagaatagccgtattgctcgccgaactcgacgatgatggtccagccgatgcacaacctgccatctcccaggtaggccaggctcgccggcccatgcgggaaatatccccgctccaggcactcgcgagggtacgtctcctccacccacgcgtacctggtcaccggcgccgccgccgccggctcggcggaggggacgtcgaaggcgcagaggcagtaccttgtccggcacatggcgaagcaaaggttgagttcgggcacgaacacggcgcgccgcacccatggaagctcccagtcgcctaccttgcgccacgccatggcattcccatgggcggtggtgtcgaaggagtaggtgcccctgtccggcgcggacacccagatgcgcgcgccggcggccacgaaggccgtggtgttgcagaagatcatcgcgggggccggacggaccatggagaagtcggccggtggatcgggcagcgcgcgccacgaccaatggcgccggcgccggccgccggacccggcgacaggggtggcgggcgggaggaggacctggaagcaggggtcgggctcgcacgggcggttgtccatggcgtagagtcgggtccccagcaggatgagggccgtgccgccgatcgtcgcgtgccggagctccggaccgttcgacaccacggcggcggcggtgtcgtagaggagggtgcgcttctgcgtgctgacagcgacgacgttggatccgaccaggggcgaagtcgaggcgctcggcgcaccgctccagcgaatcgaacggcgcgattggaggaggtaaggccctcatcgttgcccaatcgtcgtcgtcgccggcgtcggcgaacatgggcttgagatttagggtgaagacgaagtatatgccgttgccaccagtatccagcctcttctcatccaccacgaaaaatatgcgatttctcctcctccccttgctcttcttacgctgctgctcgcttgcgccgcctgattccatctgccctgcc

SEQ ID NO: 61097 - DNA, 495 bp, Oryza sativa
  Clone ID: PAT_MRT4530_62563C.1
gggggggggtgtttttttttttttttttttttttttttttttttttttttttttttttttttttttttttttttttttttttttttttaaaggccaaaaaaaaactggttattttttttttaagggcaactatacaaaaagttcaaattaggggggggggggggggaacctttaaaaaaccacaaccaaatccaagggaagccaggatctccaaataaaaagggccccaaaaggggctcctgaaaaaaaaaattgaggcttaatttgcaggcttcgaaaaaaaacccaaaaaaaaactttatcccttttttgccaaaaatgtccttttgggggcccttccacccaccaaaaaaaggccccccacttggtgcttaaacatcgatatactttggaaaaattttttcaaaaaaaactgttccaccccttctgggcttttcaccagcttcatcaacgcgatagtaaaccaaaaaagaacggggcggcggacccctgggt

SEQ ID NO: 61098 - DNA, 2892 bp, Oryza sativa
  Clone ID: PAT_MRT4530_62564C.1
atgaagatgatgagcatggcgcagatcatgaggaagacgagcgtggtcgtcctgcaggaggaggaggatctcacctcctctgcgacccgccgtgctccagctccgccgcctcgcgaggtagtacgcgtccgcctccgcctcacccccgcccctgtcgccacggcggaggacgccgccaggggaggcaagatgccgccgccgccgccgctccccacctcgtgcgagcaagaagaagcatgtgttgagcaagaaggaagaggcggcccttgcccgttgctcctccgccgcggcgcgacgcccgatgatcaagaactgcagcggcggcggcgagcgctcgcaggagagcgcgccggcgccgtcaccgtcgccggcgaggctgggctcctcgacggcgcaagacacgctgagcgcggccatcgccgtggcccgttcggtcatggacaagcggagggaggtctcgctgtggagggaggaggcccacggcgggagctggccaagatgcctacaaaggcaggcacaagctgcccagaaccagaaccagaaggcccagtggctagccacgcacaacccctaaacccggagggcctctcctctccgacggcggtagcgcggcgtgggcggcgcgcgcgctccggcggccaaggctacggcgccgggtgcagcggcgcgggaggatctggaagggtgcagcgcgggaggagcacagccgccgagcccttgctgcgggctgcggcgcggcggcggcgaggcggcgagccgcagggcaggccggcaggcggcaggcggcaggcagcggctgagcggcggccagcgtcggcgtgtgcggcggcgactcggcgtcgacgcggcttggcggctgcagcaggcgcgggcgcggcttggtcgcttggaggcttggccgccatctcgccatctccgtcgaccgtcggccacctcggcacctccttgaattccgtgcaattctacatccactactggctgttgagaaacttggtagcaatcacaagaaagagcatcaagaggcagttgctggcactgaaagtgaaaatcagctctcatcggagccacagcaactgctacataatgtctcttgctgcggttgcttctccacatttcccaccgtcatgggcctatcagatccgtatggctgcttcccagggccaatttctccacgccatctctctcttcctacaaatgcgtgcctctgttgcgccccgatcatctgttccggcctccctccctgctgcactcaagtcctgcgccggccttggcctctgcactcttgctgcatctctccatgctctcgccatccgctccggttccttcgctgaccgctttaccgccaatgccctcctcaacctctgcatcaagctcccagagcacaagaggcaccaagaagctctgagcatggttagggagatgtggagggatggatttatgcctgacacgtttacactgtcaactgtgctgccaatctttgcggagtgcgctgatatcaagagaggcatggtggtccatgggtatgctatcaagaatggatttgacaatgatgtttttgttggaagtagcttgattgatatgtatgctaactgcactcaaatggattactctatgaaggtgttcgacagcttctcagactgtgatgcagttctgtggaactcaatgcttgcaggttatgcacaaaatgggtcagttgaggaggctcttggaatattccgtcggatgctgcaagctggagtgaggcccgtgcctgtgactttctcaagcctaatacctgcctttggcaatttgtcattgttgcgtcttgggaagcagctgcatgcctatttgatccgtgccagatttaatgataacatatttatatctagctcccttattgacatgtattgcaagtgtgggaatgttgacatagctcgtcgcgtttttaatgggatacaatcacctgacatcgtatcatggactgcgatgatcatgggttatgcattgcacggtccaacaacagaggcttttgtgctgtttgagagaatggagttgggaaatgtgaagcctaatcatataacttttctagcagttttgactgcatgtagtcatgctgggttggtggacaatggatggaagtattttaacagtatgtctaaccagtatggatttgttccatcccttgagcattgtgctgcacttgcagacacccttggtcgtgcaggagatttagatgaagcatataatttcatctctgaaatgaaaataaaaccaacttcaagcgtctggtccaccttgttaagggcttgcagggtccataaaaacactgttttagctgaggaagtggccaagaagatctttgagcttgaacctaaaagcatgggatctcatgtaattttgtcaaacatgtattcggcttctgggagatggaatgaagcagcacagctgcggaaatctatgagaatcaaaggtatgaagaaggaaccagcttgcagttggattgaagtgaagaacaaattgcatgtgttcatagctcatgataagtcccatccctggtacgataggattattgatgcactgaatgtttactcagagcagatgattcgtcaaggatatgtgcccaatatggaggatgttttacaggacattgaagaagagcagaagagagaggggcagccgccactcgacgcctctgccatctacaattcttctctccgccacttcgaaatcagtgattccaagttccccttgcattctataagcctgtcttatgacaacttggcatggatgttggcgctggtggagatcagcgctgatctttggtcaatacgatcggcactccaagggacggaagagattggctgccttgtttatttcccttgtgtgatcaagctttttgttttggaggaatga

SEQ ID NO: 61099 - DNA, 686 bp, Oryza sativa
  Clone ID: PAT_MRT4530_62565C.1
ccgacccggcggcggcgcacccacggaggaagacggaggcctccgcgcgcggggagggagggagtgagcggcgccctatgctcttcgccacggcatcgtcatcgtcattgctgaccatcggcggcgcgcgcggtgtgcgtggaggaagacagaggctggcgcgctcggggagggagggagcggctccctgtgatcttcgccgcagcgtcgtcgtcgttgccgacccgggggcagtacgtgtgtggaggaaccgaggaagacagaggccggcacgcacggcgacagagggagcagtgccctgtgaggcgctggagctcgccggcgtgcggagggcgggcggcggcatcacgcgcacggagaaaggaggaggccggcgcaccgaggacgagcagtgacagcttggcgccgaaactcgccagctcacgggagaggggcgccgctagatctgcggcttgtacgcccagcctccgccggatccaccgccacaacttgagctccgccaccgttgctcctcctcgtcgtcatcaagctgccgccgctccttccgctcgtcgttgctgctggtccttctgctcgccgtagctgtcacctgtcctttctccgcgcgcaccgcctcctccgcgcacgggctgccacaggtctgctacctccgccacaagccgtggtacaagaacctggtaaaaagg

SEQ ID NO: 61100 - DNA, 2664 bp, Oryza sativa
  Clone ID: PAT_MRT4530_62566C.1
ctataatcccttcttggcccccaatgcgttcaaccccgaaccgaaggaatcgtgcagaggcggcaggatcgtctctgctactactccaatggcgcagcagcacagcatcggaattgatataaacagattggatccgaggaggcgcgaagacgaagcctcccagcctcccttctccgtctccgcctccgcctccgcctcggcctccgacgggccgcgaacccccgcgagattccgcttccgaagtcgcgcagtcacgacggcggaggcgcggattggcggtggccggagccgatcaactgctccgcccacaaaattccggcattctagagcagcagtaattacattccacgtcacacacaccaagcggcgcggcatgtgcctctcgtcggggaagaggaggatatcgtagggcttcccctccgccatcagcgagttgatgagcctcgccgtgtgcctgaaatgcacgttctcgtctatcataccgtggatcagcagcagcctccctcggaggttcttcacatgatgcatgatcgacccgtatctgtaagcgtcgcgctgctccgagggcagacccatgtacttctcggtatagaaagtgtcatacccatcccatgctgtcaccggagcgccagaaactgcacaactgaacgtgtcgggaaatctcgcgaggcacattgccgagagaaagccaccatagttctttattagccactcggcacgtgctaactgatcttcagcatcgacacgaacgatgttgtatttgagctgtccctctaactgcaaaccgcgtcttgcggttcctcgattgtccatcttccaaactaatatacccttactacgcaggaactgagctctcatgtcaactgtacttatccatgagtcacttacaagctggacactgggaccgccataaacgttaacgagtgttttgtatgggggtggtccatattttttctcatcagggagataaagagttccatataaagcagtcccatcctttccttcaatctgtactatctctggagacagctgcggagagcatagcaggatcacaggtggagattttattgagtcatacacatcaataaacctcagcaactgatggtcaagaattactgaatgacgtcctgtgccatgagtcaacctcttggggacttgcaagggaaggctccaatccggaaataggttggtggagtaaagatttgtctccaatggcccatccaatgtgccattcttgtcatgaagatacaggtgtctaaatcctgtcttctcactggcccaaataaatccacctgaagcgatgtcaaacttaagtagcttaagttttgagtgagttctattgagaacttgaacagcaatagcactattatgcatccagtttactctagcaagatattcttcatcaccatggatactatttggttctccacataggagatccatccaagttatttctcctccatgggaagaaacaactccaaggcgcactttgacattagcagcccctgcaaaggggtaagcatgatcttcttgagcatctggaccaaccgaacttttaccctggtgcataattctatacagtgggatttcagatgagtcaacttcagtaaatgcaaggtgtttgctatcaggagaccaccagaatcccatcttcctttccatctcttcctgtgcaatatactcagcaagtccgtggatcttcccactttcgcttgcaccataggtcaactgggtagtttgcccatcagagaaccccactgtatgcaactcatcatcccgcacatacgcaatcatgctcccatctggagacagatgtgggtcaatgatgggggatgtggctgaactttgcagcttgagtacaggttcagcaccagacaaatcctggaagtaaaccccagaggggagcggcacgacaatgccggcgcgggaggcgggggtgccggggaggcgggcgcgccactcgtagcgcgtgacgccgaggccgcgctcccgtgcgcgctcgcggcggaggcgctcctcggcggagaggttcccctcctcgaggccgccgccgtcggggggcccgaagaggagctcctggcgccgctgcgcggggtcgaaggcgtacacattccggtgaagcgtgccgtcggggctgtacaggaaggccacccggcggtcgtcggggctgaagctaagcgccacgggcgccccgtagcccgggagcgggtgctgcacgatgtccaggagctccacgctcggggcggcggcgcaaccccccgcccccgccgccgcgccgtccccgtccccgctgctgccggcgccgacgaaggcgtcggcgagcggcatccgggcgagctcctcctcctcctcctcccccgcgtcgaaccgcggcttcttgcggctgttccccaaggtctggctgatgattttctcgattgacttgagccaagagcatccagacttcttcacctggcatcgggagagccgccactcgtcccggttctcttcgtgatcggcgactccacggctgatgtcggcaccaaaaactacctcggataactcacccgcgccgaccgcgagttgtacggccttgagttcgacactcgccacaacacggggcgcttctccaacagtcacatccccatcgatcttgcaatagctgaaaccccacttctccaacat

SEQ ID NO: 61101 - DNA, 318 bp, Oryza sativa
  Clone ID: PAT_MRT4530_62567C.1
atgagaggtgtcgggagaaaaggggtacgcacatctatctatacacctacatacggcttcctgtcatgcgtggccaatcgtatcattcgaaaaggagagccccccacaaaagctcatctcatcacaatatctaagttactacagtacgccagatatgagagagtactgttcacttccatcttatctgaattttgccaggacacgcggcttatgaaaatccgaatggtgccaggacagccgagagagatcactgttcaaattcagacgtacccccttcgacccaaaataagcgcaaccattagtttctgtgtccaactt

SEQ ID NO: 61102 - DNA, 765 bp, Oryza sativa
  unsure (1)..(765): unsure at all n locations
  Clone ID: PAT_MRT4530_62568C.1
gtcactttttttttttttcaactcacgtttgtgatttagaaaggcaacgtgaaatcaacatctatgggccatgcttatcacagccaaaagaatcatatccctggagtctgcggataactacagatgatgatgatggaaatgaaatagcttcaacatactgtaacaacatcccaagtcatgcccacagcgagcaaaagatttatacaccacaggtagttctctctctctcttcctctcttcacattcacaggttcctctctacaaaatcccagatcctctcttccatatagatccggtcccctaaccggcgcggcatgtgcctctcgtcggggaagaggaggatatcgtagggcttcccctccgccatcagcgagttgatgagcctcgccgtgtgcctgaaatgcacgttctcgtctatcataccgtggatcagcagcagccctccctcggaggttcttcacatgatgcatgatcgacccgtatctgtaagcgtcgcgctgctccgagggcagacccatgtacttctcggtatagaaagtgtcatacccatcccatgctgtcaccggagcgccagaaactgcacaactgaacgtgtcgggaaatctcgcgaggcacattgccgagagaaagccaccatagctccagccgtagagacctatatgntccgggttttgctaggcctttctttattagccactcggcacctgctaactgatcttcagcatcgacacgaccgatgttgtatttgagctgtccctcaaactg

SEQ ID NO: 61103 - DNA, 444 bp, Oryza sativa
  Clone ID: PAT_MRT4530_62569C.1
atggatctcgaagagggagaactcgtcggggaggcggaacttgaggtgcggaagcagcgggtggacgacatggaatcatggatggtggcggtgcccgcggcgccggcgactcccttgccccctcacgagccatccacgggagctcccgacgcagcgcgcgccgcggtcgtgggggaaggcgatgtcgtggaagcgcccgtcggcgacgacgttgtgcccgtccacggcgagcgcaagccatggcttggagaggaaggtggcgccgtcgaagtccgtgttgcgcgggaggcggcggaagacgttgcgcaggacggggcgcgtggggagctcccaggcgtcgtggaggatggcggcgagtccgtcgtcgtcgtcgcggtcggcctcctcacaatacagatccgacgccttcgcccacattccaccacgagcggcgcagcgaaatga

SEQ ID NO: 61104 - DNA, 654 bp, Oryza sativa
  Clone ID: PAT_MRT4530_6256C.1
atggatgaacacaaagctcaagtgagtgtgagagaggtgcaaggggtgtatgcaattgaatagggtgccaagagagtccccttgctgctagtaggggagtatttatactcccactcaccaaaactagccgttggggacgaaatcccccaactctgtgctctgccagtctgaccggaggtatgcagccggtcagaccgtgctactctgcaacggctagaaaactagtcgttgtagccctgtcagagggccccatcggcctagccgggggccggtctgaccgcgcatgtgcctccggtcagaccggccttatgcgccggtcagaccgccttcttgcggccggtcagaccgccactatgtggccggtctgaccgcccctgccccgtcgtcatcttcgtcctcggctccgcgtcgtcaagtgttgcgccggccgtgtctcgccttcgtccaaggatcaccgccgacgtcgttccctcgccggtcgcctccatcgtccccgagccgtctccgccgcgcccgttcgtcgttgtcgttcccacgcctcgtcgcgtggtggtaaggatccgtcctctcgctgccccgtcctcgtcctttcggtgtcgccccatgcccgtcgtgtggttgtcgaccccggtacccatgtaccagtgtcggtag

SEQ ID NO: 61105 - DNA, 282 bp, Oryza sativa
  Clone ID: PAT_MRT4530_62570C.1
atggagtacaccatcacttatagcagacaaatcacaaaccaacctgacattgtcaaccagctgaacatttcagctatcattcccaagacaggatccagcgctaccatgaagaaaaggccgctaaccggctacgaagacgaggatgagagtaggcaagcggcgccccagtctcgccggagtgcgggcgaaggtggacggggagaaggaactgaggtggcggcggcgaggggcgacgagaattggaggcggctttggcaggccggcgtccacggtaggatgtag

SEQ ID NO: 61106 - DNA, 547 bp, Oryza sativa
  Clone ID: PAT_MRT4530_62571C.1
cccccggaatgggggggggggttccttcctccatgatggacccatgcccccaaccaaaaaaaaaaaaaacaaaaaaaaaaccatttgggggacgggaattttcatggccctttggccgaaaagcttgggggcggggggttgggcctgttttttggaggctgccggtttcggggttgaaggttgctggggtttgccgtttttgctgctgctgctgaatttgaaaatcctgtcaaggttgtcggggttggcccggaaacacggccggggggggctgtccttttcctccaacaagttgaaggcgtccgcccccgtaaaggccttcctcctccccatttttggcaacttggcccgggtcgtcggaagttttttgttttcacccttggaaaaaggaccctcggggaaaaacctgggcattgggggggccttaaacgtaaggcttttcctaaaaagtttaagggcttcctctggttctttcttaaatttggcctccaactgaattttcttttcctccaaagctgggggcttctcccccaacttaatgaaaaat

SEQ ID NO: 61107 - DNA, 2887 bp, Oryza sativa
  Clone ID: PAT_MRT4530_62572C.1
atggctgagtttttggttaggccactgctctccgcggtgacgaacaaagcttccagctaccttgtataccagtacaaggtgatggaaggcatggagcagcagcgtaaggctctggagcgcatgcttccacttatccttagcgtcatccaagatacggaggagaagagaagtaagaaacccgaactaagcgcttggctcgatgaactcaagaaggtgtcctacgaggcaatcgatgtctttgacgagttcaagtatgaggcgctccgacgtgaagccaagaagaaggggcacgacgctacccttggcaaaggcattcagcaggaaacaccaaagcagtggaggcaaactgattccatcatggttgatactgagaagggtattattagccgatctagagatgaggagcagaagaagattatcaagatgttgcttgatgaagcaagaggcaaggacctcatagttcttcctattgtcggaatgggtgggctaggaaagactacatttgcacaactcatttacaatgaccctgaaattgagaagtatttcccgcttcgtaggtggtgttgtgtgtcagatgtgtttgatgttgtcaccattgcaaacagcatatgtatgagcacagagagagatcgtgagaaggctttgcaggacttgcagaaagaagtaggtggaaagaagtatctcattgtgttggatcatgtatggaatcgagattctgataagtggggaaagctaaagacctgctttaagaagggtggcatgggtagtgtagtactaacaacaactcgaaatgcagaagttgctagaattatggttattggagaagttccagtgcataatcttgaaaagctcggagaagcttatttgatggaaataatccagagtaaagcatttagtttgtcaaaaaaaagtgacgagcattttgaagttcttcgtaagattgtgcagagatgcgatggctctcctttagctgcccaatcctttggctcggtgttatttaacaggactactctgcaagaatggaaggatatattagccaagagcaacatttgcaatgagggggaggacataatttttcctatacttcgtctgagctatgatgacctaccgttacatataaagcggtgttttgccttctgtgctatattcccaaaagattttgagattgatatggagactttgattaacttatggttagcacatgacttgataccattacaagaggatgacaatatagaaatggtggccaaacatatcttcaacgagctagtttggaggtcattttttcaagatgtgcagaaatttcctctacaaactacatgcaagatacatgatcttatgcatgacattgctcaatctgctatgggagaagaatgtgtcagcatagttggcagatctgattatagaagtaagtcattagagcatcctaggtatcacttctactcattagacgatgacaatactattctcttagatgactttatgagaaaacaatcttcaacactccggactttattgtttgacagagactatattcacatctcaacatcacttttatccaagagcagttctctacgagcactaaggctgagatatctcaatacagaatcattaccaatcaggccaaggcaccttctgcacctaagatatctcgatatctccagaaactatcatgtcaaagtacttcctgaagatatatgcacactgtacaatctgcagactttgatcctttctgattgcaaaattcttgttggtctcccaaaggatatgaagtatatgacaagtctacgtcacctctatacaaatggatgcttaagattgaagtgcatgcctccagagcttgggcaattaacttccatccggacactaacatattttgtggttggtgctagctctggttgcagcacccttagagaactgcacagcttaaacctctgtggtgaactagagttacgtggcttagaaaatgtatctcaagaagatgcaaaagcagccaatcttagaaacaaagagaaacttgcacgcctatctcttgtgtggaatagtgaatgctgtgttgaagaaccaaattgcaatgggaaggttcttgatgctcttaaaccacatcatgggctgctgatgctcaacgttatatattctcttatccattggcttcgtatatgggctatcctacagaagcctgattcgcgggatatgctaatactggacgtggatgacaaagaaggaagagtgcagcttgatcagattcacgaatcatctctctcagaactggacttaaagcactgcaactttttcttccccacgagcccatcacaaccaataatcatgttttggaaatgccttagacaacttgtgtgtttggaaatctggttctgtggtgtgctcatctactggccagaggaagagttcctgtgcttagtatccttgaagacattgggcattgagggatgtgataagctaatagggcgtcccacgctgctgctggcacggcggcgtgctcgacgtccacgttaccgtagtcctcggctcctcgcgctcaaggcgaatcttgttgcgcaaatagtggcgacggccgggaggtcatcaggggcggggctaaccggattagatggagcgaggcggcagtgctccatcggcatcggcatcacccgttccccacaacggcgccggccgaccgcctactctggttcccccgcgccgcacgtatccatgggtgctgggtctaggcggcggtgcgggggaggaagagggcggagcagtggcggcgacgcgagtgaaaagcgcacggtacatgcgcgttgttacggtggagttagactgggctccaaattttatggacaaaaataccccctcactaatgatgattacactgttaattcgcttttaa

SEQ ID NO: 61108 - DNA, 111 bp, Oryza sativa
  Clone ID: PAT_MRT4530_62573C.1
atggtgaaggacgacgctctccctgacgagggcaccctgcagttgtgcggctacatactcattagcacatcagtgggtcaaccggtgtccgccttcatggcgctagcttga

SEQ ID NO: 61109 - DNA, 617 bp, Oryza sativa
  unsure (1)..(617): unsure at all n locations
  Clone ID: PAT_MRT4530_62574C.1
ttggttgagtggcngggtgcccctgctgnggccatgatcccattcnctcaaaagctttggnataaggtattgggatcatccgggtccggatggccaccctggancgtcttgangccctcctcggttgggggaacttaataaatcgcctagttgcagatggtgttggctgcacctcccaatggatgcnantgtttgactgaaatgtttggggaatcctattcgctagtttgcggatgcatgatggatggcctgctttagatgggggacgggtggacgaagggtgtgaaaaaggacccacgggttgtgttaatgntgcacggtggttgggtctggctggccttgccagtgtggtgaccaaccactgtgatgagggctgtntggtgtgtgcaccctgcccctgttgaggttgattaaattccaatgttgcatgagtgtgcccgaaatgtgcttgggctggtgcaatgcttgctgtgtgcctggtgctgcaatggtggtgtgccctgtgtgcgctgtgttgacttggtgtgtgcgtcaggaangctgttcaatgtgagtggtggtntttaccataagaagctgcataattatgctgccggtaaaaaaaaaaaaaaaaaaaa

SEQ ID NO: 61110 - DNA, 324 bp, Oryza sativa
  Clone ID: PAT_MRT4530_62575C.1
atgtcaaagaagcgacagagaaggagatggtcattgccgttgactccaacgacaaggaaggcaacgatgctggacgacgagaagaccatcctcgagcagcagatcgccgccgcaacagcgaggctggaggaactgcgacgcaccaaccgtgagttggagatcaagctcatcgtctgcgacctcatgtcaggccgtcgcaacaacgtggatgacctgaccgtggacatcctccaggttgtccggatggctatcgtgaagtaccgcctggggatacggaaacgtatccgggagcttcgttccatggattcctccaagcccacctga

SEQ ID NO: 61111 - DNA, 207 bp, Oryza sativa
  unsure (1)..(207): unsure at all n locations
  Clone ID: PAT_MRT4530_62576C.1
ggcatgtgnagtcaangctcctccggtttcgggagagcaggnaagccaccttacaggacctngntatccttactgggggngaagtcataacttaagagcttggaattnaccttgngaattttgagcctcagatnctgngganttccaagaaggntacagtatctaaggctgncacngtcatcttgcctggagctngatgataagaag

SEQ ID NO: 61112 - DNA, 1524 bp, Oryza sativa
  Clone ID: PAT_MRT4530_62577C.1
atggagatgggcagcttgctacctcacgccgcctcactattcgctgtttccatggcgagcttgatgattgcagcggtgctttccatcgtcaggcggccgtggccgtggaagacggcggcgatcagccgggaagccgtgctccgcctcctcggcgtccgcctgggcgacgtgccgacgaccgtcgtcagggacggcgccgtcgcggtcgacgcgctcgtccgccgcgccgacgcgttctccgaccgccccgccggcggcggcgccacctccatcgtctccggcggccgcgcccacaacatcaacaccgtgccgcacggcccgctctgggtcgcgctccgccgcaacctcacctcggaggcgttccacccggacgtctcggcctccgcggcgcgctccgccggcggaggggcaggcgtggtggtgcccgtccgcgactgcctgtacgccgcgctgttcgcgctcaatgtggccacgtgcttcggcgacggcgtggacggcgagctcgtcggcgccatgcgcgccgcgcagcaggagttcctccgcttcctcccccgcgcccgcgtcttctccacgttccagaaggcggcgaggctggtgtacccggaccgatggaagcagctgctccgccatcgccggaggcaagaagagatgtatctcccactgatcagagcaatcaacgagcagcgccgcacccgcggcacgccatctccgccgccgccgacgacgtacgtggacactctcctgtacctcgaggtcccggcggacgacgggcggcgtcggcggaagctctccgacggcgagatggtgggcctcgtgtcggagtacctgggcgcggcgacggggacggtggtcgcccagctggagtgggcgctggcgaacctagtgcggcggccggacatccagacgcggctgtgcggcgaggtcgaggcggccgccggcggcgagccgtgcgcgtacctgagggccgtggtgatggagtgcctgcggcggcatcctccggtctcgtccgtgcagcggcacatggtgcgcgacgtgatgctcggcggcgcgcacgtcgcgcggggtaacgtggtcagcttcgccatagaagaaatcgggagaagacaacatgagaacatacttaaagcccgactcaaatatagatatgtatttctaaaaacgaacttaaaaaccgactcatatacagatgacatatggacatcgtcggaagagttctcgccagagaggttcatggagggcggggaagaaggggtgaggttggccatcggcagcaagcaggaggcaacaactaaggtgaaaatgatgccgttcagcgccgggcgaaggacgtgccccgggatgggatatgccatcctgcacctggagtactttctcgcgaatctggtcacggccttcgagtggcgccgagtcccatgggaggaggaggtggatctcacggcggactacgggttcatcaccaccatgcagcacccgctccgtgcattggtcgtgccactgagtaatgacagatcgacagtggtttga

SEQ ID NO: 61113 - DNA, 407 bp, Oryza sativa
  Clone ID: PAT_MRT4530_62578C.1
cttcttcctactacgtcttcttactagtgtcttcaatgagaaggatgaggatgagaagctagggcaatttttgcaatggctacaagccttcttacaacctacatcacggcactcgttccacctctaatacctctctttatccacctgaatgatcagaccgtttaattatactatccgacaccaactctcttgaggttcaaacaccctttttttattcgccatttactcatttattcattcataccgattagtaagctttttgtgcattcatatcttccatatttcatgtacatacccttcacattctgttaattcttcatgcatataatgtatattttattttacattaactgtacattttcattaatttcaaaagtactttcaccattttacatgattttattgtt

SEQ ID NO: 61114 - DNA, 912 bp, Oryza sativa
  Clone ID: PAT_MRT4530_62579C.1
atggttctgtccaccatccattgtgatcccaaggatagcttcccgccattgagtcgttatggttttctgaggacgtccatattcccgcctctcaggaacggcttaccgacggcggtggcggcgacggcggcgacggcgacggtggtgacgtcggcgcaaggtgcagcgcggcgcggcggcttcgtggcggcggcgcggcggctctatgcgacggcgcggcggcgtggtggcgtgggtacaggagaggagggcgcggggcgcgaggagcggcagcggcgcggcagcagcggcggcacggggctcgggggcgcggcgcggcaggtgatgcgacgtgcgatggcgatggcgcggcagcggcgacgcgacggccgaacggcgacggcgcgcgacgatggaacgggcggcgcggcgcgtggcgacgtgacggcgcgcggcgcgatgggacggcgcgacgggatggcggcgagcgacgcgcaacggcacggcggtagcggcggcgcggtgatggcgacggcgtcggcagaggggaggtggagcggcgtgcggcgcgcggggcgcgagggcaacgcggcaaaggaggggctagggctaggggacctcgtcgaacactttagaggcggcgcgcgtgtcgcggctcggcgcgggtggccgtgggacaccgtggtccagcacggggcggcggccggggattggcgcagcggcgacagccctcatggagggcggggccaactgcatccgggcggcggcctgggcggatggatggcggcggcggcggcggtcctcccggagggcgcggccagatcgtggcccgtggtcggcgcggcgcagcatgggcggtcggacggcggcggtctggccttctggtgcagcggtggtggcgttggggtgggcatggcggctcgtaggccctga

SEQ ID NO: 61115 - DNA, 216 bp, Oryza sativa
  Clone ID: PAT_MRT4530_6257C.1
atgcgtgttggcctttgcgatggcagcgtcatgagattcacgacggcgagcgatgagtcgctgactccgccggcaacgacgatctggaaggagcgtgaatatcaggatgatgtccgcgtggtcttctttttccatctgagccgaacagctgccgtgctgccaggtgcgcagccctttttctccagccacatcggtccagatccggcggtggagtga

SEQ ID NO: 61116 - DNA, 7693 bp, Oryza sativa
  Clone ID: PAT_MRT4530_62580C.1
cccggcccgctcgaactcgcctcgcgcctcctccgcgccccgtggtgctcacgccccgcagccggggcgcggccgcccgagccgctaccccctcctcctgccccgccctcctggcgccgctctccccccgtccccgggcccccccgcgccgggcttccttgcctcctgccagccctggggccgtgcgcgcgagcgacttcgcccccgccgccctccgctctccgtcgctgcttcgtctcccatgggggatctggcgttgatgagctttctgtccgggaagcgggagcgacagcggcagctctgccaccgacaaattggacgaggccgtggctcaattacttcagtggctaaaactgaaagaaagggtctgcactaccaactaaaagaaaacgtttaccttccttaggacatcttgcggctgatccatgccatgatgccactgcgagatgctgctcgtgctgcttgcgcctcgcacatattcctgcagtcctggagatgtcgtcccaaccttatcttcactggggagacgttgggcttgattataaatggtactggaaaggatgacgctaaaagagacttcatcaatatagtacagcgcatactgctgaatcactcaggcattggcgtgaaaacactaaagcttgaactcctccattttagcgatctcgacttaggttgtctcgaagcctggcttcagattgctgttgcaccagggattgaggaactcaccctgatgtttccttgcgtaagatacaaattcccatgctcgctcttatttgaaagaggtggaaactcggttcgatatcttcacctcatggtctgcaccttccgtcctacaattggtcttggttgcttgataaaattgacgcagttgcatctgtctttcgtgtggattactggagatgagttagagctcctttccaaatgcgtcgctttggagtggctgaaactctcatattgccctgagataatttgcttgaaagtaccttgtatgctaaggcagcttggctcccttgaggtggctgaatgcagatatttgaaagtcatagagatctgtgctccaaatctttcaaatttttatcttactggttttctagtacggacttcatttgagaatccattgctagtgaagaaactacgaatcatgtgtttacgtcaaggcaactttgtttcttatgctcgtacgaagcttccatcccttgtgccaaatgttgaaacacttacagtagcatctaatgaagcgaccgggcaggcgattcccaccgaccgacggccactccggccccggcggccacccccctgcgccggtagccaccccggcgccgacgcccaccacccacgcctctcttgccccatcgcgcttcccctggagcctgctcgaccgccgctcgacgttgctggccagatgcggttggcgtctctgccgccgtcgtggccagcactccagccggcgcatcccacgctgctccgccaccacaaaccagtaatcccctctcaacccctctctggaccacccctttccccacgaagctccaccccacgccggaacccccagttctggctggagtcgccgccgccgccgccatccagatctgctgtgcctttctccgccgacgatgtctcccacgtctcggagtccccggatccaaggagttcgcccacgcctgctatgccacgctccttcgctgatgctgtcaggttggatttcaatcccgccaaaggagacggcctgcccgttttcaaatccccacacggccaaccaccgccgcgcccaaaattgaagtccgccattactatcccagcctggagcacctttcagcgtcgcgcctacagggctactcccggagaggaaatgggcgtgcgtcgcatccatggtacggcgagaccaggccgcttcaatggcgagtggaaggaagtcaagccacgccactggtggcgccgctcgccgcattcacccgagtcccagcggccagcttccaggcgacaagacgcacattcaaggcgctcgttggctcccgctgcatcggcatcgctgcgcctcttcagagagagaacggctggaaaatgcttcaactgccttgcgcgtgatcaccgcgcagcgcgctgcagggacccggttcgttgcttcagatgtttccgttcggggcacaaggcaaactcctgctcccggcgtgaaccgcgaccacgccaacctcgccagtctccacagaaagcgctgcgccgccaagcttctacaccacccccgccacagaacacgtcgcaccgccaggcttctacgccatccccgtctcttccccgggctacacgaccacgccaaccacgccagtctccgcagaacacgtcgtgccgccaagcctccacaccacctctgcagctacctcttccacccaagccgtcctgcaacacgcggatggctctactgggagacccggcgacccggccggatgaagaccactgcttcgttccgacaccgttcgccacggaggctgagcggaaagaatgggaaagctcggcggtggtgtcctgggcgatgcgggcaccggcttccacaacggcgcaagatgttgaggcggcttttcgggaggaattccgtcttcggcgaggggaggtcacggtgacgcgccaccacccggaagccttcctgatcaagttcgagcatagcagtcactgctatgaagctatgcgcaagggcttcgtcaagcgaaacggtattgagctccacttcatcaagtggcgcagcctgagtgcggccctcggcatcgcgctcatgtttcgccggctcatcgcgcgcacctgtggcctcgaggagatcgagaccaacctgatccacccggtcgacactcgcacggtggatgtgtgggcttggaccggcaatccgagctccatcccgaagcggatgtggctaacctttaccggctcgacgcggggagccaaaccagagcaaatcctggtgtccgacagaccgccggcacactggcaacatggcgccaaattctgcgtctacatccacctggaggagatccacgactacacgacggtggcggtagacctcgatggcaacgaggcatgcgcgccctccaagcggcgccttccggagtggcacctcggcgtggccgacggggacccggtaccaacgcgagccttcgagaacttcccgcaccacccgcctccaccacgcactcgtcaaggccgcgagccagagcgcatcgacgaccgcgacgaccgtcgccgaagagccaaagatgatcgtgaccggagccgtcccaggcggtcgtataatgacgaccacccggaccacgacagggaccaagcctggcgacggcgcgacgacgacgacgaccgcgacggcaggggcggccggggccgcgaggcatggcgaggacgagaaagccgcaaagtctcgggccttgatggccaacgcgtgcgcgagcgttcgccgcgtcggcgcgactgggcagaggacgaccgtcgcggtgaccggcgtcatcacgtgcaggctgctgtcgccctgcctgctacaatcccgcctctcaagctcgctccgaagcaggcaccaagggaaaacctccgtgagacgggggaaaggcttgtgaacagggtgaacaatttcgccgctgcggtggatgacgcttctcagcctggcggggaagaagcctggtccgaccgccggccaagtcgcgtccatgacgtcccgatccggcaggtgttcgaccggctcaagcactgcctcttccctgctggcatccactctacaccaagccactcgggccaagtgatgcctcatgacgagagggcgtcgatcggcgcgcgaggcaacactgcagccgccacggcggttgcgtcgaagacggtgacgccgccgcagctgattacagctgcgccaacgacggaacaagatgaacaccaagatgccgggaataagaacacgctgcaagtgctggagagcctcttctccaccccgccgcgcgccgttttgccacggccgacctcccctgcgctgacgacgacccaagcgaccccagcgccagcaccggcgccgccaggtggccacgggatggagcgtcgccgcagcgcaagactcgcggcaaagccgccaatgccaactatgcaacgctgcacgagggtgttattgaagcggcttggcatgctccatgacgacaagacgctcgacgaggtgctctccgactacatcgccatgttcaatggacctctaccgcaacacgtgatcgcagcgctcacgtccatcttcgacatcgacgccgatgcaatcatggaagccaatcacgtcgacaacacgctcctggaggttgtcggcgaaggcgtcgctgaccttgtcgaggagtgtactgcactaaacgagctaatcgcagagacatcttgcaacctcgtctgcatccaagaaaccaaactaagagcagttgatgaccagctagcccgtttcttaggagcctacaggctagacagttacgctttcaaaccgtccaggggcactaggggaggcatcctacttctgtggaacagcacggcgatctcggtgcacagcactcgcataggtcgttactcgttgacagcgaatataactgtcctacgctgcggaacaagcttcatgctcaccacggtctacggcccaacgcgtcacagagaaaaagactccttcctccgtcacataaggagtttaaagccgtccccgggaaacaaatggcttatcctaggagatttcaacttggtttatcgggcacgagataaaaacaacaacaacctaaatttaggccgaatgaatcgcttcagagctgcactcaaccgctgcgagctaaaggagatccacctccaaaacaggaaattcacgtggagcaatgaaagacgacgaccaaccctcatgagacttgataggttcttttgcaatgaggaatgggacctatctttcgaccgccacatcctacacgctctttcaacaggaccttccgatcactgcccgttgttgctcaccgacccatcctgcccacgtaagccgcggcctttcaaattcgagaatttctggataaagttacctggtttcaaggaggtcgtagagcaagcttgggggaaaccgtcgaatcacaccgagcctatgcaccggcttgcgtataaactacgggatatggccaaagaactaaaacggtgggcgagaaccacgtgctctcagactaagctgaaataccatatggccctagatgtcatcctacgactggatgtggcccaggaacaacgtaccctttcgccggaggaagggaacctaagagcagccctgaaaaggagagttttgggtttagcggtgattgaaagagcgagaaagagacaagcgtcacgaataacgaacataagagcaggcgacgcaaacaccaagtttttccacctcaaagtaaactccacaagaaggaagaatcatatacatcgcctccgcaaacaaaacgggtgggcagtgacgcacgaagaaaaaagccaagcgattttcgaccacttttccctcttcatggggaggccgcaagaaagacaactagatctaaactggcaatccctagggctagagacaacggatttaaattcgctcaatgaacctttcaccgtggatgaaatcaagagagcaatttgtcacatgccgacagacaaagcacctggccctgatggttttaccgggtgtttcttcaaagcatgctgggaaaccataaaaaacgacgtcacgacagctttcaacgccatctacaatcatcggtgcaatcatctaaacctcctcaactcggcaagcgtcgtcctcatcccaaaaaaagatggtgcagaacaagtctccgatttcaggccaataagccttatacacggatttgcaaaaatcttctcaaaattactggcccttcggctgcaacctctcatgcacaaacttgtttcaacaagccaaagcgctttcattcggggaaggagcatacatgataatttcctatatgtcagaactctgttcgcaacttctagctccaagatactcctaaacggaataccgggtaccaaaataattcatgggcaaggcctaagacaaggagaccccctatccccgctactcttcatcttagcaattgacccacttcaaagactacttagcaaagcgacagaactcaagctactaagcaagctacgaggaaagtctgtgacactatgtacttccctctacgcggatgacgcagcagtctttattaaaccaggaaaatccgaagtgcagaatttcactgctattctacatcgctttggcctcgcaaccggcctacgtgcaaatatagaaaaaacacaagtggtggccatcagatgtgaaaacgtggacttggatgaggtgcttcaaaacaccccggcaacaagagcttccctacctatgaaatatcttggacttcccctaacaacgggcagattgcgcaaggcagacctacagctgttgtttgacaaatcggccggaaaaatggcagcttggcgaggtagaaacttgggactcgccggacgaactacactagtcaaatcagtgctatcatcacagccggtctaccttcttattgcactaaaggtctccaaggaatcaatggagacgcttgacaagcaaagaaagagcttcctctgggcaggatcggaaaagctaacgagaggaaaatgtaaagtaaattggaaaagaacctgctcaccgactgtctatggtggtctgggcattctgaatttagaaaactttgctagagcgttgcggatcagatggctgtggcaagagtggaaagctccggagagaacctggatcggccgggacaacccatgtgacaacacagagaaaactctttttgcggcggcaacgacaataactgtgggagacggggaaacggctagcttctggaactcagcttggatgcaagggcggcggccgagggatgtgatgccacttgtatatgcaatatccaaaagaaagaatagaagcctcaaagaaggcgtcacagataacgtctgggtacaagacctaaatttctcttccccagatgcaataacagttgagctgctggaccaaatagtgactctgtggtcgataatccaaagcgtgcagctcagtccagacgtgacagatgaaatcacttggaagttcaccaatcatggggagtatacaacaagctccgcctataagatgcagtttctcggatccatcaatgcaaactatgacgcaatcatctggaaaccatgggcaccaaacaaatgtaaaattttcgcatggttggccatccaaaacagagtctggacggctggcaggctgactacacgtggatggccgaacaacactttctgcccgctctgtagacatacccgggaaacggtattccacctcctagtagactgcagatactctaggaggatttgggagaatctggcttgctggacgtcgcaagagcacatcaaaccaggcaattgggctcaacctgcgtcgctccaagactggtggactgcaatagcaacacacccagggacaccgagaaaaggaaatcgcacccttctgttgctagtgacatgggagatttggaaagagagaaatcaaagaattttccagcgcaacgaactctccatactatcgctctgcacaaagataaaggaggaggccaagacctggactctagccggcgcgaaaaggctatctgagataatcccttaa

SEQ ID NO: 61117 - DNA, 503 bp, Oryza sativa
  unsure (1)..(503): unsure at all n locations
  Clone ID: PAT_MRT4530_62581C.1
ttagtcttctccgacggnggcctcgactacctcggcaaccccancctggtgcacgcccagancatcctcgccgtgctgggattccangtcgtcctcatgggcctcgtccaaggctaccgcatcaacngcctccccggcgtctgnganagcaacnanctctnccccggcggncagtncttcnacccgctcggcctcgccganaaacccgtcaccttcgccgaaactcaaggtcnaggganatcaaaaatggccgccncnccatnttctccatnttcggnttcttcgtccaagccatcntcaccggcaaggggcccttggaaaaaactgctctaacacctcgccaaacccgtcccaaaaaancctgggtntncnccaccaanttacccggggtngttaatggnccacccccattgttaaaataatctctcttctccatcnccccaattttcaatgcttgcacaaattttcnaaanctgtgaanaaatcccgatntnatccccccc

SEQ ID NO: 61118 - DNA, 582 bp, Oryza sativa
  Clone ID: PAT_MRT4530_62582C.1
atgagtgacttctcactggatggctacagcgacggcggcgacgcctatgtcgctgagccagcctcgcccatccgttccagtgcaaatcggcctcgtcgtccgagcgccagccgcgacgaggttccccgctacgtccttcgcgtcatccgcaccgcagccgccgcctccgcctcgctgcctcccgtcccaggctacagccccaggatgtccatcgacatggcgtgcacgcacagctgggcgccctacacggccgtaatcccggccctccgctccctctccttcctgtctctccgggacgaacactctcccggcgtggcgaagaagacgatcgccgagctctacggccacgccacgccgttcgacgccgccggccgccggttccccgccggcgaggtgtacgtctgcctggatcgcgccccgctcgccagctacatccagagcatccagaggaacgtgacggtgtcggatgtgtcgtacggggacaagaccaaagcgtgcgacagctacctgagcgccgtcagctccgccatcgacgagctcacgcgcgacgaccactacactccagtgtccagtgctgtatga

SEQ ID NO: 61119 - DNA, 2355 bp, Oryza sativa
  Clone ID: PAT_MRT4530_62583C.1
atgtcaagccaaagcctacaactacttagctggaatgtgagggggcttaactccccggaaaagtgtactgcactaaacgagctaatcgcagagacatattgcaacctcgtctgcatccaagaaaccaaactaagagcagttgatgaccagctagcccgtttcttgggagcctacaggctagacagttacgctttcaaaccgtccaggggcactaggggaggcatcctacttctgtcgaacagcatggtgatctcggtgcacagcactcgcataggtcgttactcgttgacagcgaatataactgtcctacgctgcggaacaagcttcatgctcaccacggtctacggcccaacgcgtcacagagaaaaagactccttcctccgtcacataaggagtttaaaaccgcccccgggaaacaaatggcttatcctaggagatttcaacttgatttatcgggcacgagataaaaacaacaacaacctaaatttaggccgaatgagtcgcttcagagctgcactcaaccgctgcgagctaaaggagatccacctccaaaacaggaaattcacaaggagcaatgagagacgacgaccaacccttgtaagacttgataggtttttttgcaatgaggaatgggacctatcttttgaccgccacatcctacacgctctttcaacaggaccctccgatcactgcccgttgttgctcaccgacccatcctgcccacggctagagacaacggatttaaattcgctcaatgaacctttcaccgaggatgaaatcaagagagcaatttgtcgcatgccgacagacaaagcacctggccctgatggttttaccgggtgtttcttcaaagcatgctgggaaaccataaaaaatgacgtcacgacagctttcaacgccatctacaatcatcggtgcaatcatctaaacctcctcaactcggcaaacatcgtcctcgtcacaaaaaaagatggtgcagaacaagtctccgattttaggccaataagccttatacacgggtttgcaaaaatcttctcaaaattactggcccttcggctacagcctctcatgcacaaacttgtctcaacaagccaaagcgctttcattcggggaaggagcatacatgacaatttcctatatgtcagaagtatggtgaggaagtaccaccgaaccaggcggccgatgcttctgttcaagctggatatctcaaaggctttcgattcagtacgatgggactacctcctaacacttcttcagcatcgaggcttcccccaacgtttttgtgactgggtttcggctctgttcgcaacttccagctccaagatactcctaaacggaataccgggtaccaaaataattcatgggcgaggcctaagacaaggagaccccctatccccgctagtcttcatcttagcaattgacccgcttcaaagactacttagcaaagcgacagaactcaagctactaagcaagctacaaggaaagtctgtgacactacacaaaactctttttgcggcggcaacgacaataactgtgggagacggggaaacagctagcttctggaactcagcttggatgcaagggcggcggccgaggggtgtgatgccacttgtatatgcagtatccaaaagaaagaacagaagcctcaaagaaggcgtcacagataacgcctgggtgcaagacctaaatttctcctccccagatgcaatgacagttgagctgctggaccaaatagtgactctgtggtcgataatccaaagcgtgcagctcagtccagacgtgacagatgaaatcacttggaagttcacaaatcatgaggagtatacaacaagctccgcctacaagatgcagtttcttggatccatcaatgcaaactacgacgcaatcatctggaaaccatgggcaccaaacaaatgtaaaatcttcgcatggttggccatccaaaacagagtctggacggctgacaggctgactacacgtggatggccgaataacactttctgcccgctctgtagacatacccgggaaacggtgttccacctcctagtagactgcagatactctaggaggatttgggagaatctggcttgctggacgtcgcaagagcacatcaaaccgggcaattgggctcaacatgcgtcgctccaagactggtggactgcaatagcaacacatccaggggcaccgagaaaaggaaatcgcacccttctattgctagtgacatgggagatttggaaagagagaaatcaaagaattttccagcgcagcgaactctccatactatcgctctgcgcaaagaaaaaggaggaggccaagacctggactctagccggcgcgaaaaggctatctgattag

SEQ ID NO: 61120 - DNA, 301 bp, Oryza sativa
  Clone ID: PAT_MRT4530_62584C.1
gatctctcatttgaaactaaaaaatcgaaggaacaggttgacaagaaaaaagtggagggcgagggacaccaaacaaagagcggaagaaaggggcaagacaattaatcttgcacagaacttgttacacggcaaacaagcctgcagtgtacggataaaagtcaaaccaagcgaaaaggaagaaccgtgtattctgcgggaaaatttggggcggtaacatattatgtcaagaacggaggcccaagaaaaaagagataatacctggaagcccgaagaggaaactgactgatttttaggggggaaa

SEQ ID NO: 61121 - DNA, 316 bp, Oryza sativa
  Clone ID: PAT_MRT4530_62585C.1
aaaaaccacccacgcgtccgccaaaacaaaatacattgaatcctaatgctgcactgctggtggttccttgaagaaagaaaaaaaacaagaacgaacactattctaaaaataaacaaaaactccacaatacactctaaaataactacactgatctcactatttcatgctatctataacttcccaagcttctatcctcccctacttacaacaagttacgccaatgactacttcactccccatcgcatcactacatctcctaatcccactcactctcctcttcttaacattttctcttacatctcatatttatatttcc

SEQ ID NO: 61122 - DNA, 623 bp, Oryza sativa
  Clone ID: PAT_MRT4530_62586C.1
attacttacctgtcctttaaaataaacaatgatcattggtaatatgtctgaaagaaacatttctacgcatcagattttcttattttatatatatatatatatatatatatatatatatatatatatatatatatatatatatatatatatatatatatatatatatatatatatatatatatatatatatatatatatatatatatatatatatatatatatatatatatatatatatatatatatatatatatatatatatatatatatatatatatatatatatatatatatatatatatatatatatatatatatatatatatatatatatatatatatatataagatgaaatgtatggtcagtgatcaacatatatatatggcacgcaaatttaaaatattcatctgttgataaaattttacactacaaatgtatgcatatatatatacacatgtaactacatgtgtgtgtctatatatatatatatatatatatatatatatatatatatatatatatatatatatatatcgtgtatatataccctttctcgtgcctacatacatatatatatatatatatatatatatatatatatatatatatataccccctctat

SEQ ID NO: 61123 - DNA, 189 bp, Oryza sativa
  Clone ID: PAT_MRT4530_62587C.1
gagacccgtcggcaacctggagcgggatcctggaggcgatcctgaggattgcctgggggacctccggtgcggaggggatccatcgctgtcagctggcggcgacctcctgaactataattggtctaccttgaccgtggacgaccacgataacggggagagcgggaacgcgaacgtgaacgagacctccct

SEQ ID NO: 61124 - DNA, 202 bp, Oryza sativa
  Clone ID: PAT_MRT4530_62588C.1
tcgtttatatccaaagcgtcatcttcgattccgcgggaatgatgaccatcgaagtgcggttccgacctccagaggctaccggaacagcttttgactgagtgccctaataaatcagacatactaaaaaagctgcacaagaatctacagcatataaaactaaagtgtaggaaactagagtatggtcactatgagatcgtgatgc

SEQ ID NO: 61125 - DNA, 692 bp, Oryza sativa
  Clone ID: PAT_MRT4530_62589C.1
cccgggctgcaggttaataatataaaaatggaatgctttcgacggctgcgggctgcggctcgaggcagatcttcaatccggcacatcattttgtttcaccaagatgtgtgatatattatggtacagattgaaaccgagaggagtatggtatctcggactcaaaagagtggcgccttttatttttcgggggaattgtttatcggatttttttcgcccttttttattggacaattacggttttttcgcccgttttcttctcgctcgcctggttatttggccagttttgttgacagacgatggaagcatctcttattttcagtagtagagatttgttttggagcctgtgttaagctagctctagagcaaacatcattcattttctgttacctctccattccacataaaacattattcattttttgttacctctctcgtccacatataagatccttttactggaaaaaaaatgtcatatcctctaaatagggtgttacctaacattttaactatatggttggtaatctaatccacgttatacttaaacagactatattgagaaatgatccaccaggatcgtggttgcctgcattgtccatcaggtcggataactagtattatacgacttttaagaactggaaggatgtttactatttttggacagggtttgaatctttgattccaagatctacacc

SEQ ID NO: 61126 - DNA, 419 bp, Oryza sativa
  Clone ID: PAT_MRT4530_6258C.1
atggatgaacacaaagctcaagtgagtgtgagagaggtgcaaggggtgtatgcaattgaattgggtgccaagagagtccccttgctgctggtgggggagtatttatactctcacccaccaaaactagccgttgggggcgaaatcccccaactttgtgctctgccggtctgaccggaggtatgtggccgatcagaccgtgctactctgcagcggctagaaaactagccgttgaagtgctgtcagagggccccatcggcctggccgggggccggtctgaccgcacatgtgccaccggtcagaccggccttatgcgccggtcagaccgcccgcttggggccggtcagactggccagggcacgccggtcagaccgccactatgtggccggtctgaccgcccctggtcaggccgaacccagtga

SEQ ID NO: 61127 - DNA, 450 bp, Oryza sativa
  Clone ID: PAT_MRT4530_62590C.1
cggtttcccccgccgccgccgccgcggcgggacgggggcccagcgccggcgcgcgcggtagaaaccgcaagagcgaagcgcggcgagatccggagcccgcgccgctcgccgccatgcagccgccggtcctcctcaacatcgggggcagcaggtacgagacgacggcggacacgctcacgcagcgggatcccgggtcgctcctcgccgccgcgctctccggcgccgccgcccacggcctccccaccaccgaggatggggccgtgttcgtggaccgcgacggggagctgttccggcacgtgctcaactggctcagggacggcgccgtccccgcgctcgccgacgccgagtaccggcagctgctgcgggaggcggagtactaccggcttcctggattgatcgattgcataagtgaaaggattgaggattgggatgataagattgaagatcttc

SEQ ID NO: 61128 - DNA, 2841 bp, Oryza sativa
  Clone ID: PAT_MRT4530_62591C.1
ctggcaaaaacaggggaaattttatggaaagaaaaacttgaacatctttgatcaatcaatgtacaccatacaaactcatcatatagactttccaggacagctttatggaatcagcacaaaatgaaagtgaaacccaaagctacaactcctgtggtcattggaagtaagtaatcaatggcgtacaaccttcttccattccttgttcgcaaggaaaaacgcaaacagccttgagcccttgagtcgattacaggaaaagaatacacaatcatgattagtaggttttcaagtgaaaaccacacctcgagcttggattatcgagatgcaggcacccaatggcgggctgagtgtggtacagagccggatcgtataagactgttagtagaaactcgtttatctgtatattgctacaaaatgtcaggcttgacatcgctgttcagctaagaaatccgaggaatgtctagtctctatctgttgtatgcatgtgatctgaaccaccgctagaatccgctcttgctggagaacccttgtaccttactatgtttctatagaacatatccaactcgtgttcttttttcttgatttcatgggaccaaagggcaggatcaacattcttaggcagggactcctggagttgtgacctctcccttaaccattgttcggctttagtgcactcactatcaacagcctcttgctcaggtgtgggtaatgatttggcagccgtcttgtggtcaagaatgaacttcaaaagatcccttgtggcttgacctctgacctcctcatctttacaacgattttcaatgggatctacaagccttttcagctcctcaagtttactattgtaaactgcttcagtctcatcatcaccttcttcataaagccaatcttcagtctgttgtagactgagtgagatttcttctctttcagaatcagttgcaaagctccgatacctctcggaaagcttattgcgagtatcatacacataagattccaatgcgttcttcctttcttttgtccgctccatgagtttatcctgataagcaagttgtgattcttgctcttgagcttccagcaattcctgattactcattgcaccataaatggactgaacaataggcaattggattaacctttcgcttcttgacttatcaacctgttgccccatttcaccattggaatccacctccatagagtcagcagaatgtgcatcgctttgatcatcatcaatcagagcagctgattccactgaaacaagtccatggagatttaaccgaattcttactttgactttagacttttcagtatgtgcttggaaagggccaatctggaaagcaccaatttttgttgaggtaccaggaggcaattcattctcatccacataaaatgcatccagtttaaatttgctgttcttatgcagagtaacgaccttcacactgggaaggggatgacctctctggaatagcgcgttacttggtaatgttgaaattgggccttcactcgtgcaaaatcctatcgaagaaggaattgcatcttggacctcatattctcgaacgcggaatgtgggactaagcattgcgcactgcagtgcacacccccgagccacacattcactggcattgagcgtgcgactaggctcccttctgaagaaccctgcaagaattctagcaatagcaggtacccttgaccctgacccaaccggatccacagaatgcagcctgtcaaatccgatccttgaaccctccatagccttcttgcatggctcgacaaccctctccagcagcccagcacacagtttctcaaactcctccctccggatcatccccctcacatccttctcctccatcaggcactcgatattgaccactgcttccgcattcgcgcttagcactttcttcgccttctcacatgccgccctcaacctcatgcttgccttgacattcccagtgacatctatcttatacttgtccctgaattcctccgcaaaatgctcgaatagcacctcatcaaagtcccttccccctaggtccgcatcgaatctgtgcgacagcaccttcatcccggagacatcgaacgcgacgacggccacctgcgtatcgcagtgaccgacgtcgacgaacgcgacgtacgtgggaccaccggggccgccgaggtcggagcggtagaggccgtagccgagggcggtggcggcgaggtcgtgcatgagcctgagagggcggaggcccgcgacggcggcggcgtcgaggtaggcctggcgctgcgcctgcgtgaagtagcaagggacggagatgacgcagtcggatacgggcgcctcgaggtcggcctccgcgagctgcctgaggtacccgagcagcatggcgaggagctgggtcggggagagcgcgatgcggcggccgatgtggtcgacgtggacgaggacgccgccgcctccatccgcggaggaggcctcgacggggaaggggaggcgcgagaggtcgccgccgcggcgggggagcagcgtggggcggcccgcgaggaggaggaggcgcttgatgctggagaagggggcgtgcgacgaggcggcgccggcggcgtgggggccgaggaggcgggcgttgtgggagaaggcgacggcggcgggggactcgcggttggactcggcgttgaggagcacgtcgatgccgcgctgccgcgccgccgcggcgaccagggtgtcgttgccgacgtcgaagcccaccacgctcatgtctccccccacgacctcacctcctcatcaaacacccccacacgcacgcggctgcaggcggcggcggcggcgagcagaagaggaaacaaacagctcaccacgtcgtcgcgatccaatccaat

SEQ ID NO: 61129 - DNA, 279 bp, Oryza sativa
  unsure (1)..(279): unsure at all n locations
  Clone ID: PAT_MRT4530_62592C.1
ccggtcgaccacgcctgcgcgacgcgtgagcaagtacaaatactatggcgagttccgttttctctccgttttctatatacatttgtgttcttctattatgccgtggttctatggcacaactatntaatcccancacaaacccatggcatagtcctcggcaaggaagtcttagggagtgtagatttgatagactacaagcatttgaaccacttcggaaagtgaggtcagaagctgtggtgactgantacttccatgagaacaatgaattattccaatgca

SEQ ID NO: 61130 - DNA, 1202 bp, Oryza sativa
  Clone ID: PAT_MRT4530_62593C.1
cgacctctcctcctcgacccgcctcacttctcggcttcccccgccgccgcccccgccgcgggacccgcgcccgccgcccgcgcccgcctccggagcccccgccgcgcgccgccgcgcggcccccggcccgccccgcccgccgccgcgccgccgccgagccgccgccgcacccgcccgcccccccggcccccgccccgcgcctcgccgccgcgccccccggcgcccccgccctcggcctccccatgcagccgccgatcctcctcaacatcgggggcagcaggtacgagacgacggcggacacgctcacgcagcgggatcccgggtcgctcctcgccgccgcgctctccggcgccgccgcccacggcctccccaccaccgaggatggggccgtgttcgtggaccgcgacggggagctgttccggcacgtgctcaactggctcagggacggcgccgtccccgcgctcgccgacgccgagtaccggcagctgctgcgggaggcggagtactaccggcttcctgtatatgagcaatgcctcctgccaccctggttgtgtgtgtggggggattttgaccccaatgctggattgatcgattgcataagtgaaaggattgaggattgggatgataagattggaagatcttcagaggccgagctgactcgcaaggacgtgatcaagtgcatccaggctgataaagtccggttccgaggcgtcaacctttctggccttgacctgtccaagcttgacttatcggaagttgatttcagttgcgggtgtattgaggagacaaaattttcccttgccaatctttacaaagctaaatttcgggaggttcaagcttctcgatcttcgttcaattatgctaatttgcgtgagtgtgagtttgtaggagcaaatctccaagagtctactttggacagagccaacctacaaagtgcaaacctgcaagatgcatgcttggtaaaatgtagcttcattgaaacagatcttcgttcagcacatctgcagagggcagaccttacaggtgccaatttgacaggagctaaccttgaaggagccaatctgaagggagctaaattgtctggttcaaacttgcaaggtgcaaatcttcagcgagcttacctgcgggaagttgatttacgtgaaactcaattaactggtgctaagctcggtggtgcaaatctgcttggagctatcagatag

SEQ ID NO: 61131 - DNA, 191 bp, Oryza sativa
  Clone ID: PAT_MRT4530_62594C.1
gggggaaaaataggacagggtttattatattcagggcacgaaataatttttaaaacccctccttcgttcggacagaaaaaaaggggctaaatagctaaactccgggtacgcacgtacaaagcgcaccgcatgataaacaccttagagagtaagaccatctaacatgaccacccaacgacatacgctacggg

SEQ ID NO: 61132 - DNA, 3592 bp, Oryza sativa
  Clone ID: PAT_MRT4530_62595C.1
cccacgcgtccgatttgaggaacctcagggtctgccacctgtgagatcgtttgatcacaccattcctttaatccctggagcaatgcctgtcaacgtgaggccttaccgttatactccatcccagaaagatgagattgagtctcaagtccaagaaatgctgtctaagggattgattcagcccagctcaagtccattctcttcacctgtgctgttggttaatttcttcctcctcaagctgctctttcctccctccaattcctcaaatatccacgaactcgctgaagaattagtatactcgtgatcacttcagcagggtgtcaatattggattgtatttttatttttttttttttttttttttttttttttttttagcccatgttaaccactagtaagtatatattccagggtaaaacaggtaaaacctgtgatacaaagcagtcacataactgaaaaagcgcacgatagtttgtgctactacaacagtaaaccaggacagaacacatccaacacgatgacgacgaggtcatgggggtttcgacgatagcaatactggcagtacgaattcgaggtgccgcacaacggcgcaccacattcacttcagcagggttttaacgatggatttgacattgagcttcttgaggtcagtgtaagactgaccacagccaacgaacatgactggagctccagatatataaaccattgaaagtgcagctccaaccttgtcgtcgatggtgtcaaacttggtgagcaggatgccatctatcaatctggtagtagggacagcggaaaggtctgctaatttctggttaaatttagtgagttgatcaacagcatcattaccaaccaatgcttccccaacaaataaaactagatctgggctattgagattgatgagcttggagagtgctctcatgagtggctcattatcctgcatacgtccagcagtgtcgacaagaacaacatctgacttattacgagtagcttcctgaatagcctcctttgcgacaaccgctggatctttttcatatcccttctcaaatataggtatctgaagcctgcgagcatgagtacgcagttgctcaacagcaccagatctaaaggtgtcacatgctgccaggcttacactgaggttatgctgaagaagccaataagcaacctttgcaagattggtagatttgccaactccattcactccaacaaaaacaataacatatggcttcccacgctctttggcagcatgtacatcccttaatatgtcaatagatcgccttggggttaagatgcgaagaagagcctcctccatagctgtctgaacagtagaggatatccttgtgaaggatcccagctttttgccctcaaggctagctgccactgattcacaaagtttctctgcaatttcttcagccacattcttagtcatcagcctatctttaagcgctttgagtgcaggttggatgtcagacttctcaagcacattgttacctgcaatgctcttgaacatcgaggagaaccatcctttcttcttttgggaagctccagaattttcctctccatcttcctcttcttcatcactatcactgctcacgacatcatccttatccatcatgctttccccctgcttgacaaccacctggtctatcacctcatcccctctctcatcagctgggtctgtgaaatccagcttcttcttgtcatcaggtgtgtcatcccaaaccctatttttcttcaaattcttctttgtgttagccttagaggtgttcttggccacattactagcaacctcattcttcttgttacccttgtttctcatcttctgtaacttatttacatcaaaggccccatcgttggggtctccgttctcctttcctttaacaacaacactgcgggcatgagaattgtccttgaggctattctcttgcatcttggaattaccatttggcaaagtgtgctccttcccggagtcaccatcagagtcgtccttccccgagtcacctttcttcctaccaccaccagagccctgagtgtcgccacgattggtcttagtggtagccttggtgggccgggaaccagtgtcctgtttattcttcttcatctcctcactgcgagcctcaccctcgaggtggagctggcgaaaaccctcattgaaggcgtcatcataggaggtgcgcttgggatcataaatctgtgagaactccttacggacggcggcgaggaggtcgtcgacgtaaaggaggtggagcatgcgctggtaaacggcgacgaacacgaggccgaggtcattgttaaaggtccacttaagcgcataggtgtcctgggagaagctggcgtcggcagagcgctccccaattcctaacatggcactgcctccttggcatgtcaacatgtcacccggcctgatcccccggaactccaggccccggccgtccgccgccatctccggcagcggctcgacgacggtgtccatgcacggcccgatcaggctcacgaacgacatcctcgctgctcgccgccgaccaccgcgcggtggagcacgcccttgtaccttccgttggtcacaatctccaactgatcgccggcgatgacgaagaaggagcccgggaggggcttcgcgaggagccattcgccatcgtgcttgacctggaggccatcgacgccgttctggaagagcagggtgaggaggccatggtcggagtgagccgataatcccatcgcctgctcgtccggtctagagcacgcagggtaatggttccccaccaagatctggaagcaggactcgaggttgagcgcttcagagaggcggccgccggcgaggcccaggctctcggagatcgccttggtgagctccagcaacagggctctcgtgcaggtcgcgtactccgttgcaatctccctcagctttgcgggcttttcggggcagtggaattcaggatgagagaacatcttcaggtagtccctcctgcatggtacggcgtcgacgacagagtagaaacctgtaccgatccgtataggatccatcggcttggcacgcatgtactctttcttctcctccaaaggtaatctgaacagctccttgcaggcgtccatgattgcttctcggagagcctcgggcaccccatggttagtcaccatgaagaagccccaatcctcgcatgccctgcctaggtcgcggatcgcccgcgaccgctcgtcggccgcgccgttgatgaggacgccgagatcgacgacggggattccttgggacggtgtggccgagccgtcggctgcggcggcggcggattgctcctcatgggatgggagccgagacggcgcaaccatggctgtgcactgcttgcttgccggcgtcactgtcggcttgcagctggcccgctgctctctgccgcctcccgtgcacgccagcgcagtcgagccattcgtcgccgcccgccagctgctcgctctcgtcacccagcgcagcttcggccctcaccgcccgccgccggccgaaggggaagaaccgatctcttgctgtatctggtcccaggggaatactccatgactaggcaagacagattatcggtcgtaagaaagaatacaaagagggaggaaggaga

SEQ ID NO: 61133 - DNA, 731 bp, Oryza sativa
  Clone ID: PAT_MRT4530_62596C.1
aggaaaaaggaattattgcgtcagcggctagggtttgcggtggaccgggcgcacggcgacggttcacgggaacggacggccgagatcgatccatccaaaacggacggccgagatcgaacggtccacgaccggctcacggcagacggccacgatgacgtcagcggtgacgtcatcgatgacgtcagcaccggcggcggctcggcggctcgggcgcgcaagcttgccggcgaacgacggcgctttggcacgaacgaaggacaccagcacgaagcgggcgacgcggcgaactcaccggtgaccaatgcaacagcggaagatcaacagacggcgacggcgacgaggttgaagcggcggagaagatcgggttgacggcggcgacggtgctccggtggtcaacagcgactgcgaaggggaggacgaggacggcgatgcgatggcgaccacgaagacgaccttcccgagcgacggcgacgactggaacggtggcagcgcacggctggagcgacgtcgacgacggcggcgcaaggtctcacggcgctagggctcttccgacggcgagagacgaaagcaagggtggcggcgggtagaggagacaccggggatccttttaaaggggctaggaggcggcgacgaaggcccacggcgaccggtgacgcgaaggaaagatcggggctcggagagagagagaccgatccgaatcgacctcgaatcaaacactttcgaagcgattt

SEQ ID NO: 61134 - DNA, 589 bp, Oryza sativa
  unsure (1)..(589): unsure at all n locations
  Clone ID: PAT_MRT4530_62597C.1
gtgtgctccttccgggagtcaccatcagagtcgtccttcnccgagtcacctttcttcctaccaccaccagagccctgagtgtcgccacgattggtcttagtggtaaccttggtggccgggaaaccagtgacctgtttattcttcttcatctcctcactgcgagcctcagcctcgaggtggagctggcgaaaaacctcattgaaggcgtcatcataggaggtgcgcttgggatcataaatctgtgagaactccttacggacggcggcgaggaggtcgtcgacgtaaaggaggtggagcatgcgctggtaaacggcgacgaacacgaggccgaggtcattgttaaaggtccacttaagcgcataggtgtcctgggagaagctggcgtcggcagagcgctcctcgaggaggcaggagcggatgagggcgtcgatgggcgagcccttgagggcggcgccgccgagcgcccggcatgacgaccagaggatgaggccgccgcgcgtgaagatgagcagctcctccaacatctcgacggacgaaccttgttcttcttcttcgtctgcttgtggtgtgggtgggggaaaaaacagat

SEQ ID NO: 61135 - DNA, 706 bp, Oryza sativa
  Clone ID: PAT_MRT4530_62598C.1
gagagcactctccaagctcatcaatgtgaatagcgcagatctagttttatttgttggggaagcattggttggtaatgatgctgttgatcaactcactaaatttaaccaggtactgatagtctttcaaggactggtgaatgctactccctccgtttcatattataaaacgctttgaactgtgtcttagtttaatttttgaattttgaccaagtttataaatttttttgtcaaaatatatttaatgttacatttaatgaaactaatttggtattataagagatactacatttccctacaaacttggtcaacatgtgctttcactggaatgcactgaacggttttgtttgttgaacagaaattagcagacctttccgctgtccctactaccagattgatagatggcatcctgctcaccaagtttgacaccatcgacgacaaggtctgaactgtcacagaattttgatttactgcaattgccttcttttacagtatttttatttttatgactactcaatatatatataggttggagctgcactttcaatggtttatatatctggagctccagtcatgttcgttggctgtggtcagtcttacactgacctcaagaagctcaatgtcaaatccatcgttaaaaccctgctgaagtgaatgtggtgcgccgttgtgcggcacctcgaattcgtactgccagtattgctatcgt

SEQ ID NO: 61136 - DNA, 285 bp, Oryza sativa
  Clone ID: PAT_MRT4530_62599C.1
ggcccaaaacccataaatttattggggaacccaataattcaactggccaaaccctggtttttaaaaaaaaggggaaaaaattttcaaacataaaactgggggctgcctaaaccggttgggaaaaaacatttaaaggggccttaaaacccccgggttttgcaacacaaaaaccccctcccccggccgggcccccggctccttggggggcccttaaccccaaaaaccccaggggggaacctcaccccaaaagaacactgatcaaaacaggggcttctaaaaagcccc

SEQ ID NO: 61137 - DNA, 419 bp, Oryza sativa
  Clone ID: PAT_MRT4530_6259C.1
atggatgaacacaaagctcaagtgggtgtgagagaggtgcaaggggtgtatgcaattgaattgggtgccaagagagaccccttgctgctggagggggagtatttatactcccaccaaccaaaactagccgttgggggcgaaatcccccaatcattgtgctctgccggtctgaccggaggtatgtggccggtcagaccgtgctactctgcaacggctagaaaactagccgttgtagtgctgtcagagggcccccatcggcctggccgggggccggtctgaccgcgcatgtgccgccggtcagaccggccttatgggccggtcagaccgccgttgtgaggccggtcagaccggccagggcacgccggtcagaccggccactatgtggccggtctgaccgcccctggtcaggccgagctcag

SEQ ID NO: 61138 - DNA, 258 bp, Oryza sativa
  Clone ID: PAT_MRT4530_625C.1
atgctgacgagagaagcagatcatcgagagcctgagactcacggcgccaaggagcaccaccagcgcggtccaagtcatgcatgggcggccgccggtcgggggcggaaagggcaaggtaaccgccggtccgacggcgtcgagcgggggtgggattcgctatattgggccgtgacgttcgcggaggcatacagtagcgaagcagcggaggcaaccggcgcggcgcagcggcccggcgcggagggcgggcagcgcctctga

SEQ ID NO: 61139 - DNA, 510 bp, Oryza sativa
  Clone ID: PAT_MRT4530_62600C.1
atgtgcaagtcacttgcaaactgctcttcagcgttagagactgaacttgccgcctgtgtggagggccttcggttagcactgcaatggacactgctgctggttgcaattgaaacggactgcatctcagttgtgcatctactcactaataaggaggactgcttaaccctggcgtttctagtcagagaagcaagatggcttcgatcaggagaaaggacgacttctattacgaagatccagcgggaacaaaatttgattagccatgaattagcaaacaaagctagaagggacgattactcaggcttttgggctgggtttgagtccaattctgtttcatggttgattgaaaaagacttccatgagaaggtgaaaggatgcctcaaagatgtgcctatggaatgggccgtgtcaccaggggatatttggttgcttactaactttgccaaatcccatattaggcaaggtgtggctgccacaaaatgtgtggttagcaaaatactagccacaacttag

SEQ ID NO: 61140 - DNA, 320 bp, Oryza sativa
  Clone ID: PAT_MRT4530_62601C.1
cgatccgaatccgattgcgaaggcgcgatggagggaaattgtgtgcccttgaagagggtaagaagctggtccctgtccagttgtcctgtctattgttgatcatggaaggctccttgtaattagttagaggtcattttacacctctcatatcccctttttctgttcatgtcttttgtttttatgtgttttgaatgatgatgttcttttcaacttgagaaggatggtgaccaaaagaagacaccagccttcttgacttcatgtgtgcaataaggatgaagtgaataaaaatgatttgtttgtttttaaaaaaaaaaaaaaaa

SEQ ID NO: 61141 - DNA, 243 bp, Oryza sativa
  Clone ID: PAT_MRT4530_62602C.1
acggtatatcggcgcgtgtacggacgttctctgaatacgttaaggaaattcatttcgaagtccaccaatggaaaggttcctacccatataggactgggtcgccactatatcgtgtagggtccgatgtctccgagtcctacttggagacctcctgacctgcgatataaaagggaccctccgggaagacctagggcatcgaatctcatagccaacatggtggggtccacctgtcaggcccgtcgt

SEQ ID NO: 61142 - DNA, 377 bp, Oryza sativa
  Clone ID: PAT_MRT4530_62603C.1
ggcgccttttttttttttttgaggaagcatgacatctgatcataaatattgagcagggacaggttgtatataaagcataatacaaacgccacaggatataagaccctacctaaaatctttgcaagaggcatcttatattttcaggaatccactcaaaatcatagaattactgagctatagaacactctgcatagaactgagatgtcaccaatcttcatggatacacttacagaactgattatcacggacacctccgaactggttgatagtttaactggactgcccaagtgaatggaagctacataaaatagcagctccacttgtttctaatttcctataatccacaatctgcacaaaggccctgaaatctctgagct

SEQ ID NO: 61143 - DNA, 870 bp, Oryza sativa
  Clone ID: PAT_MRT4530_62604C.1
atggcaaggccctcccctccaccagattcggtgggaggggaggcggtgatccggcggcagcacggcgatgtcctctcctccgccagagccagcggaagagaaggaagggagacggtgacccggcggcgacagcagcgggaggcggcatgtggccacaggagagagccagctggaggtgcgatggcgtcggtggacgaaggcaggggaaggttgtgcttgccagcggctggccgcgctcgctggccggggctggcccgctccgtcggtgtgggaaggcagctcgccggagtggagggtatggatctagggtttgggtggggaaggaatggcgcccgggggggtggaggcttaccggcgacaggggagccagatcgcgagagacatcaagcggcggcggcagaagggtacggtggagtcagggacggggagggcggggacggccgcggtggcgaggaggaggagcggcggcagaagggggcggtggagtcagggacgaggagggcggggacgacggcggcggcagggcagctcggcgaggaggaggagcgccggcggaagggggcggtggagttggggacggggagggcggggacggccgcggcggcgaggaggaggagcagcagcagcggggcagctcggcgaggaggagggcggcggggcggggaggagcggcggtggcagcttgaggtgggtaattttgttcccccaaaagcaggcgacttcatctccgaccagatctccgcctgcaacgatgtcgacctccgccaatccatccgccgcgccatcgaccgaatacgcagaggggccaatgaccccaactctcatagacatcatcatgatcacgggtctggatgtcacctcatcggctaa

SEQ ID NO: 61144 - DNA, 892 bp, Oryza sativa
  Clone ID: PAT_MRT4530_62605C.1
ttttgtgtttgatggtgagccacctgacatgaagaaaaaggaactggcaaaaaggtatactctgaatagtgattgcacctctgaggcagcatttatgttacaggttggagatgaggatttaattgaaaaatttagcaaaaggactgtaaaggtcacaaaaaagcacaatgaagactgtaagaggctgttaagcttgatgggtgtccctgtagttcaggcaccaggggaggcagaagcacagtgcgcagcactctgtgaaaatcacaaggtctttgctatagcttcggaggatatggactcgcttaggtggagagcgagctgtttaatttgtcattcaacagggttgagttttaagagatctgctgtaacagaattcgaagtgtcaaaggttttggaggaacttggactcacaatggatcagttcattgatttgtgtatccttagtggctgtgactactgcgagaatattagaggtattgggggacagagagctttgaaacttattcgtcagcatggttatatagaagaagtagtgcaaaatcttagccagacaaggtatagtgtcccagaagactggccttaccaggaagttcgggcattgtttaaggaacctaacgtttgtacagatattccagacttcctgtggaccccaccagatgaggagggccttataaactttttggcagccgaaaataatttcagtcctgatcgagtagtaaagtctgtagaaaagataaaggctgctaatgataaattttcccttgggcgggcaacgccgtggccgtccgcctcgtgaagcacctcggtgccaaggtggtggtctccgtcgaccgcggctgcgaccgctccgacctcaccttcgcggcgcggaggggcaggcgggggcgcgagg

SEQ ID NO: 61145 - DNA, 362 bp, Oryza sativa
  Clone ID: PAT_MRT4530_62606C.1
gagacgtcctacttggaggaacacgacaagctccagcatcagatttcatctgctaggagtaaccgtcgagtacgtggcagatggacacattatcttcgtgttaagatggctaaagggtgtggcagagctgaatgatactcgtttaagaggggtcatggcgaccaacagggttgccacggcggcgttattaatcgacgggggggacactgtcactgtagaggacattgccactgttatccccaactgcttgaggcatctgcttcggaaggacccacttgtattaattgactcaggattgctcgtggttgagaagttgtatgaagcccttcacctaaattatactggaggtaattggatttctt

SEQ ID NO: 61146 - DNA, 3586 bp, Oryza sativa
  Clone ID: PAT_MRT4530_62607C.1
cccgggctgcaggatcggcacgaggggaaagacgggggtcgccggcgatggcggggacgatctcccgcatccggctggagaacttcatgtgccactccagcctccacatcgagctcggccaacacgtcaacttcatcaccggccagaacggcagcgggaagagcgccgtcctgacggcgctgtgtatcgctttcggctcccgcgccaagagcacccagcgcgccgccgccctcaaggacttcatcaagaccgactgcagttatgctgcaattattgttgatatcaataaccaaggggaagacgcattcaagcctgaagctgttgtttctcttattcttcccttacctttcattaaaaacttaagactggtgaaccagtttgaagatggtcaagaagggtgctctgacggtgaagcaggggctccagtgaaactgatggatgtggtctttacagggaggaaggtggcacatcgtaaagacgatctcattgagataattgaacatttcaatattgatgttgaaaatccttgtgtcattatgagtcaggacaaaagtagagaattcttacattcagggaataacaaggacaagtttaagttctttttcaaggctactcttcttcaacatgtaaatgatttgcttctggcgataagagaactgttggacaatgcggactctgttgtgcaagaattggaaaagtcaattaagccagcaatgatggagcttgatgaattacaacagaagataaagaatatggaacatatagaggagatagcacatgaaattgataacttaaagaaaaagttggcctggtcctgggtttatgatgttgacagacaaattgaagaacaaacagtaaaacttctgaaactgaaagagcgaattcccgcctgccaagaaaaaattgatggacatgcagccatgatagtcaaattgaaggaagaattaacagataaggaaagaaatgccagatctttggtagaaaagtcacgtgaagtaaccatgatgaaagaaaaactggaggatgacattgctcaggctgttgcactgaagattgaactagagagagagcatgtacgtggtacaaatgtgctaaagaatatgaacaatcgtgtgaaacaactccagaaacaaattcatgatttccgggagcagtatattcaatacacgcaggatgaatcatctaaagctgagaacgacaagtgtgaaatacagaaggagataaattctcttcattcaaatgttacaaggttaaaagaggaagaaagagggttgcatgaaacacaaatgggcattgtaaaatccatccaaaacatggaaacagagatagttgaaaacagaaagaagattactcaatttaaagctcacattcgtgatcttcaacaacgtcaatctgataaggtatcaacatttgggggacagagagttcggaacctcttgaagtcaatagaaagacaggaaagaagattcaacatcccgcctcttggtcctataggagttcatgtgggtggcagccaaattactctttctcagcatgagatcaatgctgttcccttagtgaagcttcatatattactagcaattgagtgtgcattggggaggctactggatgcttttatcgtctcctgtcacagagattcagtcattttgcgggaatgtgcgaaagaagttaactaccataaccttcaaatcattatatatgattttgcgaagccaagactgaacattccagatcatttacttccttcgacaacacatccaacagtactttcagttattcagtcggaaaatcctactgtgctaaatgttttggtggatcagggtagcgctgaaagaacagtcctagttcgagactatgaagtgggcagatctgttgcatttgataataggatacaaaatctgaaggacgtgtatacttccgatgggtacaaaatgttttcaagaggtcctgttcagaccattcttccaccacacagaaagggaaatgcaggtcgtttgtgtacttcactgggagaaaaaatagctgaaatggaatcagaaattgctgacatggagagaataatctcacaaaggactcgggatatgaagaagccaaatgataaacgagaagatatcgaattaaaaataaagaatttgaagagaaaacgagtagaagaggagcgtcttcttgagagcaaaaaagttcaattggatgcgtccgggaagacttctgctgacattaatcgtgttacatcgtcggataccagtgaactagaggcagaaatgatgcaagtggaagtcgacattgagcagaaagaattgttagtgcagaaaaccaatttaaggttaacaaaagctttgcaggatgagaatgaccggagagcctgttacaaggaattcattgatggtgtgtatagggaggtggggcctagtaatgttctggagaaggaaatagaacgtgttaaggacaaactacaaacagctgagcagggcaaggcttactatgaaggtataatggaaactaaagttttacctgatattaaaattgctgaagcagagtttgaagatcttcagaagcttcagcaggagagcttcaagaaggcatcaattatatgctctgagagtgatgtggaaactctgggaggtgtggctggatcctcaccagaacaactaagtgctacgataaataaattggaactgagatttcataaagaaagtagcagatatactgagtccattgatgatctgagagcattgcatatcaagaagaaagagaaaattgaagataaacagcaattatatgcaggttttagggataagttgaattcgtgtcaaaaagctttggacatgcgatggaagaaatttcagagaaatgctgctcttttgaagcgacagcttacgtggttgttcaacgagcacctagggaagaaagggataagtgggtttatcaatgttgattataaggaaagacttctgtctgtcgagctcacgatgcctcaagattcttctcgtgacacaattacagacaccagaggactttcaggtggagaaagatcattttcgacactgtgttttaccttggctcttcacggaatgacagaggctccttttagggccatggatgagtttgatgtattcatggatgcagtaagccgcaagataagcctagacaccctagtagatttcgccgtcacgcaaggatcacagtggatatttataacaccacatgatatcagctataaacctcatttaggctgtattcttccctttctcaaccgtttttcgtctttcatgcgcatgctttttaaattgctaaagttagcatggtttatggacatttttgctcttgggcttacctgtcagatccaaagcgagaaatctctctctggatcgaatcggtcaatccttcctccaggctgattttggataagcttatcttggcgcgactggatcacggtcttgttctctggtaccacctactcgtgtcgcgttctctccctcgtgccgcgtccggccccccggggctgcaaacacacgcggttcagtctttttatgtcgtcagataatatagttcttgtagttgttttgaaaaaaaaaaaaaaaaaaaa

SEQ ID NO: 61147 - DNA, 954 bp, Oryza sativa
  Clone ID: PAT_MRT4530_62608C.1
atggagataatgatgatggggctgtcggtcgaagggttcaccctaccgccggttaccgcggttaccggccgtaccgcggggggtcgctgcgcattgcttcgaaggggcgacgaggactgccgcgccagatccgccgcctccgtgccggcgtggctgatttccgcgcgggtggagatggcagaaagtagggaccttgtgtgggagcacggggaggattttgcacctggatggcgttgtaagtattgccatcagaggaagaaaggtggtggggccacacgactaaaaatgcacttgggacacaaagggaagggggttacatattgcaattcagtgcctccggatgtccgtgatttcttcaagcgtgaattggagaggataaaacaaacaggtgacaagcgtcagaatgatagcaatagaagggttgaagcggcaggggtcaactattatgacctaacagaggaaaacttcaggagccacgtggaggagcgtggtggcacttatgagcatggtggtgggagtggatccgctcagctcgaggcacggaaaggtagaagtaacccaattaccagtatgctacgaagggctacatctcatagggagtcacctgctgtaagagattacaatctagcatctgccaagttccctgtgcagacacgcattgacataggattcttcacaaagaaggggaagcaagctaggcaggccattggtgagtcatgggcaaggttcttctttaccgccggcattccaggtagaaatgccgataatccatactttgtcagtgccgttcgggagacacaaaagtgggggggtccctttcataccgtgtatcatcttgatccccaagaaaggtttgaggatatcggatctgatacggaacaatccgtatacgtgaagataaaccttatcggtatatttcataagtcgcaggataggagttttctaaaagagtga

SEQ ID NO: 61148 - DNA, 1477 bp, Oryza sativa
  unsure (1)..(1477): unsure at all n locations
  Clone ID: PAT_MRT4530_62609C.1
cggcgccggccgcgctggttgggccgtccctccaagtcctcacagcactctccgatcagaacaataaaagaattgttcttgcattgcaaagtgggttgaagagtgagatactatgggcattgaacgcccttacagtactctcatttaaggagaaggatgatctccggcgggatacaacacctcttgctaaagttcctgggctcttggacgctctccttcaagttatagatgactggcgagatattgcaatgcctaaggatcatacaaaacccccaagagtaagaacattgggtgtcaatacaacactctccggctttggtcatgagaatgttgaaaaagtctactcagacaccaccactccttcagatgaccaaacaaagacagctgactctactgtcacgaagaagcgatctgcaggatttttgtttgatgaagagggcctatttaatgttgatgacgaaggacgaacagaaaagcagcagtgtgctgttgcagcctccaatataattcgcaatttctctttcatgccagaaaatgagactgttatggttcaacatagacactgcttggagactgtatttcagtgcttagaagaccaaaacactgaagatgatgagctcataacaaacatgcttgagacccttgttaatctagcacctgtcctggacctgagaatcttcagctcatcaaagccatcatttattaaaataactgagaaacgtgcagttcaagccataatgggcatgcttgcatcatcgattagggtgtggcattgtgctgctgctgaattaattgggcggctgataatcaatccagacaatgaaccatttcttcttccagccattccacagatatacaagagactagttgacctcttgagtgtgccagcagtcgatgcacaggcagctgctattagtgcgctgtacaatgtagcagaagtgaatatggacttccggctgaagcttgctagcgagcgatgggctgtcgatagactccttaaggtcgtgaagacgccacatcccgtgcctgaagtttgtaggaaagcatcaatgatagtggagagcctagtctctgagcctcaaaacaggatgcatctccttgtccatgagaatactttttctgagatactcacgtcggaagggaaatactccgacacatttgcaaggattctatatgagctgactgcaaggccgagcaacaaagtgacagcagggcaagctatctgggggaacataaactgatgcatcattgtattgttaaaatctactagataagatgtactttagtagcttaggtacctgttatgttgaaaatgccttgggtttctgactgtatgtaacaagcttttagctgtatttagttgcagccttgcaagcttacattttaacgccttgatcttccttttctgaagtactacacttgcttccagagtttcagaggactatctatagagatattttttgttaaccccctntnt

SEQ ID NO: 61149 - DNA, 513 bp, Oryza sativa
  unsure (1)..(513): unsure at all n locations
  Clone ID: PAT_MRT4530_6260C.1
gcacgagggtggtttcaatctcttctcccccttccaattcatgtttgtttctgcaattggttgacaaagcaagttcctttattgtctggacatactgtattttgcccagtaggtgttcaattaaatgccactgaaataatctgaatcagagccggtttaatcatgcatctacgtggacacatcctttanttttattgtctaataggtattgattatgtatatagcagtgccataagaatttttctctacagctcattcaagcattcaacaatgctgggctgatttgtggaatgagcaatataagtttaacattgttccatgtttttgcttgtaggatgtatacttctattgttgtccttaccctcatacctgcgtatgtgtagtaataaatattggttgcataagaatgacacagaagactgagtgggtctttgtagcgaacccaaaagggctatagatcttactgctatgatagacggtgatgatgacaacgatgatgaaagttatctcatg

SEQ ID NO: 61150 - DNA, 4390 bp, Oryza sativa
  Clone ID: PAT_MRT4530_62610C.1
atggcgtccgggaaggtcgtgtccttcgtcggcgccgacgagctgggcgtgtccctcgccgcctccttcgtccggtccggggccatcgtccgctgcttcgtcgctcccgggggtgatggatcggcgacggcgctcgcggagctgggcggcgtccggtgcgcgagccccgcggaagccgcgcgagacgctgagctagtcattgtgctcagtgacacggatggggttgatgagctgttcttcggacctgaggggatagtgaaaggactgtgctcgggtgctgttgtattgattcgatcaacaatgctgcctagtcatctggagaagttgaatcagaagcttgcagatgagaagaagaatgcccttcttgatggatacatttttagtggtttatctgatgaattaaagcaaaagattgttgttgttgcatctgggagacatgatgttacagaaagaaccgggcaattcttctctggtcttgatacagcagtttactttgttgaaggtgaatttggcagtagcagcaaaattaagctggttaatgatttgctggagagcattcattttatagcatctattgaagcaatgtttcttggtgttcgggctgggattcatccatcaattatctatgacataatatcgaatgctgccggaagctcaagaatattcgtggagatcgtaccaaagcttttgagagaggattctttgcttattgattatctagagtcatccaagacaaacgcaggctatgtgatggatatggctaaagcagtaatattccctttgccacttgtagctgtttcttatcaacaattaatacatggttgttcatcagcaaatggagatgcattagtctcaccgttgaaggtttgggaacagtcatttggagtaaacatcatagatgctgccagtcaacaaatctacgatgcaagcaaattagctgaccagcttgttatggcatgtaaaacagcaaaaactatcggctttattggtcttggagctatgggctttggaatggcatctcatttgctaaaatcaggtttctccgttattgcttatgatgtatacaagccaacactggccaggtttactgatttaggtggattgactaaagattctcctgaggaagtatcaaaagatgtggaaatacttgttatcatggttgcaaatgaagttcaagctgaaaatgttctatatggaaatgctggtgctgtatcagtaatggccgctggaacatccatcatcctatcttcaacagtttctcctggatttgtgattaaactcaaggaaagattagaagctgaatgccgagacataaagttggttgatgctccggtgtctggtggtgtcaaaagggcagcagaggggacattaacaacaaacatgcagaaattggtccatgactgtagtatattttatgtaacagcactaagtgagaagctttatgtcatcaaaggaggatgtggagctgcaagttctgtaaagatggtaaaccaacttcttgctggggttcatatagcctcagcagctgaagcaatggcatttggtgctcgattaaatttgaggacaaggagactttttgaaattattcaacatgcaagaggttattcatggatgtttggaaatcgtgtgccacacatgcttgataatgattatactccttattctgcagtggacatatttgtcaaggatcttggtatagtatctcatgaaagctccaacgcaaggatcccactgcatgtctctagtattgctcatcaactttttctttcaggttctgcttctggatggggtcgatttgatgatgctgctgttgtgaaggtttatgagacattaactggagtaaaagttgaagggaggcctcccatgcttaacaaagaagatgttctgagttctcttcctgctgaatggccagaagatcccatggatgatcttgtttcatctgcatctcataatagcaaaaaaattcttgtggttttggatgatgatccaactggaacccagacagttcatgatatagaagttttaactgaatgtgccataagcctcacttggaaattaaactgcaggcctgttgaagcccttgcagaacagtttcaaaagctaccagcttgcttttttattttgacaaactcccgttcaatgactgcggaaaaggctacactattagtaaaagatatctgcagaaatcttgaagctgcagctaagtctgtccctggtgttagctatacagtggtattgagaggggattccactttacgtggccatttcccagaggaagccgatgcagtcgtttcagtgttaggtgagatggatgcttggataatatgcccatttttccttcaaggtggccgctacactattgatgacattcactatgttgcagattctgacagattaattcctgctggtgaaactgagtttgcaaaggatgcagcttttggctataaatcttccaatctcagacagtgggttgaagagaagacaaaaggacggatttctgagaaccaagtttcaacaatttctgttaatctcctacgtaaagagggaccgaatgcagtctgccagcatctctgtagtttgaagaagggttctgcatgtattgtcaatgctgctagtgagagggacatgtctgtgtttgctgctggaatgatccaggctgaattgaaaggaaagagatttctgtgccgcacagctgcaagttttgtaagtgctagaattgcaataaagccaaagccacctattcgtccaactgacctaggtttaaaaagagctttaactggaggcctcattgttgttggctcttatgtgccaaaaactacaaagcaggttgatgaacttaggtcacagtgtgagcaatctctccgaataatagaggtatctgttgagatgatttcaatgaaatcggctgaggatagagaccatgaaattagccgagttattgaattgggaaatgcttatatacaatccaggaaagacactctagttgtcaccagccgccaactcatcacaggaaaaactcctgaagaaagcttagaaattaattacaaagtgagctcagccctagtggagattgtgagagggattggcagtcgaccccgttatattcttgcaaagggaggaatcacttcatccgatcttgctacgaaggctttggaagctcggcgtgccaaagtaatgggacaagctttagctggtgtccctttatggcagcttggtcctgagagtagacatcctggtgtcccttacattgtttttcctgagaatggtggttatgccattggtgctttcaatgtatataaccttgagggaattgatgctgtcgtttcagctgccgaagccgaaaaaagtcctgctattctgcaggttcatcccagtgccctgaagcaaggtggagttccattggtctcatgttgcattgctgctgcagaacacgctagtgtacctatcaccgttcattatgaccatggaacttccaagtctgatttgcttcaagctcttgagatgggttttgattcaatcatggtggacggatcacatctacctttagggaagaacatcttatacacaaggagcatatcttccttggctcattcaaaaggcatgcttgtagaagctgaactggggagactctcaggcactgaagatggcttgacagtcgaagaatacgaagcaagatttactgatgttgctcaggccttggaattcattgatgaaactggtatcgattctctagcagtatgtattggaaatgttcatggaaaatatccccccagtggaccaaatctcagatttgacttgctagaggaccttcgtgcattgacaatgaagaaaggtgttagcttggttctccatggagcatccggactgcctcatgaacttgtaaaggaatgcatagctttgggggtgaggaaattcaacgtgaacacggaggtccgaaacagctaccttgaatcccttaaaaggccagaaaaggacctgattcatgtcatggcatctgctaaggaagcaatgaaagctgttgtggctgagaaaatgcgcctgttcggttcatctgggaaagcttgagttcaagttgcatcgccacttatgaacactccatgaacacttaattctggaggcatgattggtccgtgggattaagacatcttgatagactgcagtggagcccagcccataatctgaagaactcattaccgactcttggctgaagtgcttcggagtgattgatgccattctgtcatgtgatcaagttcatgtccatactacatacgtcgtctggtcctttagagcaacatgacttcaggacgttgctatcaacggctattgatgataaactagtaataaaatttgtcgatgaaattacttgccgtgataaaaaaaaaaaaaaaaa

SEQ ID NO: 61151 - DNA, 2579 bp, Oryza sativa
  unsure (1)..(2579): unsure at all n locations
  Clone ID: PAT_MRT4530_62611C.1
atggtgattagtaggacattggtggtaaggggttttgatgaactttgggagacgattcggccggttttggtttcatcagatggtccagcttccatgagcaaaaatggactgttgcttgttgtttcggaggagttttggattggcaaggtttggtgggtgagcggtgatcgcatttgggggttggagatgaaggaggtgggggaggtggaggaggtgaggtgcttggacccgcagctatggcacgcgtgcgcgggcgggatggtgcagatgccggcgccgcgttcccgggtgtactacttcgcgcagggccacgccgagcacgccgacggcggaggcggggcggcggcggcggccgcggagctggggccgcgcgcgctcccgccgctcgtgctctgccgcgtcgaaggggtccagttcctggccgatcgggactccgacgaggtgtacgccaagatccgcctcgcgccggtcgcccccggggaggccgagttccgggagcccgacgagctctgcccgctcggcgccgccggcgacgcggcggagccgtcgccggagaagccgacctcgttcgccaagacgctcacgcagtccgacgccaacaacggcggcggcttctcggtgccccgctactgcgccgagaccatcttccccaagctggactacagggccgacccgccggtgcagacggtgctcgccaaggacgtccacggcgtggtctggaagttccgccacatctaccgcggcacgccgcgccggcatttgctcaccaccgggtggagcacgttcgtgaaccagaagaagctcgtcgcgggggactcgatcgtgttcctgcgcaccaggcacggggagctctgcgtcgggatacggcgggcgaagcggatggcgtgcggggggatggagtgcatgtcggggtggaacgcgccgggctatggcggcggcggcttctcggcgttcttaaaggaggaggagagtaagctgatgaagggccatggtggtggtgggtacatgaagggcaaggggaaggtgaggatggccgatgtcgtggaggccgctagcctcgcgtcgagcgggcagccgttcgaggtggcgtactacccgagggctagcaccccggattttgtcgtgaaggctgcgtcggtgcaggccgcaatgaggatccagtggtgctccgggatgaggttcaagatggcttttgagacagaggattcatcaaggattagctggtttatggggacaatatcttctgttcaggttgctgatcccaacagatggccgttggcgccgggtaaacgagctccggtgacatgggatgaaccggacctgttgcagaatgtgaaatgtgtcagcccatggcttgtggagcttgtgtcaagtattccaccaatccatttaggaccattttcgtcacctcgaaagaagttgcgggttcccccacatcctgacttcccatttgagggtcatcttctgaacccaattttccatgggaacccacttggtcctagcaacagcccactatgctgttacccggacaccgctcctgcaggcatacagggagccaggcatgctcaatttggtttaccactaacagaccaccagcttaacaagctgcaccttggtctgttacatagcggcagttttaacagacttgatgctattactccaccttcccggatatcaaagggctttgtggtcagtagtgcaccagcccatgacaatatctcttgtttgttgtcaatcagtacaccacaggtcgcagagaaatctgatgacagaaagacgacaccccatataatgctgtttggaaaggctatatttactgagcagcagataacttcaagcggatcaacagagacactctcccctggagttactggaaatagctcacctaatggcaatgcgcacaagacaggaaatgcatctgatggttctggttcatcaatttgcattggtttctcatctcaaggtcacgaggcttctgaccttggtttagaagctggtcactgcaaggtatttatggaatcggaggacgttggtcgcaccattgatttgtctgtctttgggtcatacgaagaactgtatggtcggctggctgacatgttcggaatcgagaaagaagaaatcataaaccatcttcatttccgtgacgcagctggtgtagtcaagcatccgggtgaggtaccattcaggtgattcatgaaagcggcacggaggcttacaataatagccggcgacagggagagaattgagagacctctcatcgaatgcttagttgagcaggcgtgatagttcaataaactcccgtttgaatttaattctgaaatatgaatcgtagcgtgaaaagacttcctttgttacatgtacttgcgttgggctgttaactaagcagacctgctttgtattgtcagtgttgtggattgctcaagttaaggtgtgtgtgtttttatcttgccccncggtctgctctccaagctcgcagccgacgcggtgttggtacacaccccctcctctgtgaatgccatctccgccctatgcgaggcgactggtgccantgtggccaaaattgcttactctgtggggaa

SEQ ID NO: 61152 - DNA, 414 bp, Oryza sativa
  Clone ID: PAT_MRT4530_62612C.1
ttcccttcacagccacatgaagatagtgttcaagcattaatctctagccaacttgaagttggcagaccaggatacatgcatggtacttcctccactcaggacgtccatttcatgaacgcaacggaacgccatatttgccattccatcaacctcaacatctatgagttcaggagtgaaaagagccccaggagctcaaaaccgttcagtgcccactttgattatattatgatgaggatgttaggtcccgatcatccaataggtattgataactatcaatttggcggaaacttgactcacactcttgagccccgcaatcgtagcaccacgtctcctctggttatcaaccgtgccaaaaccgttgacctcgccgagaaggctgatccctgcaagcgaatcgaagaacacaaatgcata

SEQ ID NO: 61153 - DNA, 2086 bp, Oryza sativa
  Clone ID: PAT_MRT4530_62613C.1
tcggcgcgcggctcagtcttgcttgcctctctgcgtgatcccgatctgcagagctcgccgccggcgagctaagccccggaggcgcgcgcgtggacgggcccccccttctcctccgagcagcggccaccggtggccgccgccgccatctcggtctcgaatcgaggtggacagaaaaaagtcatcagctttctgcatgcgatttggtagatactgacacgtcttgattctgctcaaggaaggcagctgattgattggttgggagggcaaactaaaaggggtgtaatcttggccaattcgatagaaaaacacagagatttagtggcgagaatggattggctgtccgcgaacctgcaggtgaaccctcaggtgactgtccatggggactgggtgtcagcagtcatgccgctgatgaagctgctgtgcttgacggtcatcggccttgtgctgtccaacccgaggacgcagatcatccccaaggccaccttcaagctcctgagcaagctcgtctttgcgctgttcctgccatgcctgatctttgtccaccttggccagtcggtcacaattcagaacatcctcgactggtggttcatcccggtcaacgtgctcatcagcacggccatcgggtgcattcttgggtacatcgtcgcgctgatctgtcgcccgccgccgcagtttttcaggttcacggtgatcatgaccggatttggcaacacgggtaacctcccaatcgcgatcatcgggtcggtttgccataccacggatcacccctttggtcctggatgccaccgcaagggtgtcgcttatgtttcgtttgctcaatgggtcgctgttattcttgtctacaccttggtttaccatatgatggagccaccgatgcaattctacgagattgtaggcgaagggaacgagattgtggaagagcctgcacagatcagcaactacagtagatctctgcttcatgaagcggaatggccagggatggctgacaaagaaacggagcactcaaagacgccattcattgcacgggttttcatgagtatttcaggctcttcacagaatacatttcctgatattgattttgcagaagagggcacttctggtgctggacctagcagtccaaaatcgctaaggtgtttggcggagccaaaggttgtaaggaggatcagggttgtagctgagaagactccaattcagcatgttctccagccaccaaccatcgcctccttgctcgccattgtcatcggcatggttcctttgttcaaagattttgtgtttgtgcctgatgcaccactgtcgttctttacagacagtttggagattctagctcaagccgttgtaccctcggtgatgttaattctagggggcatgcttgcagaaggacccaaggataatgccttgggtatccggactatcactggtataattgttgcaaggctcctgattctcccgtgcattggcatcggtgtcgtcctgctggcagatcggttgcatctgcttgtcgaggaagaccacatgtaccgctttgtgctgtcgctacagtactccacccctagtgccatcctgcttggagcgattgcgagcctcagaggttatgctgtcaaggaagcatcggcacttctattctggcagcacatttgtgcggtgctatctctttccatctacctgatcgtatatttcaggttgcttaccatttgaaagatgacggccggccgccttccaaaattggtttgtagcattcatcctcggaagtgatttctagggagatgggtacttgaatggattttcaaccacgtctccttatggtcaagtgtatttatagtatatttaattttttttagcgatttatatttcagatacatgtagaacttgagaacatgagatatgttcttgtcgttcattagtgtcaatatattgctgttcgcttgcacatttcttgatccgattacagcattacagttgctgctcaaaagttgtacaagtactgctacattagaagtcaatatattgctgtttgatgcagtgatgcttaaataaaaaaaaaaaaaaagattcaatgtatgtaatttgttacgcgatttgtatttcc

SEQ ID NO: 61154 - DNA, 428 bp, Oryza sativa
  Clone ID: PAT_MRT4530_62614C.1
gtacatagtacatactacatacaagcacacaccaccaatggttccagatcatacaggtttcttggtttatcaggatgagataggggagggccctatctgaagaagatgatgatgatgggataatgtgagggatggatttgtggcgatctgatgactccgtctgctccttctccgtgccgctgtatcgtagataaattgatcatgtcgaccttatctgtttgtgattgtggtaggatccatatgatcagaggtccgttgatctcactcacacccttctttttttgtccttttattttttatttccttcttttttgttcttcgaatatgtacatcgatgttgccccctgtgagggaatgatggtcagaaggagacatcgttcctcttcattctgaaataaaagtgaaagtaataaaaaaaaaaaaaaaaa

SEQ ID NO: 61155 - DNA, 448 bp, Oryza sativa
  Clone ID: PAT_MRT4530_62615C.1
tttttgttttttttttgatccccacaggccagaaaggctccatcactataggctatcctctcttcacagatctggccatctggcagactaatgattgcaccataaaattttcgatctacacaagcgctgcattttgtacagggtggagggggaaaaaagaaacaaaaaaaaaaagaagaaagaggaagcaaagactgatatggatctagtggacagctagctagagagacagcacttatgcaagaaaaaaaaaacacaattgtttgctcttcagcacacactggccatctagcacacaagcaaccgagcacaatcatctacaaaaactagcctttgagacaagtacaatgcaagaggatggtcacaatttgagacagagacgagagttccatgtgtgttttggctgagtcccatataatgtaactcattgcttctgcttggaatcggc

SEQ ID NO: 61156 - DNA, 184 bp, Oryza sativa
  Clone ID: PAT_MRT4530_62616C.1
acaagactgctaaaaaaactcaacaataaaacatttcgttgaagtctgtaacgaggaacacccccaacccgcattgattgcagacaacacaacccaaaatctgagaagagggctcaaacctgagaaaaggacacacgcataagaaacataaatgccgaagaacaaccccaaaaaaggagcaaaa

SEQ ID NO: 61157 - DNA, 207 bp, Oryza sativa
  Clone ID: PAT_MRT4530_62617C.1
aggcgaagagagcgcctcatagactgctgcccctaggtggctgcgagctgcgcccaacttgcataggaaggactgtgttttgggagggtggccctgtaaccccagcggatgcctctgcttgctgagcttgccctgtgcaagcactagcctgtcgtgagccgaaccctgtgcggatgcttgtgatgcggatgtctgcgtctgcgctgc

SEQ ID NO: 61158 - DNA, 348 bp, Oryza sativa
  Clone ID: PAT_MRT4530_62618C.1
gagctggatgaggcgccgaaggaggagttggccgcagtgttgggggagcccgacaggatgacggagttaattggagggggtggtcaagccggtcctaagccgaatttagccgcctccatcttggttctggaagaagaaggccgacgaaagtggagttggggagttgaggagttggaggtgcaggtggccgggaggttggccggaggggcacaacaggtgtcaattggtgaaattgccgcattgaggggtcgttcgttgttgcagatatgcttgttggatagccgcgggacacgaagatcagcggtgtggtcagtgacctggttgacggcaagggttcttcccgactag

SEQ ID NO: 61159 - DNA, 243 bp, Oryza sativa
  Clone ID: PAT_MRT4530_62619C.1
ggcacgagcgatcgtcagctacctaagtgacaagtagtggaggagcagttctgctaccacgtccagcagctcgcacaccaggttcactgacagaccattagccgtgtcagactgtatatccagcagctgcgtctccaccagtctgctagcggctactgcagtcatagccacggtttggtccacgactatgaggacccttaacattccgtgaaagacgcagtgtcaaccctagtacacagctgc

SEQ ID NO: 61160 - DNA, 154 bp, Oryza sativa
  Clone ID: PAT_MRT4530_6261C.1
ctcctccaactcgttagagtcggctaaggtagcgcccgagcccaccacagagggaatgcaattgaaggagagacttggctctaacttcattagtggcatgaatcaagggccagacccatgggatgctgatgttggacagctgcacccgagttag

SEQ ID NO: 61161 - DNA, 183 bp, Oryza sativa
  Clone ID: PAT_MRT4530_62620C.1
atgcggtacacgatgtggcagacgaaggccgctgccacctccccggcgagcccagccgctagcccgacgccaccaccgccaccggagagatcagctgacatgaggccgatgccaccgaaggggcacttcttcatcccgcacccgcacttccttgtaccaggcggctacgccgaccaccactag

SEQ ID NO: 61162 - DNA, 179 bp, Oryza sativa
  Clone ID: PAT_MRT4530_62621C.1
aggatgcatgcactgttcctcgtctttttgcccgtgaaaacggagggctcatccatcacggtggaggttgaggcgcttgtgatccaagggcccaagctgggcaccgtcctcagccaggtgaagaagctggatgcatctgtgctggtgctgagccaatgcaagccatctcctttctgctg

SEQ ID NO: 61163 - DNA, 136 bp, Oryza sativa
  Clone ID: PAT_MRT4530_62622C.1
atggagcggggtgggccctgcgacggcctctgtcgcttccggattcacctagagttcgagtatgtgtcagatggaggtttctccgagaacacagccaggatgctgcaacaagtcccaccgaacagctccacttcag

SEQ ID NO: 61164 - DNA, 528 bp, Oryza sativa
  Clone ID: PAT_MRT4530_62623C.1
ggaaacaaaaggagaccatcatcctcctttatattccccctccttaattaaatcatcacaaaaaaatcatatatttaccccgggaggcagaaggggggggggggacaaaaagtcggagcagtaaaaaaataaatccaaaaggggaatttacaaagcaagcaagcattaggggttataaatccccttcaataaaggcccccccctccttaatcaacggcgaggggggtagggctggggtttggggggggccccctccccggggggcttggcgtccatgacggtctcaaaggcgccgacaagcgccttcaccctggtggactggcgtttttccaggagcttgctccgcgcctcctcgatcacgtggttgttccgccgggccatttcccgcgggggagggtggtcctcctccgaccttttttccatggccggtttcaccctgctccccttgaacctccgaaccatctcgtcgccgtcggggttgtcgtcacgctgctttttgatcgcctccttaaccaccgccacaaactt

SEQ ID NO: 61165 - DNA, 233 bp, Oryza sativa
  Clone ID: PAT_MRT4530_62624C.1
ttggagtcgactgggggagagtggcgcctgatcacttcatccaggggcaaggaggatgcagtccacaactttgtctcggttgtggtaccggatacggagtcgtgcaggcacttttttcaacctggggtaagagactcccttgggatataccgaagctgcgtgagaactacaggggacggaatctaggaagacatactctcatggtcctgccgtggatccaaagaacccaccca

SEQ ID NO: 61166 - DNA, 229 bp, Oryza sativa
  Clone ID: PAT_MRT4530_62625C.1
tttttcctttcatcaagagcaagaggtactttttcacccatattgaatgtaattgttctcactcaacacccatttgctttattcgtgacatttgtattacgttcaataacgcacatagagagtagctgacccagaatgatttgactaagtttacaagccctctttcaccatcattttattcttttagtgtgaacccttgtaagattcacagcttgctgagttctgagcc

SEQ ID NO: 61167 - DNA, 531 bp, Oryza sativa
  Clone ID: PAT_MRT4530_62626C.1
atggtggccaccatcccgctccacctccgctggcgtatcgacctcgtccactgcctttgtggctttgtgcccacaaccagctctgaggcatcgatcaccatgagcaacagcggcagcggcactagcaacatcaaggatgagatcgacgcggcgttcgcggcgggagcaatgccgccggagtggcggccgaggctgctggcgtcgcagcgactgggcgagggcgacgtcgacaggatcgcggcggccatcgccgaggttcacgcgacctaccaatacgtcgggtcgaccaaggggaacatcggttatgtggcgtttttgttcgtcctcggtgtgctgttcttatgcgtggctggccttttcttccgcgaaaacaactacttgaatggagcgttagccgtgcttgtggccgtggccttcatagtgatcattcctatgataatcttgctttatgagttccatcgatggagggccaatatgctaatggcgcaaacacgaactgtcctcgagcgctttctgcttccacctgtttaa

SEQ ID NO: 61168 - DNA, 2457 bp, Oryza sativa
  Clone ID: PAT_MRT4530_62627C.1
atggctgacactcgcggtgagctcggcgaccccgtcaccgaccagcaacttgtccttgcaatgatcggtggtttaaaccctaaatatgaaattctccaaactattattcctctgcagtgtcccttcccgatgttcgtcgaagcccggatcgagctgcccctcagcctcgcgctggacaggcctggcccactcctcagcacccctgggtcggcacgattcaaatgtggctgggcggcccgatgctgcgtgctccagggattttgggccctcggcccacttctccttttgcgggcgtggcaatgtccggtgggcaagctgccctcccgcagccggacacagtttgctacacccattcgcaacatccaatgcgacaatggtcacgagtttgataactccgccgctcgatctttcttcctcaccaacggcgtcgccatgcgcatttcctgcccacacacctcgccccaaaagggtaaagctgagcgtactcatcgttctcttaataacattgtacgctcgcttctatttcaggctcacctccccggctcattatgggttgagtctcacccaaccaaaactttagcccaacacactccctacttcgcccttcacggtgtccacccctcatacacacatctttgcgtctttggttgtcgttaccccaacctatccgccaccgcaccccacaaactctcgccacattccaccaagtgtgtgttcttggataccctagcgaacgtaagagataccggctccaattggctccaatcgctcggggaaggctgcctccacttctcttgggcccaccggcgcatgcatcgatcggccgacccctccctgcttgccgggctgggctgggcgcctctctcctgggccggcacctgcggcctcatctccgacggcccatggggtctctactttagggccagcttctccggctcgccgtcgccactcgcggtaccgacgtgcgccagaagcgcccgcgccctagttacatggccaccggttacaggcttcggcatctctcccatcgacaacaaccacgccatggtgacaaggggcaaggctggcgtccgggttgccacttcacgcctgaacctccatgccgccactctctccctgatacctcgcacctaccatgctgcgctcgccgacaccaactggcgtgatgccatgcaagaggagtactcggcaccgatgtcaaattgcacttgggaccttgtgcctcttccaccgggcacaaacatcgccaccggcaagtggatctttcgtcacaagttcctcgccgatgggagtttggaccgctacaaggcgcggtgggtcctctgctgcttctctcagtgccccggcatcgtcttcgacgagacctttagccccatcatcaagccagctacagtctgcacagtgcttagcttggcagtctctcgtaactggcctatccatcagctcgatgtgaagaatgcttttctccatggcaccctcgcagagacagtgttatgcatgcagccatctgggtttgttgatcctgctcagcccaactctgtttgtcgcctgaacaagtctttgtatgggcttaagcaagctccttgcgcctggtacagtcggttcgccacttttctccgctccgttgggtttgttgaagccaaggcatatacttctctatttatttgtcgacgtggaggtgatgtggcctacctcttattatatgttgatgacattgttctcactgcttcgtcgacatcgctgcttcactggacaatctcttctcttcagtctgagttcagtatgaaggaccttggtgagctccatcactttctcggtgtttcagtctctcgccattccttcggcttgtttctcactcaacggcagtatggcttggagatattggagcgtgtagctctcaagcggattcttcgctatgttcgaggcaccctggatcttggtctccacattcgtcactcagcctcacatgatttggttgtctactctgacaccgactgggccagttgtcctgacactcgcaagttcacctcgggatatgctgtgtttttgggagataatcttgtttcttggtcctccaagcaccagactatggtttcctgttcgagtgcagaggctgagtatagagttgttgccaacgctgttgccgagacatgttggttgcgccagcttctccatgagcttcatgctcctccagtcaaggctactctggtctactgtgacaatgtcagcatagtttatctcttgactaacccggtgcaacgccagcgcacgaaacatgttgagattgatctacactttgttcgtgagaaggtcgccattggttccgttcgcgctcttaatgtgctcacacattatgctgacatcttcaccaagggtcttccaactccagtcttcacagagtttcggtccagcctaaacgtttgttcgaacgacgttcagtctgcgggggcgtgttag

SEQ ID NO: 61169 - DNA, 2958 bp, Oryza sativa
  Clone ID: PAT_MRT4530_62628C.1
atgcccttcatgcccaggcggtgtctgttctcaatgtcaaggtgcttgtccccgtcgtcctcgaccttggcgccgcaaattaccaaatatgccctcaccgaccacgtcctctctgacgacgcttttcctcatcatgcgtcctgggctcggacggattgtgtcgtgctctcgtggctctatgggaccatcgccaccgacctcctggagaccatcattcagcctgatggcggcggcaacacacaaggtggcggcggcaacaacaaaaatcgctgtcgacgcaacgggaacgggggcggcaccgccggcggcaatggcggcgccgctcagggcacatgtggccaaagcgtagggcaggctgcccctcagcctcgcgctggacaggcctggcccactcctcagcacccctgggtcggcacgattcaaatgtggctgggcggcccgatgctgcgtgctccagggattttgggccctcggcccacttctccttttgcgggcgtggcaatgtccggtgggcaagctgccctcccgcagccggtctcccaggccggcccttaccttccagccggcctcactcagcagcaacaacaactgcagccatcggcccaaccaacgtcctgtcttgtttcacctaacattatcaaaaacctaatctctgtttgtcggtttgtcactgacaacaatctctccattgagtttgacaagtttggtttcactatgaaggatctacttaccaggaccgtgatcgccaggacacagtttgctacacccattcgcaacatccaatgcgacaatggtcacgagtttgataactccgccgctcgatctttcttcctcaccaacggcgtcgccatgcgcatttcctgcccacacacctcgccccaaaagggtaaagctgagcgtactcatcgttctcttaataacattgtacgctcgcttctatttcaggctcacctccccggctcattatgggttgagtctcacccaaccaaaactttagcccaacacactccctacttcgcccttcacggtgtccacccctcatacacacatctttgcgtctttggttgtcgttaccccaacctatccgccaccgcaccccacaaactctcgccacattccaccaagtgtgtgttcttggataccctagcgaacgctccaattggctccaatcgctcggggaaggctgcctccacttctcttgggcccaccggcgcatgcatcgatcggccgacccctccctgcttgccgggctgggctgggcgcctctctcctgggccggcacctgcggcctcatctccgacggcccatggggtctctactttagggccagcttctccggctcggtctgcccacgatgatgccatcttggcccatgacggcgctcctcatgtccacgacggcgcttcctccctggctcatgacggcgcaccttccccagctcatgacggcgcgtccagcttcggcatctctcccatcgacaacaaccacgccatggtgacaaggggcaaggctggcgtccgggttgccacttcacgcctgaacctccatgccgccactctctccctgatacctcgcacctaccatgctgcgctcgccgacaccaactggcgtgatgccatgcaagaggagtactcggcaccgatgtcaaattgcacttgggaccttgtgcctcttccaccgggcacaaacatcgccaccggcaagtggatctttcgtcacaagttcctcgccgatgggagtttggaccgctacaaggcgcggtgggtcctctgctgcttctctcagtgccccggcatcgtcttcgacgagacctttagccccatcatcaagccagctacagtctgcacagtgcttagcttggcagtctctcgtaactggcctatccatcagctcgatgtgaagaatgcttttctccatggcaccctcgcagagacagtgttatgcatgcagccatctgggtttgttgatcctgctcagcccaactctgtttgtcgcctgaacaagtctttgtatgggcttaagcaagctccttgcgcctggtacagtcggttcgccacttttctccgctccgttgggtttgttgaagccaaggcatatacttctctatttatttgtcgacgtggaggtgatgtggcctacctcttattatatgttgatgacattgttctcactgcttcgtcgacatcgctgcttcactggacaatctcttctcttcagtctgagttcagtatgaaggaccttggtgagctccatcactttctcggtgtttcagtctctcgccattccttcggcttgtttctcactcaacggcagtatggcttggagatattggagcgttatgctgttcagcagatttgcctccacatgcatgatcctcgagagtctcatctcatagctctcaagcggattcttcgctatgttcgaggcaccctggatcttggtctccacattcgtcactcagcctcacatgatttggttgtctactctgacaccgactgggccagttgtcctgacactcgcaagttcacctcgggatatgctgtgtttttgggagataatcttgtttcttggtcctccaagcaccagactatggtttcctgttcgagtgcagaggctgagtatagagttgttgccaacgctgttgccgagacatgttggttgcgccagcttctccatgagcttcatgctcctccagtcaaggctactctggtctactgtgacaatgtcagcatagtttatctcttgactaacccggtgcaacgccagcgcacgaaacatgttgagattgatctacactttgttcgtgagaaggtcgccattggttccgttcgcgctcttaatgtgctcacacattatgctgacatcttcaccaagggtcttccaactccagtcttcacagagtttcggtccagcctaaacgtttgttcgaacgacgttcagtctgcgggggcgtgttag

SEQ ID NO: 61170 - DNA, 501 bp, Oryza sativa
  Clone ID: PAT_MRT4530_62629C.1
atggcgacagcggtggagaggagaagggggcggcggttgatggggaggaggacgtggcggcggtggcgggaggaggcgatgcgacggagagggctcatggcgagccggcagaggcgggtggaggcgcggcgacgtgacgcgactcactggagaaggggacggggaaggaggacggtgatggagggggctcacaaggcaccgatagcgggggaggcggacggcgacgaagggggctcacaagccggcgtggagacgtgggcgggggagaaggcagcgagggcagcgaagaagggcttcgacggagggagcggagaaggcgacggcgctggagggggaggagacgccaggacgggcgacggaggcggcgagggagatgaacggcgacggagtagaaagcaccggagtgggactcatacgaaccggggtagagataaggattatcttctaccaacaccagagagggcaggacgagacatttatatgcatgcaaacatagattga

SEQ ID NO: 61171 - DNA, 1504 bp, Oryza sativa
  Clone ID: PAT_MRT4530_6262C.1
atgccgccgccgccgccgacgccgccgccatcgccaccggtgcgcgtggtgtcgacgcgcacggtgaagccatcgcggccacggccgcgggagcgcatcccgctcaccacctgggacgtgtccctcctcgccgccgactacatccagaagggcctcctcttccggccaccgcccgccactctccacctcgtcgaacatctcgccgccgccctcgccgacgcgctccacgtgtactaccccgtcgccggccgcttcgccaccgacaagcaccccggcggcggctgctccgtctccatcgactgcgacggccagggcgcccagatcgtccacgccgtcgccgatggcgtctccaccgctgacatcctccctcccgacgtcgatgtcccgagtggcatcgtccgctccttcttccctctcgatgaggctgtcaactacgatggccatgagctcccgctcttcgtcgtccaggtcaccgagctcgtcgatggcggcgtcttccttgggttcgtgtacaaccacgcgctctccgatggcaccgccttctgggacttcctcaacgcctgggccgagatcgcgcgcgctaagctcgagaacgcggtggcgacgtcgcgcgcgcctctcctggagcgttggtcgcccgacggcggcgcggcggcgccggtggtgctcccttacgacgacctggcggggctcatcgcgaggacaacgacgacgacacctccgctgctgcgcgagcggatgctgcacttctcggcggagtcactggcggcgctcaaggagcgcgcgcggtgggagctcctcgccgccggggacgcagccggcgcggccgccgtgacgaggttccaggcgctgagctcgctgctatggcggtgcgtcacccgcgcgcggcggctggcgccgggccgggaggtggtgttccgcgcgtcggtcaacagccgcggccgcctccgcccgccgctgccaccggagtacttcgggaacagcatcctccccgcgtcgacggaggcggtgccggcgtcggagctcctggcgcgcgggcacgggtgggcggccgccgccgtgggccccgcggtggccgcgcacaccgacgagcgcattcgctcgcgctcggcggcggcgccgtctgtgtcggcgttcaggctgttcgacgcgagcggcgtggtcgtgagcagctcgccgcggttcgacatgtacgggtgccaactctggtgggggaaggcggtggcggcgaggagcggcaaggggaacaagtacgacgggaaggtgtcgctgttcccggggcgggacggcggcggcggcggcggcatcgacgccgaggtggagctggcgccggagcacatggcggcgctggaggaggacggcgagttctgggccgccgtcacgccggaccacctgctgctggtcaacgacaacaacgacaaagcttgagatcttacactccctaatttttatattattttttttattcttctctcttctctattctctattctgttatgcctgg

SEQ ID NO: 61172 - DNA, 1185 bp, Oryza sativa
  Clone ID: PAT_MRT4530_62630C.1
cgcggtgtgcaaactccagactcccccaaaaaatcccccaaaaccgaagggaaagaggaaaaaaattactcttcgctctcgcgtcgcgcacgacacgaccgagccagcaaagccgcccatccgccatcccgccgctcctgcaatctacagccgcgtcgccgctcgtccgcctgcgctcgttctcgctagggttcggaagggggagggtggggatcgcccggcgatggactggagcgcggtgacggcggaggacctggtggacgcgctgcgggaggtggactggtcgacgccgccgcgccccgtgccggagttcttctcccgcttcaccgtcccccgctcctactccaagtggaccagccgcctcaagtgcaacctctactactacaggacaaattacttcatcttgatcatgttcatccttgggataggcttcatttggaagccggttgctatacttgcagcctttatgactggaatcagcattgcatttcttaatgacagctttgcagtcactttcaatgagaaagtcacgaggactgtcagacaattttcaccacatttagctgcaaaaatgaggccaccaataacccctgttcttcgtggtagaccaagttcaaagaggtcgattcatatttgtgggcgacctcgctggctatttgtgctgttattttctgcagttagttgcatgctctggttgacttcctgcagtctcctcacagttctatgggcccttttaattgctatctttgcaactctgcttcatgctagcttcagaacacctaatctgaaagcacgtctgaatacattcagagaagaattccgagctgtttggaggaattatagtgagctttaaggttcatgtggtaagaagtgcttagtgctgaaacttcgtgctgtttgtgaattgtgtttgtgggagataccaagatatgaacaatggtgacaggcagctgcgttctattgtgattacttgctcgttttggaggtgggccttgactgtctaagtacatgatgatgttacacttggtacgccaccttccaaatcactataattgttcacatggaattctccctaaccaagcattggaaaaagaacagcatgtaaaggatgtaaacaagtattctaatcaacacagcatatattgtttgttgaaaaaaaaaaaaaaaaaaaaaaaaaaaaaaaaa

SEQ ID NO: 61173 - DNA, 617 bp, Oryza sativa
  Clone ID: PAT_MRT4530_62631C.1
caacaggtcgtgtaaccactgttgaagctaaagtgttattttttgtactgttaatcattgcttttttattggatttatcactcaatcaatacgcatttttgctttcatttgttgccgtggcattagcggttatttatccgtttatgaaacgttttacgcacttgcctcaagtcgtacttggtatggcttttggctggacgattcctatggcatatggtgcagtgattgaagatttgccgttaacatgttggttattatttttagctaatattttatggacagttgcttacgatacgcagtatgcaatggttgatcgtgatgatgatttacgtattggagttaaatcaaccgctattttattcgcacaatacaacaataaaattattgcgctattacaatttttgtcactcattttatttattctgtttgggtggttaagtgaatatcacattggttattttattgtattagccttaacttcaaccttatttatttatcaatgttggttaacaaaacaacgggttagagagcaatgttttaaagcattcttaaataataattactttggtttcggcattttcatcgcgattctagtgggcatttatggtttttaagtt

SEQ ID NO: 61174 - DNA, 1155 bp, Oryza sativa
  Clone ID: PAT_MRT4530_62632C.1
atgaagaacttcaaaaaacttgaaacagcatactttctcacaagatccaagttggcaaagcaagttgggaatcctgtaagcagttgccatcaagtcgtgaaaaggactactgggtcacctgttgtgactgagggaagttcaatagatgattttgctttggaagggcattatggtacaaggcaaagaggcttcgaccgggataaagagttctttgcaactgctggtgtaaataagaagataaaagtgtttgaatataatatgattgtaaatgaacattgtgatattcactatcctgtggttgagatgtctaatagatcaaaattaagttgtatttgctggaacagctacatgaagagccatatagcatctagcgactttgaaggtattgtacaggtttgggatgttactaggagccaagtttttgttgaaatgagggaacatgagaggcgtgtgtggtcggtggacttctcacttgcggacccaacaaaattggttagcgggagtgatgatggttcagtgaagctgtggaatatgaatcaggcaattttattcttgcacctggctgggagtgttggcactatcagaacaagagcaaatgtatgctctgtgcagtttcaacctgattctgctcgttccattgcaattggatcagcagatcacaaaatttactgctatgatcttcgaaacatacgagctccttattgtacgttagttggccacacaaaaacagttagctatgttaagtatgtggatgcatcaactatagtgtccgcatctactgacaactccttgaagctctgggacttgtccatgagtcaggcaaggataattgacagtccgcttcggacatttacaggtcatacaaacactaagaattttgttggactttctatatctgatggttacattgctactggctcagagacaaatgaggaatattttggctcacttaccttagtgcgcaaggtttttgtctaccacaaagcatttccaatgccagtcttggcatataaattcagtgtcacagacccaatatcaggccaggagattgacgatccatcacagttcatttcatgcgtgtgttggagagggcagtcctcaacgcttctttctgctaattccagcgggaacattaaaatcttagaaatggactga

SEQ ID NO: 61175 - DNA, 2313 bp, Oryza sativa
  Clone ID: PAT_MRT4530_62633C.1
atggagggctcccgtgtcgacgccggcgcgggcgggcggcggtggggggaaggggaggagggtggacgacgcggaagaggaggaggaagaggaggaggaggaggaggaacaggaggtggtggtggtggtggatggaggagaggcggggatgacgggggttaggtgagcctgcgggagtggctggaccggtcagggcgggccgtgggggcgccggagtgcttgtacgtgttcctcaagttggatgagtcggaggagatcgagcacgcgcaggggggcgccttgggccgcgcacggccttcctcagtcgtggggtggtccccgttcgcccgcgtttcgttcattgagtccgcctgcggctcggacgtctcgggctcctgttccagctccgaccgcaacaaagaggctgaccggaacccttgactcctcggcggagatggggagtcgccagcgttgtactttactttcgagactatggaggagaagatgcgagcaatcgcgaacctacggcaccgcgtcttcccttcacagctgctgctcatgtgcccctagcaagcatcattctgtcagttgttgatgcaccctgtgccggtgacccgaccgaagatgagtgatatgctacaaagtgagttccttaatcggtctagaaatagtctggaggagcgtgaagcagcacttcggttacgcgaagacatagaagaacaagaattactgctggattttcttctccaactacagagaagaaagcaagatatagcagacaatttgcaggacacagttgcatttctctcttctgacatcaatgaagcgcaccagcagtcagctctggggcagtgtggaaacttctcatttgagttggataaagaggtgtgctctgaaacagttgaagatcagagtgattgtggatccagaaaacgtttccgacctgagctaccagctgttgatatggaggaacagaatcgtagtcttgaagaatgttcgggaacagttccatcatctgtgctgatccaggaaagtgtgttgtctaaaagctccagactgatgaagaacttcaaaaaacttgaaacagcatactttctcacaagatccaagttggcaaagcaagttgggaatcctgtaagcagttgccatcaagtcgtgaaaaggactactgggtcacctgttgtgactgagggaagttcaatagatgattttgctttggaagggcattatggtacaaggcaaagaggttggatgaactcttttcttgagggattgtgtagttacttatcgttcagtaagttgaaagttaaggcagaactgaagcaatgtgatctgctgaactcatcaaacttagtatgctctgtaggcttcgaccgggataaagagttctttgcaactgctggtgtaaataagaagataaaagtgtttgaatataatatgattgtaaatgaacattgtgatattcactatcctgtggttgagatgtctaatagatcaaaattaagttgtatttgctggaacagctacatgaagagccatatagcatctagcgactttgaaggtattgtacaggtttgggatgttactaggagccaagtttttgttgaaatgagggaacatgagaggcgtgtgtggtcggtggacttctcacttgcggacccaacaaaattggttagcgggagtgatgatggttcagtgaagctgtggaatatgaatcaggcaattttattcttgcacctggctgggagtgttggcactatcagaacaagagcaaatgtatgctctgtgcagtttcaacctgattctgctcgttccattgcaattggatcagcagatcacaaaatttactgctatgatcttcgaaacatacgagctccttattgtacgttagttggccacacaaaaacagttagctatgttaagtatgtggatgcatcaactatagtgtccgcatctactgacaactccttgaagctctgggacttgtccatgagtcaggcaaggataattgacagtccgcttcggacatttacaggtcatacaaacactaagaattttgttggactttctatatctgatggttacattgctactggctcagagacaaatgaggaatattttggctcacttaccttagtgcgcaaggtttttgtctaccacaaagcatttccaatgccagtcttggcatataaattcagtgtcacagacccaatatcaggccaggagattgacgatccatcacagttcatttcatgcgtgtgttggagagggcagtcctcaacgcttctttctgctaattccagcgggaacattaaaatcttagaaatggactga

SEQ ID NO: 61176 - DNA, 852 bp, Oryza sativa
  Clone ID: PAT_MRT4530_62634C.1
atggcgtcgccgcggctgaagagggagcagtcgttcgacttcgaggaggcgagcgcgcaggaagccgtgggatccgcgtcggcgtcgtacagccctcccgggggcggcggcgtctttggcatctcgccgccggagtcctcgccgcgcgacggccggaagagaaggaaggatagaccatcattggtgaaacatacgttcacacctcattttgatggtcatttgtggaggaagtatggccagaagaacatcaaggactctgctttccctaggttatattacagatgctcttaccgtgaggacagacagtgccttgcctccaagctggtgcagcaggagaacgacgacgacccgccactgtacagggtcacctacacgtacgagcacacctgcaacaccacgcccgtcccgacccccgacgtcgtggccgagcagccgccgccgggcgccgccggcgacgcgtacctcctcaggttcggctcctccgctggcggcggcggcggcggcgctcatcagcagcagaccgagcgagaacgacagcagcaaaatacagcgagaagaaggccattcatgatgctgagcttcgattctagtagcagccatcagctgcacgagcagccgcacgcgttccctcccgacggccagctgccggccacggccgcggccgcgtcgccgtcgtcgttcacggcagccgaggcgttggcggcgccgccgctcacgacgacgatgaacgacggaggcgacctgttctcgacgtgggacgcgctcaggtatggtttggactatgaccacgggcaccttggtaaccatgtttatctccctgatgactgtaatggtggtgatgataattactga

SEQ ID NO: 61177 - DNA, 354 bp, Oryza sativa
  unsure (1)..(354): unsure at all n locations
  Clone ID: PAT_MRT4530_62635C.1
cggacggggntgtntnttttcgtggtagtacactatgagaattttccgaaatactatgtcctgctacatggttgctgaatacattcaagggcattgcactgtcttttgatgaagctccaaatcaaattcacatcttaatgcaatcaattatcaggtaatcatgtagttccttggcaagatcacattggtaggtaagttaaggtttgcaactgtggttgatgtcagcaggtcttgctattttccttttaatttagtttcagtcctctaatgtttttatcttgcacctgtcacttgctaaaattttattcagtttatatccctttaggaattttcaaacttaatgtggcctttcag

SEQ ID NO: 61178 - DNA, 436 bp, Oryza sativa
  unsure (1)..(436): unsure at all n locations
  Clone ID: PAT_MRT4530_62636C.1
caagaagtactcagacaaagaatgagagagcttggtgagctgcagagattgccccctacgtgatggcgtcgtctgccaccagcgtcgctcccttccaggggctcaagtccaccgtcgccatgcgcgtcgcccgccgttccggcaacttcagcttcggcaacgtcagcaatggcggcaggatcaggtgcatgcaagtgtggctgattgagggcatcaagaagtccgtgaccctctcctacctggcagcgttaaccgtggaggaccttctgangcgagatcgagtacctgaatacttccaagagggagccctgcctcgagttcagcaaggactgattcgtcaaccgcgagaaccacatatcctcnggnnactacgatagcaagatctggaccatatggtaggtagcctaatcagggtgcaccgacgccacccatgtgc

SEQ ID NO: 61179 - DNA, 625 bp, Oryza sativa
  Clone ID: PAT_MRT4530_62637C.1
cgggctgcaggaatcggcacgagggtctcgagttttttttttttgctcttgtctcgtgttttttttttttttttttgaataaaaaaaatattcatagataagcccactgcaaaatgttgtcggcaagtgtgctctataatgaacaccattgtaatatctgacacactacagcttatttacatattcgagtgcagaaaacaccgattgctattttagagatcaaacttcgccaccttgagtctgaaagatatgtaagttatacaaacaagatgtatgacaataacaacgacgatattgtttggatctacaaatggttgcttgtttcaatcaacttgaggcactttatgtaccaccaatccttcatttcttaccagtagtaagattgtagagatgtagctgttattgtcacggtggtatatagatatgggctatgcagtgagatggttatgcagtttagagaaatacaatatagctaagctcaataaaatataagcagtgagccccctcgaaacaaaaaagcagtcaatagtgttaggtatctggatgtttgcatacattgatttatgtgtacctaattttgtcaaaatcaaattgttgtgatcatgactgaatgttatatgacata

SEQ ID NO: 61180 - DNA, 338 bp, Oryza sativa
  Clone ID: PAT_MRT4530_62638C.1
acgcctccgtcacgcgtccgcccacgcttctgactaggaatagatcgcgagctgtcactctagagagtctcaggcttcaccatcaactgcatgtgacggactcagattactgtcgagcaaatcgacatagaataaagtggcgttcagtctacaacacagggactgcgacaaccgctgtcactactaaagtgattgcgtaccgcgatacattcccttgttcagagctcaactgataccgaactggacgacatgattcacgatgtcgatcatgagggcaatctgaatagcgaatgggacgcgctcttgaacgtggtattaaacgcgatggatgatacggt

SEQ ID NO: 61181 - DNA, 399 bp, Oryza sativa
  Clone ID: PAT_MRT4530_62639C.1
atggctaacagcaatggagacagaagccagccaccgcccactcccagcgtcaacctcccacactcactcactgcctcttactcgccgtcaccttctgcactcatcggtggcctcctcgccagcactgacaaccgtgctcaaccttcagcactcctcctgcctgctggtcgtctcctgaacaaggggtggatggtggcggaggaaagattggacctcgcttgttggggcgccggccgcgatggacaccgtcagaggctgggatgtatgagcggcacacaagcggaggtcagggaggatgacggccatggtccgccatggcggatacaggaggcgttgggttgctcctccatctacggggcccacgacatcggcaacgcgtggagccgggcgacaaattag

SEQ ID NO: 61182 - DNA, 180 bp, Oryza sativa
  Clone ID: PAT_MRT4530_6263C.1
cagctcagaagcactacacttctgaaaagggggaacaatagcaaggctgagtacaaccaccgtactcagcaagccacactaacgatgcaaacgtgcaaggggatacaaggacggtttgtggcaatttgcataaaggcggttgtaaaacattttattgagcaaaacggtaaaactgttgag

SEQ ID NO: 61183 - DNA, 265 bp, Oryza sativa
  Clone ID: PAT_MRT4530_62640C.1
gaccactcagggaagcatggacagccagcacgtaccggtcccgcattttccgaaacgacccacgcaccctcgtctccctcgctgccaaatgcggcggggacgccttgccgtgtcgtgggattcgtctcctgcgccgtctgcgccttcgccgccacgtgtgtcctgcactggctgtcgcaccggaggcccggcgtgggggaggtattggtggaacaggaggggtggtctgtgcattgctgccgccatttgtgggctcatgtgggta

SEQ ID NO: 61184 - DNA, 2277 bp, Oryza sativa
  Clone ID: PAT_MRT4530_62641C.1
ttatggagtggcccacgcggcgttgggcgtccgacccaattgaaatcggaagcacgcttcggcgacgcgattccacatttccacccagcggcgcggcggggcggcgagatgatgccctactcctccggcgatcgcgggctcccccagccggcaccggcgccgccgcacgcggccatgtcctggccctccgccgcgcttcttttcgccgtcgatcgtcaccgcctcgctgaacattaccccaatcccacagccctagaccccctagcccgtggcccgacttccccaccgccccatcgtactactcgtcttcggcgcaacctccggcgagctccatgcaccccgttatcgcggagacggggtactgcaaataccgatggatttctgtttagcgatagtgcactacacaatgtatacccggaggatcaatttagttccatcaagcagctgcatccctggattccctcaacaacaggaagatcaagctggctggaagagaaaattccagtaattcaccaaagaacttcagcagctgcatccagtgagattggatcatcagttctccataagccttctttgtttcccagcattattgattgcttcgacaaagaacctgttcccatacatcaatctgatggccgttattcttatgatagccacctatcacatcttacgtcctgctcaacatctttgaattatggcctatccatgccatctgttgctgcctcacctgtagtatgtggcatgaaaagaatagatccgtcaccaagtgatcctgttttgaagggtcgattcctgcaatatgcaaacccatgtaggtttaatattggtcattttgatagcgtgcaggatgagcagaaagatcatgctggctttcagactgcgtatagacattgcagcgactggaacagatgtactaacgatacgggaatagtgggaaactatttagctaatagttctggcgagacttgtaatgttggtgagaattctataactggaaggttttcacaggaaattctgtgttctgaagtgcctatgagcagagttcaggaacctttatctcatcatcactcacttgttcaggaggacctgaatgcattttgtgagaacatcacctacagatgtaactatcatgcagagttaatcaagtcaatgtacaatttgtcagtagcgcttatatctagttgcaatggtgattatgagttggacgaatcttatcaagaacttattcaatctgccatacaaaatctcagttctctgagtccaaaaagaagcaagaatctatctatagaggaaaataagtctggcaatgataaagatgcacatgtgctggcatataagaatctgtggatcgaagcagaagcttccatgtgtaaactcaagtatgaacttcaacttgcccgtatggaacttgcactgaaatatcacagtcaacaatcaggtgcacctcctactattccattagatgtccaagattctagcttgtccaaatccaagagcttgttatgtgatgaagtgcttgatgatcctagcaaacaacaaaaccatgtgaaagaaaacactatctgtagtgcaaccttgctacctgaggaaggtaatactggcgatggacaatctcctaaagtaaatagaagcattgcaaatgaagttgaggctggtgtctttactcaattgagagttttgagatcccgtggtgatagtatatgttcctttggcgagggaagtgatgaggagcagcaggaaacaagtaataacaaaaaaacaaatggttttgataatactgctgcagttagtatggatactttgaagtctggtgatgatagcatgaactctgtagtggtagaacctatcaaagagcgggtggaatcaagtaaaactgatgttgatactgctgcacctttctattcgtttgttaaacgtttatcgggctcttcaagctcatcggatgtggactttgacaagtttctatctagtattaaaaagcaaactgatgttactgttatggctaggcacaaagatttcgtgtgcgataagggtaatataagatcattagatgacaccactaatcaatgccaagcagcaagtaatacgaagcagctcgaagatgatgctttaaggtttttccaatccttgaaaattccggaggggataccagaagatcattcagacgatgggtcatcagactcagattattatcaaacagaacattatccattacgggttgaaccaggaagacttctcttcatccataaagtccttggaagtggaaaggaatggtga

SEQ ID NO: 61185 - DNA, 240 bp, Oryza sativa
  Clone ID: PAT_MRT4530_62642C.1
atgtcgagaaccagacttatgtatgaatgggccaagaactcagaattgatacaaagaattgggccaaaattcacaagtcagcgaatagaagcaacagaggaggccgctagccgaaattgggctggattgggccggccccaggttcggccgaaccagggagttcagccgaaccctcctcagcgccatccgatccagggcttcgcctggacgtatctagctggtggaataggaatagagtag

SEQ ID NO: 61186 - DNA, 547 bp, Oryza sativa
  Clone ID: PAT_MRT4530_62643C.1
tcatgctcgtgtcatcctgcccgagctccgaaagatcgaaactacaatcgaaatcgaatcaagggagtcgggcttgacgaagacctcgtcgcagtcggagcaggagaagacggtggcggcggcggcggcgagggtgcgcgggtcgagcaccgagtggcagtggaggtagaaatcggagagattcctgatctgcattgccctaaatgagccaccgatggatgacaacgacgaggacagtgccgatggcggcgaggtcgtcgtcatcgtcgacgatgtgctaattaccgacgacgcggagatggcggccgcggcagcggagtcgccgtggtactcgggaccacccatcagcgacctgctcgacgtgcgtgctgcctccgccaccatcgccgccgacgttccggcgccggcggcctctccccctgctcgccaccgagctctccttggttctgcagatcgatcggcacacgtgatgctcacctccgccgctgtcattcttgccttctgctgctgtagctgcagccattggttggcttctgctagcccctag

SEQ ID NO: 61187 - DNA, 278 bp, Oryza sativa
  Clone ID: PAT_MRT4530_62644C.1
cttcttttccgactgcgacgccttgccgagcttgggcacatccggctacgccttcacccgcatgcgctaggtcttcgcgttcctggctcagacgtcgcacgagaccacggtcgggtgggcgtcggctccctatggaccttacttgtggggctactgcttcaaggaggagaacatctgcatcgttgggtgcgtctgctgtgtgcagagcttgtatctgtatgtgcgcttctgcaatggatctcttcgttttacattacggccatattatccgctgtttc

SEQ ID NO: 61188 - DNA, 564 bp, Oryza sativa
  Clone ID: PAT_MRT4530_62645C.1
atgattacggcggcggtggcagccgtggtggagtccgcgtcgccatcgccatcgccggcgaggaagcggtgccggctgggcgggccggtcgtcgcgaacggcgagggtggtgctgctagtaatactaccaccagtagcgagttccagctgcggcactggcgcccggcggccgcaggcaagcgggcggggctggggatgcggaggcggtgggcgccgccggagatagagatccccggcggcgggagcggagtcggagtcggagcgcgagggtacaccagcctccgggacatcctctcgtcgccggagtacgccgcgtcgagcaagtccagctcccccgccgacggtggcagcggcggcggcggcggcggcggcggcggcggaggggacgtgcacatgatacgccacccgctggtgaagcacgcggcgtacgcctacctccagctgacgccgtcggcgagggacgccgccgacgccgccggcaggaggcggcggcgcagccgcggcccgctctgccgcctcctcctcggctgcctcggcttcgtcggcgcgctcttcggacggtga

SEQ ID NO: 61189 - DNA, 450 bp, Oryza sativa
  unsure (1)..(450): unsure at all n locations
  Clone ID: PAT_MRT4530_62646C.1
ggattcggcacgagctcgtgccgaattcggcacgangtcgccgggaanaaaaaaaacggcggcggcgcgctgctgcccanccggcaggggatgctggtggcgtncgtnccggcgttcgtcnccgcggcggcgtcnttcgccgtgcccggcgccgtggtgggcgtncgcgcccaggtcctcancgccgcgctcaccgtccactttctcaaacgaattctcnanggggggcccggtacccnattcnccctatagtgagtcntattacaattcactggccgtcgttttacaacgtcctgactgggaaaaccctggcgttacccaacttaatcgccttgcagcacatccccctttcnccagctggcgtnataacgaaaaagccgcaccgatngcccttcccaacanttgccacctgaatggggaatggcaaattgttanccttaatattttgtt

SEQ ID NO: 61190 - DNA, 701 bp, Oryza sativa
  Clone ID: PAT_MRT4530_62647C.1
cgccgtccgtcgtgcggccctctctcctgccggtcgtcgcccgccgcgtcgcttcgccacctcaccctcctcctccgatcgtcgccgtcgccgcctcgccctcctgcatccatcgtcgccgccactctttcctagcaaggccatcgcatcgcaccagcgtgatggcccccgtcctactcgccggttgatgtgcccacacggagatggtgtatgcaatctcctcacctgccaccgcactgccactgccgccgccgccgccctcgatcgtcgtcgctgccgctgcccctattggcctctccgttgcagctagaggaattggcctctatggcctgctcttgcctcggcatccgcatggattagggctttgggcacaccaaggtccaaccttcaacggcatctccgcctcgaccatgccctgctcatagatccaatttatccagtccggactggtgctcactctgcagcatgaccctaaaccttcggtgaatccatggaatgatcctctaattcgaatcacccacggataagcaatggcatcagctcacgtgcaaactactggggcttctatttgaaggtttccttgcagggtccataatagatataaaacttgagactatttctctggatgatggcgtgtgcttaatcttctatccaagtcaggttgatctaaccagtcgaggagaatttctttctttgagcaa

SEQ ID NO: 61191 - DNA, 219 bp, Oryza sativa
  Clone ID: PAT_MRT4530_62648C.1
atgctaagtaggaacgggcgaattgagcttcgttgcttgtcctggcccaacgcgtgcagcaacgctgcacccgcacgtgcacgtattgcagccgcgtgtgcaagcggtgcgaaggggtcactggtcaccaccttgcccctttctcatttctccccgaaaacgaaaaggctaggttttgttgctgctgcattgctcatcgccgggctcgacctcagctag

SEQ ID NO: 61192 - DNA, 153 bp, Oryza sativa
  Clone ID: PAT_MRT4530_62649C.1
atgccgagggaggtggcggcacaggttggggacgaggcgactgctaggggcggctggagcggctgccggcggtggacagagaagacgaacgcggcgacgacgctacaagcgacggtggagagagccggctggaggttgaagatgccactgtag

SEQ ID NO: 61193 - DNA, 228 bp, Oryza sativa
  Clone ID: PAT_MRT4530_6264C.1
atggccggtgctgcctgcccctggtaccgcttccttcctctactcccctgcttctccctctcttcttctctttctttctctcttcccctgatcctccctctctctcagtctcgtcctagctctaaccctagccgtcgccccgcctctccaattgccgctgctgccgtggagatgactggtgccaaccaccgcgcaactccggcggctgcgtcctatccccattggtga

SEQ ID NO: 61194 - DNA, 240 bp, Oryza sativa
  Clone ID: PAT_MRT4530_62650C.1
ggtccgtccggattccggtcgaccccgcgtccgaggcgtttcgtactcgcctttccggccctcctccgcgcgtcgcgcgttgttccgcgcaccgccgcgctgagggacgcattgatccactggggccgcggactcctgtcggagcgcgtctggagctctttgctgggctcgcatgatctgggggaggaaaatttatcatttgcggggcgtgggtgtggttctgcggtctttcgttgttgt

SEQ ID NO: 61195 - DNA, 402 bp, Oryza sativa
  unsure (1)..(402): unsure at all n locations
  Clone ID: PAT_MRT4530_62651C.1
ggatggcagaagagcaaagaaaatcggtatatgttttagcgcttcggtcgtgtcaccagggtgttcttggctaaggaccgggatacggagtctggccaagggtttcagcctttancagttttgcagacagagaaaatgccgtcaaggcttgcaacaagatggacggctggggttttaaacatctcattctcagagtcgagttcgccaagaaggcaacctgagagttgggtgtttgactttgcgtttcgtttatagaatggggcttttttggtgtcgtggctttcctttatgttacggcatgacctcttttagtctccgaatgttatgatgctctggagtgaggggggctataggagacggcaaaaaaatggatttgtcttgaaaaaaaaaaaaaaaaaaaaa

SEQ ID NO: 61196 - DNA, 290 bp, Oryza sativa
  Clone ID: PAT_MRT4530_62652C.1
atacaggacaaaatcatcttgcaagtgacatacaacgattattacggagctatatacaatctgtataaggataactctgggcgagatgccccctttttggttaggacacagctttgggcccaaagataactgtggccaactttgaacagggtctactactgcgtgcatataacatgtgccagccggaagaagctagccgaagataattcacatcacattactatttggatgcatcccgtgcaaaggatgaggtgtatagtgtattggttcccgaagaaggaatacgacag

SEQ ID NO: 61197 - DNA, 628 bp, Oryza sativa
  unsure (1)..(628): unsure at all n locations
  Clone ID: PAT_MRT4530_62653C.1
acatcaaataaagaataaataaacttctattcaagccatgtttcacttgaaatacaaaagcataagataaaataaacaaggtcctccttgtatgaattaaggattagacagaaaaaaaaacctcagggttcaagagaaatgtggaaaacggagataaaagacactttgatcatccgatgctactggtcataaaaaaattgtgcttacatttgtataaaaaatggtcacttatatgtgaatgtgtgatcctcaacttctcctagaagttttaaataaagtagagttgcagatatatattatgatcctttgaacacttaatgatacttagccaatgtaatcccaagcttactggcagtgaatcgctaggccaatatctgctacacttttttttaatagtagcccaaaatctttatatcatcagcagattgatccttgtacacataaggaccacttaggtaccacgaaccttcatgttgtgcttacggagtatatgaaattagatacatcaactagagaccaatcaatgctaaataaaagaacaaaatctcctcgaccaacatcctggatagatatggagacatggttgatcatctatattaagggagttaatgtgggncctgctcctctg

SEQ ID NO: 61198 - DNA, 240 bp, Oryza sativa
  Clone ID: PAT_MRT4530_62654C.1
atggccttctccggtgggcatcggatggtgatggggacaagcgttagttggcaacgcctcatcgtctatggatttgggcggcttagcggcgtccacgggacaacggcaactccaacgagatggctcaagacgcaaccagagctaatgacgcctttgtcagaaaaaaactcacgcgaactggctctcagtctctctaaaacacacactctgacgcttgtaggtgcagctacagctaactga

SEQ ID NO: 61199 - DNA, 562 bp, Oryza sativa
  Clone ID: PAT_MRT4530_62655C.1
taaggaccaaaataccctcagtccaattgctgaaatacctttgtcataaaataatttactttgtttatgtgataaacaagatttgtgcgatgcttttcttatatccatgccacaactagtgaatggacatgttaattatatagttgagccatcatgtgttgagtttaagcatgttattcacattgctagcgagaataaagagtttaaattactatcttttttaaatacttggggctatattcaattcgatgatctttgtccactcaactgtttagagaataaattatttgctagttgtttaaatgagctatatgttggtttgcaagaaggggggtgctgtggttttccaagtggcaaaatttcagaatccaaccatatagcaatcaagaaatgttccttacctgatgttgtgatagataaagataagttcagtaggctcaataacaaggtgaaaccgaggacggtttccaaacaagaagatgagtatgataaggacacaactagatcagatatgaccatgactaccatatgtattcatcaaccaaaagtgcatatgttctat

SEQ ID NO: 61200 - DNA, 571 bp, Oryza sativa
  Clone ID: PAT_MRT4530_62656C.1
cctgaaattaaccacttatcatgcaaaattcaaccgcaatgtacatattcaaaattcctacacgaataattgtggcagcagtgaaaaaagaaatgcaacaaccttaagagttaaaccactaattgttgccttaaccggagccggacaacaacgggctaattaagtaattaactccactaccgagacgtcggtgacaagaaaattagaaagacaaatttgcccctcaatgaccaaacccaatcgccggaaagtctaattacttaaaagatccggtggacttcctgaatccggcgacgattcattaatcgccggagctttctcagtcacgtctgattccgccgcttgctgcttcgaaagaggaatttttgggatctcagtgagaatctgaacgacttcacgcatcgtcggcctctccaccgcttgttcttcaacgcagagcaacgcaacgtagaagacgtgtgttacctcgtgaactggaactgaagagagtctaagatcgattactttgagcacacaatctttatttgaatccgtcatgcttctcacccatttgacaatatcaacgccgtcg

SEQ ID NO: 61201 - DNA, 598 bp, Oryza sativa
  Clone ID: PAT_MRT4530_62657C.1
gctcccgataaatcggaacaatctcgaagcatccgcccgtctccgcctgctcctcccaccaccaccaccgctgcttcccttctcccctctcgcccgccgccgcctcgccgcgacgcgcatcggcgccgccccacgaccgcagcagagaagcccaccaccacgcgcggagcggccgaggaggcctcaccactattggtgcgggatggcggaggtcgccgccggcaccgggcagctcattggcgtcgccgtggccacgctcctcgcggcgatcttcctcgccgccgcgcttcttggcagccgccggcgccggcggcgggcgccgttggcagggaagcctgcggccgtgggtggctgcggggtggccgacggcgaagggtgcggcggggatggccggaccgacgtcatcgtcgtcggagccggggtcgccggatctgcgctggcatacacgctcggaaaggatggccgtcgtgtgcatgttatagagagagacctaacagagcctgatagaattgtcggtgaactggtacaacctggtggctacctgaaattgatcgagttggggtctcgaggattgtggttcaagaaatagatgctcagc

SEQ ID NO: 61202 - DNA, 465 bp, Oryza sativa
  Clone ID: PAT_MRT4530_62658C.1
atggagcggcggtgtggcaggcagctagagcggcggcagtgtcgggcgccggctacgggcttgagcgcgacggcgtgcgtggcgagcgcggcatcgcgcgtggcgcggcggcgacgaagcgcgcgacgtggcagtggcggcgtgcgcggcggcggcgtgacggtgcggcggtggcgtgccgcggcggcgtcgtggcgtcccggcgtcgtgccgccacggcggcccggcgtcgtggcgcggcttcgtcggcactgccggcgcgacgtcgtcgccggtgacggccgcatcgaggtcggggtcggcatcgtcggcgcggcggagtcatgttcggccgcgacgacgtcggcggcggcgtcggcaacgaggcgaccggcagtgagatgcggcggcggcggaggcggcgacgacgacgcgcgcgagacgacggcgagatacgacggcggcggcggcgcggagatgccctag

SEQ ID NO: 61203 - DNA, 295 bp, Oryza sativa
  Clone ID: PAT_MRT4530_62659C.1
cggacgcgtgggcgcgggtgatcatcaggaggagaatggtgacaagtgaaggtgcacatgatgcgtagcgagttgcatatgatcatatatatatatatataatatatatatgacgtatgtatttcatggtgtaatgcattgtgttatctaaagtggaagaagttgttcttcccatcttgtaccatcttatatgcacttctttattaagatagttatgcagatgatgttgcaaacatttctgcatttgatgattttctgcaaactacggggaaaaatagtataaaaggattttggt

SEQ ID NO: 61204 - DNA, 1404 bp, Oryza sativa
  Clone ID: PAT_MRT4530_6265C.1
atggagagcgagcaggtgaagaggcggttcgggcggtgcccctactgccgcgccatgatctaccaggaccccaacgccatcatctactactgcagcaagtgccgcacgcccatccgaggcaagaacccggagccgacggacgacgccgagtacgcgctctcccagctcgagatcctctccgccgacaccgcctccgtgttctccgacgacccggacacgctgagccgcacgtcctccgtcgcatacggcggcggcgagcagcctccggtgcggaccagctcggctccctacgcagcatttgatcggggcagcgttagggctggttcaagaagcggcgagcaatcgggggaagagagaggtggctcgccgatgcacagccgcgtcagcgaactccggccgacgtcgcggagaaccaggcggccgatgagcggcgacatgggtgcgttcagggacgatggatcgagctatggttcggacaacgacgtcccgacgtctgccgccgcgagctaccgccgccgggcgtcgccgctgacctcccaggaactggaggcgtcgtcgtcgtcgatggggtcgtcgggataccaaccgtccggcgtgtcgtcgtcgtcgatggggtcgtcgtcggtgtacgaaccgtccggcgcggcgaggtcgccgctgacggacccggcgttccagagggacctgctgcaggcgctggacaacctccggagggtcatcgccgccgtcgagcagccgtacggcgtcgacgcgcacctgcaacaagccggaatgcccccgaagagcgcgtcctgcaacgacgccgccaccggcggcagcggcggcggcggcggcgcgtacgcagcagcagtcacgcggcgcaactcccgcctcatgcgccgcctcgagtcgcagctcgtgcaggcgctgcccagggacggcctgcgccgggacaggagcacctcctcctcctcgtcggcgtcgagcagccgcccgggcggcgaccgggccagggcggcggggcggaagcaccactgccgcgctgtgctgggcggcacgccgttcgtcgtctgcgacaagtgctcggagatactgcagctgccggccgccgtgtcggcgaacagggcggccaggctggagtgcggcggatgcggggagacgctgtccatcaagctgccggcggcggcggcggcggcggcgagcggctcgacggaccggcccaagaagatattctccgcgccgcagcccgccgttcgccggctggatgacgacgacgcgggggaggagcacgcgtccgcgaggagcaacctgagcggcgaccagcgatggccggcgtcgccggccgaagggccgctccaccgcatgctcgggtacagcacggtgagctcggttttccggagccggcggtacggagagcaacactga

SEQ ID NO: 61205 - DNA, 775 bp, Oryza sativa
  Clone ID: PAT_MRT4530_62660C.1
atgcgatgcccttagcctccctctagggttctgtcgacgggggatacccgtagaccggatataaaaggtattggggtccgttggtacgaagatctacgtagtacgacatcaagcaaacagaagacaaggattatactggttcaggccccttagaaggtaatagctctaatccagttggtatgggattatatgatggaaaccacagattacaaagagaataacagaactcgatgataccgacgagaccgtagtcgagttggttcggctagatcacccggcgacttggctcctgtaggctccgacttcgtaggctgaggtggatgggttggtggtgagattcgatgccttaggtcctcccggtggtcccttttatatcgcgggtcagttgatctccaagtaggactcggagatatcagacccctcatgatacagtgacgacgcagtcttgtccgagtaggacttctctcatgtgtagattctgtttctattacgtgattgatttccttaacatgtacaggaaacatccgtatgcgcgtaggtataccgtatcggtatacaatatatatccaagggtagagagtataccttatccgtaaccttgacaattacttgataaaaacatgttcccaagatacgtgaactcaatgacgtcatcttctttttgaggggatgtgcaactagaatagactgaaggcttttgtttcttttcttctttgatttgatctgatctgttcaatggagaacatttttatggaagccgagggcaggggatagc

SEQ ID NO: 61206 - DNA, 1317 bp, Oryza sativa
  Clone ID: PAT_MRT4530_62661C.1
cccccctgcgccgggcctggcgatgatgctcccccggctcctcctcctcgtcgttgcctccgcgctgccgctcgcttccgtcgctgcgggcgccgtcggcgtcggcgaggggttctgctcggcggagccgtcggcggcgtcgggcggctgctccggcgtgcggccgccgctctactggaaggccaccaacccgactctggcgcccgcgcacctccaggatttacctggcttcacacgtagtgtttacaaaagggatcatgctttgattacaccagagagccatgtattcagccctttgcctgactggatcaacacattaggagcatatttaattagtccagctatcggggcacatttcacaatgtacctggcaaaaatgcatgatggatcaaaatcagccctaccaccaaaaggtgttgaaaggcttatctttgtactccaaggaagcattctattgtctgaggagagtgggaatacccatactctgctggtggactcttatgcctatcttcctgcaaacatgaaacactctgtgatctcagatgaagtaactacccttgtaatctttgagaggaggtacacaaccattgagggttaccatcctgatctcattgttggatcaactgataagcaaccccttcttgaaaccccaggagaggtatttgagttgaggaagctgctacccacttctctgccttatgactttaatatccatataatggattttcagcctggggaatatcttaatgtgaaggtacccggtgcaatcaggggacaccatttggatggcaccgtttgtgcctcaatggtacgctgcccttggaaaaaccaagacgagagcatcaaatatgtggcgacatgtcgaacatcaatgtttgggtatctgaagatgccttttaaaaatggaaatgaactgctttaatttctcgctgatgaacccttcaaaatgatgaatcgacgcaagaatctcagatctgtacatggaatggtcaagctacccacttgttcttattggtcaatatgaattcagaaaaaaagttgctgtactattttctggacagaactgggctatgctgtgactcttcggaaatctgtattggctaaccccttgaaatgtcgaaataatgcgtcgctgtaatgaaaccaggtacctgattccaagattagggcctttttttttccttttaattgcagagcatcaaatatgtggcgacatgtcgaacatcaatgtttgggtatctgaagatgccttttaaaaatggaaatgaactgctttaacaatatttgcaagaagaaacatgattactctttggcttt

SEQ ID NO: 61207 - DNA, 1092 bp, Oryza sativa
  Clone ID: PAT_MRT4530_62662C.1
atggtgggcccacatgtcattctctcccatctccttttcctcttcccctcttcctctctctcgatgtcaagcgcggcgcggccggcacgcgaaggcggcagtagtcggcagcgcatcgtcaggcgcggccggcggcgcaggacgtcggcggggaagcgaggcgtaggcgaaggcggagaggaggctatggctggagcttgttggcgagcggtagtaggcgcgacgaggagggggaaccggccccagacagcggcgggcggcgtggagggagcgtggctgggagggcgaggcgagtgcagctgggtgcacgaggcaagcacaccgggcggctgggagggtgctgcggtcggtctttgcaggaaggcggtcgagtacttcgaggggatgtgcgaccggccggatgccatgtccgacgagttcaggagactccagctaattgagatggctgccaatgatggcctcagtgatttgttatggatgccttatagtcaacataaagtttttaaaatttctgattgtcagttgcttgggattcctatagaagaactacacatgaagcagaaaacgaggaaaatggaggatcatacaagtactacgagttattcacagtactgtcagtttaagcaaattgcgcgaccatttcgtgcaatgccaaacaacccaacacaactggaaataaattggcaaactcgtgcacttgttcttgatatttttggctccatagttttcactgatacacctggagatggactgccagcaatgtacctccaatttatggtagatttaactgcaccaacagagtacaactgggggagcagctgcactttccacgttgtacaggcaaatagagtattggttctgagaaggagagatctgaaacatgtgggccttactacagttgtggtgttggtcgcgtttgtcactagggcgtcctgtaaatgtaatgcaaaatacacaagaaaccgagggagtgcaagagactcgcagatggactgttgccctgtatttggagctaagtggggtgctgcacatgaatttcgtaccccacgtaatgctggtattgttatatactccctccgtctcataatataa

SEQ ID NO: 61208 - DNA, 1021 bp, Oryza sativa
  unsure (1)..(1021): unsure at all n locations
  Clone ID: PAT_MRT4530_62663C.1
tggtggccaacatccggtctcgtcgtctggagctttgttcgaagcctttgattctaggcccttattggcaaagggatttgccgacaggcacataaactaattatgcaggcaatctagtgcttcaacgaggccgtcaggatcgacccagggaatgcatgtgctctcacttattgtgggatgatatacaaagatgagggtcacttaattgaagctgcacatgcttatcaaaaatctaagaattgatatactttctacaaacctgctgcagagtttcttgctattgtgttgaccgatcttggaactagcttgaagctngcaggtaatacagaggaggggattcaaaaatattgtgaagctttggaagttgacagccactatgcgcctgcttatacaaccttggtgtggtttactcggagatgatgcaatttgatttggctcttacttgttacgagaaagctgctttggagaggccattgtatgctgaagcttattgcaacatgggagttatttacaagaatcgtggagaattagaagcagcaattgcctgctacgagaggtgcttgactatttccccaaattttgagattgccaagaataacatggcaatagcactaaccgacttgggtacaaaggtaaaaattgagggtgacattaatcaaggtgtggcatattacaagaaagctctgttctacaattggcactacgctgatgccatgtataatcnttggtgtcgcatatggtgaaatgttgaattttgagatggctattgttttttacgagcttgctctgcacttcaatcctcgctgtgcggaggcatgcaacaacctggngagtaatatacaaggacagggataatcttgacaaagctgttgaatgttatcaaatggccttgtcaattaagccaaatttctctcagtcattgaataaccttggnagttgtctacactgtccagggaaagatggatgctgcttcagcatgattcagaggccatatttgcaattccacgtatgctgaacatat

SEQ ID NO: 61209 - DNA, 499 bp, Oryza sativa
  Clone ID: PAT_MRT4530_62664C.1
ggccccaaacccaaaaaattttttttattttttggaaaccccccgggggggggggggaaaaaaaaatttttaggggggggggggccctccaagcaccacgggggggtaaaatttgggactaaaaaaaaacaaagtttacaaaaattaaaaggggtttgggccgccccttcaggggagaaccctttttaatttgggggcaaccaaaaaaaaaaaaaaaaaccccctacggggaaaaaaaacccagacagggttggggagacccaacacctttacctcacccaaaagggggaagggttttccaaaaaggggggggggttttataaaaagccccccataagaaaaccccccccccgtgggagaaaaagaaaacttaactttgccccaaggggggtggggggcacagaaaggaaaaaatttgaaaagggattgggcccggggaaaattccccaaagaaaacacccccggccaaaaaagagctcccccaaatgggccaagggga

SEQ ID NO: 61210 - DNA, 2208 bp, Oryza sativa
  Clone ID: PAT_MRT4530_62665C.1
atggggcgaccggggatggactccagcgaagggagggagagcaatggcgttgttcctgaacgtaatggtggtgctgtccctgcaaaacagcagttggacgggaaggacaccttgcggtacgccaacatcctccgctcccgcaacaaatttgccgaagcactccagttgtacaataatgtccttgagaaggatgaagccaatgtggaggcccttattggcaaagggatttgcctccaggcacagagcctacctatgcaggccatcgagtgcttcaacgaggccgtcaggatcgacccagggaatgcatgtgctctcacttattgtgggatgatatacaaagatgagggtcacttagttgaagctgcagagtttgttgtcataaacactagaagtctcaaatgttgtatatgtggttctctgaaagcaaaatactcaaatgctgaagcttatcaaaaagctcgaaatgcagatccttcctacaaacctgctgcagagtttcttgctattgtgttgaccgatcttggaactagcttgaagcttgcaggtaatacagaggaggggattcaaaaatattgtgaagctttggaagttgacagccactatgcgcctgcttattacaaccttggtgtggtttactcggagatgatgcaatttgatttggctcttacttgttacgagaaagctgctttggagaggccattgtatgctgaagcttattgcaacatgggagttatttacaagaatcgtggagaattagaagcagcaattgcctgctacgagaggtgcttgactatttccccaaattttgagattgccaagaataacatggcaatagcactaaccgacttgggtacaaaggtaaaaattgagggtgacattaatcaaggtgtggcatattacaagaaagctctgttctacaattggcactacgctgatgccatgtataatcttggtgtcgcatatggtgaaatgttgaattttgagatggctattgttttttacgagcttgctctgcacttcaatcctcgctgtgcggaggcatgcaacaacctgggagtaatatacaaggacagggataatcttgacaaagctgttgaatgttatcaaggaaagatggatgctgcttcaagcatgattcaataataacttgggtgttctttacagagatgcaggaagtattacttcagccgtacaagcttatgagaaatgccttcaaattgatccgtgattcacgaaatgctggtcagaatcgtttgcttgcgttgaattatattgatgagggctttgacgacaagctttatcaagctcacagggagtggggaaaacgcttcctgaaattgtatccacagtatactagttgggataacccaaaagtcgctgatcgtcctctggtcattggctatgtgtctcctgattactcgtcctctggtcattggctatgtgtctcctgattactttactcactctgtgtcatacttcattgaagctccccttgcacaccatgactactcaaattacaaggtggttgtgtattctggtgttgtgaaggcagatgccaagacccttcgattcaaggataaggtattaaaaaagggtgggttgtggagagatatatatggtattgatgaaaagaaggttgctagcttggtaagagaggacaaagtggatatacttgtggaacttactggtcatacggcaaataacaagttaggaacaatggcatgcaggcctgctcctattcaggttacatgagattggctaccctaatacaacaggtctgccaacaattgactacagaataacagattcattggctgacccacctgatacaacccaaaagcatgttgaagagttggtgcgccttcctgaaagctttctttgttacagtccttccccagaagctgggccagtttgtcccactccagcaattttaaatgggttcatcacgtttgggagttttaataatctagcaaaggggacacataaaacttgaactcccgtcttgtggttaagtgtaagccattctgctgcgacagtattagacagaaattcctatcaacactagcagaattgggtttggagccgttacgagttgacttgctgccactcatccatctcaaccatgatcacatgcaagcatattccctaatggacataagcctggatacgtttccatatgctggaactactactacatgtgaatctcta

SEQ ID NO: 61211 - DNA, 487 bp, Oryza sativa
  unsure (1)..(487): unsure at all n locations
  Clone ID: PAT_MRT4530_62666C.1
gaggaaagagtccttcatttggactccttgagagtacaattctcacaggatgggtgcctactcttcttcgagctggaagaggaatgacattgtggaacaaagctggtgaggtacctgaagacaagctagagctcttctcgtttgagaataatacttatgcaaggattgtccgtgaggctctctgtgaattggaggttccttatatcctccagaatgttggagaggggtcctcaaagatggatttgcttcaaaagatatcaggttctaagcaggtgccatatctgattgatcctaatactgggttccaatcgggggaccataagaagatactatcctacttatttcaacaatactcgactagtgggtagtttctttctgaacctctgatagacgtgcgttctccagtagcaagcagacatgacttgagagtcttcagtgtatattttagctctgagaagccagtagtgtttcatggttctngcctggt

SEQ ID NO: 61212 - DNA, 655 bp, Oryza sativa
  Clone ID: PAT_MRT4530_62667C.1
cccgggcgcaggttttagtacatttttgtgtcgctgtgtaggttgtttttattaactgttcaatatcatattgtgtttctactctctagtacctttgtgttgttgcttggccagtatttgcgattctgaattggatcattgttttatttgattgatattggcagtctcaccaaggtttagcactacgtaggtgccatgctttgatttgaagccccatgattcttcttgttctgccgtggtggggggcgggctgccgggggctgggcgcacccctctctctctctctctcgctctgtgcgtctctctctctctctctctctcaaatatcgtaacggaaatggtttgagcatttttccgaccgttctcatccccaactcgcacacatcatcattcccatgcctgcatatttgcagctaccggcgctgtgccctcaaatataaggctgtgtactttaccatcatcccaggaagtggtttagcatcacaggtccttcacacaatttgaggctgtctcccgcacatcgatggatatttgtatgagctctgagggcattcttgttaccattttcatgtttgcttgagatgagtccatctgtggctcgtcctccctggtatttatgtcaacattcgtaatatctgatgctctctttatctcg

SEQ ID NO: 61213 - DNA, 505 bp, Oryza sativa
  Clone ID: PAT_MRT4530_62668C.1
cgggcccccgcaaaaaaagccggctcaatccatcggctcaatttgagtagatgcatcgagaaatttcacttcaagaacaaatgaacacaacatgaacatcaagaacatgagatgaacacacaagttgaacacaagaacacatgaacacaagaacacacatgaacgctccagccaggctatcgccgagtcccttgccgccgggccgacgccttccctcccgccaccgcccgtcgcagctgcccccacctcccctcatgtcgggccaccgctcccggccagatctggcggaggggaggtgctgctgccgcctccgctgtcaggccgccaccttccctccagccaccacccgccgccgccacccccgcctcccctcctgctgggctgccgctcccggccagatctagcggataggaggcgccgctgccgcctccgctgtttggccgccgccttccctccagccaccaccgccgacgcgcgagagaggtgacgcctcgtgccgaattcc

SEQ ID NO: 61214 - DNA, 339 bp, Oryza sativa
  Clone ID: PAT_MRT4530_62669C.1
atggcgaattgccctcaccggcaccttcgccctcggcttcctccgcgtcaactccaccatgctctacctcgtcgtgctccacctctcatcctcgttcccactctggtgctcctcaacacctccaacctccaaatccagagcggcgcctggtgcgagtgcctggccaatgcgacggacggctcggtatgcgccgctgcatccgtcggcggcggcggcggccgcacgagcggcgaggtcggcgggctgtactgggaggtgcggaggcagcgcgtggagctggcttacaaggagctcctgccgtttcaacacttgccgtcggcggactgcgaccccacctga

SEQ ID NO: 61215 - DNA, 228 bp, Oryza sativa
  Clone ID: PAT_MRT4530_6266C.1
aaaaaaataaaaaaaataaaaaaaaactaaaaaaaaaaaaaaaaaaaaaaaaaaaaaaaaaaggggcggccgtggtggggggtccaagctgacccacgcttacgtgcgcgtccatgcgatgttttatagtgtcacatagagttcacttaactggaccgcacttgtccaacgtttacactggaaaaaccgtgagaaccccaccttacccaccttgatgcgcatagcccc

SEQ ID NO: 61216 - DNA, 101 bp, Oryza sativa
  Clone ID: PAT_MRT4530_62670C.1
atggagaacacctcctatggattctacggtgatctaccaacctacagggatgcagtacttgaaggtgaaataatgtgcaccgttgatcagagaggggcaag

SEQ ID NO: 61217 - DNA, 331 bp, Oryza sativa
  Clone ID: PAT_MRT4530_62671C.1
gacggagtgagtatatagttactaaacaatagttccgcatttctaatttttcacctatggttgtatgggtttgcagaattatgcagttttctttttgctattgtttcgtagggcataaagaaggtaattaattcggttcttatttatttcctttacgcttctgtattttcagtcctcagtgtgtagagtttaaagtagtgatgtcatgtgtaagtatggattttcttttaccactgaatccctcatgcgaacttggatatgtggtccttttctgcacagttagtttatcaacacttcttggttatgtaatttgcagctactcatgtggaca

SEQ ID NO: 61218 - DNA, 526 bp, Oryza sativa
  Clone ID: PAT_MRT4530_62672C.1
aaagcctctctttatccaaaaaaaaaaaaaaaaaaaaaaaaaaaaaaaaaaaaaaaaaaaaaaaaaaaaaattaaaaggaaaaaaaaaaaaaaaaaaaaaacgccggccgctataaagagtacaaaatttccgggcccccctctgtagaggcccctcgtttccgttcctgcccccgcatccctttttcttttctgtggtgtcctttaaatacatttcgggggcccctgttctaccccgtcttgtcgggcattcccgtgtccccccttactttatttgccttagaacccatccccctctccccgggtggttttatcgagaagaggcccgcccggttcccctttcaaaagggccccccacctttcatttaaactggccccctctctgggtcccccccttccgcgcgggtggtgttgtttttcccctttccccccccacttccttttcccccccctccgcccccgtccgttgcgctggtttccttttttttccccccactttgggggtctttccccgttttgttttaag

SEQ ID NO: 61219 - DNA, 261 bp, Oryza sativa
  Clone ID: PAT_MRT4530_62673C.1
gggaaggaaaccggcccatggatgaaccattgggccatttagttggggggagggccaagggtacaaacccaaacagcccttatttgatccaaaaaatataagggccccatgcaaagttccaaaccaaatgaaacaaggaagggcccccaaaaatttggcaaaaaaaaaaaagctgatgccttggggaaaaaccaaacgggggggttcgggaccacggacccccccaaggggagccccaaggggagaatttccaatttcaca

SEQ ID NO: 61220 - DNA, 371 bp, Oryza sativa
  Clone ID: PAT_MRT4530_62674C.1
gcacgaggcctcgtgccgaattcggcacgaggctagtgttaccattcgacagcccagggaggacgaagaagaatacaagttcaactataaccatcttagcatggattgatgatccaataatacacaaggaggtatgcacactacatcggacatctatcatctttccaaccatagtatacaaagtttctattcatacttctcaattttttttcttcatcagttttttctatatgtcttcgtgatttttagcaatttattattttcctgtccgaagaaatttgggtatggatactacttttatcggaacgaatcaatcgctagcttgattcgttttgtagatggcatatgacagatattaagaaattgatatg

SEQ ID NO: 61221 - DNA, 392 bp, Oryza sativa
  unsure (1)..(392): unsure at all n locations
  Clone ID: PAT_MRT4530_62675C.1
cagtttacgttgtcctcatcgtcgccggcgccgccctccaaagcttcatagatagctcgatcgatcgatcccgtcgtcgtcgatcgtggtcgacgcagcagcctcgccggcggccggagactggggagatcgatcgagagggagggaggttgagtaaggtggatccacgggtcaggcatggcaagaggcccctaccggccggcgaggaggaggaagaagaccagccaccgcctccgacaccaccagcaaagcaggagcagcaggacgaggaggagctcgccgcggtcgtcatcagcggcggcggacaggnagcagcttcggcgcgtaagaacgtacgcgcagtacttacttacgcggcgcgccgacncacgacggcttcgccatggtcaccg

SEQ ID NO: 61222 - DNA, 420 bp, Oryza sativa
  Clone ID: PAT_MRT4530_62676C.1
attagtaccctcacaatgttttatattcccccagccagctaaagagaggaaacatcccatgtgcatagagatgggggacccttgtttttatatatcctccagtggtaaattgtgcatcataatataatatgatgttaagagtttggggtttttgttttccatctatctgtattacgtgctaaggtgttcaaatagtgaattgttctacaagcaagcaaataagaagggtgcaaggttggctaaaaaggaaaaaaaaatcaggttgttggaaagcagtgccattatttttttttataaactttaggctgctgcttcaatgctattgtatacttgtatgcgaatattgtatccaaaaaaggaggttgaatgagaaagctattttaaactaaaaaaaaaaaaaaaaaaaaaaaaaaaaaagag

SEQ ID NO: 61223 - DNA, 258 bp, Oryza sativa
  Clone ID: PAT_MRT4530_62677C.1
atggtggggcggatggcgccggggcgcgacgcgactccgccccccaccaccatcgagctgcacggatcgccgtcgcacccgcttgccctcccacgaccgatctgtctccaaacagatgagcggcgctccatggcttggtgcgcgaatggcctcgtgggctcgcggctggcgcacacggggaacgcgggaggagaaggggcgaaggagaagggagagggaagcgccgcatccggcagcagcatcggccgtgaggcgtga

SEQ ID NO: 61224 - DNA, 441 bp, Oryza sativa
  Clone ID: PAT_MRT4530_62678C.1
gttaatcgaaacgaaagcttcttcttcctcctcccatggagtcgcttgcgtcgcaggcgaagccggcggccgtgctctggctcgccggcttcctccaggccgcgcgcctccaccgcgtcgtctccttctgcgccagctcgaggcctctgtcggccaggatcgcgcagtgcttcctgctcaacgggttcatcttcctggggagcttgttaaccctaaaatcggtggtcattccaatcctttcgtggatactgcctggggattgcagtcagttgcaagggcagcatctgtgtgatcacacagtagctgtagcgacctattcatttctacgctctgttcttattcaaatattctatgtattatggctttatccactttacatcttcagcttcgtgttgagtacactttggtatggactattgttttaccatactcaagattccc

SEQ ID NO: 61225 - DNA, 447 bp, Oryza sativa
  Clone ID: PAT_MRT4530_62679C.1
atggcagaccaagcgaaagggaggttttgcaaggtggaggcgccgggtgcgctgacattgaggttcgctaccggtgtggacgtgccgtcatggaagcaggaactgtggttctgttcgattgacttgctctactacatgtactccataacagactatttccacacaagaagattaagaacttgtttcacatccatacacacaaaaatggatatacattcatacaccaacttgcacattataccattcccatcttcatcgattggcacatcacaccatcaccatcttcatcaatctaccaagaacaccaaaaacttacaaggccaaatggagatggggaagatcgacgttagcctcctgtctgttgccggtgcatgcccagagaggagggagctcatgaagggcttgggagctgagggtgtggtggagttttgctaccatcattgctaa

SEQ ID NO: 61226 - DNA, 1483 bp, Oryza sativa
  Clone ID: PAT_MRT4530_6267C.1
gtatattcatttgtatgcttctttggtcactgtatgtatgtcctatctgcaaaacctatgcagtttgcggatttacatcggcggagggtccagcgggctgtggtgacaggcctctcttctgtaacctgatgatggaactgagcgacctcactgcatgccgtagccggtttacagggagtccttccggagtagggcgagaaatgtcactggttgtgggttggttggtgtcttctttgcatctagattcagcagaactttcccttgcatctacaaaaaagccaccgtggtcggggaacagtgtacaaaaatctttgcaagatgacagtgggaaggtatccggtcactagctgggttatgtacttcttttttaagtatgcccatttaggaaggggagcttttgctgcagctgctccgactgagttagacattgtagaaatatcacatgtatgaaaaacaggttcattaaaacaatagagcccataagtgtaacaataaggcgaatccaaacctgcttgtagtgaagaccaaagatatgaccaatattcgtcttctcgatcagaagcaagaatagtatcccatactatacaatcggccaatacagaccacctgtgtcgtatttcgtgcaataaacattgaggaactggttgcggtacacaacataaccaagaaaaaagtacaccagtaaaaagggcaagatgagaggtgctaatacagagcatgtgaatcccagtagtccaaacaacagaacttttggcacttcagtatgatagggaaatgacgggacaaagtagctatcctctttcattctcaaaacatacttcattataaagttccatgtgagaccaaagagttgcataagttctgatgataaactagcccaaccagaagtcagtacataggtggtaaagaatgtagcctgtacaggtaccgctctagcaagcaccataggaatgtcctttgggcttgataacgcattcacttggctaattgcagaacctgataggacattcacaaagaatacattccaaatagtgaagtataatactttacagcaggcacttctcttcctttcactgtgggacacgggtccttctaatgtagaaaaaaacatcatggttgggggaacagtgtataaaaatatttgcaagatgacactgggaaggtatccggtcactagctgggttatgtacttcttttttaatatgccatttaggaaagggagcctttgctgcagctgctccactgagttagaccgagttttgaaaaatacaaaagcagcaccacaatccttatcaggtaagctcaactctgaatctttcacatcatgttttttcatctcttgctcaggttcaacaggcagcaactcgaacgactttgatgaagctccacaaagaccacatctatatgtaattggtccgcatctctgatcaactgtggtgcccttgaaatgtttaaatttcttataagccttctttgcaccagt

SEQ ID NO: 61227 - DNA, 2346 bp, Oryza sativa
  Clone ID: PAT_MRT4530_62680C.1
atggacgaggaccaactgatgatgatgaacagtgaatgcaatacgccgctacatgaggcggtgaagcagcggcggagcgcggtggcgctgcggctgctggaggtggagcccaactgcgggcacacgcccaacgtggacatgcagacgccgctgcacatcgccgcccgggagggcctcaccgacgtcgtcgaaaagatcctcgacatcccatgggtccccgagaagttcgtcgccacagccaacgtccgcggcaccgccctacaccaggccgtccttggtggccacacccgtaagaactcctttggtgctcaagtttgtttggacatagttgatcccaatcccagggcgtcgcccgccgacggtggcgcgtcgtcgccgcgtgccccgcccgtcgatggccggcgcctcccgcgcgtcgtcaccgcgtgccccgcccgccgccggccggacgcctcccgcgcgtcgtcgcagcgcgtgccgcccactgcccgacggccgctgcccgctagctcgctgaccaccgcccgcgtgtcgtcctgtcgccctgctaccgccgtgtgcctgccgccgccgccgccgcctgctagctcgccgcccgccgcccgcgcgtcgtcccgccgcgggatagcaccgaccggagtgccaccgccacgccctccaccgcggcaaccgacgccatcgcccccaatccctcttcctcctccgccgtcgtggccgacgccgcccaccaccgcccgccgcagctattgggactcgggagaaagatgggggaggagagagaacgggaggagaggaggtggctctcccaactccgctcctaaaaacggaggatctggaatgtttggcacaactccagttccaggggtggtggagatattgctgataaggacggcgccggatctgatcgacatcacggactcggccggcagcacggcgctgcactacgccgcgcagaagaacgacacgcgcatggtgagtatgctgctcgacctcaagcctgaactggccagccggcccaacgaccggcagcagtcggcgctgcacgtcgccgccgtaaacggctcgatcgcggcggcgacggagatactgcagcacagccccgatgcggcggagagtaaggacaaggacgggaggaacgcggtccatgtcgccgtgtccaatgtggacacgctcaggggcctcctcaaggtgatcggcccggcggaggtgatcaaccagggggacagcgccggcaacacgccgctgcacctcgccgccaagatggcgcacgtccagtcaacgctgacgctgctcaaggacccccgcgtcaacccctgcctcctcaaccgggacggccacaccgcgcgcagcctcgtcgaggagcgtctcgccgtcggcgagatggacgcctacgtcgtctacctctgggagaagctcaagaagcaagaggagtcccggtgcaagaacctgcagcacctcccgccggtggcgacgtaccagtcgctgcgcaggcgcagccacaggtcagctggctccggcaacggtgactacttcgagctcggcgtcggcacctacaccctcgtggccactctcatcgccaccgtcaccttcgccgccaccttcaccatgcccggcggctacaaccagacctccggcctcgccatccacgccgaccgcgcggcgttcgacatcttccttgtctccaacaccgtcgccatgtgcagctccatcaccgtcgtcttctgcttcatctgggcgtggcgcgaccccgtcaagttcaacctcgaacacctgaggtgggtacacatgctcaccgtcatagcctgccttgccatgatcgtctccctcatgacctccgtctaccaagaggtggccggcgtacctgcttgtggtcgaagcacatccgagtcccgatacaggtgcggcgtctccgtcggcggcaacagcgcctcggcggaggcacgggcaatgctcgccaggctgagcactacgccgccacatcggagcctcggagcgacatggcttgagagtccaccgccttccgctattgttcgccaccggtcaaggccattgccgtggaagtcgtcgccacctccctcaaagctatgtctgcctgtcagccctgaggctccatcgtggtcgtcttctgcttcatctgggggtggagggatcccgtcaagttcaagctcacgtggagccaccgcctgcctcgccatgatcgtctccctcatgacctccgtctacctcaccgccctccccacggagcggtggccggcgtacctggtcatcaccatcggagcctgcactccgggccgtcgtgacacatactgggcaaggaggtgttctaacttctacgtgccattatga

SEQ ID NO: 61228 - DNA, 1209 bp, Oryza sativa
  Clone ID: PAT_MRT4530_62681C.1
atgacggcgacctcgccgccgatgaggtctgtcgccgccgccgcgcttgtcctaacccccactccaacgctcaaccgtctctcctttcccttcgcccaccgtcactgccctagtactgctgctcctcggtggaggcccgcgcggtgccgcgggaagccggcggtggaggacgtggtacacgacgacgaggaggagacctggcggcgggaggccaaccccgagaggaaggatggaggagaggagatgctcgggcgcgggtggttcatggttgatgagattggtatggaaatcctcaccatcgccttgcctgctgtgctcgccctcgccgccgaccccatcacggcgctcatcgacaccgccttcgttggccatgtcggagaagagatttccatttcacaagagaaagcaggtgaacaaaggaagtttcttccagctgtctcaacatccttggctctagctgctggcatcggattgatggaaaccgtggcactgatccttgggtctgggacactactggacatcgtcggtgtacctgtcgattcaccgatgcgtataccagctgagcaattccttactttaagggcatatggtgcaccgccagtcatagtagcgcttgcagcacaaggtgcttttcgtggattcatggatacaaagacaccgttgtttgctgtggttgctggtaacctagtgaatgcattgctggatgctatatttatttttccacttggtctaggagtaagtggcgctgcattggcaacagtgacttctgagtatttgacagcgttcatcctcctctggaagttgaatagcaaaatagttctgttctcatggaatattgtttctggagacatcatccgctacctaaaatctggtgcgctgctaattgcaagaaccatagcagtagtcctgacattcactgtgtcgacatccctggctgccagggaagggtctgttccaatggctggctatgagatatgtttgcaagtgtggctaacgatttctctactcaatgatgcactagctcttgctggtcagttatttgcgggagctatctcatcagcagtactgcttgtggccgctcctaagtttggtcttggtggcgtctgggctggccttactctatttatgagtttgcgagcaattgctgggttctggaggttagggagcaaaggtggaccatggaaaataatctggtctgaaactgagtaa

SEQ ID NO: 61229 - DNA, 594 bp, Oryza sativa
  Clone ID: PAT_MRT4530_62682C.1
ccccgggctgcaggctccgcccccgccgcgtcgccgtcgccattgcgccgccgccgccgccgccgccgacgccgtgcgtcgcgaagtgctaccaggaatgctgggatgaattcatattgtgataagaaagagattactgtagcttttagcaaaactaaaaggcaagaggaggatgaagtgatttggagaatggtagaacaaggcgctacagatgatgaagagtgtggtggtgccaactgttcggctggcgaaaatagggatcctggttggcctggaacgagtgtcttcaggatgctgattcctgcaactaaagttggcgcagtaattggtcacagtggagaaaggcttagaagactgtgtgaggaaacaaaagcctgcgtccgagtaataggtggccactttgctgctgcagagcgagctgtaatcatttttgcaaaggaacaacctgatgagccaaaacctccagctattgatgcactactaagagtatatgagtgtacaatcaatgatgatggtttagatgtgagatataacaatatagttgtggcacggattcttacaccaagtgaacaggcagcaagccttattggcgat

SEQ ID NO: 61230 - DNA, 341 bp, Oryza sativa
  Clone ID: PAT_MRT4530_62683C.1
agctgctggcatcggattgatggaaaccgtggcactgatccttgggtctgggacactactggacatcgtcggtgtacctgtcgattcaccgatgcgtataccagctgagcaattccttactttaagggcatatggtgcaccgccagtcatagtagcgcttgcagcacaaggtgcttttcgtggattcatggatacaaagacaccgttgtttgctgtggttgctggtaacctagtgaatgcattgctggatgctatatttatttttccacttggtctaggagtaagtggcgctgcattggcaacagtgacttctgagtatttgacagcgttcatcctcctct

SEQ ID NO: 61231 - DNA, 1074 bp, Oryza sativa
  unsure (1)..(1074): unsure at all n locations
  Clone ID: PAT_MRT4530_62684C.1
caaagcctccaatctgcagaactctgtataagacaatacgggctttcttatagtttccttttgcgtattcacttgcaagtagagcctgaccagcaagagctagtgcatcattgagtagagaaatcgttagccacacttgcaaacatatctcatagccagccattggaacagacccttccctggcagccagggatgtcgacacagtgaatgtcaggactactgctatggttcttgcaattagcagcgcacctagagaatcatgtattggtgtatgttaaagggttttttttttttgtttaatagagataaattgcagcaagatgaaacttgtttaatagagcaagtactaaatggacttggagcttatcaatagtttcatctgttcatttagatcaacgttttcttacgaagcaagaccaccnatttgtagtctttggaaatcaacatgaggaatattgaccaaccagattttaggtagcggatgatgtctccagaaacaatattccatgagaacagaactattttgctattcaacttccagaggaggatgaacgctgtcaaatactcagaagtcactgttggcttttaacttgccatctacatatggtatctacccttggtcctatagtgcacccgatagcattaccacccttggcggtgtcttgtactgaattttcacaatattgtagttcggaagtgaaaatataagctcaggtatcatcgtatgtgacatgtgaaacttgaggtgatataaatagaaataaaattatctttcatatttaaaaaaaaaaaaaaaaaaaaaaaaaaaaaaaaaaaaaaaaaaaaaaaaaaaaaaaaaaaaaaaaaaaaaaaaggaaaaagaaataaaatttggaaataaaactttggctgtaaaagggggggcccttttaaaggatcccaattttcctaccctggaatggcaaggaatatttttttttttgggcttactaaaactaatttgcggggccgttgttttaacaatgggggatggaaaaacccttgggttccccaaattaattcccttgaaaaaaaacccccttttccaaggtgggg

SEQ ID NO: 61232 - DNA, 373 bp, Oryza sativa
  Clone ID: PAT_MRT4530_62685C.1
aaatatgaaagataattttatttctatttatatcacctcaagtttcacatgtcacatacgatgatacctgagcttatattttcacttccgaactacaatattgttaaaactcattacaagacaactccagcagtttggtgatctctactttgatcggaatctggctcaagctcaagctctgttggcttttaacgtgccatctagatatggtatctaccctaggtactatggtgcacccagtaccattaccacccttggcggtgtcttgtaatgagttttaacaatattgtagttcggaagtgaaaatataagctcaggtatcatcgtatgtgacatgtgaaacttaaggtgatataaatatgaaagataattt

SEQ ID NO: 61233 - DNA, 505 bp, Oryza sativa
  Clone ID: PAT_MRT4530_62686C.1
ctaaatttactgcaaaagatcaccactttgaacagtttagaagttactggtagcacctctgaaaagcaatttggctgtatttatcaacattttaaattcacatactttttgactcaacaatcatatttttagaaatttatccaacagatatacttgcacaagaatacacactgtttataaaactaaaaagttggaaacaatctagatgcccaacagtatgggagtgattataaaaattatggtacattgatatcatttattatgcagccattgaagagaatgagctcaattctgaaaagatctctcagataaccagtaaatatttaggaaataaaactattacatcctatttcagtttttcaattcaccaattattgaaagacttcatgcctcaagttgtatgctttgtagctatagtatttttcctttttttctcttccagatttattgagatataaatgacatacagcactgtataattttaaggtgtacagcataaagattt

SEQ ID NO: 61234 - DNA, 622 bp, Oryza sativa
  Clone ID: PAT_MRT4530_62687C.1
ctaaatctaagaatagcagtccaataaagaaaaaaactcctaaaacgaagccttcaagaaaccacacaggccgcccaagctctgtcgagcaaccgacgtcgccgctgccactaggggcccggccacacccgaccccaactgagggcgcgccgggttctagacctacaggagccaggtctggccgtccccctcacaccaccactgccgcccaacaccgcaacgccgccaccaacccgggatgggagggccagcgccggacgcggtgaggcaggccgccggagctggatgaccggcgacaccccagatccgcccggaggagaagaccgccagcccgatccagccgtccctgcgcagctctcgctgcatgcccgagatgaggaggccgccgccgagtggggagtagttcttggcaccggaagccctagatctggagaaaaggagggagggagagaagagagaggaggaagaaggggagagtcgccggtgccggcatcagtgacgcgagcggatgcagcctgggagccctcgcgcacaagggccgtttgcctcccgtgtcgcctagggcgagcaacacgggagtcgggagtcgatcccattataagtgttcttgtttgactcaagc

SEQ ID NO: 61235 - DNA, 571 bp, Oryza sativa
  Clone ID: PAT_MRT4530_62688C.1
ccggccgggatcacatcattcatgaacattcagacatctgcttatagagatctatatgtctcctctagcttttccttcctgataggttgtgctctgcttgcattggcctcatggacagcattgtctacgacactagacctctacatgacttatgtgtcgccgagctaaattcaaatactgccacaccgtgaatttagcattgccataacccctacgaccgcagagtgcccgcacagacattcttcacacagcactcatgtctcgagtacatgctcagatacacaccacaactaatgattgcgtaccaatgtgctgttctgcccaatgtacttgcacatatacgtgcatctcaactaccctctttaatctctcagatcacgtcattgacattgcacccttgttgttgtgaacccaacacacaccacaccctcgcgcaatctacagctacccgccacttgaaggaacactctacgttgcctttgctactgcctgcccagcataacccgctatcgtctcgaggtgcttacacagcgaatgttcttcggttcactcagggactcatccacttcca

SEQ ID NO: 61236 - DNA, 229 bp, Oryza sativa
  Clone ID: PAT_MRT4530_62689C.1
atggatccaggactggtagccaatctctagggcctgtttatctgagcatctccatgtcggcttcgactccctagttctcctggccacttggcagctgtggaaggaatagaactccagggttttcaactccgcacttccttcggtctcagtggttctggagtccatccgctcggagggccatctgtggtctttaactggcattgttgcttttaaagatttcttgggagtg

SEQ ID NO: 61237 - DNA, 1566 bp, Oryza sativa
  Clone ID: PAT_MRT4530_6268C.1
tcaggcgctcacacccccgcaatccattccgattcgagcaatgggcggcgccgcctccgtggagccgaaccgaaccccagcaccagcaccagcaccaccgtaagcctccctcaacgacgacatcctcctcgccctcccgtccctccatgccctctcgtccgcgcggtcctcgcctgcagctcgtgggctcccgcgccgcccggcttttcgccggggttccgccgcctgctccacccacccggaccctgccccctcgggctcttcaccgaccacggcggcctcaccatcctccccggcaccccggacttcggccgccgccgccgtcgccctccgtggagccacgagctggaggactacgcctcccacggttggcatgccgtggcgtggcgacctcctcctgctgaacccacaggaggctcgccatcctaaacccctttgatctgggacgtgtacttcatccccgctgttgctcggtggcatcgagctggaacaggaagagcatggagcttccgcgctgttccggtttacagggatgaattcaggctttgtgcttgcggtcttttcgtcctccgagacccatgggattggaattggatcatccatatcgccatccatgggttgagtttgcatgggaattaatgacacaggggttgcagttttatggctggggagactaaggattgagggctttgcattgtgtatgcaatagacttcctcatcctcatctggatcctttgcctggagaacatgaagcttgagagactgtttcaggagagatttcaggagaccgtatatgtatggcctggcttcctttggtttgtgatgatgggagctttggacatgaagttgaaggctctcagtgacaatcatcggggtatgatttatccattctctaatactgttattcggcatattgctcctagactccaccgacaatgtatttatgtcggcatttcttttgtcatttacggtggaaaataaaccagggattctagttcttacacttctggttgtcccacaaatcttcatttctctcttagtgtcaatcatcaaaaggagcatcccaatgggttttacttttgagaacttgtcatccctgaccttcaacacactgtatatcgagatgaatgcttttgatgcctcatttgtaggcagtgacgtgagctcctgaacagagccacgccgcatggtaagaattagatgcactacttctaccgtgatgcatagcgactctccaggcttgttgttgagttcagtttggtcttgatttgtttgaatttcagcttgatctgttagccgtgcagcaagctctctacttgtcagtttctccagctttatattgagcaggttcccaaaatcaagttctttgaccctcttacgtgcatcatgaaagaagagtttagctgcagtagtcacagaactaggtggaaccacagatgcacatttatactccccctggccttgactctgtccccggccatgactattaccacctagccttctggtttctgttgctaatacaaaagggaaccagtcttgaacatgagcttgaattcgatgggccat

SEQ ID NO: 61238 - DNA, 439 bp, Oryza sativa
  Clone ID: PAT_MRT4530_62690C.1
cggcacgagggtcaagctgactgattttggcttgtcgacgggtttccacagactccatgacaagaagtactatcagcagctgcttcaggggcgatctaaccggccgcgcgaccgtacctcggtcgccatcgaccagatcaacctcactgtcagcaaccgatctcagattaacgactggcgacgatcacgaagattgatggcgtactcgaccgtgggaactcccgattacatcgcccctgagatctttactggacatggttacacctttgactgcgattggtggtcgctgggaactatcatgttcgagtgtcttgtgggatggcccccattctgcgctgaggatagccacgacacgtaccgaaagattgtcaactggagacagaccctgtacttccccgacgatatcacactgggcaccgatgctgagcatctgatccga

SEQ ID NO: 61239 - DNA, 1037 bp, Oryza sativa
  Clone ID: PAT_MRT4530_62691C.1
gtccttgggcgcctcatccttcttcctcctcttgctccgcttccccttgacctcggcatccatggcgatttcgccgccgccttcttcgccctcgtccatgtcgagccgcttcttcgccgacttctccctgcgcagctcctcgatgagccctccacccagcatctcctcctcgtcgccctccccttccatcctcggcatccccagcgggtcccaccccgcggcgccgaaggtctccgagaacagcgggtccagcccgtcatcctcctcctcctcctcctcctcctcggtggtatctgtcggtggcagcggcgaggagctcgggttgggaggaggagaggtcagtgcaggggagggagcagcttccgcagccgcatccgcatccagcggcggcggcggaggtggggagggggacgggataccgtcccccaacgggatagctcctcttcataaacgcgattcgcgtcccccgttgctgccgcgtccgtccctcgtcgcctccaccgccgccgtgtgcccgtcccccgtcgacgccgctgccgccgccgccgcgtctatcccccgctaccgctgccgtcgccgcacccgtccccctgtcgcctcaatcgccgccgccgcgcccatcccccaccgctaccgtcgctgtcccccgccaccgccgcggctgtcccccgctaccgccgccgtcgccgcgcccgtcctctgccctcgccgttgccgtcctcgcctggtaagtatcatccgatacctcgcaagtatcacgtgatacatggtagaaatcgtatgatacatgacaggtatcacatatacctcgtgagtatcacgcgataagtggttgaaatcatctgatacctgataggtttcacataatacttcgcaggtatcacctgaaacgtgtgtagaatcgtctgatacctaataggtatcacacctgatacctattcggaatcatcctgttttatagaatcgtctaatacctgataggtatcacacctgatacctactcgaaatcatctcgttcgaaaacgggattccgttat

SEQ ID NO: 61240 - DNA, 507 bp, Oryza sativa
  Clone ID: PAT_MRT4530_62692C.1
cgtccgcggacgcgtgggtttgcattgtagattgacaatggcctcttgtctgtcagtcctgttgctcttgtgtctagcacttgcaggttcagtctccgggcaacaactgtcggctacattctattcgaggtcgtgcccgagagctctggccatcatcagggccggcgtgagagctgcggtggcgcaggagcctcgcatgggggcgtcactgctcaggcttcacttccatgactgctttgtccaagcaagtcgtgcatttccacactacttgacttacatttttatatccatcagtcaattacattgtggtcgcagcctttgcagtttcagttctttacactctttcagtctctcttccagtttaatgtgctgcgtcagaacagaatggactcgtagcactgtgttgacgttggattagagagactatggccaccgaatttgctctcaagtcatactagttcctactactactctgaattaacctgaaaaaattaactcaacgtgcta

SEQ ID NO: 61241 - DNA, 423 bp, Oryza sativa
  Clone ID: PAT_MRT4530_62693C.1
ttgtgttacatggcatgctgcggcggcgtaagggggggggtggaggaactgacggagtcctttgcctacctggagggagaggcgcttagggaagcccgggaactggtggccgagctgtgccggctcttctactgacacgggtgggtctccgaagcgggcagcctcttcaccatgaaggacaacgacccggggctgcccgtcaacaagagctcatcgttatgtacacgtatggtgtgtaaaaggtgaggatggtggtacaggacatgtacgcgctggctgcagatgggatggtgctctctttacctgcgtcaaaagcatggccacacatgcctgaaaaggactgactgtgcacgtctgcttatgaaggcttatctgatcataggacctgcggctgataattatagccgtcagagggaaacttgc

SEQ ID NO: 61242 - DNA, 422 bp, Oryza sativa
  Clone ID: PAT_MRT4530_62694C.1
ataattctggtacgcatgaggagatggagcaggagtgcatgaggagaacaccatgaggaaagaagaaccatacaaactaactagggaaccatccaagggggggcgaaaaaagcacacacagacaacaaagaaaacggcacaaaaaaagggaaaaagaaaaaggcaaggcctggcaacaaaaaagctggaaacaaaggcaagcaaaaaaagggcccgatcaaagctctgaacgacagtagcaccacccaaacaaaaaaaccccaagcagccgggcgacaaccacaaaagaatcaggtgccggaccaacaagagcaaccgctgaaaatggagccaaacttgcaggggctgcagccgcagccgcccatctcgccggtctccacccccatctccattcctccagagctcgccttgttggatggaac

SEQ ID NO: 61243 - DNA, 804 bp, Oryza sativa
  Clone ID: PAT_MRT4530_62695C.1
atgtggcgctcatgtctccacatgccgcatttcaattaccttcccaaagccgggcagaggcagccgcgccatgcgcgctgggcgcagccgggatggcacgaggccggcacggcggcggccggggaaggtgcgacaaggttccggcgacctcccaccaccgtcagcgacgtgcggcggagcgagggcgagcggcgcagcatggccaccatggctgagctcgggttacaagtggctaggtcaaaagagagggtttctgaccaatttgatgggagcatgagcatctacggcgcatgggggttccattttactcacttgatggagaggaggagctccgggatggcttgtccacggcgagctcaccggcggcaaaacggtggccggaccggcacggcgacggggaggcctgaggagcgaggacttaccgagggatggaggaacaacgaagatcagtgttacggtggtggagcgtacaagaaggtgaagcacgcccacaagggggcggaggggagaggtggctggtgcagtgatggtggatgggacgcgcgcggcatgcggggctcgagccgagcggcgacgggacaggagcgcaggcgcagcgtggggctcggcgcgatgatggcgacggtgcagcagctgacggcagcggcgcgggcacggggctcgagggcgcggcagcacgacggcgacggctcacggcgcgcggcgatggcgacgtcggcatggggctcgaggcggctagggccgcgcggcagaggaggggcagggctatggaaccacatcgagcacctagaccataatgaatag

SEQ ID NO: 61244 - DNA, 2211 bp, Oryza sativa
  Clone ID: PAT_MRT4530_62696C.1
atggcgacgacgccggagacgctgcccaactcggaggccgtctcccacgcctacaagttcgcctccacctgggagaagaacgcgccgctcacggagcagcagaatgccgcgatcgccgcgctctcccgcgccgtgtccgagcggccgttcccggccaacctggagaaaagtttagtgaaggatgggggtgtggttgtgccagaaaaagaggctgcattagaggagggtgcaatggatgcagtcttggtgaatacgcatcagttctacaaatggttttctgaactggaatcagctatgaaatctgaggtggatgacacactgaacttatttgaagaactgcaatcgttgcatttgagtgttgccacaaagacaaaaactttgcacgatgcttgcgaccaacttttgttggagaaacaaaggctgattgagtttgcagaagcacttcgaagtaggttgaactactttgatgaattggaaaatgtctctactagcttttattctcaaactatgaacatcggaaatgaacaatttcttccacttttgaaacggctcgatgattgtatttcgtatgttgaaaataatccacaatatgctgaatctgcggtgtacttggttaagtttcgccaacttcagtctcgtgcattaggtatgattcggtcacatgtcctgtcaatacttaaagccgcttcatcccaggttcaagcggcgattcgaggtaatggttcagcaaaaaatgttgttacagagggtgtggaagcatcccttatctatgttcgcttcaaggcagctgctagtgagcttaaaccaatcttaggtgagattgaaagtagatcttctaggaaagaatacacgcagattctttcagaatgtcacagcttgttctgcgaacagaggttatacttgatacgaggcatggtgcagcaacgaatttctgaatttgctagaaaagaagctttgccttctctaacaagatctggatgtgcctatctgatggaggcatgccaatttgagcaccagctttttgctcactttttcccggcatctgcatcagatgtttcaagtattgctcctttaatggacccactgtgcacgtacttgtatgatactctgaggcctagactgatttatgagggaagcattgattctctgtgtgaactcgttgacattctgaaggtcgaagtgctaggggaacaactaagtagacgaggagaatcagtagctgggcttcgacccatattgcaaaggatacttgcagacgttcatgagcggttggccttttgtgctcggactcatattcgtgaggagattgcaaacttccgcccttctgatgaagatctggattatcctggaaagcttgagagatccgtagatgcaactacaagttctaatgttagtggcaactcggacatatatgtgacatggtatagaccactggagaaaacagtgtcttgtctgtcaaagctatatcaccgcttagaacctacagtttttactggattagcccagaatgcaagcaaggtcattgcaaaaaaagcaactgcaatggatggacagcttttcctaattaagcaccttcttattttaagagaacagattgctccatttgatattgagttttctgtcacgcataaggagctggatttctcccatttgctggatcacttaagaaggatcctcagggggcaggtctcgttatttgattggtcaaggtcaacatcacttgctaggacgttttctccccgtgttctggagaaccaaattgatgccagaaaagaattggaaaaaagcctcaaatctacctgtgaagagtttataatgtccattacaaaattagtagtggatccaatgctttcttttgttactaaggtaacggctgtcaaagttgtactgtcctcgggtagccagggtcagaaattggattctgttctggctaaaccccttaagactcaagcatttgcttctcctgataaggttgcggagctggttcaaaaggttgggactgctattcagcaagatttacccaaagtaatgaccatgatgaggttgtatttgcaaaatccatctacgcggttgattttattcaaaccaatcaagacaaatatagttgaggctcatatacagctacactcccttctgaagtcagaatacacagctgacgaaatccaatcaattgtacttgatagtcttcgaacggggccatatacgttataa

SEQ ID NO: 61245 - DNA, 975 bp, Oryza sativa
  Clone ID: PAT_MRT4530_62697C.1
gcacgaggcacacgccgccaccctcctctcctcctcctcttcctcgccgttgcctgccgccgccaccatcgccggcgcgtcacagtccaccaggcccaggccggcggtgagcccggccgcggcggcggacttcgtgcggcggtcgtgccgcgtgacgcggtacccgcaggtgtgcgagcggagcctcatgccgcaggcccccgcggtggggcgcagcccgcgtctcctggcgcaggccgcgctcaccgtcggggccgaccgcgcgcgctcctgctcgggctacctcgggggcggcggctcctccagctcgtccaagcgctccggcggcggcggcaggggcggcgcggtgggggactgcgcggacacgctgcgggacgcggaggagcggctgcggcagtcggcggcggagatgagccggatggggcggtcggggagcccgcggttcgcgtggcggctgagcaacgtgcagacctgggccagcgccgcgctcaccgacgcctccacctgcctcgactccctcgccacctacgccgcccccggcatcgacgtcgacgccctcaggaagcgcgtcggcgccgtctcccaggccaccagcaacgccctcgccctcgtcaacaacctcgatccgcaccaccacttgtaattactctaaatcactcccctacgtgcacctctacaatcacttgtatgtagtaataatctcatcgctcctatcctacacgtattatggatgcttaattatagtagtaactgccttgcttcttccaaatttcttctcctcttctgcttggggatgtgtgtgtaactgtatcttcttgtcttttctcttctttgctttcttgttttcttttctggaagttgctagcgttaatctcttctttcagaagaggttgtagtactgcctttcagtttggatatcttaactgtacggaaccagagcagctttaattaaaagagtaatatatacaataagtt

SEQ ID NO: 61246 - DNA, 2891 bp, Oryza sativa
  Clone ID: PAT_MRT4530_62698C.1
ttcagtgctccgaccgacgcgccaatcaaccgggggcagttacaggacagtcgggcgtcgccgccgcgcgtcccacttggcccgcatcgcaacgccaccaggggacgcgaccgccgtctccccacccctccggcaacgcccgcccggggccgcggacgcatcagccgcccgccgccggggacgcccatggcgacgacgccggagacgctgcccaactcggaggccgtctcccacgcctacaagttcgcctccacctgggagaagaacgcgccgctcacggagcagcagaatgccgcgatcgccgcgctctcccgcgccgtgtccgagcggccgttcccggccaacctggagaaaagtttagtgaaggatgggggtgtggttgtgccagaaaaagaggctgcattagaggagggtgcaatggatgcagtcttggtgaatacgcatcagttctacaaatggttttctgaactggaatcagctatgaaatctgaggtggatgacacactgaacttatttgaagaactgcaatcgttgcatttgagtgttgccacaaagacaaaaactttgcacgatgcttgcgaccaacttttgttggagaaacaaaggctgattgagtttgcagaagcacttcgaagtaggttgaactactttgatgaattggaaaatgtctctactagcttttattctcaaactatgaacatcggaaatgaacaatttcttccacttttgaaacggctcgatgattgtatttcgtatgttgaaaataatccacaatatgctgaatctgcggtgtacttggttaagtttcgccaacttcagtctcgtgcattaggtatgattcggtcacatgtcctgtcaatacttaaagccgcttcatcccaggttcaagcggcgattcgaggtaatggttcagcaaaaaatgttgttacagagggtgtggaagcatcccttatctatgttcgcttcaaggcagctgctagtgagcttaaaccaatcttaggtgagattgaaagtagatcttctaggaaagaatacacgcagattctttcagaatgtcacagcttgttctgcgaacagaggttatacttgatacgaggcatggtgcagcaacgaatttctgaatttgctagaaaagaagctttgccttctctaacaagatctggatgtgcctatctgatggaggcatgccaatttgagcaccagctttttgctcactttttcccggcatctgcatcagatgtttcaagtattgctcctttaatggacccactgtgcacgtacttgtatgatactctgaggcctagactgatttatgagggaagcattgattctctgtgtgaactcgttgacattctgaaggtcgaagtgctaggggaacaactaagtagacgaggagaatcagtagctgggcttcgacccatattgcaaaggatacttgcagacgttcatgagcggttggccttttgtgctcggactcatattcgtgaggagattgcaaacttccgcccttctgatgaagatctggattatcctggaaagcttgagagatccgtagatgcaactacaagttctaatgttagtggcaactcggacatatatgtgacatggtatagaccactggagaaaacagtgtcttgtctgtcaaagctatatcaccgcttagaacctacagtttttactggattagcccaggccatggcatcgaacttgacatataatttcgattttcaccaggaagctgtagaagtttgctccacatctcttcagcgtgcaagcacggtcattgcaaaaaaagcaactgcaatggatggacagcttttcctaattaagcaccttcttattttaagagaacagattgctccatttgatattgagttttctgtcacgcataaggagctggatttctcccatttgctggatcacttaagaaggatcctcagggggcaggtctcgttatttgattggtcaaggtcaacatcacttgctaggacgttttctccccgtgttctggagaaccaaattgatgccagaaaagaattggaaaaaagcctcaaatctacctgtgaagagtttataatgtccattacaaaattagtagtggatccaatgctttcttttgttactaaggtaacggctgtcaaagttgtactgtcctcgggtagccagggtcagaaattggattctgttctggctaaaccccttaagactcaagcatttgcttctcctgataaggttgcggagctggttcaaaaggttgggactgctattcagcaagatttacccaaagtaatgaccatgatgaggttgtatttgcaaaatccatctacgcggttgattttattcaaaccaatcaagacaaatatagttgaggctcatatacagctacactcccttctgaagtcagaatacacagctgacgaaatccaatcaattgtacttgatagtcttcgaacggggccatatacgttataaagatgcaaatgcgaccctacgttttgttcgttgagacggtaaatggtatcctgaagtacagtaaccccgttgtaccagagtgatcagtgatgttgtaaaaatgtactatgttactgtggaatggagcatcattcttgtgtggaggtcagtgtgcacaatgccatgcttgacgtgatgttcccactgggccagcaatggcgggtccgtgattgcgtcttttcagctaacaagttactgtacacaagtggttccgtttggccgaggataaagtgctggaccaccacccccaacccctgcagttgtatcgtgtgatcacactttaatttcttcccttttaatacacctgagattgctctgtcctgtgatttaaaaaaaaaaaccccacaaaaaaaaaaaaaaaaaagggcggcaaaataaag

SEQ ID NO: 61247 - DNA, 135 bp, Oryza sativa
  Clone ID: PAT_MRT4530_62699C.1
atgaccaccgacaagatccccatggccgccgcacccctcctctccataatgcgcccttgtccctacaggctcaagcttgacgaggtagccgtcgggagctcgatggagaagaaggcagtcgcggtcacggcctga

SEQ ID NO: 61248 - DNA, 1104 bp, Oryza sativa
  Clone ID: PAT_MRT4530_6269C.1
atggccaccgcgcagtcttcggcttggtcagatctccggcctgagctactggacattgtgctccaccgtctgcactccttggccgaccggattcgcttcagagccgtgtgccgaccgtggcgccacatcgcgctggctcagccgcttcctcctctaatgccatggcttgcgctcggcaatggtgatttcctcatcatccccgatggtgaaatccaccgcatggatgttccggacaatgcttgttgccatggttcctgtgacaattggctctttgtcgtgcacgacaatggtctctgctccttgatgaaccctttcaccaaggcttcagttcagctacctagcctaccgaaagttgcgcctcacaatgagctgctctctgatgccaagtttcacatgacagtggtgcccccagcatcccttaactcaccatcagatctgcttgcggccgtgctgatcagagattttcgtgacaccttattttccttttgccagccactaatcaactcaggttcattcaatgggtgtagacaagggatgctaatatctggcattgcattctgtcatggcaagctttatgttgctaatccagatttcatgctatacaagtttgatctcgctgttagttctggtggcaaccgatattcttcgatgaaaaaaatgactctacttagggaagaattacaaatctggccccaagacatacctttatccaaggaagattaccatatcatcaggcgatatctggttgaatgtgatggtagattgctgttggtcaggcgtaggatgcaaatacgcccatttgcaaaatgtgatgatctcttggagactgcatgcacttgctggtttgatgtctttgaggcagacttcactgtgcaaccttgtcagtggagaaggctcaacacattgggccgcagagcgcttttcattggcaaatattgctctaagtctgtctcttcagaagaatgtgaggaagtcaaagaggacagcatctatttcatgtgtgactatgtgaagtcagatcaatctgttgatcctcttcgtgattcagttttagtgcatgaacaactagtacttgtcaagtatgtgctgcatgagatacgctga

SEQ ID NO: 61249 - DNA, 114 bp, Oryza sativa
  Clone ID: PAT_MRT4530_626C.1
atgacttacaggaggacgctggactttgtaatggagagtattggggcaattattggtgatgatgacagcagggacgaccaagagtctctaaccacacaagaacggcccgtgtaa

SEQ ID NO: 61250 - DNA, 243 bp, Oryza sativa
  Clone ID: PAT_MRT4530_62700C.1
gcctctcccgcgctacggcctaaaactcacacttaacttagtctcccgcggaagggtaacttaaccgcggggtgattaagattaagctcgatccgagttccacgtttaggccgatgatgatttccacgctgccacgcttcgactgccacgctgtgtcccgccactttgtaattaccagaaaagttttggtgctaatttgtacatggtttttcgttgcattctgatcagaaaaaaaaaaaaaaa

SEQ ID NO: 61251 - DNA, 1125 bp, Oryza sativa
  Clone ID: PAT_MRT4530_62701C.1
atggctggcaaatccctaatcccattcattggctcctcctccaattccacctacaattttgatggagagccgacactggcaaatcaattgatcccggtggagcattacacgatggaaggggtgaacacactatgggcgcagcccctcgcaacagtgccgggttcccctgtgaatctggagcccgtcggcgagctccctgatgatgggaaggccgcgccgtctcccgccgagtgctatgtgggcaccctgttcaccaaggcaagggatgaggtgctccacaagtacaccacacccaccgctactccatccactccgaaggaggagcgattccgtattcagggagtgcgaactaccggcggtgggtatggtaagggtttactccggcttttgatggcatcggagaaggagggggcagcggagtcccaggtggtgacagccctcgagatcactaaagtcctccttgtccggatgataaaccctgaagttgggagggccgaaggccaggccgggagggcccagcccaagttcggccaaccctgtacgtttgaggtaggtgtagaggtggtgacagccctcaagatcacttatgtcctccctgtccggcggaggccgaggacgagttgcctccaccccccgcccccattggccactgccctcggctccccctccgccaccccgcccccgttggtcgccgacgtcgactcccccttcgatgctgcgccgccggtggcggccgacgagggcccctccccgaccccttggcgcatccgctcccgacgcccttaccaacctctccggctacgccttccgccccgacctccgggctcctccatcctctcgcaccagcgcgccgccctcgcgccgcctcgggcgcccccgttccaggaccgcgtcgtccatgcgctcctcctcctgctcctcgagcccgcaggccccaaacctttcgctcccaccgccacccgttccgtccgctcccacttcgccgctctaccctttggttcatctctgccgacctcaccggcggtggccgacgcgctctcgccggatactttctactttcctgttgtccagaagaccgtctctgaccgcaatgcccatgtctgggctgtgtttgtgccaccatga

SEQ ID NO: 61252 - DNA, 302 bp, Oryza sativa
  unsure (1)..(302): unsure at all n locations
  Clone ID: PAT_MRT4530_62702C.1
gtgaaaccagcagganctcacggnnccacnggnntcaagcggctncanttacatcggcaggatggacgccgngcccgggatacgagnccgcnacntggacaccgnngaggacagatcctccnccncacccncnaggtcgtcgtcggcntgattntcancggcntngatgtcccccagatcnacngcgccccgagaangagggggncgtncggagccatnncganctctggccagnangcggaccacntgncgctnaaacgnnctccgccggncnaacncnanatacgttccatctacaacgc

SEQ ID NO: 61253 - DNA, 144 bp, Oryza sativa
  Clone ID: PAT_MRT4530_62703C.1
atgtcgtactacattagtccttacgccaacgtttctatgattgctacataccccgtctacggataccagccgttgacagtattgatagagaaggagggagaggttgattctgggatttttcaggttcaaccccgtcaaggttag

SEQ ID NO: 61254 - DNA, 562 bp, Oryza sativa
  Clone ID: PAT_MRT4530_62704C.1
atgaccaagctggagatgatcctaccaatatcctccccatctcattggaggatttgtatgaggagcaaagacgggagattgaacaacatctaaaggcgacacaagaggcacttttggcgggatgcttcatcaatactcgtcaaggagttgttggtaagcccggttctacaccaaaagtcactgtcaataagaggattgtatcttttatgaattccaaattcggttctcatgcgatcaatttgccgtctacttctgttgcgagtactagccaagctcctattcatcacatattagcaaaatcgatgggcgaccatgcaacatgccgggagtgaagattctagcgctgcggccgatctacccggacatcatgcatgtccgaccgcctagttgcacggtctgaccagtggctctctcgccggtcagaccacacctctgatgaccggttagatcgggccttgggccggtcagaccggtggaattgttcctgtccatgaggtagcccttcgaccaaatttgccgaaacccgtggcgaaggctatgaaccaaggatgatgcgaggcga

SEQ ID NO: 61255 - DNA, 245 bp, Oryza sativa
  Clone ID: PAT_MRT4530_62705C.1
gctggtacgccggacgtaccggatccgagtcccgaattcccgcaacgacccactcgtgttcccacgcgttcaaggccaaggggagcctggcattcgggtgcgttgcggcatcctacatctacacaatgcgccggccttcctggatcgccagactggggaggacgccgtgttctattgtcacgcacaccggcgtggccgggagaacatactgcctggcgtcgcatgactccgggaagaacaccgcg

SEQ ID NO: 61256 - DNA, 297 bp, Oryza sativa
  Clone ID: PAT_MRT4530_62706C.1
atggcaggtggatctggcgccagcggacggggcaacgacggctcgcggagggtcgccggcaggaggcgatgttctagccacggggaggagtcctcccctccaccagatctggcgggaggggagacggcagcaagggcggcgggctcgccgggggtaggtggcggcaggctcgaggaggggaggcggcggagggctcgccggtgggaggcagtgatctgccgcgggaaggagccctcccttccgccagatctggcgggaggggaggcggcggcaggggtggtggctcgccgggggtag

SEQ ID NO: 61257 - DNA, 1695 bp, Oryza sativa
  Clone ID: PAT_MRT4530_62707C.1
atggcgccgtcccagatccgcttcggccaccagatccccttctcccgccccgactccgacgaggaggaagaggaggacgacgaggacgaggaggtggaggaggaggaggaggaggaggaggaagaggagtacgaaggggaggaggaggagatggagggcgaggtgccggtgtcatcgccgctgatgctgccggcggcgaggggaggaggaggaggaggggtgtccgtcgtggagacggtggcggcggcgctgcggaggtcgctgctgctgtgcagcagcgtgcgcgccgcggaggacgaaggggccgcggcggcggcggcggctgctgcggggatgcagattggccggcccaccgacgtgcggcacgtctcgcacgtcaccttcgaccgcttcgtggggttcctcggcctccccgccgacctcgagcccgacgtgccccgccccgcgcctagcgccagtgtgagtgtatttggagtttcaccaacgtccatgcaatgctcatacgataacagaggaaacagtgtgccaacaatactattgaccatgcaaaagaagttatatcaacttggggggcttcaggctgaaggaatcttcagaataaatgcagacaatagtcaggaactacatgtcagggagcaactaaacatgggtgttgttccggatggtgttgacatgcactgtctgacgggcctcataaaggcatggtttcgtgaacttccaagtggagtattggactcattgactccagaacaagtgatgcactgcaacactgaagaagaatgcgctctccttgcgagtactctacctccagtggaagcagcactacttgattgggccatcaatctgatggcagatgttgtggaacatgaaaactacaataagatgaacgctcgcaacattgctatggtttttgcaccaaacatgactcagatggccgatcccttgactgctttgatacatgcagttcaagtgatgaattttctcaagacacttatcttgaagactgtgaagggacgggaagaaacagctatgccatcaagtgcattcccatcaagctctggttccccaagtgacaaagatgaacctcaggcattagagcatttggacaagcccaccatttgttcaactcagcaaaataatgattttccaatgattagtggggctactcttgatcacttcctctttagagcagaaccattgcgtcataatgacgcacaaggtagtgctggacgacccaagaaacgcgacaataaggaccatgacaacagcagcagggaattttctcccatagatagtgattcaagtagccaagccagcaattctgcaagcaaattcagtaatgacaatgtggaaggtttatttgacagatttaaatttcggaaaggagtagggaggctgtgcagacaccctgtttttcagttgagtaggtccatgaaaaaatcaggtgaagcgggacaagcctgtgtatgaagtaatgacacgatagggtgtagttgatagtttccattatttttagaggcatgtttacttaacatttcatcaaccattgtcctagatttcgtgagtagaactgtagaaggtattagccaatttggtggtagtagtactgaactactgatgtcgagttcctgcctgtatatttcaactattcatttctgaccctgccacccgcacgcggcccccccagcccgggga

SEQ ID NO: 61258 - DNA, 233 bp, Oryza sativa
  Clone ID: PAT_MRT4530_62708C.1
aagcttaccaggtactcaagctaaacgaatcaccgccgccaaaaactaaatatttagctaaataaatttaaattttccccaaaaaaaaaaagctttttttttttttggacctggtaagcttacattgttgcatataatggaagcagctaagctttttttttttgaccctcagacacaagcacctcgcttgttacatgttctcttaccttgctatgtctggacctggtaagctt

SEQ ID NO: 61259 - DNA, 429 bp, Oryza sativa
  unsure (1)..(429): unsure at all n locations
  Clone ID: PAT_MRT4530_62709C.1
acactatactaatactatgactgcacgcgcacgcatgcttaaaccctatacatctacaaccgcccccttttttttttttttttttatnacagacacaggttaattaatctagaaagctcctctatctatcacacacacacacacaattaatgtacatacatacatccactgctgcaactacaactacagggtcggtgcgtcgctactacaagtatacacatcgtacgtcggttggcaccatctccatcatgtcgttgtgctcacttaccggggacgaagttagtggcgtattcccacgccttgttggcgacagcgtcggcgacgtcgtcgaaaaggatctccattaagcccttccctgtgactatggcctggtcgaagaagcctaacatcgagaacatcgcgaggcggccggtcttgagctacttcacc

SEQ ID NO: 61260 - DNA, 744 bp, Oryza sativa
  Clone ID: PAT_MRT4530_6270C.1
atgaagcccggaggccaaaacccccgtggcaacaacgcggcaccgttcggtcgctacagcaacaaccacggcgcgggcttccgccgagggagtaccggacccaacgccccacggaaccaccaccacccggcagcggccgcgccgccgcacgtcgtcatgacgccgcagcagagggacgaggtgctgctgcgagccggccgcctcgccgcggagtacctcgtgaacatcggcgagctgcccccggacgcgctgctgcagggccgccacccgcctcctccgccgcacgcgccatttcagggctaccaacaacgccagtggccgccgccgcgcggacacccgtggcacgaaggcccgcacccgcagcatgggttccaggcatcgcgctcgtccgcggttggcccgatccgcaatatcgcgaagcgggcagtagtacgcggcggcggcggcggcgggacgttccgaggacgcggcgggcggtttccctctcgtcggcccggcgcgagtggcgccgctgctccggagacggcaggggagcccgggcatggccagggagtggcgcctggcgctgatgttggcggggtggtgggggtgcgcggcgatgggtctgacgcgacagcaccagcggggccgagtagcgggcggcagccgtcggcggcggcgcatccaggtggcgcggcacacggtcaaccggagaagggccagccgggagggcattcaaactctgatggctcagtaggtttatag

SEQ ID NO: 61261 - DNA, 2721 bp, Oryza sativa
  Clone ID: PAT_MRT4530_62710C.1
cacgattccgtcgcgcaaatcctccccgatctaaacctaaacccaccccaccccacgccgacgaaaccctaatccccctcgcctccgccgccatgggggccgccatcctgccgctcccggcgccggacggcgacggcgactcccatccgcaacagccgcctccccctcctcccggcggaggcgcgaagcccgagccgccgccgacggtggccacccacacccgccccctcgggatcatccacccgccccccgacatccgcgtcatcatcgagaagacggccaccttcgtctccaagaacggcccggagttcgagcgccgcatcatctcccacaacgccggcaacgccaagttcaacttcctccagccctccgacccctaccacgcctactaccagcaccgcgtctccgagctcgctgccgctcccccctccgccgccgcctccgccgccgacgcggcccccgagcccgacgaatccggcgccgcgccgccgccggccgactccgctgccgcgcccaccgtcgatggcgaggcggcgaaggcggaccactccgccccattccgcgtgccgccgcccaccaaggtgctggtgccacccaaggcggagctctacacggtgcatctgcccgaggggatcaccggggaggagctggacatcatcaagctgaccgcgcagttcgtggcgcgcaacgggaagagcttcctgacgagcctggcgcagcgcgagagcaccaacccgcagttccacttcatccgccccacgcacagcatgttcaccttcttcacgaagctcaccgacacctattcgagggtgctgaacccggtcgaaggcatgcctgccctactgaaggacctacaagacggggcgaaggacctgaccaccgtgttggagcggtgcctgaaccgcctggagtgggaccggtcgcaggagcaagcgaggcagcaggctgaggatgaaatcgaacaggagaggatgcagatgcagatgatcgattggcatgattttgttgttgtcgagacgatcgagtttgcagatgatgagtgcgagggactccctgtgccacttacgctggaggagttgaagcgtcggaagaggattgaggacctgggagaggaggaggcagccatggaattggccgagccagcgaaggatgttgagatggagatggacgaggaggagattcaacttgttgaggaaggaatgcgtgcagcaaggctcgaggaaaatgaaggaggagttcaagttaagcttgctggtgatgaggagccgcctatgaggattgtcaagaactacaagaggcctgaggagagaatccctgcggagagggacccaacgaaattcgttgtctcaccaataactggggagctcattccaattagtgagatggaggagcacatgcgcatctcgcttattgatccaaaatataaggagcagaaagagcggatgttggcaaaaattaaggagacaacacttgctcctgatgatgaaatctccaggaacattgtgggtcttgcccgtaccaggccagacatctttggaacaacagaggaagaggtctctaatgctgtcaaggcagaaattgagaagaaaaaggatgaacagccaaagcaggttatttgggatggccattctggtagcataggtcgtactgccacacaggctctgtctatgggcggcgaggaacaggttgatgcttcgaatgttcctggtccagctccacttccccgccctcccatgccattgcttagacctcctcagccacttccactggttaatgttccacgctttcaacctagtgcaatgccatatcccccacaccaacaacctcatctcatgcaaggagttccacatatgatgcctaccatgcatccgcctccaccaccgccaataccaggtcagccgcaggtgcttaggatgccaggttcaatgggtcctatgccaaccaatatacctccgcctccaccaggccaaaatccctacatgcctggcccgccgcgtccatactccatgcctccaccgccgcacatgccaaccatggcaaccatggtcaaccccattgggattcctcagcctccaccacctttgcctccacaaccacctgctgaggagcagccacctcaacctgatgaaccagaacctaaaaggctgagaacagatgacgcttctcttataccagcagaacagttccttgctcagcacccgggccctgctcacatctcagtgtctgtacccaaccttgatgaaggaaacctgcgaggccaagtgttggagatcggtgtccaatcactctcagacacagttggcagtctaaaggagcagattgctggagagttgcagctccctgctaataagcagaagttgagcgtgcggactagtttcctcaaagacaatctcactcttgcttactacaacattggccctggagtggtgatcaatttaacactgagggagcgtggtgggagaaagaaatgagctttcttgtatctcagtgcactggcaggttattgcttgcaactgaacttgcagctataaaggagaatatttttgttggttgctgcctattaatttctgtattctcatgttatgtttaaacgtggtgaaacactgttatttgcactatttgaatgtcagacatacatatctctttatggccatctattaattaaaatatatgttttagcttcaaaaaaaaaaaaaaacccaaaaaaaaaaaaaaaaaaaa

SEQ ID NO: 61262 - DNA, 330 bp, Oryza sativa
  Clone ID: PAT_MRT4530_62711C.1
atggccactgttctccgatccctgacgaccctgagtagtcgctcgtcggcaaccaccgccggcatcgtcagccgccgcctcatttgcaacgcggcgtcagatcatcatcagaagctcgcaaagaacagcggcggcacgaagacggaggtggtatcggcgactgtgaattccgaagtgcaaatcgtcagctggggtagattattcggtttagccgttatcaccttcttcagctgcaaacttggaggaagatatgccaactaccaatacgagaggtcccttttcgagggcttccaaaaatctaagcaggagatgtcaacaccacagctgtaa

SEQ ID NO: 61263 - DNA, 1429 bp, Oryza sativa
  Clone ID: PAT_MRT4530_62712C.1
gcgggacgcagacgtgttccagaggcttcaaccgcagcgaatccccccacctgaagaaaaacgagacgagattctctcgctctcttccggcgagattttcgtctttcccccctctcctctccgctcctcgtctcgtctctccgcttcccctcctctctcgattccccaccatggccggagccgccgcgacgccgccggcgatgatgcgcgccgtgcagtacgacgcctgcggcgggggagccgccgggctcaagcatgttgaagtcccggtcccttcggcaaagaagaacgaggtgctgttgaagctggaggcagcgaccatcaatccagttgactggaagattcagaaagggatgctgcgtcctctgctgcctcgtagactaccttttatcccagtgaccgatgttgcaggagtggttgctggtgttggtcccggagtgaatgatttcgcagtaggtgatcaagttgtcgctatgttgaacagtatgaacggaggtggattggcagagtacgccgtggcggcagcgaacctgaccgtcaagaggccacccaacgtctcagcggccgagggcgccgggctgcccatcgcggcgggcacggcgctgcaggcgctgaggtccatcggcgccaagttcgccggcaccggcgagccgctgaacgtgctggtcaccgccgcctcgggcggcgtgggcctctacgccgtgcagctggccaagctggcgaacctccacgtgacggccacctgcggcgcccgcaacgcggagctcgtgaggggcctgggcgccgacgaggtgctggactaccggacgcccgagggcgccgccatgcgcagcccctcggggaggaggtacgacggcgtcgtgcactgcaccgtcggcgtcgggtggccggcgttcgagccgctgatggcgccccgcgggaaggtgatcgacatcacgcccaacttctcagccatgctcacctcggcgctgcacgcggtgacgctgcggcggaagcggctggtgccgctgctgctgtcgccgaacaaggccgacctggagttcttggtcgggctggtgggggaagggaagctcaggacggtggtggactcgaggttcccgctgggcgacgcggcgaaggcgtggcagaagagcatcgacggccacgccaccggcaagatagtcgttgagatggaagggtgatagtatcatgttggcatgttcggttgttcttgtttgttcgtgggtggaaacttacattcggttggaacataacaatacagaataggggaatactagtcagtttggcatctgtttagtttggtgatatgacttggtgatgatatatactcgagatttgtttctctcttctgcgttttgaagaatttaggagctgtaaatctgagggcattatatatcgagattacttctgcttcaaaaaaaaaaaaaaa

SEQ ID NO: 61264 - DNA, 198 bp, Oryza sativa
  Clone ID: PAT_MRT4530_62713C.1
cccgatggtacttacacttatgtgttcgtttatacgtactacacaccccctgccaactacactcccacacatacacaccccacattttacacatttactgtgataccactggtttgaacctcacacatcacctcgacacaacactttacacacacacacacgataccacttgacccgcaccgacacctcactcccaaa

SEQ ID NO: 61265 - DNA, 2880 bp, Oryza sativa
  Clone ID: PAT_MRT4530_62714C.1
atggcgtcgtcttcttcctcttccaccactagcgttaaccctttccaaggccataccgtgagtgagaaattaggaaagaataactacgccctatggaaggttcagatctgcgcagccgtgcgtggagcgcgcctgcagggttacctgactggcacatttgagaaacctaaagcggaggtcaccgtcacagccgatggcaagtcgacgaagaaggccaatccagcttttgaggattgggaagccttggaccaggaggtgcttggctacctcctcttatccctctcacgggatgtgctcatgcaagtcgctgcgtgtgagacggcggctgaggtgtgggcgacgatcgagcggatgtactcgacgcacactagggcgaggacgatgaacactcgctttgccctcaccaacaccaagacgggaaaaatgactcttcctgagttttttggcaagatgaaagctcttggagatgagatggctgccagcaccggccggccagttgatgaagaagagatgatccaacacatcatcgctggcctcggcgaaggctacagcaaggtgatttctgccgtgtgcgcacggcccgaaccgatgacactgaggacggaccagatcgcaagccaacgtgctaggtctgcttcaagcgaggtcacaccgcaaccaattgttggtacagccgccacagctagctcatcctacaacgttgataccaactggtacattgatacggatgccaccgatcacatcaccggggagctagagaaactcaccaccaaggacaagtacaatggaaatgaacagatccacaccgccagtggagcaggcgctcgtcttcgctccgagctcctactattatcacctgaacttactagtgcggatgaacacgtattccaatttttggctaataatcctgctgcatctaacgccacttatcagttttcccaagaaaatgcagcagatcaggcggccacagaaaatcctaccggcgctcactctgaggaagatgcgctgcagcctgccatcaccaatcccacggcgacaggctctgctataccagcggaccacgggagtgcgccctccaccccgccctccagccactccgggagctccacgcggcagccggctcgtgattacgtggtcctgcctgggtcgctgtcacgtcaggaatccggggagcagcatcaagacacgtctgcagcgacattgtctcctgacactgacatcgacagtgatgatgatgcaggtagtacatgtgcgtcagatggtgcagatggtgcaaatggtgcaggcagtgatcaagagatggaagtccaggcgtcaccagaacgtgttcgtcctcgcactcgtctccaaagcggtatacgaaaagagaaggtatatactaatggtacagttagatatggctgctttaccagttctggtgaacctagtgatcatatagaggcactaaagaataaaaactggaaacttgccatggattttgaatatgatgcactggttagaaacaatacttggcacctagttccacctcagagagggaaaaatatcattggttgtaagtgggtctacaaaattaaaagaaaggctgatggatctttagatagatataaagctcgcctagtagccaaaggttttaaacaaagatatggcatagattatgaagataccttcaatccagttgttaaggctgccacaattaggataattctgtcaatagctgtttctagaggttggagtctcagacagttagatgttcagaatgcattccttcatgggtatctagaagaagaggtgtacatgcaacaaccccaggctcccagagcctggtttgctagactaagtaaaaagttgatggaacttggatttagtggttctaaagcagacactttattctttttacataaaggagacattactatctttgttcttgtatatgttgatgacataatagtagccagttcgtcagagagggcaaccatggctcttctccaagatttaaaggaagagtttgcattaaaggatctgggagtgttgcactactttcttggtattgaggtgagtaaagtccataatggtattgttctgacacaagataaatatgccaccgatttattaaagaaagttgaaatgatgaactgtaaaccaatcacaactcctatgtcagtaagtgaaaaactgtctgtacatgaggggtctcttttgggtcctaatgatgcaactcaatttaggagcatagttggagctttacaatacttgacacttactagacctgatatagcattttctgtcaataaagtctgtcagttccttcatacccctaccacaatacactgggcagctgtaaaaaggatacttagatatttgaagtcatgtactaagatgggactaaatatacacaaatcagggtccactctagttagtggattctctgatgcagactgggctggtagcatagatgacagaaggtcaactagtggatttgctatctttattggttctaatctagtgtcatggaatgctagaaaacaggccacagtatcaagatctattacagagtcagaatacaaagcaatagccaatgcaacagctgaaattatgtgggtacagactctgcttttagagttgggaactaagagtcctcaagcagcaaaaatttggtgtgacaatcttggggcaaagtatttatcagcaaatcctgtttttcatgccagaacaaagcacatagaggttgattatcattttgtcagagaaagggtaagtcagaaattgctgaacattgattttgtttcttcgggtgatcaagttgctgatggatttactaaaccactgtcaacaaatctcttggagaaattcaaggccaatcttaacctatcaaggttatga

SEQ ID NO: 61266 - DNA, 139 bp, Oryza sativa
  Clone ID: PAT_MRT4530_62715C.1
cttggctctgaactcgtcggaggacgtagtcaccgctcgaaagtatgcgtactcggatacgcttctcgtgatatcgatgaagggccagttggtagctagctgctctgacggcaacccgttctcgatgttcctcgagtag

SEQ ID NO: 61267 - DNA, 215 bp, Oryza sativa
  Clone ID: PAT_MRT4530_62716C.1
attagcaccccaagcttttacactgtaatgcgtccggctctgtatattgctggggaattgtgaccggagaacaactttcacacagggatgacagctatgaccatgattacgccaagcttaatgacgactcactatagggaaagctcggtactgcctcgcaggtaccgggtccggaattccccggggcgacccacgcgtgccgggccgacgccggc

SEQ ID NO: 61268 - DNA, 261 bp, Oryza sativa
  Clone ID: PAT_MRT4530_62717C.1
atgcccagcttccctccgcccggcgccgtcaccatctgcgagatcaaccgcgacctagttgcggcggatgcggtgtccgacgatggagccaaggatgcctacggggatgtcctctcggatgctcttgttgccacccacgagcctcctgctatcactgaagctgctgagccttctgagattgtccccagaacaagtttagcttccaccatagctgagtccttcaaacaaatgctcttcccttcgtgcgataaaaattattaa

SEQ ID NO: 61269 - DNA, 317 bp, Oryza sativa
  unsure (1)..(317): unsure at all n locations
  Clone ID: PAT_MRT4530_62718C.1
ggggggcgggtgggccnctcaaatactcncgttgaggagtcgcgccgcaaccgccgccaccgcagccgccgccacagcctgaaccgcagccaccggacttggcatgtccaacggtggagctttccatggccacgccgccaccacatcctcctccggtgggggcggggtnacatttattttcttnnatctttccattaccattccnccnccacaacctccaccacatcccccncctcatccttatccccatccnccnnacttnacatnnccatccttnnatctttccatttccacnccnccaccncatcctccaccac

SEQ ID NO: 61270 - DNA, 621 bp, Oryza sativa
  Clone ID: PAT_MRT4530_62719C.1
cccacgtcttcctcccacgcgtccggccgacgcaagacaacgacgatgcccagcttccctccgcccggcgccgtcaccatctgcgagatcaaccgcgacctagttgcggcggatgcggtgtccgacgatggagccaaggatgcctacggggatgtcctcggaaatggtcttcagcccgattcctttccagtcggatgctcttgttgccacccacgagcctcctgctatcactgaagctgctgagccttctgagattgtccccagaacaagtttagcttccaccatagctgagtccttcaaacaaatgctcttcccttcgtgcgatatcaacggcatcccagacctacacatcaagccaaggtttcacagctgcttaatagcctgaatgctcgagtaagttgtgtcatattgatttgtgcatgggtctggatgtgtgaggctgcgttgatgtaatcttttcgctcgcttagccgactaaggggctgcgctgctataaatcttaatccatgtaggattctacgcttctctgtttagagctacatgctaccctgaaactgaaaggactgcaaaacatgttctgcatgctcaccaattcgatccgtgtccatataggatctcgct

SEQ ID NO: 61271 - DNA, 588 bp, Oryza sativa
  Clone ID: PAT_MRT4530_6271C.1
atgggcccgaccggctacgccgccgccgccgccgccggcgcacttgcggcgggcggcgccgtggccgtgctcgtcgccttcactctccctacccctgaccaaccactcccacccctcccgccgatcgtcgtgcgctgcagaaagctcctcgatgacatccgccgcgccgcgccgcgttcacaccaccggttccaggtcgcctccggggcgctcgccgaggccgaccgcgccatcgccgccggcgcctggggcggcctccacaaaccgctgctgctcgtcgtcagggcgttcgcgctggacgccccgggggcagggcccgccggcgcgctccgggcccttgccggccgcctcccgccgcgggagcgcggggacgcgctcgtgaagcgcgcggagatcaacctggactactaccgccgctgcttcttcccctgccccgcccgcctcgaccgcgccgccgccgatctcaaggaggccctctgcttcgtccccgacaacgcccgcgcgcgcgcgcgatgctcggcgagtgctcgaggaagaagggcggctacaagaagaaggatctggctcgggcacgccgccgtgaagtaa

SEQ ID NO: 61272 - DNA, 201 bp, Oryza sativa
  Clone ID: PAT_MRT4530_62720C.1
atgcctgctgccgactcctatcgccgccagtctgaccgccgtgtgcccgccggtcggaccgtcgcgatgctgccggcttcggcgctgcaaggggtgccagcgccgttagcagagcccagctgtccctgctcccaagggacgacgatgactattgcagccatagtggcacccacgctttgtgaggcagtggaagtaaattaa

SEQ ID NO: 61273 - DNA, 102 bp, Oryza sativa
  Clone ID: PAT_MRT4530_62721C.1
atgggttacatcgagtatgacaaggcgagggacagttggggcgctgcgcatttatggctgttcagcttgccgggcgagggcctcggggcgaaggcgcggtag

SEQ ID NO: 61274 - DNA, 372 bp, Oryza sativa
  Clone ID: PAT_MRT4530_62722C.1
aacctagacaaggaagggctcttggagcaactgctacagtcagctgctctactgaataaatccatctctgtgtatacattttctggtgtgtccctgaaaatcttgcgaggcgttcggggaggtgctagttacatctgtggcctcggtgccggtgaagtgacctgcgcggtggacaagtgcaaggaggagctgagcaggctaagtatgatggggatgaggaggagcagaggtggcctaaatctgatggacaagattttggcagtttgggaagcatttgggatatggcaggctccagaatccgtggttaattcattaccatgtaagagctacaaaaagcagacagcccaatgcagtgataacatggaacagtga

SEQ ID NO: 61275 - DNA, 991 bp, Oryza sativa
  Clone ID: PAT_MRT4530_62723C.1
ctcatcttaaacctaggatcaagggtagtggcaatgatcataagtttgttcttctctttccaatatttatcaaacttttccaacatagcttcaaccatattcttcaaaaccttgtcctgaggcatgaactctgatgaacccctagcaatgaacttgtcctttaatttgccaacagcactatcattattagaagcattgtcaagggtaattgagataaccttatcctctatattccattcagttatgcactcaaagattgcccctttctccgtttttgatggaacatccacaaccttgaaaagcttccaacaatctgaacgcttaacccttgccacactctttgtaggggatacaaaaatacccttctttcgtttccctttcctctttgatcctggagatccagagttgccctcatctgtagattccccatccacttccttatcttgacttgaggaatgaactgacaaatgtgagggtgtgctatcagacgaaacagacggcttagaaaattcttcatttttcgagtctgatccttgatgtgaggttggtggatttgatttaggtctttgtcttggtggcttctgaacagaggcgaggtggctgctgcctggacaagcttctgatgatttcttccccttgctgtggttcttggactccatgcttgccaatcggcgctccctatccatgaaggccctgcggcggctgcgggagaaggggcgtggtcggcgtggcctggcggctgcggtgggaggagcggcgtcatcggcatcgtcggcgtggcgctgtggctgcgggaggagcgaccggagtcgtcgccgtggccttgcggcccttgcggctgcagcctgcgggaggaggagccggtgggcagggcaacggcaatgttgcggcctgtggcgggccggcggtgcaaggagaagggcgagggcacgaggcagcgctacagtggcgcaagagaaggccacggcagcagcctgcaacggcatgcgcg

SEQ ID NO: 61276 - DNA, 511 bp, Oryza sativa
  Clone ID: PAT_MRT4530_62724C.1
ggggggaccaatttggagaggttggtttttttgcattggatgttgggaacgggcacaaaaattttgcgggggtcttttaaaaaaaattttggggggtgggtaccttgggaaggggggggttttcagccaatttgacaaaaaggatgcttggggacagttgcaaaaaatgaaaaaagggttatgaacaccgagggggcaaacaggggtaatggcctataaggatataacgggactagcctttgggttaaaacgttgtacttttttacggggggattggccttgtttgggttgctcccaataatgggttccccgaaggacccggtttttaaaggccttaaaaaaattttggggccacaatttttttgaaaacattctaggggtttcagttacactaaaacaatttttgtttgccaaaattggtttattaaacaaaaaatttttaacaatttccacgcgggggttcaaaactttcatgttccatgagtcagcaggggccccataaaaaggtttt

SEQ ID NO: 61277 - DNA, 849 bp, Oryza sativa
  Clone ID: PAT_MRT4530_62725C.1
atggcgatggtgcggtggaggccggtcggcctcgaggtagagcgccgtggcggcgcacggggtgaggcgggcgtggaggacactgtggaccgggtggaggaagagcgagatgtacaacggatcttggccatctccgagatatacagcggtgacgcctgcatgacaatcactggtgagatgaatcaagaactgatatataatttctccggtctctacgccacggctcagagaaaggcacccgcccgccgccgccgccggaatcatgctccgcggccgctcctcgttgccacaccgcttgaagagggaaggagagcgagaaaggtcaagaccgagcgggagcaggggaagggctccttcgtcttcctcgagctcaaggacggcgccgtttttgtgcagggagccggagcggtggaggcgaagaagggcggcgcggcgggaggcggcgatgacgggcgccatcaccaccgccacaaccaggccgtgcagagcgcggtggcgagggagcggcggaggcggatcagcaacggaagggcggtggcaacagcaggcaagcggagacagcggcgaacggtgggccacgccgcccacctcctcctccgctcgtcgcccaactcccttgctgacgttggcctgctcctgcccgccgccgttcttcgcctcctgctctgcccttgtccgctggaatccgccgcctccgctcacgagctagccacaacagagcgagcaaaagcaaccgccctccccgccctcacggcttcgtcgtctccggccctcgcccgcccgccgccagcccccgtcccatggccgccgctcgccgaacggaagagaacgagagaggggggaggatga

SEQ ID NO: 61278 - DNA, 2193 bp, Oryza sativa
  Clone ID: PAT_MRT4530_62726C.1
atgaagggccagggtggcggcgcgggggccccggcgaagaggcggtggaggagcgtggcggccgcggccgccgcgctggcgctgctgttcctctccgtcggcgtgccgctcgccgtgctgctcggcctccaccagcgcttcccgtccatgtatttggccgacgagagcgccgtgtcggtgtttggcggcagcgagggtggtggttgggagccaaatacatcgcaggaaaatgacaggctgccagtcaacgacacgaacaaatttccgccatcgattgaaaagtctgcttttgccatatcatggatcttgtttcacatggccctcttttgcatttctactgcaatcaaggcactgtttctttccttttggcatgactggagcaaaacaaataccggtaattctgatgcagaaagcaatgggaccaacaatcaaccaagtattgacaaaccgattagcaatacctcaatccatccaggccttcctatcaaacaaatcgtgatctttgatgatatatcattactgagtaatactgatgctgatcctaaggacaattttgaacaaggtttacctggtgatgagagtataaaatcgtgccaactagaatttggaagctattgtgtttggtctgttgaacacaaggaagtgatgaaagattctgtagtgaagagacttaaagaccagctctttgttgcaagagcttactatccaagcatagcaaaacttgaggggatggaaaaactttcacatgaaatgaagcaaagtatccaagagcatgagcacatgctcagcgaagccatatgtgatgctgatcttcctgcattccatggagccaatatggcaaagatggagaagacaatagctgcagcaaaatcatgtctgatagaatgcactaattttgagaaaaaactgaggcaattgcttgatatgactgaggatgaagctcattttcatgcaagacaaggtgcatatctttaccggcttggagttcagacattacctaagagcctccactgcctttcaatgagattgacagtagactactttaaatcctttgctgacatggagtactccaatgtgcaaaagcttgaaaatccagttctccggcactatgttattttctctaccaaccttcttgcatcttccatgactgtcaactcgactgtgataaattctgaggaatcagcaaatgtggtttttcatcttgttactgatgcacagaacttttatgcatttaagaattggttcattagaaattcttacaaggaagccactatcggtgttctgaattttgaagatttccaagcaacacatttggataataggagagttgaacacttatcaccatatgaggagttccgcatcgcttcccatagcaatgcccgaattccaaatacccaaatgagaactgaatatatttcagtgtttggacactctcttttcttgcttcctgagctgtttagcaatcttaaacgggtgattgttttggaagatgatactatagtccagagagacttgtcacacatatggaatcttgatttgaaaggaaaagtgattggtgctgtacagtcttgtcgagttagattaaggcatctcagaccatacttggttgacttcccatatgatgctagttcatgtatctggatgtctggagtgagtgttattgatctcaataaatggagggagcatgatgtgactgcagttcgtaatcgagtactccaaaagctgcaacatggccctgaagcgtcatggagagctgcggtgttacctgcaggcctgcttgcttttcaaaatctggtccatcctattgaagcacagtggatccagtctggtcttggtcatgactatggagtcaatcatggtgctataaagaaagctggcatattgcactacaacggcaacatgaaaccgtggttagaactcggcatacggcgatacaggaaatattggagaaggtacctgccaagggatgatccattcttgatagattgcaatgtgaatccatgaacaaggcaattttgttagtcctggagtccggaagtccatgttcgacgaacagcaccaccttgtgcgatagcgagagttcactgtatgcgggaaatttgatgagaggagaggggcttcagtgagcaccgcccaaactactgaggatctttcaggatgctgctgagatatgaagtaaaattgatttttttt

SEQ ID NO: 61279 - DNA, 1575 bp, Oryza sativa
  Clone ID: PAT_MRT4530_62727C.1
gcggtggcctcgaggcgcccgcgtggattgcagtggcgctgctcgtcacttcgtctcctcctctccaccactcgtcgtcgtcggcggcgtgggcatggcgacacccgcgccgctctccggcctccgcccgcgcgctcccgctcccgctcccgcggcgcgcagtcgcctgtgcggccagtcgccgccggtcgtggccccgcggctcggggcgttcccgcggcggcgtggtggggcggcacggtgctcgccgcgcgccgaggccggggacgtggaggcgcttagggcgggggtgtcggtgtacaagccgcggtcctacgacgtgctcgtctccgacgccgcccgctccctcgcctgcgccatggacgagggcaagacccgcctcgagatcgagttcccgcctctgccgagcaacatctcttcttacaagggttcctcggacgagttcatcgacgccaacatccagcttgctcttgctgttgccagaaaacttaaggaactcaaggggactagatcttgtattgtgtttcctgacctaccagaaaagcgcagggcatcccagttgttcgggactgctctagactcgattgagactgcaactatcagttccctggatgaggtatctaccggacctgttaataccttcttcagatcaatgagagataccctggattttgactttgctgacgatgttgaagatcgatggaaatctgatgaaccaccatcgctatatatcttcatcaattgcagcacacgtgacctttcaactatagagaagtatgtggaacaatttgcctcatctgtcccagcccttctctttaatcttgaactagataccttgcgctctgacttggggcttctgggattcccaccaaaagatttgcattacagatttctttctcagtttaccccagtattttatatcaggcagcgtgactactctaagacaattgcagtcactccatatatcgtgaactacagtggtgctgtattccgtcaatacccagggccctggcaggtcatgcttaagcaagccgatggttcttatgcatgtgttgcagagagtgcagctcggttcactttgggacaggctaaggaagaactgttaagagttcttggtttgcaagaagaacaaggaagctcactagaatttctcagaagaggatacaagaatgctacttggtgggaagagaatgttgatcaggagaaatcgtcagcatggcgaacttgaggttgaggccctgctgctgccttgtctgggtgctgatctgattggcggcgagtgcagacaggaacagaagaaaaaaatggttgtctgaaattgcagagcccaggcgacaaggatgcaaattgcctgtgctgcaattgtacattttgtgattgtaacatgttactgtgtgagtaacaggcattagagttttgagaggattttcctttctttttcgatgattatatatgtgttggactctgcttctttgaagcatgaagcaacttcacattttaaatggaaattcgtgttcatccaattgtactttctccccctccctaaaaagcaatatgaatggaaattatccttac

SEQ ID NO: 61280 - DNA, 191 bp, Oryza sativa
  Clone ID: PAT_MRT4530_62728C.1
ttctcttcaccaattcagtgacataagcaatacccgcagcagaggccagcgatgctaactcacacatcgaccaagtcagctcttacataggagaggaaagaaccggagtgccaaacatgctaagacacagcggcaccgaagacgggaggagcccgcatgcgtcccgccaggacaaagagagagcagctgac

SEQ ID NO: 61281 - DNA, 380 bp, Oryza sativa
  unsure (1)..(380): unsure at all n locations
  Clone ID: PAT_MRT4530_62729C.1
cgcaccaccggcgccaaaccaaccacccaccatccaccggtcgaacactttggccgctctncgncccgncttaagcttcggttcttgttcggtggntggcttcgaacccgaanaaagaaccgggacattgggcttccccaaggaancgnccggccgaagggcccggtcggccggtcggcccggtgggcgggaagggncgggagggaanccgggantgggaaggcccaaggnttccggcgggcggtgaggggaagcggcccggtgggggcnagggtacgcnggcgggagatccgcgacccgggccaggaaggcgcgggntgtgggcttcgggnaccttcgacaccngccgaggccgcgggcgcgcgcctacgacagcgccg

SEQ ID NO: 61282 - DNA, 230 bp, Oryza sativa
  unsure (1)..(230): unsure at all n locations
  Clone ID: PAT_MRT4530_6272C.1
tcgatngnaagcttatagangtttccgtgggnaatggngatccgggnnaggtcctncnnctacgncncnganggttcgcgntngcgntcgcgctggcgtccgtcnccgctgtcgccggcnaggtcttcttccangagaagttcgaagatggatgggaaantcgntgggtcaantcagaatggaagaagaatganaacatggttcgtgaatggaaccacacatctgggaaa

SEQ ID NO: 61283 - DNA, 605 bp, Oryza sativa
  Clone ID: PAT_MRT4530_62730C.1
gcacgagggccaaggcaaacgcaacgcctcctcctctgcttcttcctctgctgctactgctagtgctaatcccttcctagttcctactgctcgtgctcaagctcaagctccggtctccaacctcgaggtcaatcgcagcaggagaggagaaaaggatggaggtggagatgatggaggacgacgtgttcttcgccgagctcagcaagcggatatcgctcctcatcacggacgacgacgaggcggccgacttcggcgccgcacgcttccccgcctccgccgccgcgcccatcccgggattctcgctcgcccatgtgccgatgggcgcgtcgatggtggcgccaccggcctacacgttgtaccaccacgccgccagctacaacaacggcgccggcatgatcggcgccggcgacaacgccgccgtcagggcgtggcagcagcagcagcagcagctgtgcggcagcaagggcaccggcgtgttcatcccccggtcgtcgccgggatccgtccaccccaagaagaagggcaagagcaagggcaacgtgcacaaggcggtacggggccaagcggcgccggcgaagaaacaatcctctccttttttaagaaaa

SEQ ID NO: 61284 - DNA, 214 bp, Oryza sativa
  Clone ID: PAT_MRT4530_62731C.1
ttatgcgtgtttttctatcgacgtgtcttctgcattcgtcgtcaccttcatataggaatcaggcttgacgtcacctacagatcgcccgtaaagcaaaagggcgggctcctcttcatggcgccccggcgcagtgatcgaggcagcgaagccgtgcctcgatccccaagacatcgtccgaagccgtgcctccgacaacaacacctcaagcgcttga

SEQ ID NO: 61285 - DNA, 416 bp, Oryza sativa
  Clone ID: PAT_MRT4530_62732C.1
cggaggggagggcgcggccgccgccgccaccacctccgctgggcaaccgccggctacgggagtccactgcctcgcctccctacgccgaatccaccgcccaccagcctcgtcgccgccctcgagcctccccaccgttggatccgccgctcaccagcctcaccgccgccagccaacgatggagatgaacatggtggcggctggatcgacgcgaggaagcagcaaccacgacttgggccagtggtggatctggccggcccgtcgccgtcgacggcagaaccgcaggatccaggcgagcaccactgccggccgccttggacccttggtgagtaacgagagattgagagagagtgagagacagaatgggagagagaacaatagaggaactgccctcgtgccgaattcctgcagcccggggg

SEQ ID NO: 61286 - DNA, 543 bp, Oryza sativa
  Clone ID: PAT_MRT4530_62733C.1
atgttcggcgtcgtcttcccggaccacagcttcccgctcgacgtcaccgccttcgcgcaggtggcgcccaactcctgggcgctcgacctctccacgctctccctcgccgccgccccgcgctccgccgtcgtcttcctgctcccggccgccgccgccgcgctcccgccggggaaggccgtcgccgtctacttccagcccgccgccaaccgccccttcgcgttcctcggcgcgctcggcccgggccgcccctccgcgagcctcccgctcccggaggccggcgacgaaccggagccccccctcggccccgccaagctcggcgtcgccgtggaggacgcggcggcgctccctccgccccccgacgggcagcgcgccgagcgtgtcgcgctccgcgtcggcgagaacctgttcaacttcatgcagtcgttctgcggcgccgacggcggcaagctggtggtgcccacggacatcctcgaccggtggttccgcaagttccaggagcgggccaagaaggatccctcgtatctcaagacattcgacttttga

SEQ ID NO: 61287 - DNA, 753 bp, Oryza sativa
  Clone ID: PAT_MRT4530_62734C.1
atgtactcatcggagaccggggcgtggagcaccccggtagttcttgatgatggtcttgattcctgggaacagcgatggcgagatgcacagagtagaggtgaattctaccgcgtaccttatgtcatgcctaggcgagttgcccttgtcggagatgaaatctacttcacacttcgggaggataatgccatcatcaagtacaactggggcatgcactgcttatctgaaattgactcgccgtcgccagacgtgtatggcattgccctcatggagatggagaacggttcactgggttttgcctgcattgaggattccagcctttatgtgtggtcacggaaggtgaattcagaaggggcagcagaatgggtacaatgcagggtgatcaagctggacaaaatgatacctgttgccaatctcagtgatgaagcatttgtggttggctctggggagggtatgggtgccatattcgtgagcacaggtgttggcttgttcacgatcgagctcaagtcaaggagggtgaagaaggttgcagagcctgaggtctactttagcatcttaccctacatgagcttctacactcctgcttctatatatcttattagtcataatataactgcaacatttgttatatggattgacaaaggctgttttgtatcgtggcacattgttatcgctagcaaggactcactgatctttgatgtcatgctcaagagtaacttgttgcaaaatggacaaatccattgtcttgactcttga

SEQ ID NO: 61288 - DNA, 2532 bp, Oryza sativa
  Clone ID: PAT_MRT4530_62735C.1
atggcgagcggcggcggcggcgacggcgaagggaagccgccggcgaaggaggagtcgacggagtaccggctgaggaagtacctgctgctgctggcgacgctggtggcgacggtgacgtacgcggcggggctgaacctgccgggcgggtcctgggaggaggacgcgccggcgccggccgggctgcgggtggtcgccggcgaccccatcctccgggagacgcggtacacgcggtacgtcgtgttctacgcctgcaacgcggtggcgttcgcggcgtcgctggtggtgagcctcatcgtgctcgtcctccccaaggaaggcggcggccggctgctcggcgccatgcgcgcggtgatggtggtcgacctgctcggcctcatgggcgcctacgccgccggcagcagccgagacgggttcaccaccgccgccgcctccgccctcctcctcctcgtcttcgcctacgtcgccggcgccttcctcgcctccctcaatctcatcaccgtcagatggcagctgccgtgtcaagaacgagcatcgccgccagcggcggcgccgcggccgccgccgccaggagaccaagatccggcagcaaccaaggcgatgaagtcggagcacgagatcctgctgctgctggccatcttcgcggcgacgatcgcgtacgtggcggggatgaacccgccggggggattctggcgggacgccgccgtgggcggggagcacgtcgccggcgacccggtgctgcaggggcgggagcacccgaaccggtacagggcgttctacgtctgcaacaccgccgccttcgcggcgtcgctgctcgccgtgatgttcatcgtcgtcgaggacaagaggctccgccattggaggagggcggtgccgtacgggctcgtcgtggcggcgctgctggggctcggcggcgcgtacgccgccgggagttgccgggacgggaagcacacggcgtacgtggcgtgcctggttgccccggtcgttgcctacattgccatcctctatatagcttgtcccagccgcagcccatcgtcgacgtcgaaatcgccatcgaatacaaatactacaaccacaaccatcagcatcagtgacagcaaacaagacaaagaggtggataagatttgtgagtacattcagttgcttgctactctagcagcgaccattgcttaccaagcaggaatagatccacctggtggtgtctggggagagagcgggaagggtcatagggttggagatccaatactcctcacaacgcatcccaggcggttcaaggtcttcttctattttaactctgcagcttttgtggcgtccctggtcatcatggcactgtcgcagaataaaagattggtgaggagataccatgctgtactggaggcgaccatgatactggacctgttcggcctcataggagcgtacgctgtcgggtgttgcagggacacgagcacctccatttacatcatcgccatggctggtgctgtccttgtctatgtagtgattcacattgtcttcttcacattggagactaaaaatggcggtgatgatcagttggaggagcatcgtgaggtgctgcttcttcttacggtcttggctgcgacactcacctaccaagctggcctaaccccgccaggtggtttctgggagaacgatgagaagtttggctaccatgcgggcttccccgtgctcctaaacaaggacccttgccgctacaaggcattcttctactgcaacgcggcaagcttcatggcgtctgtggctctaattgttcttcttatgaacaaaaatctatatcggccaggcattcggagctatgccctcattatctgcatggtagcaggcatgtttggggttctgggtgcctacgctgctggaagctccatatatctacggaccttcatcattgtactggtattggttcttgtggtttttgtaggtgtaatctgtctggcaatcaaccatttcagagaattaaagaagaatacacaacaacaacaacaacaacaaccaccaccaccaccaacgggaaccaatgggttctcctcgccaaagctttcgatgcaagaagaagatgtgatcaagtacctgatgctggtagggatactagccgcgtctatcacctacctgacaggcctaaaaccacccggcggcctatggagggacgaaggcgatggacactctgcgggcaatccggtcctctatgacattaacatgcgacgatacaatactttcttctacagcaactccacttccttcatggcttctatcactgtcatcgtgctgctactccaaaggatgttgtcgcccaaaacgggtggcgaaaaggtcttttggccgatgcacacggtcatagtgttggacatgcttgccctcctggtagcctacgcagcaggcagcgttcgggattgggaaacatccaagaatgtcttcctcctgctcatccccatacaactcttcgttgggggtttgttcttcatatgcaagaaaaaacaaacttcaccacaagatgatggttcagctgctgggactaacatgtag

SEQ ID NO: 61289 - DNA, 389 bp, Oryza sativa
  Clone ID: PAT_MRT4530_62736C.1
acaaacttgagaattgggatcataaaaaaaaaactcataaaaacaatattctaaaaactaaactaaaaaacaaccggggacaaaaaacagaatggcgctcataaaaacaacaatctcacatataagaacattaacattggggccgccctttttaaaggatccacgtttccgtccccttccttccaacgtaatactttttttatagggcccccaaatttaatttaattgcccgtagtttaacaccttcatatctgaaaaacccttggttttaccaaactaaatcccttttcaccaaatccccttttccccagttgccatattaaccaaaagccccgccccgatctcctttccaaacatttgcccaaccttattggaaattggaacccccc

SEQ ID NO: 61290 - DNA, 880 bp, Oryza sativa
  unsure (1)..(880): unsure at all n locations
  Clone ID: PAT_MRT4530_62737C.1
aggcggccccccccactagacgtttacttccccgccctggttacctcctcccctcgaacagcntttagaatttttcccccctgggataccccccgngaccccgccttcctaacctcnaatactcgggctccccccgccccccggccgccctttcactntgngcanccacccaaaccgcgccgaggcanatccccctcccacatcaacacccaccctctccacacccatccacatggagataggccccttcctacatcccgtttcatacttacttaaccactccccaccccgggagaggccgccctaagttacttctcccaaccacaggggagccccccgcgcccctataataccccccccccggagaacatcgggttccccctcgggcccgcgccaccntaaacccccnacgcccaccgcccacgttttaccccccccccacaactacancgggaggccccccgacacaccccctaatagacccccagacccccagatanaacaccagacacccccccagacacactctcaacgatatcacccccgagagcctngaaccccacatatcaacccaccaggctatacacccccagctgtttccccgccacccacacgagacccgcgatangattttcctcccagacccgctttttagccccccttgggcgctcgggggcttggttnntccgccactccccctttttaaagggggttgtgccgttcccccccccacactaaagaaccctcggaagatttggtccnccccacaataaagccgcccccgggggttgtttcgggttgtgttgggccgcccccctttcaacatttaacttttggagatgtgctccccccctaagggccgctcgaacattatacccca

SEQ ID NO: 61291 - DNA, 2643 bp, Oryza sativa
  Clone ID: PAT_MRT4530_62738C.1
atggggtcgttctcgttgccttttgggacgattcattcgattgagccggcattcaacctctctgcatgtaatcgtctatacgatgtgagcggcggcggcaacgtcccacgaccggggacggggacggagaatatgaagctgctgttcatggtggtgctcatggcgatcgtgggctgcacgctctacatcaacggcttcgtgcaggtcttcttcccgtgggtgcgccagatcgggttccagaagtacagcctctccatcatcgcgcgcttcctgctcaacttcgccttcttccagtttgtccctctcgtctcggcgaccatctcccagagccaggccaacagcggcggcaacaacgacggcgtcctccggaacgaatcggagctcctggcggcgctcctgtggttgatcctcgtggagctcatccgcaagaaggtccaggggatgctgctgccgaccgacggctcctccttctcgaggggcatcgggaggctcacgctcatggatgtctcctacgaggtgagccacctggtgtgggtcggctacctcatcttcgcaaacttggcgaggcagacgaggacggagacgttagaattccgatactatttgttagggttgacgttgatctacatcttcactgtgctctggtcgctgtgcttggcgaagctggtgctgagcctgttgaacaggaggctcgcgagctgctccttgcacacggcgaggaaccctcttgtcgttgcagcttacatgcagaaactcatggagaagcagacggccacaagcccccccgccatcaccttgtccacctgcaaattcgttgtcatgggcgaggatcgacttgtcctccactacaacaaggtgaacaacgatgacgacaacaacaacaacaagaggaagaggagaatgaggaggagggataatggggtgctcgagccggtcacgatccatggatacggctacggcgtggcaaggcgcgtcggcggcgaccagaacgagcacaagcatgtgcatctcctcctcaccgaccccgacgagtatctccgcctgacggagcacgactgcgtggagaaggggcggctgatcaccgtggaagacgtgatgaacatgcacgagcagcacgccaacctgttcaaaggcaggaggcgtcagctcctcgaggacctgtgcatctccttctccctcttcaagatgttccggcgccgcttcgagcactacccgatggtggaggtcggctccgccatggctcgcggcgtcatgctcgacggcgtcctcaagctcgagggatgtgagcctgtgggcaaagcccagaaactctgcagcaagttcacgctgaaccgagtacaaggtcaaatccagaggggtttccaggtgctccagcttgagcttgatctcttggtgcactactaccagcaggcggctgccccagtggtaatgtcccaacctatccttttcgtcgtcaacttcgtctcctccctcttcctcctgtgtctactgctcggcaccgtcgtctacatacttttcatctcaagtcaaggtgagccggtgtattgccaaatcatcgtctggacgaccaccggaaacggccccatctccaacgtctacttctacataaccgtgctgctcgtgctcacggtcatcgccattgaaacccacgagttctggaccgtgcatgtgttctccagctggaacattgttcgcatggtctgcacctatcaccgtgctgcccatcgcccgtggctacggtggctctgcttccttgtcatcagggtaaggttcctcacgttttctgtgggcaaatcggagatggtcatctaccagatgtccatcttcgacgccgcctctccactccaaaaactctacgcaactgtgagggcggccgacgtcgcgctgccggcgatcgccaccggacggatcatcgacgccttgcgttctgacgccgtcgtcagccgcaccaccgggatcgtcagcctccccgacatcgatggcctcgacttccgcaccatgaccaccaccgagatcatcctggcgtgccacctcgccacggagcttctcgacaacgaacacgacgaccaccctccccccgccgccgacgaaaacgacgacgaccagcagcagcagaagaagaagaaggagaagaaagaagacgaccgcaagatcgcgtcggtgttgtcgaggtactgcatgttcctggtggcgcagatcccggagctgctccccgacgacgagacgtgggtgtccgacaggtacggcgacacggcgagcgccctgcacctcgcgtccaggcgggtcgtctgcccgacgagccggaggaggaagaaggcgatagccgtggccgtccgatcgagccggtgggaggagctgttcgacgacgacccggcggcgcggcgcggcgccaggctgttccaccggctccggcggcggggcccggcgttcgacaaggcgtgggacgagctggcgcgcttctgggtgcacctcgtcgtctacctcgcgccgtccaacgacgtgcagggccacgccaaggcgctggcctcctggggcagcggcgacctcctcacctgcctctggacgctgtgcacgcacgccgggatcacgcgccagccttccgagcaggcggccgagctcaccgtcgacgacagcaatgtctag

SEQ ID NO: 61292 - DNA, 267 bp, Oryza sativa
  Clone ID: PAT_MRT4530_62739C.1
atggaacgggagagaggaggagaggcgggggaggaggaggcgtgcgcgcggcaggtgttcggtgttttcttccatggggttttgcggggtttcgaagcgaagcccgcttgctgcgacggcgacgggccggacgcgaggtgggaggtcaggtgctccgatctcgcgcaagagttcttcgtgttccacatgttcacggccaccggcacggcacagcacggcaagagctttgaccataactggacctcatccagcaccttcgccaccacc

SEQ ID NO: 61293 - DNA, 447 bp, Oryza sativa
  Clone ID: PAT_MRT4530_6273C.1
atggaaattggttctaaaagagccgagctagggataagagatacggttggttggctgaatggaaggaatgctattctaatgggaaccgggaaaagaatggttcccaatacagggcccgaagaagagagacgaaagaaagtagtgaaagaagaaataaacacgttgccaactaagctctcttacgtaccaactgagccacttatttacaacggaaagaaagagggctacttaggaagcaaggttacagtcagaggaaataagaagtatggtaagatgaatgaaaggcaaaaatataggacatacgctttatcgcagaacatctatttgctttctattcgacaagaaggacaaggaaaagataatggatatggaacacaggtcctggcactattggaaaatgaagctctctcagttcaaacatatgagattacttaccccggtttctaa

SEQ ID NO: 61294 - DNA, 457 bp, Oryza sativa
  Clone ID: PAT_MRT4530_62740C.1
cccacctgtgtgcagatctccccctggcggacgaacgagggggccggatagcgctttcctcacattcccttcgcacgccccctcccgtggggtttggctatcctgaggtttcgatgatgatctggtagtgcacccctcgctgccaggggtgaggagccagatcgcgcgtcgatctgcgcattagacgtggacaccacgattgtctcatagtctctactcacattcacatgtgggccacacacaggcgtctgtgaggctgtcatcgtgtgacgtcgtagcgcccgcaccagttgatatcttgcaaagatttttttggattcttttacgccaaatattgtttcgtctactctttgtatgttgtttggagagtgttaagattctatatagaccaagacttctgagaattttataaagctgggtttattgagatatatcaagttcaaaaaaaaaaaaaaaa

SEQ ID NO: 61295 - DNA, 501 bp, Oryza sativa
  Clone ID: PAT_MRT4530_62741C.1
atgacgccggggttcatcctcgccagcgaccggaccagcaacagcgtcatgatggagcgcaccagttcggtcaccgtcagccgcaccacgcccaccactgccgctatgcctcctcctctggtgccgccgctctgcctcctccaccgttgcgaggagcccatccgccgccactatacctcttccgccagcgccgccaccgtgaggagcctgtccgccaccgctatgccttttcctctgccggcaccaccgctttacctgcccggccgttgcgaggagctcgtccgccgccgctacgcctcctcctccgccagtgccgtgctacgcctcctccgcgacgccgccactccgccttcactgcctccacgaggagcttgtctgccgctgctacgcctcctcctccgctggcgtcgccgctctgcatccaccactaccgcgaggagccccgtctgccgctgcttctccttattcgtcgccgctgctctacctcctccaccatcatga

SEQ ID NO: 61296 - DNA, 263 bp, Oryza sativa
  Clone ID: PAT_MRT4530_62742C.1
tcgcgtacagggactcatcaatatttccaaatgtcaagcgtcgaaagttaatatctaaatggctgctgcggtgctgcggatcagtgtggccaagcagaagcagcacacacgaacactcgaaacaccgctcctgcttcaaattcgcatggctccgaggggcagctactgcaggcggggtatgttgggggccttccccttgccttcttgcccgctgtgcctccggccggggtcccccgcttctttttttcttgtttggttttttc

SEQ ID NO: 61297 - DNA, 161 bp, Oryza sativa
  Clone ID: PAT_MRT4530_62743C.1
ctgaaaattacacattcagcatgatttcagataaacataccactaagggacctaccatattgatcaatttatctaacaagaacctgaattccatcatggacaattcacagtattgagtaacctttaaaacaagaatggctatttccttaattgaaacttcc

SEQ ID NO: 61298 - DNA, 509 bp, Oryza sativa
  Clone ID: PAT_MRT4530_62744C.1
cctctaagggcccccaaccgttttggacttgagtagtttgaaaaaagacatcacaaccttgccaagaacgacgttcgccagaatatatgacccatggctcctttaggctcttgtgaaattctgtggggtggcgtaagctaccgagatcaaatgccagttaattatggtttctcctagaagttggttagcgacttgcccattttggttctaggattcttgctgtttttggtgggcccatttgtgccatcaggaagagcccgggctgctcaccaggatttggaaaagggaatcgatcgtgatttggaccctggttcttaaccatgaccccttcttaactaaagattttcttaattgaatgaaccctggttccttaacctggtttttttctggttctggctccggttattcttatctacccgaccattcatcctttctagtgaaagaaagataaggggacagacacaaccaataaagaaacaaccgtatccaatacccaaaaaaaaaaaaaa

SEQ ID NO: 61299 - DNA, 1533 bp, Oryza sativa
  Clone ID: PAT_MRT4530_62745C.1
atggagcggggcgggccctgcgacggcctctgtcgcttccggattcacctaggcacgagaggggactgcccgctgccttgcgaggagtggggtgatgcacttggacatggtgctggtgccagtccagaacctggacttggtgctggtgccagtccaggttctggacttggtgctggtccattttccaggagaacttctgctactgctttgattcaagctgtttcttctaatgctaacttgaatgcctctgagttgtctgcctatcttgactgtgacattgtcaaccaattcgacgatgacttcaatatcctaaactggtggcatgagcacaaacacacatatcctattatgtccatattagctagagatgtcttgactgttcctgtttctactatatcgtcggagtctgcttttagcttaactggcaggatcatcgaggagcgacgacggcgtctaggtcctaacatgcggctgcccagcgaaggcggtggtggcggcggcggcagtgggctccctaacgccagatccagcgagaggggaggcagcgctctccccttcgccagatccgcggcattgcggcggcgcaggcggcccgggctgaagaaggggttctacaagaagagctgccccaaggcggaggagatcgcgcagcgggtggtgtggaaccgcgtcgccggcaacccggagctcgccgccaagttcctccgcatgttcttccacgactgcttcgtcagggggtgtgacgcgtcggtgcttctggactcggctagcaacacggcggagaagaacgcggcgccgaacctgtcgctggcggggttcgaggtgatcgaggaggtgaaggcggcggtggagcgggagtgcgccggggtggtgtcgtgcgcggacatcgtggcgctggcggcgcgggactcggtgtcgtaccagtacaggaggagcctgtgggaggtggagaccgggaggcgtgacggcacggtctccagcgaccaggaggcgctcgccgacatcccggcgcccacctccaccttccccatcctcctcgcaacttctccgccaagggcctcggtctccaggacctcgtcgtcctctcaggccacatgcacgtccggcgggcacaccatcggaatcgggcactgcaaccttttcagctctaggctcttcaacttcaccggaaagaacaaccccagcgacgtcgacccgtccctcaacccatcctacgccagattcctccaggggcagtgcaggcgtaaccagcaggacccaaacgacaactcgacggtggtgccgatggacccgggcagcagcgtgtcgttcgacagccactacttcgtgaacctcaaggcgcggcaggggatgttcacctccgacgccacgctgctcaccgacggccgcgccgccgcgctcgtcgacaagctgcgggaccccggcgtcttcctcgaccacttcaagaactccatcaagcgcatgggccagatcggcgtgctcaccggcgccgccggccagatcaggaagaggtgcaacgccgtcaactcctag

SEQ ID NO: 61300 - DNA, 1956 bp, Oryza sativa
  Clone ID: PAT_MRT4530_62746C.1
atggagcggggcgggccctgcgacggcctctgtcgcttccggattcacctaggcacgagaggggactgcccgctgccttgcgaggagtgggggtttctccgaggagtaggcttcgtccgtgccgtcgaggatgcctgtggagtgtctatgcttaagtacaatgctgatggtactgttcgtccatgggaatatgatcctgattatgctagatctgagttggttaaattgattgctgtagaggatctgccacttaattttggtcaatctcctgcttttgaggagtacattcagaatgctcataaccctagattccatgctgtctctaggcaaactattagtagagatgtttttaagtactttaacaagagtcgtgctatgcttattgagaggttcaagtctgttaactctgttgctttgacatctaatatatggtctggtaatgctaaggaggattatttaagtgttgttgctcattttgttaattctgattggcaattagagaaaaggattttgggtctggtgctgattgatgtgaagcacactgctgagaatatttctaaacgtgtgctttctgttgttgaagaatatggcagtactgctagtaagaaaaagacagcctggggaaagatttttggtgccagtgatgcacttggacatggtgctggtgccagtccagaacctggacttggtgctggtgccagtccaggttctggacttggtgctggtccattttccaggagaacttctgctactgctttgattcaagctgtttcttctaatgctaacttgaatgcctctgagttgtctgcctatcttgactgtgacattgtcaaccaattcgacgatgacttcaatatcctaaactggatcatcgaggagcgacgacggcgtctaggtcctaacatgcggctgcccagcgaaggcggtggtggcggcggcggcagtgggctccctaacgccagatccagcgagaggggaggcagcgctctccccttcgccagatccgcggcattgcggcggcgcaggcggcccgggctgaagaaggggttctacaagaagagctgccccaaggcggaggagatcgcgcagcgggtggtgtggaaccgcgtcgccggcaacccggagctcgccgccaagttcctccgcatgttcttccacgactgcttcgtcagggggtgtgacgcgtcggtgcttctggactcggctagcaacacggcggagaagaacgcggcgccgaacctgtcgctggcggggttcgaggtgatcgaggaggtgaaggcggcggtggagcgggagtgcgccggggtggtgtcgtgcgcggacatcgtggcgctggcggcgcgggactcggtgtcgtaccagtacaggaggagcctgtgggaggtggagaccgggaggcgtgacggcacggtctccagcgaccaggaggcgctcgccgacatcccggcgcccacctccaccttccccatcctcctcgccaacttctccgccaagggcctcggtctccaggacctcgtcgtcctctcaggcgggcacaccatcggaatcgggcactgcaaccttttcagctctaggctcttcaacttcaccggaaagaacaaccccagcgacgtcgacccgtccctcaacccatcctacgccagattcctccaggggcagtgcaggcgtaaccagcaggacccaaacgacaactcgacggtggtgccgatggacccgggcagcagcgtgtcgttcgacagccactacttcgtgaacctcaaggcgcggcaggggatgttcacctccgacgccacgctgctcaccgacggccgcgccgccgcgctcgtcgacaagctgcgggaccccggcgtcttcctcgaccacttcaagaactccatcaagcgcatgggccagatcggcgtgctcaccggcgccgccggccagatcaggaagaggtgcaacgccgtcaactcctag

SEQ ID NO: 61301 - DNA, 441 bp, Oryza sativa
  Clone ID: PAT_MRT4530_62747C.1
atgcctcccccgccgtccgccgccactctccaccgccacttccgcggcgccgccgccgccgccagcaccagccgccgcatcgccaagcgccggccgcgcccgtcgcggcgcctgcccaccacctacatcagcgccgatccggccaacttccgccgcatggtgcaccaggtcaccggcgccgacgacctcccgcctccacctcctccatctctctcgccgacgacgacggagctcctccgccacgccgctccagcgggctcgcccggccctgcaggcgcgctgatgcttcccacgctcgacacctcggcgttcctgctcggccgccgcgcggagccgacggccgcggccgcgccgtgcgacgtgtcggtggcgttggtaggaggagcagtcttgataaacactccttccaacagtacaactgctccagcaccatctcactga

SEQ ID NO: 61302 - DNA, 669 bp, Oryza sativa
  Clone ID: PAT_MRT4530_62748C.1
atggccacgacgtcctccatggtgaacccgtcctcatcgcggaggatctcctcgctgccggcggcgaccatccccggcgtagacgtggcagtgcacggagcatgcggcggcggtgacagcgagatcaaattgccatgtaagcgccaccacgtcagtgccacgtcagatgaagaccgagtcaaattagccacgtatgcaccacgtcagccaaaaccactatcaaaaatgccgaggaacctcgtttgcccggttttcgggcttaatatcccaatctcccagaaagaaaagaatctggccacggtttccactttaatttcggtgggagatgggaatacggcgctgctctgggaggactgttggatagatggagcatcgatatgctcttttgcgccggcggtttatgctgctgtccctgcgcgtctgcggagtcgtcgaactgtggctaaggcgctccacgacaggagttggatacgggacatttcttccgcactgggtgtccaagcaattttggagtacatcaacctttggatgacactcagatcggtgcagctctcagatgagcctaactcgttgtcttggagatgggagtcctcagacgagtattcttcccacttggcatatcaagttatgttcttgggaagaagtcgtttcgaatacaaatcaatctag

SEQ ID NO: 61303 - DNA, 841 bp, Oryza sativa
  Clone ID: PAT_MRT4530_62749C.1
ctgcactgcccctggaggaatctggcgtaggatgggttgagggacgggtcgacgtcgctggggttgttctttccggtgaagttgaagagcctagagctgaaaaggttgcagtgcccgattccgatggtgtgcccgcctgagaggacgacgaggtcctggagaccgaggcccttggcggagaagttggcgaggaggatggggaaggtggaggtgggcgccgggatgtcggcgagcgcctcctggtcgctggagaccgtgccgtcacgcctcccggtctccacctcccacaggctcctcctgtactggtacgacaccgagtcccgcgccgccagcgccacgatgtccgcgcacgacaccaccccgggcgcactcccgctccaccgccgccttcacctcctcgatcacctcgaaccccgccagcgacaggttcggcgccgcgttcttctccgccgtgttgctagccgagtccagaagcaccgacgcgtcacaccccctgacgaagcagtcgtggaagaacatgcggaggaacttggcggcgagctccgggttgccggcgacgcggttccacaccacccgctgcgcgatctcctccgccttggggcagctcttcttgtagaaccccttcttcagcccggccgcctgcgccgccgcaatgccgctgctgccggcgaataccaacaccacggcggcggcggcgatcaagcataccaagcccttattattggcgcctccctgcatgatgctaggtagcttagctaacagctatcactcaattatttttgctctcctctcgatggtgagtagtgaccggccgtgagctctatctagctagccctcgtgc

SEQ ID NO: 61304 - DNA, 640 bp, Oryza sativa
  Clone ID: PAT_MRT4530_6274C.1
ttaccaacggcggtggcggcgacggcggcgcgacgacgtcgcacggcgcacggtgcggcggcacgaaggcggcggtgcggcggcgcgagggcggcgcgacggcgacggcggcgcaagacggcgacgcacggcgcggcggctccggggcgacggcgcggcggcttcgaaggtggcggcgcggcggcacgacaacggcggcgcggggcacgaggcggcgacgggacgcgcggcgaccggacgttgacggcggcggcgacagcggcggcgcgcggctcggggcgggacgcgacgggcggcgacgcgacggtagcgcggcgcgacggcgacggggcgagatgactggcgagcggcgatgggacgggcggacggctcggggcgcgaggcagcgcggtacggggcgcgtcgcggggcgacggggcggcgcgcggcgcagggcgcaaggccggctagggcggcgcagcagcgatggcgacggcgacaggcggcgatggcgacgtcggcgcggcggcaggcgacggcgcgacgggacggtgacggcgacggcgcggtagcggcggtgcggggctcagggaatggccgggcgcgtggcagagaagggtctagggctagggaccaaaatcgaacacctatgaggcaatga

SEQ ID NO: 61305 - DNA, 339 bp, Oryza sativa
  Clone ID: PAT_MRT4530_62750C.1
ggaggccgagcggcgcgccgcggggggggccgcctgagaggccatgaggatgatcctccgcctgccgtaggtgaagtcggcggccatgacggaggcgcgccggttcaggcgctactccgaggagcggctctcgcacgacgccggcgaggatgtcgcgctcctcgacgccgcggaggagggggacgacattttttttttcctgtccgggcagatcatggccagccgctacctgctgctccacctgggctccatcatcccgtggggatcactgaccttctgcgtcgccgagactgaccggcacaacgacgataaggacaacgaacaccacccctagagcaa

SEQ ID NO: 61306 - DNA, 1929 bp, Oryza sativa
  Clone ID: PAT_MRT4530_62751C.1
tcatccagttccagtggcactgccactggttacatcatcaagacataaattctcaaacgattttataagctctacattctcagcagtgtgctgcaacttcttgtctgcctgcacccagtccttgatcaatgccaaagcttgcaccatgttaggacctagacgtcgtcgtcgctcctcgatgatcctgccagttaagctaaaagcagactccgacgatatagtagaaacaggaacagtcaagacatctctagctaatatggacagaacaggatatgtgtgtttgtgctcatgccaccagtttaggatattgaagtcatcgtcgaattggttgacagtgtcactatcaagataggcagacaactcagaggcattcaagttagcattagaagaaacagcctgaatcaaagcagtagcagaagttctcctggaaaatggaccagcaccaagtccagaacctggactggcactagcaccaagtccagcaccaagtccagaacctggactggcaccagcaccatgtccaagtgcatcactggcaccaaaaatctttccccaggctatctttttcttaccagcagtacaacttttcatgggaacaacaacatttctaaagttattatcattctcataagtgttaagatgtccagcaatctcaagaatgtgatgcataattaatggagatgttggataataaacaccagacaaaataacagttgaatcataaaattgttcaaggaataaaagcacagtttcaacaattgtccagtgcaaatcagtaagcaatagtctaccattttccctaggataatgagtttcaataaacaatgaaaaaagctccttatgtgggaagagatgcttgagcattagataagttgcattccatctaacatccatgtccaaaccaaacttacgaggtcgaacacccttagcaatacaccagtttttgtataaagcaatgcgctgattagatgcattcacaaatgagatggctgttctaaaatcttgaagcatgggtttgaaaacttctagaccagccttaacaatcaagttgattatatgacatgcacagcgctgatgcaaatataaatcaccaacatatgcagacaacttaggttttagaaaatccattgccttagtattagaagaggcattgtctagagtaatagaaaaaaccttatcagtcaaaccatattcttcaacaacagaaagcacacgttcagtaatattctcagcagtgtgcttcacatcaatcagcaccaaacccaaaatccttttctctaattgccaatcagaattaacaaaatgagcaacaacacttaaataatcctccttagcattaccagaccatatatcagatgtcaaagcaacagagttaacagacttgaacctctcaataagcatagcacgactcttgtcaaagtacttaaaaacatctctactaatagtttgcctagagacagcttggaatctagggttatgaacattctgaatgtactcctcaaaagtaggagattgaccaaaattcagtggtagatcctctacagcaatcaatttaaccaactcagttctagcataatcaggatcatattcccatggacgaacagtaccatcagcattgagcttaagcatagacttcgcgccattgcgtgattcaaagtgttcttcgaagtcatcccataccttggatgatcttggccgcttgttggtagcactggagtcggtgccggacaacgcgcctgagccaccatcaccgtcaccgccaccggtaccgtccacgtccggctccgtctccggctgcgacccatcgaagtgaggaggtgacgaagtgattccgaacacctgcacatgttcctcctccaagtcatcttcgtcatcaccccgcatccccatcaacctcaactcgtggttgcaagaggatggatcgtccat

SEQ ID NO: 61307 - DNA, 1190 bp, Oryza sativa
  Clone ID: PAT_MRT4530_62752C.1
tacgtaagaaacttgactaccttcgctcaaggttttattagcaaggggatggacataagaagaaagaccggcttgctaagtgggacataatatgtcgtcccttagatcaaggggggcttggaattcatgaccggggcttggaattcatgaccttgaggtaaagaatatagcgttgcttagcaagtggctatacaaattactcaccacagatggaacgtggcaacagatgctacgtaataaatatttgggatcacaacctttatctcaggctttttggaaagcgggagactcatatttttgggctagtcttatgaaggccaaacaatattttcttaggtttgggtcctttcgtataagggacggcactcaaataaggttttaggaagataagtggttgggtaatgcctcgttgagagatcaatatccttgtctctataacatagctaggcataaacagtcgactatctcacaaatctttcaaaacaattctccaagcttttcatggagacgagatttaataggagcaaaattagctgcttggcataatttgtggcctcgcattgctgatttagtgttgacaaatgagcaagatgaatttcactggaatctcacccccaatggggtattctcggtcaaatctcattacttagctcttgtccatacaggtgtcccgaatatcaataggcgtatttggaatgtaaaagtaccgctcaaagtaaatattttcctttggtacttacgccggggagtaatactaaccaaggataacctagccaagcgaaactagaaaggtagtaaaaaatgttgcttttgtcacaaggaagagaccattaaacatttgttctttcaatgtccagagaacaagtggatcttcttgttagccagatctgaagcttggcgtgtttcttcgaaattcaagccgtgacaaataccgaaagttcatagccataccagtgtgaaaatattcgtttttgtacatcttgaagcacaagtctttttggacagttgagcacccttgtttaatttagtaggttactctgttgtatactagtttggatagctttacggtttttaagcctattgtttgcaattctttccagtgaagtgtatcaaatttgtaattcgattaaaagtgtatcacagcggaatgcaaccccaataatatgagagctcgtttttgtcattttcct

SEQ ID NO: 61308 - DNA, 330 bp, Oryza sativa
  Clone ID: PAT_MRT4530_62753C.1
atgctcatcaatgagctcaagcggatgtgtgccccgctcgccaccgcacttgctgaggagctctcctcccgtcccgctcgttccccatccaccgtcgcgtcctcctcgtcctctagtgtcgatttgtctatcgaggatctcctcgcgctcatctacttcggctccctcttcgacgtcaagccacagaccgagttcgtcgccacaatgctcgtgcgtgccaaggagcgggactgctgcagcaccttcgactatgagaagcacggggcagtcaagcgctacaccttcccatgctgcatggcatcatcatatgggcaaggttttcaccgctaa

SEQ ID NO: 61309 - DNA, 183 bp, Oryza sativa
  Clone ID: PAT_MRT4530_62754C.1
tcatcgtcgtcgatggaggcaacgtcagagatagcccagaatcggccgcaaacgccgccgcctcgcgctttgccagtaggtgtgccggttacagcttgcgtcgagccgacgatcgggcttgcacccgttgtcagcgtcacggagggatccaccgcgatcgcctcacaaacgcctaaccgctaa

SEQ ID NO: 61310 - DNA, 231 bp, Oryza sativa
  Clone ID: PAT_MRT4530_62755C.1
atgtccaagatagaggaacctctaacgatcgagccacactctgaaccatccacttctgctagctcgattgatgagaagattcctgagcagccatctgtcgagaatgaagaaattcaaactccggatcgtgccgcaactctgttcagggacgattttgacgaagattatggcaacacccttgatgagggattagccttctcggtgaggtcaaccgggtttcggcacggttga

SEQ ID NO: 61311 - DNA, 379 bp, Oryza sativa
  unsure (1)..(379): unsure at all n locations
  Clone ID: PAT_MRT4530_62756C.1
cgcaattctcatgtaagttgatcgaattattgtattccaaacaaaaaaaaaaaaaaaaaaaaaaaaaaaaaaaaaaaaaaaaaaaaaaaaaaaaaaaaaaaaaaaaaaaaaaaaaaaaaaaaaaaaaaaaaaaaaaaaaaacaaccaagcaaagaaaaagaaaaaaaaaaaaagagaaacaaaataaaattaaatgaacgaaaaaaaaaaaacgaaaaaacagaggggggccctggttttaaagaaacccaattttccttgcggggggggcgcctttaaaaatttttcgtaatgccaaagagaccnggaccgagccggctttttaaaaacaccctaacctgaaaaaccagggggtcacccccagaaacggcgcataaaa

SEQ ID NO: 61312 - DNA, 1934 bp, Oryza sativa
  Clone ID: PAT_MRT4530_62757C.1
atggcgttggccatgacctccacctcgccgcagccaccgcctccctccccacgccggcggtggcggcggcggccgctcctgcgaccgggggtatccagtccgccctccaggtgcagacccagcccgagccccaaagccaaggccgccctcccgctcctctccgacgtggggcgcgatcccaccgccatcaagtactactcccgcgtcgcatccaacctcgtgggcgcggggcggctccgggagttcctcctcgccgccgagggcctccgcgcggcctccggggacgctggattcgaggggcgcatcagccggcgcctcctctcgcgcggcgtcgccgcggcgctccgcgaccaggggcttccccacgtgctcgagttcctccgcgacgccggccgcgtcgggatccgcgccgccgtgatgctcgacgctgacgcctacgacaccgtcgcggccgcctgccggctactgctggctgagcgcagcatgacggagttcgtcgaggccgtggaggcgctagctcagtgtggattctttgttcaaggcattgtggatccgatggatgtattgaaaatatttgtcaagaagcgtgacccaaatatggcaataaggtatgcacgtatatttcctcaatcccaacttttgctgtgcaatacaatggaagcttttgggaaaagaaaggagttaaagcatgctctaacagtctttggagcactcaaggatcagtttggaggtatcaatatgtttgcatgccgaagtatcatcgacatatgtggtcattgtggttcttctgtgcaggctcgaattatattcgaggggcttcttgctgataagattactccaaatgtctatgtcttcaacagccttatgaatgtgaatgcccatagcttcagctacaacttttcagtctacaagcacatgcaaaatcttggcgtccctcctgatttgacatcatataacattcttctgaagacatgctgcaacgctaaggagtataagttggctcaagaaatttatgaggaaattaagaaaaaggaacagaacggtcttttaaagttagatgtttttacatacagtacaatgatgaaggtgtttgcagatgcaaaaatgtggaagctggcttccgacatcaaacaggatatgcaatcagctggtgttcgtcttaacctagtcacatggtcatcattaatcaacgcctatgcaaattctggtttagttgaccgtgccatagagatacttgaagaaatgacaagggatggttgtcaacctactgctccatgcttcaatattatccttactggttgtgttaagtcatgccagtatgatagagctttccgcttgttctatgactggaaagaatatggagtcaagatatctctatcccctgaacagaaaggatgttttggtgacaacttctcatactgtgaagaacatacaagtaacagcagtactctgttagtggttccatttagaccaacagttacaacatataatattctaatgaaggcctgtggcacaaatggagaacgcgcaaaatctgtaatgaatgaaatgaggcgaaatggcctttgccctgaccttattagctggtctattctgatggatatttatgggtcatctcaaaacagggatggagctattcaggcactcagaagaatgcaacgtgttggaatgaaacttaatgtcactgcatatactgttgctattaaggcatgcgttgaaaacaaagacttgaagttggcattgcacttgtttgaagaaatgaaagcacatcaactgaaacccaatttggtcacatacaagactcttttgacagcacgcaataaatatggatcattacaggaagtccagcaatgtttggcaatctatcaagaaatgagaaaggctgggtatcaagcaaatgactattacctcaagaatttgatagtggaatggtg

SEQ ID NO: 61313 - DNA, 246 bp, Oryza sativa
  Clone ID: PAT_MRT4530_62758C.1
atgggatcgggccccgggcagaccttaggtatgccactgacggagcgcggggctcctcaccgggagaccgcgcaggcccccctttgccggttcgaccgggggctcaggcctggcatatatctaaccgggactaacgtgccatctctaagaggtaacacgctagctccgtctgggaacgagcgcctagaagccctcgtcctgacgggatggggcgaggcgtgcgtcagaccgcctgtcgcgacctga

SEQ ID NO: 61314 - DNA, 324 bp, Oryza sativa
  Clone ID: PAT_MRT4530_62759C.1
atgtcctcatcaaatgatcaggcagaaccccaattcaagagggtggcctcatacattccccgcactccatctacagccatccacgattccataaggtgcacgggaagggcgatgacatcgcatccaataaaggcgtcggacccgcagcacgggcaccgccactgcagtcccaacattgctccctgccaccgcatcgagccgaatcaacgggacatgcggcaatattcaaatctcgagtcgctcgctcccttctacaataccgccgacgagtctgatctgttgtcgtccccagcatcgttgctcgttgtcgtgtgggagccctag

SEQ ID NO: 61315 - DNA, 318 bp, Oryza sativa
  Clone ID: PAT_MRT4530_6275C.1
aaaaaaaacccgcccatgggtgggttcattaattggccggcctccctggaaaaaagggggggggggtccaacatgcttttcccccctgaaacggacgtcaaaagcgacgttttgatgatgggcaaagggcaaataagggggttttttctaattaagggcaggggggggggtagtagtaattagctagtcaaactggacaatggagctggaaacggggttgggctgccaatcgggggggataacccgatcggcaaaaagggttttgccgaaccctttggtaatccggaaggaaaaaggcccccccaacggggggtgggg

SEQ ID NO: 61316 - DNA, 1341 bp, Oryza sativa
  Clone ID: PAT_MRT4530_62760C.1
atgccgcggacggtggccgtggtcggcgccggcgcggcgggcctggtggcagcgcgcgagctgctccgcgagggccacgccgtgacggtgttcgagcggtcggcgcgcgtcgggggcacctgggcctacgacccgggctccgaccctgacccgccctgccttgacacggccgcccccggcgccgccgccgtccacggcagcctatacgcgtcgatgcgcaccaacctgccgcgcgagctcatgggcttctccgggttcgcgctggcggggagggtgttcgccggcgacccacgcacgttcccgggccaccgggaggtgctcgccttcctcgatgccttcgccgtggagtccggcgtcgccggccgcgtcaggctccgcgccgaggtggtccgcgtggggcccctcgccggccacggggagaggtggaccgtggcatggcccggcgagggcggcgtggaagaagaagaagaagaaggtgttcgacgccgtcgtggaattggcaattggcaagggaagcagatgcacagccacaactatcggactcctgaaccatttcaagatcaggttcaagatgctgtctcggttacagtatcaattgttgttgtggtaggattaggagcaagtggagttgacatagctagagagatctcaaatgttgccaaggaagtgcacattgcatctaggtacacagaagatcggcttgggaaggttgataccttccagaatacctggttgcattcagaggtggattgcatccaagatgatggccaagtgcgtttcagcgaaggatctgcatcaatcgcagcagatacctttctttactgcacagggtatcggtaccatttcccgttcctggacgtggagggggtcaccgtcgacggcaaccgcgtcgggcctctgtacaagcacgtcttccccccgaagcacgcgccgaacctctccttcgtcggcctgccagtcaagaccatcatgttccagtcgttcgagctggagtcgaggtgggtcgcccgggcgctgtcggggcgggccgagcttccgggcgaggaggccatggcggccgccgtggaggaggactaccggcggatggacgccgccgggaagcccaagcggcacacgcacgccctcatgcctgactggctcaccatgttccggccattggtggccgcgacgatcgacgaacggcaggtggagtacatggactgggtggcggcgcaggtcggcgagccgcccatggaggcgcggaggcgggagatatacgagaaggctctccggtgcatctggtctctggatgacagctaccgggacagctgggaggaggaagaagaagaagagaatagatag

SEQ ID NO: 61317 - DNA, 1146 bp, Oryza sativa
  Clone ID: PAT_MRT4530_62761C.1
atgggcttctccgggttcgcgctggcggggagggtgttcgccggcgacccacgcacgttcccgggccaccgggaggtgctcgccttcctcgatgccttcgccgtggagtccggcgtcgccggccgcgtcaggctccgcgccgaggtggtccgcgtggggcccctcgccggccacggggagaggtggaccgtggcatggcgcggcgagggcggcgtggaggaggaggaggaggaggtgttcgacgccgtcgtggtgtgcaacgggcactgcactgtgcctctagtgcccaagctccgaggaattggcaattggcaagggaagcagatgcacagccacaactatcggactcctgaaccatttcaagatcaggttcaagatgctgtctcggttacagtatcaattgttgttgtggtaggattaggagcaagtggagttgacatagctagagagatctcaaatgttgccaaggaagtgcacattgcatctaggtacacagaagatcggcttgggaaggttgataccttccagaatacctggttgcattcagaggtggattgcatccaagatgatggccaagtgcgtttcagcgaaggatctgcatcaatcgcagcagatacctttctttactgcacagggtatcggtaccatttcccgttcctggacgtggagggggtcaccgtcgacggcaaccgcgtcgggcctctgtacaagcacgtcttccccccgaagcacgcgccgaacctctccttcgtcggcctgccagtcaagaccatcatgttccagtcgttcgagctggagtcgaggtgggtcgcccgggcgctgtcggggcgggccgagcttccgggcgaggaggccatggcggccgccgtggaggaggactaccggcggatggacgccgccgggaagcccaagcggcacacgcacgccctcatgcctgactggctcaccatgttccggccattggtggccgcgacgatcgacgaacggcaggtggagtacatggactgggtggcggcgcaggtcggcgagccgcccatggaggcgcggaggcgggagatatacgagaaggctctccggtgcatctggtctctggatgacagctaccgggacagctgggaggaggaagaagaagaagagaatagatag

SEQ ID NO: 61318 - DNA, 282 bp, Oryza sativa
  Clone ID: PAT_MRT4530_62762C.1
atggcgtcccttcggacggcgagggagccggagaccgccgccatgctgcgtgcagtacgcgcgacggcgcaggcctgtactgcgtgcggcgtgcggtggtggcgtacggcggcgagcaggcgaggatgccgtgtggcgagcacggtggtggcgtgcggcggcgcggtgcgggcgtgcggcggcggcgagcgcggtggtggcgtgctgcagcgcggcgcgggcggcgtggcgtgcgacggcgcggctggcgcgggcgagaggcgccatagccctaggggttag

SEQ ID NO: 61319 - DNA, 930 bp, Oryza sativa
  Clone ID: PAT_MRT4530_62763C.1
atgaaggccacacactaccctctctccacctccgcaccctccgcttatggactccgcaactgcgacatcgcatcgaggctcgagttcttgatccctttgttgggctcctacgaggtgcttctcaagaccgtcaagcgaagctaccgcatcctcacctccgacatagaggaggtcatcaagcccaacttcgcgcagctccaggagtgcgggctaactgtttgtgatattgtcaagaccaacccgaggctgctctcgttcaatccagagcgaatcaagcgctatgtgcatcgtgccgatatgcttggcgtgccccgttgctcgccggcattcaggatggccgtgtgctctaccaatgaaggcagcgtcactgcgaggatggagttcttgagcaggactcttggttgctccatggacaatatccttatcgcggttggcaagaggccaactattcttggcctatcaatggataatcttcgccgcaagatagagttcttggtgactgaggttggcttaaagctagagtgcattgtggagtgccttgggattctcaggtacagccttgagaagcgtatggtgccacggcattctgtcatggagatactgcgggcgagggggttgatgaagaaaggtgcttccttatatggtttaatcatgcaaggtgaggccgatttcgttgcgagatacattgatactcataaggacatggttcatgggcttgcagatgcttacaatgcatcttgttttgggaaaatgcctgtagtgccggattccactgttaaaaagagacacgggaggcgagatatatattgcaggggatttgctatgtttgaaatttggaacctcctgagttacatgcttgacaattacacttgtaggtcggctttacatctagcagacactcttttggagttttctgagttgcaacagtga

SEQ ID NO: 61320 - DNA, 226 bp, Oryza sativa
  Clone ID: PAT_MRT4530_62764C.1
agagatgtttttcaacagctcatttggtaatgtaccgacctcccgggtcagatcattacttctcggctcccagagccattccacttgattaatcggctcccagagtccagctgcccagcagcacaacaatccgcttccactcgggaagcctagtctatgatgcccgcagacatcccgaatcacacagattcgtttctgaccactcaggtcgtccatctgccacatt

SEQ ID NO: 61321 - DNA, 341 bp, Oryza sativa
  Clone ID: PAT_MRT4530_62765C.1
atccaagctatatctgcctatgtcacctatgtatccaatatgcactggcgtgtcggaaatggtatccctggacgtcttgatggccggcaataacatacataataatccatggccatgggccggaccgactaccacatcctgttgatacctattcgggggatgctgatcgccgatacgtggcaggtataatccctacccatactaatgcaagtgctcagaatgctcggcctggggcatggtgtcgtagcgtatgcgaccatgtgactcatgctttgcggatgatgacatgactgaccgagaacagcttgacaatggcccatatgaataaaagtctgctaggc

SEQ ID NO: 61322 - DNA, 207 bp, Oryza sativa
  Clone ID: PAT_MRT4530_62766C.1
atgtgggaggtggccgaattggattacagaacttgtcaacttgatcttgatgtgagcgatggttgtatctatagtagccatggtcacatcaccagctggacgggagcacaacaacagagtcactgggtctcgaggtgcctgtcgaaactagatttcggcaatactaaaagaggtaggaaacaagctatgaatgtggatgggttatga

SEQ ID NO: 61323 - DNA, 676 bp, Oryza sativa
  Clone ID: PAT_MRT4530_62767C.1
ttcgatgctgccgccgttgttgctcgctgctgttgctgctgatgccgccacgtcgccgctattgctgtcgccgccgccgctccgtgtcgctgctgctctcgccggcgccgctctaccacgtccttcgcagcacgacgatggcccagtctgcttggatcgggaggagcatgtcacagcggagtccaccgccctgcggtggtgctcgaacgctgcaacagctgtcgtccaccctgtccttcagcacccccttccaccgcccccgcgttgggaccccgcttgatgcaaatgcaatggtgttgtggtgaagaagatgaacagtatggagagagaggagaggagcaagggagaagattgggacaattcttctccggcacaggaaccgaccgccagccgtcgaccggtcggagggctccgcctcgtccagatctggccgctgcttccctcggcggctcgtcggatccgtctcctccccgcgtggcccgacgaggctcgcgggcatggccgacgaagggacgagtgctctcgccggggcatgaccgacgccggcgttggacgggaaacctccgagcttgcgaattcgatgcacaggctcggtgaagaacgggttcgacaggaactccaccggctggttgctatggtcacaaatcgactcctttttgccgtaggattgctgcat

SEQ ID NO: 61324 - DNA, 736 bp, Oryza sativa
  Clone ID: PAT_MRT4530_62768C.1
aacacacccgaacgagcgaacgaggcggcgccgcggcgcttcttcttcctcttcctcgataacaaacgcagccaacctccgctggagcccgcccgacctccgcctctcctaccttctccggcacaggaaccgaccgccagccgtcgaccggtcggagggctccgcctcgtccagatctggccgctgcttccctcggcggctcgtcggatcctgctgaatctcgcgtcggcgtcggcgtcagcggagggaactcaggaggggatcggtgcttcgcgtattgggggggcctcgatggtctccctccccaacgccgctccgaccgtctcctccccgcgtggcccgacgaggctcgcgggcatggccgacgaagggacgagtgctctcgccggggcatgaccgacgccggcgttggacgggaaacctccgagcttgcgaattcgatgcacaggctcggtgaagaacgggttcgacaggaactccaccggctggttgcctggttgccgtcccggcctcaaccaaaccaagcctagcctagcctagcctgacgcgagttcctctcgcattcggaagaagagggggtggggttcactggaggaagttcattggagtttattgggggtaaggagaacagccttccagcatctcgcgtttccaggatgctgtccagtgagcttccgcaggagctgcattttattaattttgtacttaaaatggggaagtatctaatgtgcaaaag

SEQ ID NO: 61325 - DNA, 203 bp, Oryza sativa
  Clone ID: PAT_MRT4530_62769C.1
tttgtttttttaaaccaaagggtttactcacatttaattatcattcaactaattcccacccaaccttggtttaaaccaacactttttattgtcacttactctactaaactaaaacctcccttgacttggcttaaaaaccaccaaattccttcacttgtataagagtcctttaaaaacattatgccctttagagtggtaccatc

SEQ ID NO: 61326 - DNA, 573 bp, Oryza sativa
  Clone ID: PAT_MRT4530_6276C.1
atggacacctgcgacgctaggggctactcctcatcttcctctgccacgactaggcgcttgcaatctctctactccttgtttggtgggaagtacaccgcgactgtgcaaattgctcaaggagcggcagggaccagccagggtacacaaacgacaattgttgacatacagatccacgtcttacaaaaatataaaagattacaaatacagcggaaaagacaaaagcgagctaagcctgaagacttgactcctgcaacgaggcgactccattccacaggcatccttgacggcagtgacgaaaccaacttcttcgagacatctccaactgagaagaacttcaactctggggtgggggaaaagagagcaagactgagtactacccactgtattcagccagtcataccggaagggaagggagaagaacttcagggcgtgacacttggggagcagcggttggtgtcgatgccacctacgatgagctggagtgcaaatgcccctaatggcctaacatccttggggttcatgttcatatcagcaaagatattcaaccctatgatggattgtacataccattga

SEQ ID NO: 61327 - DNA, 462 bp, Oryza sativa
  Clone ID: PAT_MRT4530_62770C.1
tggatttgcttgctgcttactatatgcggctacatccctggcgtcatctactccttttggatcaacaaatttgatctattttgcgagaaaaacgacgactcgacctaattaagatatatactagctactaagattataacgtgcaatcaattggtcccaaatatagaatccttatatctcagattgtaatcatgcattctcgacagatacagtgacttgctttggggctttcagatgctactccgttactgagtgtttataaaagtaatctttggatttgttaggaagaatgtgtaatgggatgaggatgagaattacccctcccagtagttaatagaaaggatatatatctagcctccttgcgagaagattcaagcacaactgatcatattattcatgctactctctgtttgtccaatgttcagaaaactaccaatagcatcattatcagggtggatggcg

SEQ ID NO: 61328 - DNA, 480 bp, Oryza sativa
  Clone ID: PAT_MRT4530_62771C.1
ttagtacccaaaccccagggtgtataaatctatggtagcagcactgagagttaccttttcaggagcattctccccgtagaaaccatcaaggctggcacataactgagtgttctgaattctggtgcgcagcaacgggcaggcagggttgacagggtgcatagtgcaaccggagacagggtaactgagcggcatcactgcaggccggcattccgtcgaacacttggcgcgcacgcgccaagcgtgccacgacaagcaacatcacggagacatcagacatcccatggcgcggtggccggtagaggcctgagacgcaacagaaacacaagcatgtttgccccgccagctcacggcgaaatccgcggcgcccacgcagcatcgaagaggaagaggaagagcaacgccgcggattcgcacttccgcagagcgcgaggcggaggaggagagatcgaagtgggctgggcatttcctttcagttgctga

SEQ ID NO: 61329 - DNA, 1496 bp, Oryza sativa
  Clone ID: PAT_MRT4530_62772C.1
ttttttttttttttttttttgaaaaaaaagggccacatcagcatgccaaaactggataaaaaaacagattcaaatcatttctaactcccatttggtcagcaacaagccaaccaaaactgatcacagaataatgcagatatcgaatcatttccaactcccattggctcagcaacaaaccaacgtggcacttagtcacttaccctgatattcttcttcaaggggggctcttcaaggtgtacaatcgacaccgaatagtttctgaagcagcaaaacagtaaatctattgtttccagtacaaaactctctgtattttcaattctcgggatgaagtcggctggtggtagggttccacaaaactaagaccaactccaagacaacaacgtttcttcggccaagacacttacaaaacgggcataaaatggtggagctttcgtaagtatggctaggatgcacacgggcaagaagtatctaacacttgtacaggaggtgataatcaaggcttcaaggctatggccacgccgaatcttgaaggcgaactcaccactttgggatcatactcggcagaaatacttacagtagacttgggcctccactcatgctgacagagaactccaactttgccaccattgctaaatcttgtcttcagcaacgtcgaagaatcaatagcatgagagctcccgatggtgaaatagttctcttttgtttttaacttgtgcgttacttcagccgccactgtagctccattggtttcattgaacgtgtggatataagaagcttttaaagtctcccctttatcagccaatagtacggcagcagaaaaatcatgtttgttatagcagatccctgagttgtacttagtaacagaagctgaagtgctgtcgaatccaacctcagcaccagcactaagttcattcgtgccgatagttgctgccagctcaattaaaggcgttgatgtcaaaccaatggtagaattcagtgcaaaatggtcatgaaggtattgcaaatcaagcttcccggacttttgatcaggaaccctgaagctaaaagaagtcttcagaccagtaagggcttcatcaacagtgactgtggttgacactctagattcactatcaatcttgacatcaacagtggttttgccacttttatgttgtgtctgtatgtcaccgatgaagagttcgtctatcttcacaccggtggctgttagacccaaaccagaattgctagttgtcgttaaagaaaacttttggtcaaaattgtagtccttgtacaaaagatcttttgctctcttcccaatgttgaggaacggagctgggcctttgctcatccttgcctaacgaagtgattctgcctcttaccggcgaggatgcgggcggaagcagcaggacgccggcgccgctgcggctgcgctggtcggcgcagggcggcgggcgaacacgcgaggagacgaggagacgggagtggaagccgagagagagaggagaacgtaggcctcgtgc

SEQ ID NO: 61330 - DNA, 189 bp, Oryza sativa
  Clone ID: PAT_MRT4530_62773C.1
accagaggaggaatcataccatgaatgatgagtatccaatcctcagcagcaacttttagagagatatgatcaatcaatctcctcgcagtgcagtacacccaacatactgaactgaataatcatcagaccctgatggcactctgatgccagcttagttagtgcggaagcactgtacttacgtcatattta

SEQ ID NO: 61331 - DNA, 432 bp, Oryza sativa
  Clone ID: PAT_MRT4530_62774C.1
acaggcaacatggaccactttgtatatcagttcatggctgcatgcagatgcattacaatgcaccacaggcatggcacagagagagccatgagctcttacatccactgttttcataatccactaatcgcattcgcatggccgtatttaattagacacgcgtgcccacatgtggcatgaggcggggcgaactattattaattagcgcgggtaattacttcattagtactgacccagaccgaggcggaccagccgggggggcaggacatgacgcatgtggtgcagccgatgccgcacaacggcctggcccgaccgggggatgatggggtttgagatgccctccagctccttcattttggcatggaactcatcagcctgggcgagctggttgccgtccagtcactggatggcccgatcgatggcattctctatctt

SEQ ID NO: 61332 - DNA, 3324 bp, Oryza sativa
  Clone ID: PAT_MRT4530_62775C.1
atggccgccgccgccgcctcccagcctcgcagccaccagcccacctcgctccgccgcgcgccgccaccttcttcggccgcggccaagccagagcccaatgagaaggcctccaactccaagcccgcctcgcccgtccaggcaccgtcgccggagaggacggtgaagaagctgaggttggccaaggcgctcacgcttccggaggccacctcggtgtcggaggcgtgccggaggatggcgctcaagcgagtggatgccgcgttgctcactgattccaacgggatgctctccggcatactcacagcagaggacatatcaggacgggtgatagcagagggactcaggcctgacgaaacaaatgtggccaaagcgatgacgcgtaacccagtttttgttatgtccaactcaccagccattgaagcattacaaaagatggtcaaaggaaagttcagacatcttcctgtagtggaacacggtgaggtaattgccatgctggacattaccaagttcctttatgatgcaatttcaagaatggaaaaggctgcagaacaaggcagtgcaatagcagctgctatggaaggagttgaacgacagtggggaaatgactttccaggtccacattcatttatcgaaaatctgcgagaccagctgttcaagccttccttatcaaccatcataacagaaaataacagttccaaggatttggtattgcgattagtggcccaaagtttatccccagatgtgactcttgtagaaaaggttgagggagcttctgaagcgaacagtatggcaaatactatgatgcagaagttctgggattcagctcttgccctgcagcctgcagaggaatcggatgccctttcagaaagcttagatgagcttgtttctgccgtatcgtacagactgggaatggaaaaagagaagattaatcttctgcagtatgatgacgatgaaggtgacagggtggttctgaccaccgacggtgacctcagtgcggcaattcagcatgcgagatcagctggatggaaggttctgaggctgcatatggatgagccctggagcaatggggagcacaccacatcgcttgtaaatacttcaccggtgaaaacagggcggtcatttctccggctaggcatcgcagctggtgcagttgcggttgccagcatgggggtcattttcaggacagcttattggctccggttttgggcacaactacagaggtgtgatgaagatgaagagtttctgaaagttgtatgccgaaaattggagagcacggacagccacatggagaaaagtcgggacaaggtcaacattaccccagatctgaacaaaggaaaagaaacggtatatgcactattgcagtttttttttaatatgaactgcatgcccaccccctcccctttccttttttttttgttttgtaatatgggatctaatagtaggtacatcaacaggcaaatcattgaggggtgggaggagcttcgagtaaatgggctttatcatggaaatatctgcttggaaaatgtatattattgcaaagataatgaaaagatcaccatcaaacttgcaaacttccaaagcaaaggtgcaatgagtaaagaggcagcacaattggaagatatcaatgcaattggtaggatgcttaagtctatttccgctctggcaaagataggcgtaccccatcaagcagaacgatacatgttagttgatcacctggcaatgaatttggagtttcttgcaaacacccagcaaataggaacaatcaaagacgtgattctagatcatgtttttttctggtttaaagaaaggaggaagagattcttcatctatgatatcccaaaggccttaaaagatgctgcattctgtaacaatgtccgcagaggacaaacatgtgttctggaatgggacaaaaagccacatcacggacttctaggctcaatgaacaggtataggaaaacaaatttgaatttgcctgcttatgatggaaatgacccaattcagaatgtgaaatttgtgagtggagcatacacgcatgaagaggaggtgcaggatgatcttacatttaatgggatgtcctcaactgttgatgaagctgttcaatctgagcaaccaatgttatgcctcaacctatacaaatgcctgtcacccgaggggcctttagccaatcaaagttagaaggaactcaggtgccgctcaggaacctcgagctggtgttggttaacaagtcctgtgtttagtggaaacgccagtatttttgttcagtaaaatacatgttggcagtggtcgcgaaaagacaatcagatgatgtaatcagtacatgccttccatgctggtctccccagcatgaacaccttttctgcgaaaaaggaaacgatatccttttttttgttttatcccttttttgactgccgtgtacggagtagtattactgttacacatgctccaaatccagtccacaatattatactagctgtctttttaggtttttcctttggacgtcgtgtcctagtgaagtgaaggaagaaatgagtagttatgaggtttatcaaaacttttttaaaaaaaaccaagcttttatattaactagaagcatagtacatgcttgataacacagtttgctcccttaaaattgttcttgagagctgaagcaaagcacattcgattgggataagcaaggtgagaaatgttttggcaatcaaagatcggatttgccctttctaaaagtctagcttcttttgttaatttgtcaagcattttgttaatctctcttggaatccagtaaaccttcataaaatcctgtggaaagtcaattatcatttgggaccataacggtcgtaggctccaatgtcctgagtctggttcgaaatccttcttcttgatggtatctgcaatcgttgcattgtccatgaggaaaaccgtacctgcaaagtcaagacattttgctacctccaaagcaaactgtaaagctattaattcagcttgcaagggcgagctagcagaagtgctgaaggccttaataaagattgcattatgattagttggcatatgaaagaaaacaccaactcctgtcaaaccctctccccaagcagcatcaatgcagcatccattcccttgtggaattggctcttttttcctgctctgttctcctgggggctcttcatcctggtgggtgatagggttatctctcttcatgaattccttataagcactctttgtgttgcagtcaccaatcctactgtgcttccagtataatctgtcttcgctgtcacctggcatgatttgaacctgcaagattttattggcagcctcctcctcctcctcctccat

SEQ ID NO: 61333 - DNA, 288 bp, Oryza sativa
  Clone ID: PAT_MRT4530_62776C.1
atgtccagttctaagggacttagtagctctgtgcctccccaaggtggctctggagcatccaaaaggcacgcggacattcatcatgaagtgacaaaccttccaggatcgaaaggttttacaccttctcggaacaacaaccagcagccctacaatggtcaaggtgctcacagcctcacgtacgggttcaaaacatttgccacaaaacatccaagaaaatatatattcttgtcggtccagactgacaaggttgcatttcttggtgctttagaaagttcacaatcttcttaa

SEQ ID NO: 61334 - DNA, 425 bp, Oryza sativa
  Clone ID: PAT_MRT4530_62777C.1
atgcaactaccgatgggagaccttatcgttatcattgactactacactacttgattggatcaacaataccattatcttcatcataggagttggtagaatgcattttaaaaggtatcaaatagtgaggctttatatcgctatcccgctgacttttttatataagtcatggcgctgtttgggtttataaaagcaatcgattggtacagtatcgttgcttttttgccacccctccacagtcttctgatttggtaaaagtactcaggagacaatggcgaagatgattgaaacactcggctttggagtaatctagttcgagagaagattatcttttcgacttaggtctcgtgcgctattccctttatattgctaaaatattgtttccacaatcgtcattgcctctgacgatcgagttacctacaaggatg

SEQ ID NO: 61335 - DNA, 4523 bp, Oryza sativa
  Clone ID: PAT_MRT4530_62778C.1
atgcccgacgcggcggccgccgccgccgccgcccaggacgccgacgccgtgatgcgcgacgcacccgccgacgcagcagcaggcggcggcgacaacgacgacgacgacggggatgacggcacagaagaggacgaggaggaggatgacgacgaggagggcgatgaagaggagctgccgccggccgaggatccggcggccccggagccggtctcggcgttgttgccggggagcccgaaccagctgacgctgctgttccagggcgaggtctacgtgttcgaatccgtgacgcctgagaaggttcaagctgttctgttattgttaggaagaagtgaaatgccaccaggtttagctaacatggttttaccaaatcaacgtgagaacagaggttatgatgatttacttcagagaacagacattcctgccaaaagggttgcttcactcattaggttccgtgaaaagcggaaggaaagaaatttcgataaaaaaatacgttacgccgtacgcaaagaagtggcactcaggatgcaacgtaggaagggtcaatttgccggaagagcaaatatggagggagagtccctatctccaggctgtgaacttgcttcccagggttcaggccaagattttctatctcgagaatcaaagtgtcagaattgtggcactagtgaaaaaatgacaccggcaatgcgccgtggtccagctggtccaaggactctgtgcaacgcctgcggactgatgtgggctaacaagggtaccctgagaaattgccccaaggcaaaagttgaatcttctgtggttgcaactgagcagagcaatgcagctgtctctccgagtggaatcgacaacaaggaattggtggtaccaaaccctgaaaacattaccgcaagccatggcgaagtgctgcattctttcaaaggagattggggagagattggggagattgtcactcgttttccgcgcacacgcttcccaaactactcaacggtgtccctgaggggatcgagcgcgagggagatcacccgcgacgcgctgctgcagaaggtctccgaggagcgccagctccgcagccacctccgccgcgccgccgccgcggcgctctccatccagcagctaaccaagtctgcgaaccaccttatgtggccatttcaaaaagaagtccacagagtcattaggcatgtggctgttgttcatatgtggcgtgtttggagaagatactcagtcataagaattgtttcagaacagctccatgaagagtgggaagcattaataaaccagcctgacattaatctgacaaaacaatggatatcaagcatgatgcttagaccatttcttttcttcgttactcaaccatcaagctggtacaagggacaacaggacaagactctaaactcgatttcggcatgcttcaaaatcatcttgaatagcataaactcaatggatgcaagcaaaaatttatgttcctttgctgtgggcacgccagaagaaaggtgtaaccattcttgctgtaaggatggaaacatggttcagattactgacactgctatgaggttggctgtgtctttaactgattgcaaaacatggaaaaaaattacaagtgaggatactagagctgctgatgcatctgtggagagcttgattgaatttattggtgcaagccagagtggtacatatagttgtcttaggagatatatagtaaatcttggttctcatgccttggagaagaaaatttcttcaatctcaacagatgatcagttcctgattactgctagtgcagtcaccattgcgctacgacctttccattctatgagagcagggaggggtgctgatctaaatggtgcttcaaaggaatactttacacttatactcacaattccggatctttgcaaacgcttgccacctctgttgttgcctgctataaagcacatatctatactacaaccatccctagatattttactgatctccaaggacaaaatatttgaggaaataactaaattggagaagtcaggggtttctagtggtggttctggtaccattccctactgtggatgggctcttggaaatcttgtaactttagctacagagcatgatgatttatccaattcagggtgctttgttcaagggctagattgttgcctatatgttgatgcaattaactgtgtttcccaaagcttactgaaattttttgaggagaacaaggaaatgcttcttagttttggtgatagtgttgatacatctttcatcaaggaaaatgataccagtgacagctgcagcagaacactgtttatggatcttctgaagccaatttaccagcagtggcacctcaggaaacttttggtgttggcaaaggaggatgctgtgtgcaagaggcaaaataatcatgacccagatacacagacccattcgcgtagcctaaaattgctggacattgtatgcttttactatcacatgctccgaattttctctttactgagtccatctattggttcattacctattctcaacatgctctcattcacccctggatttcttgttgatttatggggggcattagaaatatatatctttggacaagcagtccacaaattacaaggaccaaaacatgaaagagaatcagctacaagtagttcaggtgagcatgtatcctccatgaggcaaagaagaaatttcaaggatacatcaaacaagtggtcgaatgtgttccagaagattacaggaaaatcaaatgacgcagaggatacaaatttggttgacaatcctttaaattctgagcagaatggtgaagcattaattttatgggatattgaagccatgagacaaggatctgagtgtattggaaaggatttaatgcaaatgttgtatctgttttgtgctacgtatggacacctattgcttgtgctagatgatattgagttttacgagaagcaggttccttttaccctagagcagcagcgaaagattgcatcttcactcaatacgttcgtatacagtactttcattcagaatggtggaagcagcagcaaaccacttatagatgtgactgtgagatgtcttaatctactgtatgaaagggacagcagacacaagttttgtcctatttctctgtggctggcacctgctaggaatggccgaattccaatcgcagcggctgccagagcccatgatgcagcatttgctacattgccaggaaatcagttttttggaattcctatccggagctctgtacttactacaataccacatgtatatccatttgaggaaagagtgcagatgtttagagaatttattgagttggacaaagcatcccgaagagttactggagaagtatctgggccaggtccaggatctattgagatagttattcgtcgaggtcacattgttgaagatggatatagacagttgaactgtcttggatcaaaattgaagtcttgcattcatgtgtcgtttgtcagtgagtgtggccttcctgaagctggtttggactatggtggtctatcaaaggagtttttgacggatctgtctaaagctgccttcagtccagaatatgggcttttttcacaagcatcagcatctgatagcagcttaattccaagcaattctgctaaacttttggataatggcatcgatatgattgaatttcttggccgagttgttggcaaagcgctctatgaaggaattctattggactattgtttttcacctgtatttgtgcagaaacttcttgggcgctatagttttttggatgaactatcaactcttgattctgagctttacagaagtctaatgcaactcaagcactatgaaggggacgttgaggacctatgtttggattttactctgactgaagagttgggtggtagaagaattgtccatgaactgaggcctggtggtaaaaacatctcagttacaaatgaaaataaattgcactatgttcatgctatagcagactacaagctcaatcgtcagatactgccttttgcaaatgcattttacagaggactcggtgatctcatttcaccatcttggctgagcttgtttaatgctaacgaatttaatcagctgctttcaggcggattacaggattttgatgtcgatgatcttcggaacaacaccaagtatactggtggttataccgagtcaagtcgatctgttaaactcttctgggaggttatcaaaggatttaagccaacagaacgttgcatgctactgaagtttgtgacaagctgttcccgagctccattacttggattcaagtatttgcagccttctttcacaattcataaggttccatgtgatgttacactttgggctacaattggaggccaggacgtggatcgtcttccatctgcttccacgtgctataacacactcaagcttccaacatacaaacggtcaagtacgctgaggagcaaactgctatacgcgattagctcaaatactgggtttgaactctcgtagaggtatgaagattttatgtggatagattaaaaaattgggtttggcacgtgaattgagtgccatagcct

SEQ ID NO: 61336 - DNA, 1770 bp, Oryza sativa
  Clone ID: PAT_MRT4530_62779C.1
cgaactctggtcgaaccgccaaaatcacctgcctgcgcctccctctatctgctaatgatttgttgcatctggaaaatactatgtcttattctgtcacaatgttgcaacaactgagaattctcaattagaatgtttgtgggctcaataacccggcacgcagagaggcagtccttgaaaccgcaaagctggtgaaagcagaggtattctgtgcatgcaataaacaaaactaagtgccattgaccagtggattggtaaggaaattgggggaagcagattgacaaaattcaatttccttcctgccaatggaacacgtggtggcattgccatcttctgggatgactctattgtgaacatgataaacttctcgcacagaacacactacctctcggcaacggcaacgaccataattgaaaacctcagctttgtcatcagtcgtctatggtccctcggaagacagcgataaggagagttttcttgttgagctaatagcagccaagccaccaacagacacgccctggctaatcgtgggagattttaacatgatatgtgaggccagagacaagaacaatcataatctgaatagacggctaatgggacggttcagagcagccttaaacactctggagctaaaagatatcagattgcaaaacatgcggttcacatggagcagtgagcaaggaaatctgattctaagcatattaggtagaatgctatgtaatagcgagggagacatcttcatctctggacactccttgttagcactgttcacatcctgcttagaccactacccactgttgttagacggccccaatgcaagatccaaagaggagcccgagattcagatttgagaatttatgggttagagtggaaggcttcctaggagtggtgactcaggcttggagcaagcctatccaggatggtcacccctgtcttacggctcagtcaaaagctaaggaacaccgaaacgactttgagacaatggagcaaatagaagtttgggcaactgaaactacaattcatcatggtccacgaactaatatattggctgtacatagccctggaaacaagaacacttttagttgaggagcatcaatttagtaaatatctcaagataagaattctggggctagcagctgtggagaaggcaaggaaaaagcaagcatcaagagttaaatggttcaaagagggcgatgctaacacaaggtttttccacatcaagatgaatgcccgaagaaggaaaaatttcatccattgcttacagcaggatggaaacactatacatacacatgaggaaaaggctgcccaccttcacgcgcatttcaactcaatcctggggacaaggagaccatgaggctgcactaaattgggaagccctagaattaaaaaaatacaagatgatagcatggatgagcctttcacggatgatgaaatctgggcagcaataaaaaactctctataggaaaaagcgccggatccggacagtttcactggtgcttttttacaaaagtttttgtcaaataatcaacaaggaaataatggaagtcctgcaaagtttttatagcctatttggggggaattttggaagtatcaatagacccatgatagcattgctaccataccatgactcgccatgttcggtaaatgatttcaggcccatcagcctgattcactccatggcgaagctcatctccaaaaacttggcaatgagactggtagcacggctcggtgaattggtctcacatgcccaaagtgctttcattaagaaaagat

SEQ ID NO: 61337 - DNA, 1378 bp, Oryza sativa
  Clone ID: PAT_MRT4530_6277C.1
atgcggcgccaccacctcctcggcctcctccgccgcgccgcggcttcgtcgacgtccgccgcctccagccgcgcgggcccacaccccagtctccatgcccctggcccgctgcggaatggcggctccgccccccgcttcttctcctcgcgcggcggcgccggagctgcttcgaagggcctgggcgacgacgaggtcgagctctactcgctcctcctcggcgtcagcatcggcgacgaaggcgaggcatcctcacgcggaccggctgcctcgaggggaggccggagggggcggaactcgaagcggcagccgccgaggtcgagatttgacggcgatggagttggctgtagattgcatacattaggtcatggaggaccacgtgctgctgaatatctgaagaaacatctatttaaaaacctcgtgaagcatcctaagttcctgaaagacacaaagctcgctataagtaatgttttttccccttcatttcggctgtacctcttctaccaaacgtttctgaaaactgacgctgatttcctacagtcgatatcttctgatcgttatagggatgatggttcaacagcagtggctgccattttgattggcaaccgcctatatgtagctaatgttggtgattcacgtgccgttgctctaaaagccggaaaagctgtcccactgtctgaagatcacaaacctaacaaaaaagatgagcgaaagagaattgaggatgctggaggcattgttgtttcagatgatatatggagggttgatggaattctggcagtgtcccgtgcatttggcaatcgtttaatgaagcgctatgttaaagcagaaccaaacattcaggaaaaagtggtcgatgaaggcttggaatacctggttcttgctactgatgggctttgggatgtcatgcgaaatgaggacgctgtttctcttttgaaagcacaagatggtcctaaagcggcagccatgaagctcacggaagtcgcccgctctcggcttaccttagataatgtcacatgcattgtgctgcagtttcaccatggaaaatcaaccaacagcaagtgatgttaacaaagtttgccatcagatatcttctaacgagagttgctcccccagatcctcagttctacaagaattttcagcaagcacgaattattagattgattaactctttttttcttattattatgtataaagcctttacatgtgacgtgcctgtttaaattgcatctttcacgagctataaacggctgatgtttgttttaatcggcgctgtaaattttggggaggcttatgatatatttctgtgcctatatatatactactacttcagttaaaaaaaaaaaaaaaaaaaaaaaaaaaacctgcagcccggggatcc

SEQ ID NO: 61338 - DNA, 4161 bp, Oryza sativa
  Clone ID: PAT_MRT4530_62780C.1
ttatcgcttttggaaattgaatagcctgagtgagagtccaaaaaggaaggcaaaaagaacagcaaatgagacaactaccatagccgggacccacaataactcatgatggaaaccaaagtagttcttgacaaagtcagatacacgctctccatcatcaaacttgtctgatacatccccaaactgtgaggtaaccaacccattgagcgtccatgcaaccgggcatatccaatagtaccatctccaccatataggaattctagttaacggtattagaaatcctgagaaaaggttccacatggtataaaatcctgtggaaacaacagtggacatgttgtaatttggagttagacccaccgccatcatgccgtaaaatgtgtagtatgacaaagtgaagtacatgaagaaaaggtaccaaaagaatttggcacctgaccactcatatcctatcattgcatacactagcatgccatatattatggtctgaaggaagatgtacggaagttcaattgcaacctgtcccaaggcatatggcaaaggggagtacatgtgcgatgctctttctctataaaagactgtgcgctcaatagagacaattggttgaactgaagcagagttttgtactcccatggtcaaacatgtagaatacatggaacccatggcgctgaacaaggcctgtttattattccttttttggccaataccccagaacattgttccaaacaacaatgcaactataatggtgaagaagtatttcacagcaatatatcgaggattacgccagtatgacagacgttgcttccagaggcaagccaaacattgtgtaagaaagggctgtgaatattgagttggaaatgataagtcgcttgaactttcatggggcgtgcttaactcctttatcaaatttttgttccttctgtatagttcagaattcttgtaaacttgagtgaagtttacgccagttttttgttcttgcattgggctagtcacttccaacatccatgttgaaggattgtagccatgttttatcttgctgacaccttcaatagcctcaaaatatctaatcaattcacatgaatgttgtcctagtggaccgacataaatctcttcgcctcctcgtttcattaggaaaagctcatcaaaggattcaaatatatcaatgcttggctggtgaattgtgcaaacaactgttcttcctgtgtccacagtattcctaattgccctcatgacaatggctgctgctcgtgcgtcaagtccagatgttggttcgtctaggaaaatgatagatgggtttgcaactagttccactgctattgttagcctttttctttgttcaattgataatccgcttacgccaggcaatccaaccaaagcatcttttaagggataaagctccacgagctccatgacctcctcaataatcatctttcttgttgcagaatcaattttagtaggtaatctgagccatgcagagaacataagggactcataaatagttacatttggtgaatggatgtcattctgttcacaatatcctgaaactctagcaaaggtttcttgcttctttgggtagccagagatggtaatattgccctctatgtatccactagtcttccttccagccaacacatctaatagtgttgtctttcctgcaccgctgacacccataagagctgtaagtactcctggcctaaaagagccactaatatccttcagtagttccaaccggctctctgtagcttgtgttttcagtgcctctggcatgtctatactgtattttatatcttcaaacgtgatggaaagaggtacaaatggaaggaccattcctttaattcctgaactagaattccctatcatgtggtttgaagttgcctcatcgttgttaacgtccacagtacatgtgagaaatatgagacagatggtgtagaggacatttaatagaatcacatatccgagcaaggcaccaacaccaatccaataccatttggcctcaggaaaaaacccacgagattccagaactagccttccaagtggttcgctaaaaccagatattgtcttgttccagctgttacctaggaattcattaactgccaatgtgttcagtgcatacataaggggtgatatccagtaaccccatatccaccatttcttaatttcctctcttgataggatgaatccacttgaaagcatagaaattaatatgcaggatgagcccatagtacttgccacaaccggatcccttgtaagggaagcaatgaagcggaaaagtccagatgttgcctcagacataacaaaaagcgctaggaattgtctaaaaaatctctctatatttgggtcaaatccaataacatagtatgttaggaagacccaaacaatcgtattgaggaaggagataggggtcttaaggatccatgatggcaaggaatacgtccaagctggatagaagaatagatcccgttgcttgaagaaaaccgggagctttgcaatagctaggcccatttctgccaacccattgaacatgatcatcaacatgccatagaactgtgctcccatgtatatcctcccattttctatggagtcacgatgcatattggtacgcataaagacagtcattgtatttattgccatgactgttaacctaattgcctggaatatatagaggaatgagtttcttttcatgagtaatatttccctgtcaatgttagcttgaagtagttctttcatgctaacaccatactttgatgttctcagcgcagcaggatggctcttgcccttgccaaatgggactaccaactcagttcttactgcttgaccgacatgaaaagactgaaatgcctcagcaatctctgcagcagaaatatatcggtatgtagaatcaccatgtgtccagtattgtttctgatctttccttgatgtaacttcctgtaagaagtcagcgacaccttttcgctcagggcatttgaatccaattgattgaaagaactcaagcacatgatcacgagggccattgtagacaacttgaccatctgagaggataattatttcatcaaacaattcatatgtctcgggcgcaggctgtagcaatgcaataattgtcgttccaccaagaatgtgaacagtctgtcggatggagttcacaatctggaatgttgtcgagctatcaagtccagttaatatctcatccatgaaaagtgctcgtcctggtgttaccagcatctccgctgtagttagtcgctttttttgccctcctgatatacctctcaccatattatttcctacaattgtgtcagcacatatatccaatcctaagatcttcaaatataaatcaatctctggatctggtttgatgttttcttccttttctcttctcaatagttccattagcatatcatagtgatggccaactccttgacactttgcagagaaactgaccgtctcacgaaccgttagttcggccatatgtaaatcatgttggctaacataagctgctgatctttggggcacaaattcatccattgtatgaccattataagttatagtccctgatacctttacagttgatgggagtgttcctgctaaggccatcagtagtgatgtctttcctgagccaggaggacctaaaagcaatgtcattctgtgaggctttacgatcccactcacattgtgaaggatcgatattttttgcttcttttttcgtgttatgtgaagagcgttccccaggccctgtttggaggtgagtgttgtcactctgctgccaacatatgactctgcttccacatttaagttctcataccgcacttcaatagtcggaagcttgattccaacccgatccaaacgttccttgaacatgcagaggaagcccgcgtggtcgtcagcgacgcccgcgacgcgctccagcagcgcgcgctgctcgtcggcggcgagccgccgcacgttcacctcccgcagctcgccgtccggcggcaaggccagcagcgccgtccgtgctcggtcgtaggtcggcagcttctccagcgccgcccaccgcaggtcctcctcgtcgtcctccctcgctgacgacgacgaccgcgagaacacgctgtccgccgccgccgccgcccacgcccagccgccctcccgccgtccgccgccgcacccgtaggtctcgccgccgccgccgtccat

SEQ ID NO: 61339 - DNA, 1206 bp, Oryza sativa
  Clone ID: PAT_MRT4530_62781C.1
atgacgccattttccccgcatctcgtcgccgccgccgccgcgctcctcggcgtcctcgccaccgccgtcgccggaggcgggacgggcgcctacacccgcgtgttcagcttcggcgactcgctcaccgacaccggcaatgcgctgcacctcccgtccaccggcggcggcggcggcccggccagccgccctccctacggcgagaccttcttccgccgccccaccggccgcgcctccgacggccgcctcgccgtcgacttcatcgtggaggcgctgcggctgcggcacccggcgccgtacctcgccgccggcggcgagacggcggcggagttccggcacggcgtgaacttcgccgtcggcgggtcgacggcgctgccgccggagttctacgagggccgtggtctcaagccgttcgtgccggtctctctcgcgaaccagaccgcctggttctacaaagtcttgcagattcttggatcttcagatcacgggaggaggaagatcatggcgagctcgctgttcatcgtcggggagatcggcgtgaacgactacctcgtctccctcgtcggcaacctcaccgtcggcgaggtcgagacctccgtcgtgccgcacatcgtcgctgccatccgctccaccgtgaacgaggtgatcgccgccggagcgacgacggtggtggtgccggggatgatacctctcggctgcgagccgcagctgctcgcgctctaccagggcggcggcggcgtcgccggcgacgactacgacccggagtccggctgcatgacgcggctgaacggcctcgccgagcaccacaaccgcgagctgcgccgcgccgtcgccgagctccgcggcgcgcacccaggcgcgtccgtcgtcgtggcctacgccgacctctaccgcgccgtcgccgacatcgtcgcctcgccggggaggcacgggttcgggggcgcgccgctcgccgcgtgctgcggcgccggcgccggcgcgtacaacttcgacatggcggcattctgcggcgcggcggggtcgacggcgtgcgcggacccgtcggcgtacgtgtcgtgggacggcgtgcacttcaccgaggcggccaacaggcacatcgcctgcgccgtgctggaggccggcggcggcgcaccgccggccgtggcaacgccgctggcgacgtggtcggcggcggcggaggctggacgtagtaggatagggtgctcttag

SEQ ID NO: 61340 - DNA, 213 bp, Oryza sativa
  Clone ID: PAT_MRT4530_62782C.1
atgtgggcaccccagattaagtgggccaagctattcatttgggccgtcgcgtcgcaatttttactgggccagtatagctgcctgcgtgtttcggtttgggccccacatccttcaggaaacgcatcgccgtgccaactgccgaacacctcgccgtcgtcgtgcctgcctagcgctggtccaataacgacgtacgagtccaataacgagatctag

SEQ ID NO: 61341 - DNA, 347 bp, Oryza sativa
  Clone ID: PAT_MRT4530_62784C.1
ctcggacacggctacactagctagcaaatgagagctgagcaggcgagcgagcagacatggcaggatcactccaagccgaggacaccctgatgcatccagacaagctcggcatgcgaaccttatacggcgaactggcatattgcccgtacatgcacgtagccagggcgaccggattacaaaccagcaccgacggaaggatcaccttctctctgcaaggctacatcctgctgggctccaacaagtgcgactatgccgccaaacttgtccgattaagactctgcacgcttatgtgtgctcgtctgagggcgccagatgctgagggcgtgaccctggaggatcacctttga

SEQ ID NO: 61342 - DNA, 357 bp, Oryza sativa
  Clone ID: PAT_MRT4530_62785C.1
atggattcgctgttgtgcaacatatggacagatccaatatcgtcgacagaaaaatgcaacaacggggtaaagcttcttgaaccagagctctccatcgcagccacaaaccgcaagaggcacgggaaaagggagagggtagaagattgcaattgctctattcatcccccttcgtctctttctttcatcctctcatcttggcccaaaaaagctccaggaagagcatgtgaggatgacagcgactgtgccattgtcgcggagcgacggaaggaggcgaagagggatcatgggtgcacggtgcggtgtgagaaatctcgtgaatcacgaccgccgccgccgtgggagagagggaagcgatag

SEQ ID NO: 61343 - DNA, 214 bp, Oryza sativa
  Clone ID: PAT_MRT4530_62786C.1
atggcgggagaggagtcgacggcgtctgcagaagcggaaggaagcggggcacgaggttgtgcacggtggcgggagatagcttcgccatggctcccctctcctttcctccgttgctgcgctgctctgccacacgccgacgccggcctcctgcggcgcctcaacgacctgcttgatctcctcgaatcggagctcggcctccttgatggagttagag

SEQ ID NO: 61344 - DNA, 202 bp, Oryza sativa
  Clone ID: PAT_MRT4530_62787C.1
ggagcaatgcatatgttggtttgttacgcccccaaaactttgggaaacagtcatgtgtgtgaagaagaatgggagagcaactgagcagagcactagcagagcaaaactatacatggcgctgtactcaaaacaaagttgggaacccctctcattttactctagctctgcccctggctcctgtggtgcaccgctgttgcagtca

SEQ ID NO: 61345 - DNA, 354 bp, Oryza sativa
  Clone ID: PAT_MRT4530_62788C.1
atgaagtatcttacagtaatgaaacagtggctcgctgccaagtgcttcaagggaccagcaacaaagaggaagaggaaagggagagagccgagagaggaggaggtgttgctggctaggaggagaactggggacggcgcatggcggcttcgctccaagactacaggcgatggtggagcgaaggcagcgggcaaaagcagtgttgtgggggcgaggaggatgtgtggcagcggtgtgacgctgtggggcgaggagaaggcacggttgcagtggacagaagggtcgctacgggcaaggagcgaagtatggagagaaagcggcgagatagacagagtgagcgagagggcgagaagataa

SEQ ID NO: 61346 - DNA, 1389 bp, Oryza sativa
  Clone ID: PAT_MRT4530_62789C.1
gtgtggaaaatttgcagtatatatatgctgatgttggaagtgatggcacgaatgtgatgtcacatttaaaacaaatgcgtcgacacatgtttacactgaccgcacttggaactatggtatgtaatacaaaataaaatatgccttaaatcaggatccgttaagtatgctaagatgacaaaattcataacattcctgatggtcaatccttagaaaatggatgatgaatgcccataaagctgggagtatacatatttggcacaaacatcagctgggatttttcctatcagatttgaggtaggcaggcagccttttgaaactgattatcatcactcttcagacgtacccatcgtcttcattggattctgcaaccacctgaatctggccctcgcctaacattcccatatgcagagagttcaagaagatccatatcacgtcctgagaccctacaataggcactcttctgtatgagctcagatttggataactctgttttgttccctttagaccggtttacagtagcctgcaaaacctggcagttctccaatgtgctcttcccacccttggagtaggggacgatgtggtcgtagtcgtggcagaggcatccggggcagccgacgagcttgcggaagacgacgttgccgagcgcgtcgcggcgccacctctccgggtcgcgcccggccacccgctccgccttctcccagcaccgctgcttcaccacgtaggggaagctccgcggctccgacgacgacgccgacggccgcggcgccgtgaggagcaggccgtccagctcctccgcgaccgcggccacggaggcggaggaggaccgaggggaggtcggccgaggcgtggccccgaacaacggcggcgagggcggcgcgtcgtgccgccgccggcgcagcggcttcctccccaccattatctccccctcgcccggataggatcgccgtggaggcatttcgtcgagcaggttgcatgctcgaccaggacggcgccgccgccaatgatctcaaatctaccaagtgagcttcgccgcgttcttcgaggagctctcccgttgcagttcagaagcgtcggcgagccgtggcggccatggagttgccggtggcggtggtcgtcggccggccggccgaggttggccttggcgggcttctgctgcggctgcggctgctgctgcttctgctgggcgaggaggtcgtcgtcgccgccgaggctggtgcgggagagctccttcttgttctgcttccgcatctcgcggatcttggagaaatccatggagtagtccggcagcgcgccgttcttcatgtcccagtccccgaacgccggcaccgtcatccacccgttccggccgcccgccgccgccgcgccatgcccccccttgatgttctccat

SEQ ID NO: 61347 - DNA, 1146 bp, Oryza sativa
  Clone ID: PAT_MRT4530_6278C.1
atggaaagtaaccaacacaaagcatcagatccacaggattctatggttcatttagatctggatgaagataagataatggtgacatcagcattaccatgtccttcaatgtccgtgggaaaatcggttatgaggaagaggggaagaccaagcaggcatgcacgaggaacttcgttgtcttctgttaccccagaagataatcctagggaagctgttgatgatatactcatgacatttggtggactacatcggaggatcatgcagttgatagatgtgaaaatggcttcaaaacagcttgtcttccaagcattgaacctcatgagaaaagttggatatcatgttaacaaggacaagagggttggagaggtcccaggagttaaaattggtgacatattctactctagaattgagatgctcttggtagggctacatagtaacatcaatagaggaattgaattcatgtctggtgcttttattaataaggaagataagatagctacatgcattgtgtcatctggaatgtatgagaatggtgatgatgacccatatactttggtatataatggccaaggcaaagtccaccataagcttgagagagaaatagctcgtgtttgtgttgtaaacaacattgatagtgaggatgctcctaacaactttacctattcaactaaacttgataatgggaatcatatggtttcagcaaacaagatgtgtgtctgcaaatgcacaagctcatgccttggtgaagacaattgctcttgtttgaaaacaaatggcagctatttaccttacaactcttcaggaatacttgtttgtcgaaagactatgatatatgagtgcaatgattcatgtgcttgcacaattaattgctcgaaccgagtggtacagaggggttcctatctacactttgaagtgttcaagacgatggatcgaggttggggccttcgcagttgggatcccattccggcgggtgcatttgtatgtgaatatgttggtgtagttattgacaaagatagcttagttgaagaagatgaatacatatttgaggttactagaccagagcataatttaaaatggaactatttaccagaattgataggtgaaccttctttctatgacatgaatgatacattcaagaagttgtgttaa

SEQ ID NO: 61348 - DNA, 359 bp, Oryza sativa
  Clone ID: PAT_MRT4530_62790C.1
aacgttaccttaccggggagaaaaaccactttcggcttgtgtgcgtaaatttcatcaaccttggtgctgcgtgcgtttaatataacactggatggccaaggtgtttcaatggtcaaccctcccggggaaccaatagccatgcccgggggaatcgcccccatggtctaatgcttcttagctttaagtggttcgtagcctatcttttgaaagtggacccgacccatagacctgatatatcatgtaacttctatccataccaccactttaatctaaattgatggcttcattcatatcttatcattatcaactgattcagccaataagaaatcaagccctctcatctcaaaaaaaaaaaaaaa

SEQ ID NO: 61349 - DNA, 1471 bp, Oryza sativa
  Clone ID: PAT_MRT4530_62791C.1
tgctggttttcggctcgtgtacttcttgttttgtcctagtttttttttgaaagaagtagatattgccgtaatccattatctctcttttttttctgttcaactaacactacattttttttgttcccgttcgtcttatccgtgcttactactacagttactactactccatggccaaaatgaaacccattaaagggtaaaaatgaagggggaaaaaggaaaggaaaagaaagaataaaacatttgcatccagcccaagatgacgctgcaaatgcaaattcccgaagaaaaaagaatcaacaaaagacgagtccttgatcatcaatcattgagtccacgctccacctccctcgccgtcgacggcgagctcaccggcggaggcatctggctgctgcggtgaaggaacgtcgcgctcgtagggtgaaagccacttggcgcgcatgtactcgggcttgcgccatggcgggaggtggaggccgcgcttcttgaggctggcgcgcgcggcgtcggcggccgcggccacgaggaggcggaggcggtcctccttcccgacgaacaccgacggcaggcgctggagcacggcgcggtacgccttggtgggccgcgcgacctcgaactccgaccggaagtcgacgtcgacgaggatgcgctcgcgctcggcgcggtcggaggcgggagggaggaggacgtcgaggtaggcgtgctcgccttttgggtgggaggaggacttgtcccagcgggagatgcagaccgcggcgtcgtgccccgccgcgcggagcgagtcggcgaggaggcggaggaggtcgcgcttgcgcgcccccgcggcgcggtggcgctcgacgagcgtggagacgtcggcgaggaggttgcgttcccggaggctggcgcagtggacgaggcccttgatggtctctgcggcgtcggaggtggccgccgcctcggcagcagcggggccgtcgtcgtcgtcgtcagacgcctccccgccgtggaagcaattgcagcagcgcgcggcgcccgccggccgctcgacgccgacgccgtcctccaagaagctccgcaccatgccgtccaggcacacggagctcggctccgacgactcatccttctccccgacacccgcgaccgacgggagcctctccgccggcgacacccgcagcagctgcctctcgaacagcctcttcagccgcgacttcgccggcgccccaggggacggatcgatctgccccgccgccgccgccgccgccctcatctcctcacaaccgaacgagacgacagtgcagggtttcactggatgcgggtgcggcggcggcggcgatcgtggtcaccgacgatcgcctcacgcatagccgtcggcggcgtctcactggcttcgatcggtgcggctagggtttgtttttcttttctttttttccttttcttttcttctcctttttttgcttcgaattttcgcgggcacccggggggatccactagt

SEQ ID NO: 61350 - DNA, 255 bp, Oryza sativa
  Clone ID: PAT_MRT4530_62792C.1
atggcggcggcgggcggcggcggggggagtggtgagctcacctggttggcggcgggcgtcgcgcgtggtgaggaggcggaggaggacgacgacgaggaggagaattgggggtggcttgggtacttccatccgatttaccgtcgtttattacaaagagtggtatttaagcttaagctcagatggccaaataagtttattttctcgtatcaaataatgatatcaaataatgaatataagaaagtgatactacaataa

SEQ ID NO: 61351 - DNA, 210 bp, Oryza sativa
  Clone ID: PAT_MRT4530_62793C.1
atgaggctttcatggctgaggaaggtaaatccatacaatgcgtataactactacaagaagtgtcacatgcaacttaaagtcggtgtcctctgcatttattacacatgcgaattcctaagggtgaatgggacgtacacgaccaacgcagaggatttgcctagaattgaacatcggacaagttttgatgatgaaggcattcaaaatttgtag

SEQ ID NO: 61352 - DNA, 554 bp, Oryza sativa
  unsure (1)..(554): unsure at all n locations
  Clone ID: PAT_MRT4530_62794C.1
tncctttnacacatataagcccattcgtctttttaaanacaaatatgctaatatgcaaaaatatanctgtatttaaagtncctttaataataaaataaatgatgttcgcatattctctaatcacatgnatgctcaaatatatgtctaaaantcaacggcattatatactaaagaaaatggagggantaggaatcagcgtatctgctaaaattaaagtcggatacanccttataatctcaatatnacctcgtacccatttttcctctttgagtgccaggctatctaacaacactagctccaaaagttcttgatgtggcatggtggacatgaatttgtaactgcatgcaggattccagctcagagaattgcaggctgttgatatctcatccctgatttctggtncccgttattgtatcatctagcacatttagagctgatgcttttgataattaaattaaggagaaaaaaaagagaggaactgatgttttttatcctaatctgaggagaaaaataaataacagttgcttttaagtcactaaaaaaaaaaaaaaaaa

SEQ ID NO: 61353 - DNA, 246 bp, Oryza sativa
  Clone ID: PAT_MRT4530_62795C.1
ccgacatccgccgcaatgctgtgtctcacctcctcttcctcctccgcgcccgctccgctccttccctctctcgctgatcgaccgagcccgggaatcgcgggcgggggcggcaatgttcgcctgagcgtgcattcttcttcgcgccgggcgtggcctgcaaaggtcaagaccaccccctcagtcctgcgactgcgccaaaaaacacaaccatgctgactgttgcggaggaggacccaaccacacaac

SEQ ID NO: 61354 - DNA, 351 bp, Oryza sativa
  Clone ID: PAT_MRT4530_62796C.1
atggtgcgtcagacccgcacgccgcacgtctgcctcactgcattaaatgtagcagggggcagttggggcgttgtgcgcattaatgtaatatcatcctgggctccctcctcgctcgcttttcccgccacatggtggctgggcgagggcctcggggcaaagcggcgcaagggcccgaggggcgtgccgtggcaccccgaggccccgaaccccctagccgcccccgcggttcgtggacggcggggggcaggagcaagtcacagggacacgtggcaggatgtgaaggcggattgctcatgcttcgcatacccccgggcccatatctccgacagtatgctgtgcttgatgatttag

SEQ ID NO: 61355 - DNA, 291 bp, Oryza sativa
  Clone ID: PAT_MRT4530_62797C.1
atggagaggactacccaagcctcgatcactcggggtagttcttccttcactctgaaggtggtgaactccaaaccactcacaaccggcgccgggcctcctccacaatcttctcggagagccctgtcagagggccccatcggcctggccggtcagagcgacatggggtggccggtcagaccggcctcggctcggtcagacagccctcagctcggtctgaccgaatacggctccgtcggctctgtatcggccaccccgagcaccaccataccggcctccagggggccggtctga

SEQ ID NO: 61356 - DNA, 372 bp, Oryza sativa
  Clone ID: PAT_MRT4530_62798C.1
ccggctcttctcccaggtctttgtttactaggtcaacaacccctaaaccacacaggccgctaagatgagtaccgaaagattgaggctcccgtacgacccccttctgatcagacaacaagtctcatacgaacagcctgacgggaacacaaggctgatgagacatatagcagcttctagacaatgcttctgctgggggaatgatgcgatctggtgctgagtgcttgtaatggcattttagtaccggagatctgccgctcgtcctgattgccgctagaggcttctactgccccatccattttggcgcttgtctaggatacatccccaaggggggggctgtccgggccgactttttcaggctgtccggagccccac

SEQ ID NO: 61357 - DNA, 1009 bp, Oryza sativa
  Clone ID: PAT_MRT4530_62799C.1
gacccacgcgtccgcgcaacgacaacgttggcgttgggaaccgagtggagactagctagtgaagaccagaggcagacatggcgagatcactggcgcacgcgacgctgctcctcgtcgttgccgtcgtggcggcggcggcctgctggaccacggcggccggcgagaacgaggaggtggcggagatatgcaagaagacgtcgtacccggaggtgtgcattgccacagcggggaagcaggcgtccaagtacggcgccgccgtggacccgctggcggtgctcaacatgcaggtggacgcgttcgcgctgcgcacggaggcggcgcggaagcacctgacggaggcggtgaagacggcgacgccgaaggcggcgaaggcgctggacctgtgcgacagcctgtacctggacgtcgaggacaacctcggcgcggcgcggcgcgccatcgggttcaaggacgccgtcaccatccgcgccatgatgggcatggcggcgcaggacatgcagggctgcgacgagcagttcaggaaggtcggcgagaagaaccccatggaccacttcaaccggtccctcctcgagatgtccgagatctgccgctccctctccaacatgatctgatcgatcgctctcgccgcccgccaccgtgccggcgcgcgcaccgcgcacgcgtgccgccggccggcgaccctttgcgtgagagcgagcaagcgcgctccagcagcgctggtgattgaagcttctctttttaatttgttttctttcgcttctttttttttaacgatcttgttttcttagtgaaaaatgtgttaacttgtaattgttggtctcgggaaagagaaggcacattcaagagggtcttctaattttgaatggaaatgttgttgattcttttttgttgtaatttatccttgatgtcaaaatgtgcatgagcagtatattgaagtgtaacagcgactaaattaaatgtatacttttgtagcaccattatatataaataaagatttttgtatatttgc

SEQ ID NO: 61358 - DNA, 327 bp, Oryza sativa
  Clone ID: PAT_MRT4530_6279C.1
gaaatagctcagtcgactgcgatggggggggcgttcattgcaacaacctgccgcgttgtggccgtcaagaccacctatgtctgccataatgagctatggaatgtccccatacttgacataccctgcgccgctaccggcctcatgaccatgagctaggaactgtggtactgacctgacaagctgaacaacctggggacattatagacgcatacaccgtgatacctgaggggcgagatcaagggcgactactggaggcacacgtaagagatatgaagagacccagaggcgtgatggaggaacatatcccatgaggagagacacggacgg

SEQ ID NO: 61359 - DNA, 1401 bp, Oryza sativa
  Clone ID: PAT_MRT4530_627C.1
ccgccgagccccttcgccttcgccttcgccttcgccgccggagatggacgccaccgcactcgccgcttcactggtgccctcgtggagtgcggtggtggtgctattctcctacctaggctaccttgccaccgctggcgctgtcctccctggcaagcttgtccccggagccgtcctcccggactcgtcccgcctccactaccgctgcaatggtttggtctcgctcctcctcttgctggtgctctctgcgctcggtgtctacatgggatggatgtcccctacggtcatagctgaccgtggaatcgagctgttgtctgcaaccttcatttttagtgttatcgttactttcttactgtattattcaggattaaggtcccatcataaaagttcttccttgaaaccgcatatcactgggaatttcatacaagattggtggttgggagtgcagctgaatcctcatttcatgggagttgacctcaagttcttttttgtgagagctgggatgatggcatggttatttatcaacctatctttgtttgcaaagagctacctagctggttcagccaatctttcagtcattctctaccaattcttttgtgcgtggtatattgtagattacttcgttcatgaagaactcatgacttcaacatgggacattattgcggaaaggctgggcttcatgctggtttttggtgatctagtgttcattccgtttaccttcaccattcagggatggtggcttttgagaaacaatgtggagctgtcccttttggctgctacagttaactgcttcatttttgttattggctatcttgtgttcagaggagccaataaacaaaaacatgtcttcaagaagagccctaaagctcttatttggggtaaaactcccaaacttgtcgggggaaagctacttgtatctggctactggggaattgcaaggcactgtaattatcttggggatatactgctagctctttcatttagcttaccctgtggaaccagttcggtgatcccatacttctacccaacatacctgttcattttgctgatatggagggaacgaagggacgaagcaaggtgctcagagaagtacaaggagatctgggtagaatattgcaagcttgtgccttggaggatctttccttacgtgtattagatcaaaagattttgcgcagcagttgtatcgttgtagaacctcagcatgacagtgccgagctattcaaatgaaaatgccataaaataaactaaatatttagagactacaaaattttagggtatctcggtatgatagttggaatctgagagcgttgttgtgctatttgaacatgtaaaattcaccaagattcctgttgtttatttgtagctgacatccgtgttgaatatcaattaacatagattttgttg

SEQ ID NO: 61360 - DNA, 300 bp, Oryza sativa
  Clone ID: PAT_MRT4530_62800C.1
atgggtgagcacgggatgcgggcggcatgcggagagccagcggagtgggtggcgaagctggatccgcatctctgcccctggctgctccgcctgtctgctacgcccgtcgaccgctcgccgccgcgctcgcccgcccccacccccgccgatgggagcgaggcggccggccgcgccgacgtgagaggggcagaggcgacggtggcggcgctgacgggtgaccaggcgctgtacaatgggttcggggccgccggaatgcatggcgctgccgtcatgcagccgccgacgttcgggcaggagtga

SEQ ID NO: 61361 - DNA, 269 bp, Oryza sativa
  Clone ID: PAT_MRT4530_62801C.1
ggaacacctttttaaggttttttttagcccccccgcaaaaaccggaaccaaacaaaaaggttttcgaggcccgggggcccctaatgggctagtttccccaacagggcccggggaccagagaaatttttaaaccaagtcttagaaacccccgggcggggtgcccagggctaatttgggttccccggcaaaatccggctgaaaaaggaaacccccggggctttaatttagggcatccggtgggccaccccctgggggggcaactttcccct

SEQ ID NO: 61362 - DNA, 307 bp, Oryza sativa
  unsure (1)..(307): unsure at all n locations
  Clone ID: PAT_MRT4530_62802C.1
catccgccggcacagcaacagaagcagcaaanctcgcattgcccgnccccaaatccaacccaaccnaacccaacccgagntggtcccaccgcgcgccgccgnccgggccgaagatccgggggcagagcgnagtcgccccaacccgcgtgcctgcgatagctgatgggttccccggagcccggaggagacgaggaagnggaacgagcagccgcggcccgcagcgacgacgagcatccgacgagaaagcngttgggacttgggaagggggaaggaaaccccaccggcgactgaaaaaagaaaaaaaaaa

SEQ ID NO: 61363 - DNA, 489 bp, Oryza sativa
  Clone ID: PAT_MRT4530_62803C.1
ggggggggtttttttttaaatttgaggacgctggttttgatttatttgcccaagtttacatggacatacgacgatgtctgagcttattttgaacttccgagccgctatactgggaaaactcattacaagacaccgccaagggtgggggggggggggggggcaccatattacctatggtagacaccatatgtagatggcacgttagaggccaacagagctggagcccgccccagataccgatcaaagtagagaacaccaaactggtggagttgccgctgctgcgctaaggcctgaacaatgttaatggcctgatagggagattgttgcgccaccagcgcgagctgttgccagacttgggtggttctcagttgaaacgcagctgattgcaagaaggggctggccggtatgccatactgctgccttaggaactcattataagggctaagcacctggtgctggggcaggacaggccgactggagctggttttg

SEQ ID NO: 61364 - DNA, 249 bp, Oryza sativa
  Clone ID: PAT_MRT4530_62804C.1
atggcgctgtcgtccatgcagagggcagggagaaggacgccggcggtggaagggaggcagagcggcaccggtgtagagggcagggagagcgaagccgacgtggacttggctgacggcgacgaggcttcctccgcgatggggaaaggaagagaggagagagaggggagtcgtgggaccgagccagtccgcggtcccaaaacgcgcaaccgcgttgcccagctatttcgacattgttccgcactgttctga

SEQ ID NO: 61365 - DNA, 236 bp, Oryza sativa
  Clone ID: PAT_MRT4530_62805C.1
tccccgggctgaggaatcggcacgagggagagagaactagtctcgagttttttttttttttttttcaggtcaaatttagtcttcatttcgttcaacaaagaggtgttcaaacgatacatatgacgctaaaaggttcaaacgatacataagtttagctgaactgataaggaaatgcaacagagctgcaacacactgcatatgagatttaaaagagattaggaccgcacatgatcagt

SEQ ID NO: 61366 - DNA, 341 bp, Oryza sativa
  Clone ID: PAT_MRT4530_62806C.1
atacaattgcagcctcgcatggaactagaactattagtgaagtagtaaaattaccaaaggtctgaacgaaacaaaaaacatggagcaaatagtaaatatgaacattaacttacaaaaatggagtaaaatttgtagataaataatttatagccagggaaaatggaaattccagcggtttttgaaacagggccctaattatcgaatgggtcgcctccatcacctccatccgcgccatcgccgtctccaccgccgtcgatcatcatcggcgccgccaccaccttgtcgtcgtccggaaagacttcgttgtacttaaggacggtgttgtcctcgaatttgaactc

SEQ ID NO: 61367 - DNA, 530 bp, Oryza sativa
  unsure (1)..(530): unsure at all n locations
  Clone ID: PAT_MRT4530_62807C.1
nggnaaantggnatcagccannnaacccgtcgtccacgccggccgctgcccagcaaggcctatcctcctcccctgttgttgccgccccatcctcccctccccgttgtcaccgccggtggcctccgccgctgcccggcgaggcctccgccaccactgccaccgttatcatagtcgctgtcatcgccgctcccttcgtccctgaactaggcagatttgctgctcctgtgggcgccggtggtggatccacccagtccgaagccgccatcgccgctcccaaggacaagggctgtggtctccgcccgaggccgccggatccacgcgccctcgagccggcggctgtctccgcgtggcggcactacctgcccccaacgccattgtctccgccatgtgccagacgggaagtggaggaaggaggaagaggggaaagtggagggatcatcaacggcacgtcatggttgcatgacgagctgaggaagatgatggccgacttcaacaaggcggtgccgacgatgttcatctacccgatctag

SEQ ID NO: 61368 - DNA, 1074 bp, Oryza sativa
  Clone ID: PAT_MRT4530_62808C.1
cacatgccattgactcatgtgggtcctacatgtcattgagagtatattatcaagaaggaagtgccacaggtgctgttcgaacagaagaaaatagctaccaatatgttatataaaaaaggcaatgtaccaatagaggatgttgatgaggatgcatggtaaccattggcctactgtgcaagctttgatttctgctaaaccaaaggatttttcaattactcaagagggttggcgtctactttgtgagcactggagtaaacctgaatttaggaagaaatctttaaatggggggagaaacaggttagctggaggtgatacagtataccaatgcggcgggtcgcgaggcttggttgctacgaaactgtacctgcaacataaaaaaggtaggcaacaaggacttgctgctgcttggcagcacatacacaggatgaaacaaggaaaaaatgaacagctatgcaaccagagagcagaagaagcttgtggagtaattaatcagaaattttaatcaacactgaacaacacacccatgctgcacaggcccaaccatcctgaacaaccatacccggctgtacagaactaactccaaaccaggagctaagcaaattattactaggtataacatccataattattgtgagaggtgtgagactaatcacgaaaaacattgcttaacccgcccataaccgcgggcacggctattcgaatagttttactctggccagaggtgtaccactgtacccacaagacacagcctcaacatcttgtctaccatgcgtcgcgaaaatcctgaaacaaaaatcaggatgtgacaatacccttatgaaacaatatgctcttgagttgggtccctcaacttcaaatgttgggtctgctccagatcatcaagaggctgaatatcaacatgaccagagtgcttttgatcaagagggaggaaatgagattggtaaagatgagggcaatgatttttatcaagagggaggaaatgagattcctaaagaagagggcaatagtgatgacgctgatggggagtatggaatgtctgaaagcgactatgaagatattgatttatggcttatc

SEQ ID NO: 61369 - DNA, 1757 bp, Oryza sativa
  Clone ID: PAT_MRT4530_62809C.1
tcgcgatctagaacgcaaatatataatatataaatcatgcttaaaatactgtgtgataaaacaactcacaaaataaattatatttacataattttctttaataatacgaaccatcaaacatttaaaaaaaatcaatggtttcatttactttaaaaaaacggaggtaatatattatagagagagtactaacgaaagcaagttggttggacgtatgtccgctagacgcccggcacaggcactcggaggattggacggagctggaggttggccttgcggcgcgccgtgatgccgaacgcctctgtcatgtcgaactcggtcgggtcagccacaccggaggcctcccagtcgatgtggaagagcaggctggcgagtgggagctccacgtttgcgaacccgaacgccatcccggggcacatccgccggccgccgccgaacggcaggagctcgaagtcggcgcccttgaagtccaccgcggcggccgcctcgccgtcgccgaaccgctccggccggaactcctccggcgagccgccgggccagtaccgctcgtcgcggccgatcgcccaggcgttcaccagcacctgcgcgccgcgcggcacgtcgtagccgagcacccggcacggctcccggcactcgcgcgggagcagcagcggcagcggcgggtgcagccggagcgtctccctgacgacgaggcgaaggtacgggagctcgccgacggcgagcgcgctctctgacacggcgccggccgcctcgaagtcacggcgaacctcggccgtcgccttcttcatcgccgccgggttccggattagctccgcgaacgcccaccccagcgtcgtcgccgacgtctcgcagcctccgctgatgacatcaacgacgacgcatttgacggcgtccatgtcgagagggaactccagcccgccctccttatgtatcctcagtagcacgtctagaatgtcttcgccggcgccgccagtcttctccaggtgcgcctggatgatgccgtcgaggacgccgaacatcgtgtcacgacacctctcggcctggcgcacggcgccgctgagacggccggcgagacgcgacgacggccacaggtccgccacgttgagcccagcagcgagctcgatggcgcggtcgagctggcggaggaacacgtcgaggcccgcgcaccgctcgcccaccacggcgcgcacggtggagtcggccacgagcgcgcacagcgccgcccgcagctccacggtccgcccgtccgccgcggccgcggcgaccgcgcgcagcgtggcggcgacctcctcctcgcggatggggcggaaggacaggacgcgtcgcgccgagaggagctccgtgacggcgatcttcctcagctggcgccagtagtccccgtacggcgcgaaggctatgtccctgcctcctttggtggccgcgcgcacgctggcgctcagcggccgcgacgcgaacgccgcgtcgtgcgtccgcatcacctcccgcgccgcgtcccgcgacgacaccaccagcgtgggcacctctccgagccgtagcatcatgaccggcccgtggcggcgcgccaggtcgcgcatcgcgcggtgcgggagcttgccggcgaggtggtgcaggctgccgatgaccggcagctgccatggccccggcggcaaccgcagcccggcgtcgccatgtgccgccgccgccgatcgcctgcgcctggcgaacagcacgacgagcaacgacacgagagctaagccgaggtagaagtaaccatctgccat

SEQ ID NO: 61370 - DNA, 190 bp, Oryza sativa
  Clone ID: PAT_MRT4530_6280C.1
ctctcccggcgcaccccgatttcctcgcccccacctcggtcctcgatgctgacaactgaccagtagcacctgcgcttctcctgcctgctctgctccgactcctgagccttaaacccttctgccccccacttcctgtgacctccggaactccaccagcagcagtcactgcactgtctctctctctctgccc

SEQ ID NO: 61371 - DNA, 2158 bp, Oryza sativa
  Clone ID: PAT_MRT4530_62810C.1
ctagacgccgggcacagacacgcggaggagtggccggagatggagattctccttccggcgtgaagtgataccgaacgcctcagtcatgtcgagcttggtcgggtcggccatgccaggcacctcccagtcgaagtggaagagcaggctggagagagggagctccacgttggcaagcccgaacgccatcccggggcacatccgccggccgccgccgaacggcaggagctcgaagtcggcgcccctgaagtccaccgcggcggtcgcctcaccgtcgtcgaaccgctccggccggaactcctccggcgagccgccgggccagtaccgctcgtcgcgaccgatcgtgcactcgcgtggcagcagcagcggcagcggagggtgtagccggagcgtctcacggatgacgagttgcaggtaccggagctcgccgagcgcgtcctctgacacggcgccggccgcggccctctccttatctctgcttgcatcacgtatccgctcgagggtgcgagtatttggtaggagtgcaacccagaaggattcgggagcggggactgattttaccccattgttcactggtgccaaggccgagtgaactcgtaggggagcaggggcagggtttttcctgtccaacttgccgccagacacgagcacgggcacacgaagtgtggggcggagcgggaggtcggccttccggcgggcggtgataccaaatccctcagtcatgtcaaactcagcggggtcggccacgtcgggcgcctcccagtcgaagtggaatagcaggctagcgagcgcgagctccacgttggcgagcccgaacgccatcccggggcacatccgccggccaccgccgaacggcaggagctcgaagtcggcgcccctgaagtccaccgccgcggccgcctcgccgtcgccgaaccgctccggccggaactcctccggcgagccgccgggccagtaccgctcgtcgcggccgatcgcccaggcgttcaccagcacctgcgcgccgcgcggcacgtcgtagccgagcacccggcacggctcccggcactcgcgcggcagcagcagcggcagcggcgggtgcagccggagcgtctcccggacgacgaggcgcaggtacgggagctcgccgacggcgagcgcgctctccgacaccgccccggccgccgcgaaggcacgccgcacctcggccgtcgccttccgcatcgccgccgggttccggatcagctccgccatcgcccaccccagcgtcgtcgccgacgtctcgctgccgccgccgatgatgtcctgcatatggtacatcaacgacgacgcatttgacggcgtccatgtcgagagggaactccagcccgccctccttatgtatcctcagtagcacgtctagaatgtcttcgccggcgccgccagtctcctccaggtgcgcctggatgatgccgtcgaggacgccgaacatcgtgtcacgacacctctcggcttggcgcacggcgccgctgagacggccggcgagacgcgacgacggccacaggtccgccacgttgagcccagcagcgagctcgatggcgcggtcgagcgctcgcccaccacggcgcgcacggtgggagtcggccacgagcgcgcacagcgccgcccgcagctccacggtccgcccgtccgccgcggccgcggcgaccgcgcgcagcgtggcggcgacttcctcctcgcggatggggcgaaaggacaggacgcgtcgcgccgagaggagctccgtgacggcgatcttcctcagctggcgccagtagtccccgtacggcgcgaaggctatgtccctgcctcctttggtgaccgcgcgcacgttggcgctcagcggccgcgacgcgaacgccgcgtcgtgcgtccgcatcacctcccgcgccgcgtcccgcgacgacaccaccagcgtgggcacctctccaagccgtagcatcatgaccggcccgtggcggcgcgccaggtcgcgcatcgcggggtgcgggagcttgccggcgaggtggtgcaggctgccgatgaccggcagctgccatggccccggcggcaaccgcagcccggcgtcgccatgtgccgccgccgccgatcgcctgcgcctggcgaacagcacgacgagcaacgacacgagagctaagccgaggtagaagtaaccatctgccat

SEQ ID NO: 61372 - DNA, 242 bp, Oryza sativa
  unsure (1)..(242): unsure at all n locations
  Clone ID: PAT_MRT4530_62811C.1
ccacgannccnnccacgcagtccntccacgngtccngnagagnnnacatcgagntgtaggcggagangatcttnaacctcgtttctatccgacggtggccaagtcgccgtcnngctgntncanncttctngnggncnncgncgtcctnaggncttgctatggtgttcttngctttaatatgtngantggntgccaaggngtttcganggtcattgtaaggttgaaagttcangngcccaaag

SEQ ID NO: 61373 - DNA, 593 bp, Oryza sativa
  Clone ID: PAT_MRT4530_62812C.1
gcacagggttaagacagcatgctaccagtgaggaaaggtttactgatgatccctttggtgcaaagtgtatgtatgtagtcaaggaaatcaaatgattagccagcagtctgtactctgctccatcggttgtcatcattaaacctttcctcactgttaagacagcatgctaccagttcagcaccaaatttccttgactacatacatacactttgcaccaaagggatcatcagtaaacctttcctatctgttaagacagcatgctaccagttcagcaccaactgccaacagctgttgctatacagcagagttgaacaagaacaaaaggaatcccatgtattcgtcgaataagtggaattttcttcctctgcacaaatgcaggagggatggttgagctgaacaagattaatacgcgtgtaaaacaatccagcacactgatgaatgagagctgctgctgtgatgcattttctgctactcttttcttgaagagatgtatcggtccttattagtgtatgtattgttccatgctgttacaactagccggtgtagaaaaactcatgtttgttgtattgaaaggtggtgcacgataccctttt

SEQ ID NO: 61374 - DNA, 591 bp, Oryza sativa
  Clone ID: PAT_MRT4530_62813C.1
atggctctgtcgacgcggcgcgtctgcgtgctcctgctgctggtcctcctcggcctcgcggcgacctccaaccgcgcgcgcgcggcgcgagtagtccccgccgcaggcgccgcggctcttcgtcgcgaagaaggcgaggcgcctgcggccgttcaccgcggacgccgcggggttcctcgcatcggccgcggcggcggagtcggtggcggtggcgtcaccgtacccgtcgagcatgtcgctagacggagactccaggagcacgagcacctcaacgaggagatgctgccgtcgttcagcggcggtggcggctctcgcggcggcggcgtctcttccggtggctcttcccgtggaggcggcagctcgatcggctccggtggcggttcacgtggcagcggtggcggctccagctcaggttcacgcggcgccggcggcactgaatccggccgacgcttcatcccgccaattatccccgccgtcccggggggcggtggcggcggctgcagcggcagcggcagtagctctggccgccgcggcgtttggaacgtgggagtcgccgcagcctcggtcctcgccgtcgcctggctcgtgtag

SEQ ID NO: 61375 - DNA, 1367 bp, Oryza sativa
  Clone ID: PAT_MRT4530_62814C.1
aaaagtttttaaatccttccctaagtcgttgggccgatttcggcccaactctttctctctccgcgcggccgaaccggcccaatcggcccagcagccgccccctcctctggagtccgatctcttcaatccaaggctataaataggaccccctagtcctcctctttcgtttgccccctctcccgtcctctcccgtgacccgtggagccgtcgccaccgtgcaagccgccgccgccgtcgcttcttcgtcgccggccgtcatccgtcgtcgttcggcacttcggtgagcaccatcgggttcgtctcgtcgtcctctacgtgtacatgccctccaaatccgcagccagccgctctatctccggcgaggtcgccatctttatcttttgtatagcatgattcattatagtgcgccagactgtgaagtggcgagaagtccatgggggtcgctggggagtccatgccttgtttataagggggtgactatgatccaggaacggtgcactgttttgagttgtgttgtgcaaagggtattgtcacgatttccccctttgcaatgccgtggtggtatttcggggcatagcaacatgtgtggaatcgtgtcttgtgggtacagtggtacacctctggccagagtaaaactattcgaatagccgtgcccgcggttatgggcgggttgagcaatgtttttcgtgattagtctcacaagatccgagggaaaaggaattccctgaatttctataggaacagcagggctataatactttgctgtcataacccctccaggggtggtgatgaggagagggttcctaagcctttctacccccaactgatttctccccacgaatggcacagatataaacgagtgggaagctccagagtcgaacaaaatggtagcagggatggaatgaatgaggaacgtaccaacgatgacgtctggagttgtcagcacgtcctcggccgtcacgtggttcacacgaccccgaatgacatccttaccaccattgttggagcggggaggcgcttggccttgctggcgcctctgctttgggcatttatccgcaaagtgcccaggctcgaagcaggtgaagcacaaacgctgcggaccttgaacgtccctgcggccttgaccagactgcgcggctggcgtaagaggacggggcgcacgggtcccttgctggctctgcttgtgctgcggctgcgggacgcgcaccacgaaatgaagtcggggcgcggagcgaggttgctgctgctgttgctgctgcgaggacgatccttctggaaagggattcgggtagcggatcctttggttagcctcccggtgaatgtggaaattcgccaagcggggcttgggcgaccccaaggccttgtgc

SEQ ID NO: 61376 - DNA, 289 bp, Oryza sativa
  Clone ID: PAT_MRT4530_62815C.1
atagagatccaatatgagcttaattcggataaggatccgaataggagtcctacgggccttggaggcccgagtgatggatcctatatattcgtgaggggtgtgaccggcggaggtattgcatcactgcgagagtacggcgaggagaacgcacgaggaggagaaggtcgagccggtgcgatcgacgcgcgctacttcgcgagagttccttcgacttctcaacgtctttttccgctgcacagcgcgtcgagtggtaatgctggaaatgctagaaccggcacctataacgttt

SEQ ID NO: 61377 - DNA, 2087 bp, Oryza sativa
  Clone ID: PAT_MRT4530_62816C.1
ggaaattgcagcgcgatgctcatacctgagtacgcatgatggagtacaacgttgactctcaaaaatgagcttgggtttttttttaaactaaaccggcaggagaactgtcaattatatttcattaaacaggagtaaaaacccagacgggttacagaaaaagaaaaaacaaactctcggcgagtagagactcgccaagtctttccaccgtggctggtacaaccacacagcacacggagctctatatcactctagccaaactatcaacgaaacgatggcggaatccaacgacgaacaccgatgtcgagatgctgaagaggcggcacaccgcgttgacatcacaaggcacatgtcatcgttaccgagctagccgcccagcgacccagcagctccaactccacggcgatcatggcatcattgtaggcaccgccaaaccgagcaaagcaacaccaagctcacactttggacatcattcaagcccctgaagcgccaaagcctgtactagcaacacccacatccctagagagaaactgcaaatgttatcgttgccaagcttcgtcgcaccccaacgacgtagcagtttcgactccacccgacagagacagacgaataagctggatgccaccaatacaagaaaggaaccaagaaggacaaggcctcgccaagcacctaggcatctagcgcatcgagctgacacaggagtccacaagcggcaaatggtgcatgggtaaggttctccaagacgatgcccccaaggaggatacgacgtgaaacgccaccatcgcccgtccggaaaccggatcacagttttcacctaaagactggtagcgtggagaaaatgctataacgacgcctccaagaagggaacgacgccaaaggcgccgccgttgtcgtgctagccaaaggctaagcaaggcttttgccaatgattttcgtccagcgccaccaccgaaccacacaacaaccgtcgcggaaccaccacatcatctcatcagccaccagttagcccagttcaccactccacggcttaggtaggctcgcggcctgctcccgcacgtcgccatggcaccgtcgtcctctgcacaagccgccgcgtccaccctctcccgaagctccccacggccaggataggatctggccataggaggggaggagctccacgagatgggctttttaagccggctgggagaagagacgtcgccgccgccaaccgcttccccgtgcacacaggccagagaagcagcagttgacgcacgtccgcgagccgcagccaccgtcaccgcgaggtcctcgcgccgcggtcgccgccgcgcggccctcgcgccgcggccgccaccgcctcctcctccgtgcgcccctcgcaccgcggtcgccgccgctatcgcctcctccgcgtggccctcgcgcctcggtcgccgccaccgcagccgcctcctccgcgcggccctcgcgccgcggccgccaccttcgccgccgacccgcgcgtctagcctagatccagccaagggagggccggatccgaactcaacggcgccggatctggctgtcctcgccgagttgcgcccctcgtgctccggtctcatcggcgcccccaaccacttgaccaggagtgaggggaaaggggagccccgccgccgccgtctttgcagctgctcgggcggcggcgaggcgtgggagaggaggggaagggagggggcgacggtgaggtttcgccgcccacgtcgcccctggggcggagcgaccgggccacctcgtatctgttgtccaagaaggagattgcccgtgccagtggaaactggaggcagaagaggctccatggctcttttgttttgcatggtaactgattctttcttgtcttggctcagtagttgatgcatcaccacccataaaataggatttgctatcttcctgatgccgataacatgaagctgagcaactattgtatctgtacgatttccttcacaaatatcgtggcccccttttgagctgactttaccatcatttagttgagtaacaaatgattcctccaatgagttaatatacagcatgtgcttttcgtctgtccatccagttgatgaaccatctcccat

SEQ ID NO: 61378 - DNA, 1158 bp, Oryza sativa
  Clone ID: PAT_MRT4530_62817C.1
gtccttgggcgcctcatccttcttcctcctcttgctccgcttccccttgacctcggcatccatggcgatttcgccgccgccttcttcgccctcgtccatgtcgagccgcttcttcgccgacttctccctgcgcagctcctcgatgagccctccacccagcatctcctcctcgtcgccctccccttccatcctcggcatccccagcgggtcccaccccgcggcgccgaaggtctccgagaacagcgggtccagcccgtcatcctcctcctcctcctcctcctcctcggtggtatctgtcggtggcagcggcgaggagctcgggttgggaggaggagaggtcagtgcaggggagggagcagcttccgcagccgcatccgcatccagcggcggcggcggaggtggggaggggttagtgggcggggaagggaactgagctagggtttcctcgtccaacggcggcggcggcggcggagatggtggaggtggggatccgacgacggggtgggcggcggtggcgatctgggacgacttcttcagccgcttgagccggcggggaggcgatgcgacgggggaagccgggagcgcgaggagctccgcctcatcgaagggctccgtctccatgacgtcgtcgccgccgccgccgccgccgccgcctagggttctctctctctctctctctctctcccccttccaccaaactccgaatcgagacgccgcgagccgaggagcggagagcggaacaccggattcgagagcgcgcgatgggggaagaggaaggaaggagatgaagaagatgaggatgaaatccaagagcagcagcgcgggagacgtttcgagttttcccctcggtttcgcgctcctactgtactgtactgcttttcccaccattttttttcccgtgctcgctgctctccccgcgctgcgctgcgccgcgccgcgccgaaactgccacgctgagacggcgcgagcgacgtgtgaactgtgaagtgaaccgcgcgtggcgcgtgcgtggccccctccacctttccgggccggtctcgcggcttgcagacgacggtccaagacgaaacggttggaaaggccgataaaagcccatgcttcgccttcaccgcggtgatgcgggccgaaggctgcgttcttcgtacctacttcatccat

SEQ ID NO: 61379 - DNA, 336 bp, Oryza sativa
  Clone ID: PAT_MRT4530_62818C.1
atgggagggagagctgagtgccgccacagtcgaggatgggtgtacgcgctgtaccagacgtgcgagatcgtgctcacgtcgtttgcgccgacgatggttgccgtcctcgccgaacgcttgcctgcctccctcgccagcaagccatggaaggaggagggggagccgagtgctgccgcgagtctgacctccgcctcgccgtgctcagccgcaatcacggcctccaatcggccgatgtggcctccctccctcgccggccatccaccgacgacgctgacggctccgcatatctggtcgacccgtccccgccgccaacgactccatcccccgcggttctga

SEQ ID NO: 61380 - DNA, 546 bp, Oryza sativa
  Clone ID: PAT_MRT4530_62819C.1
agccgcgagtgcggccgggcaccgtcacgcgcacgtcctcccacgtcaggaacaccgcggggtcgtcgacgacgtccgctgccgcccgtggaagcgaaactgcctgcgccgccggcagcggcacctcgacgccgtcgaaccgcgttggaggaggaggaggaaatgccggccatcatcgttgtcgtcgtgcgcttgacgtagacagcggcgacggtggtcatgacggcgacggtggtcgtggcaacgtcgatcgtaggcggtcacggcaaggcgtggcgcggcggtgatggttttcccgtcactagctgcgccccctcgatcggttagggtttttgtgggtggagttggcggcggcgacgaacctcgtatcgtgtgccgccctagcctccaccctctatttatgtggcgcagggtgatgggggcccaccagccaatgggctgggcgcccccaatcatagtgcggtcaagtttaaccctttgaccataggaccaagtgtcgcactgcatctgtacatagtggagtagctcatcatgctgcgcaccata

SEQ ID NO: 61381 - DNA, 1055 bp, Oryza sativa
  unsure (1)..(1055): unsure at all n locations
  Clone ID: PAT_MRT4530_6281C.1
gcacgaggcaagcagtctctcttcccatctcatcttgcttcccctcccctcctcactaccatctactcccatcccatccgccgccaatccgccgctgcagccggcaccggccttcttccacgccggcggccggcacccggcaggcagagcctacacaccaggccgccctcctcctcctcctccccggccgccggtacctgaggggaagaagcttcgcagctcgggctctcacgccctgaggcgtccggagttcgatgtccgtttgcatctcatggatccgcatcacctgaaccgccccaccgccgatgacgctgccgccgccgacgacgactgggataatgatggctttgtgataccaagcttgagtgttgaagaatctgatcttggtgattgggaagctgcacaggtttctcgtcctcaaccacctccaaaggctaccaaggataccgagaagatatatcttggaccgcacggcgcaccgccatctcgagcaaagaagcaagaggacactgcagcagctgccactgggtaccgcgacaagagcaaggtgaaggaagctgatcaaaaggtgcttggaactggccgggacaacaaagggggcaataacttcaaccgctacaacaatgctggccaccatgtcaaggaaccctacaagagatccacttgaccttctcctctccactgaggcttgctccctgtgaaacttttctctctcctatatcaacacagcttgacgaagccaaatttacgcgatttgtcggtgtgatggatatcattgctggaattaggacaacctatcttgcagcggcatgtatacctgaactgtggccatgtacgtaccgtctgtttgctactctgggctggagcaatgcgtttgctgattttctttcgaatggaaaaatatgtgttgttccggatgtcgccgacactacaggtatctggagcattacaaagcagatccatgtctattccgtttgtcattgccatgattaatgtgcctaatacatcatcgtcgtcatctctagcattgtcccanaaaaaaaaatatataaaaa

SEQ ID NO: 61382 - DNA, 492 bp, Oryza sativa
  Clone ID: PAT_MRT4530_62820C.1
atgatggtgatgaggttgaaggggttaatggttatgatgagctgtcaaaagtacggatcgaatgtgatagagaaatgcctgacatttggtagcatccatgaccgtctcgtcatcgcagctgacatcgccggtgccggcgaggaccaaatcctgatgatgatgatggacgagcatggaaattacgtgatacaaaagatgttggagacgatagcggatgagtgggtggtggacttgatagtcacagttgtcaaccgcaacttcttcaggctcatccacaacatccatggcaggcacgttacaattccgggaagcggaaagaacaaggcaaccagttggtcatttgatccaactagggttcacaggacgcaaaatattgtacagcttcatgagaattacccagaactaaaggataagatatatgaggaaaaggaagcatatatcaagaaattgcacaaggaaaagaaggtcgaggaagcgacatacttgggatga

SEQ ID NO: 61383 - DNA, 468 bp, Oryza sativa
  Clone ID: PAT_MRT4530_62822C.1
atgggtgatcagagcggcgagaaaaccactccggaggtagcgtttgcggcggaactcaccggcgaacgtggagagggcagctcgggggtggaatggaggagcggcgtggtggcaaggcttgcccgcggggcagtgaagctagcggtggtggcggtacgacttgaggtgtatgggaacggcgggaagaggctgccggaggcggtgaaggtgagactgctcgggtgtggtggtggaagtggtgctccggcgatagaattggagaacggagcagaggccggggtgtggcgaggcacggcgaagccggtggtggcgacggcgcagcgcggcaacgtcgggagcggcggcagcaatcggctggagggggttcaggcagcggtggctcggcctcacgatgggaaggtggttccggcggtgcaggagggagatggagtggatgccgaggtgcggtggggcgctgcgatgctatag

SEQ ID NO: 61384 - DNA, 500 bp, Oryza sativa
  Clone ID: PAT_MRT4530_62823C.1
aatcccttattttagagatggagggagcagtacaatctaaagtggattattggcaatttggcacggaaggggggaagaccggatcgaaggggggatggcgtcggcggctggcttgcaagatgaagcccgtcgtgcagcgctgcggacactggacagtgctccacgcctcgattcacgggcgcgcgcgcgcgtggcctctactccgtcgaccgggcacacccacagcatcatcgatgatcgataaaacagtgcccggacgtttccccgctgttacactaccgcacgcccccggtcacgtaaccctgctgcactcgcagagtcgcagggcaccggcacgccacagcccacacccatactccgcccctgctgccagcctacctactctcacgcgttgcccgccccgtccaggctgctacacccacaccacccgcccgcggcttcgcccgcgcgtgcatgtgccgcgcgcgcgcgaggcgtccaaactacgtcttctcgcgtaa

SEQ ID NO: 61385 - DNA, 355 bp, Oryza sativa
  Clone ID: PAT_MRT4530_62824C.1
atgccggccgtcggccgatctccctcaccggagcaataccagccaatccctcgcgccatagagcttgcctcgattggttcttatttaagtcctcgcgcaggaggcaaatttatgccgcgaagggcaattgtgatatttaccgaggcgcagttctctctaaagacctcgggaacgccagaactcctctcgctgctgataacattacgttcagagcgcatggggactagagttcatggaacagttgatacagttaaacatgtcggtttccaaatcattagttctgggacccgacacgctgccgctaggcaaatcctggacaccatggagcgcaggaccaggaaccgagtaatccgtt

SEQ ID NO: 61386 - DNA, 1743 bp, Oryza sativa
  Clone ID: PAT_MRT4530_62825C.1
atgacgggagggggagggggtggaggaggcacggcggcaccggcctacggggaggcgtggtactgggacgagcggtacaggaaggaggccggcccgttcgactggtaccagaagtaccccgccctcgcgccgctgctcgccgtctacgtccgccgccaccaccgcctcctcctcgccggctgcggcaactccgtttttggtgaaaacatggttgatgatggttatcaagacaacgacgacatatataaatcatatgtggggattgaagtcatgaagaagaaatattgttacaagcctcacatcaattacatgaatattgttttacggaacatggctgaattcgagtcaggttcagtcgatgctggtattgacaaaggaacgctagattctataatgtgtggccaaaattcacaagagaatgcgtttccgattctagaggcgttcaatacaattctcaaggacaagggagtttatattcagatcaattatggcgacccaagttatcgattgcgtctccctaaagacgtgaagcttttgagagtgaagcttcatgtcatagattgatgggaaaggcctcgggaccgttgatgggtacatttatgtctgtataaagggcagcgacgacgggaagtcgcatttggattcgagggctgaagtcaatggagaagcatagtgatttcacctcataacccttttggatcatcttgtataactattgaagcaataatgtaatgccgtttctgtataattaggcggttgctagacgaatctcttgtctttagtgggaaaagttaatttgataagtcttaaacagaaaaaacaaaaaaacattcctcctccaccatccgtagccgccttcagccgcgacattctatctcatcctaataaacgacgtcagaagacgccgcctctcctctccgcccctcccgtccaatggaggctctcgccggcaccgccgccgcctccctgccggccttgccttcccaccagccgcggtcccgcctggccccgcggtcactcgcccttcccggcggccgctcgtgctgcgggcccctccgcgccgccgcagccggtggcggaggcggcgccaaggacgacgcgcaggctggcgtcacgcccaacgggtctcccgttatcaagagtgcgacttttgcccatggtctacctccgccggcattggctgttcgcaacttgatggaacaggcgcggtttgctcatctgtgcactgtcatgtctggcatgcatcatcggcgtactggatacccatttggtatggagctacctgatatgttttactggggcagcatagaggagtgggcacataagcagtatgttgcaaaacatcaacaatgggcatctcaacagtggggaaatttttactattacaggatgcagaacataagcgacatatacttcattggaggctttggcactgttgcatgggtagatgtcaaggagtatgaagctattcaacccgacaagatagcagttgatggtggtgaacaaagcttaaaggagctgaatgcaattttctcgaagccacttagagagttcttgtcatcagaaggggaggttgatgatgctgcacttatatcagtagacagcaaagggatagatataagggttcgccagggtgcacagttcaacattcagaggctggcatttgatgtacctcacaaggtggagacactagaggaagccaagagagcactccacaagataatcaagacaaccagcaaataa

SEQ ID NO: 61387 - DNA, 790 bp, Oryza sativa
  unsure (1)..(790): unsure at all n locations
  Clone ID: PAT_MRT4530_62826C.1
ccattagaaaattaagacggattggaacaatatccggaccccgcatganaaattctcgagtctcccacgtaaagcgcaatctgatttaggtgagaatgcattatcttatggtttacaaagaggcagacnagcattaatcagtaaagcgaatgcggcagataaagaaggcaaaaatgcgatattagcagacagttacataggcaaactgaatcttggttttgaatttggagaattaccaaaatttgcaaaacaagtgaaagatggcaaagtanccgagcaagatatacaaaatatcgcttcatttaatgacgaaacagctaaattagcgcgaagaagcgaaccaaaaaatcgtattaacgatgctaatgtagatgataaccaacgaattattcgtgagttaataaataatgaagcggcagttgatgcattaaaacggatagctacgctaagtgaccaagaaaaagcgatgcacagtacattaagagcaaacgaaaaatttgatatggatgaactagaggagtcccctaactatactactgcggaaaataaatcgattcgtgattataaagatacccagaaagcattaaatgatgcacgtatggacttctttaccgagaagacgaaatttatcgcgaaagaaacgctagaacgaggaggacagctttactttgcattagatggtttagtgacaaatagcccaggttttagagctgatacgcagattaatatggataaattgaagggtaccgagctcgaattcgccntatagtggatcgtcactcactgccgc

SEQ ID NO: 61388 - DNA, 375 bp, Oryza sativa
  Clone ID: PAT_MRT4530_62827C.1
atgccgtcatcaatggctgccattgctgtagctacaatgctgcgtgcactagctcagctcatacagagacctgaaagtcactctctctcacacacaaataccactaagaaagctagtacagaacagagaaatgccaagcttaaatatatgggtagttggggtgatgagctaactgcattgaatttgatttggcaagagctcataattgggctccctaggcctgagacccagcagaatctttggacaaaattttacaacactcgtatatgttctttgtccggatgttcgacgtctgcatcctcccatgggaataaaacctgcaaacccttgaagcagcaacaacaacaacaaaacgaaattaaaactctcgtttaa

SEQ ID NO: 61389 - DNA, 1444 bp, Oryza sativa
  Clone ID: PAT_MRT4530_62828C.1
ctggtccatcaagctagcttcttctgcatcatgcacgcttggcaacttaggtccccatctctcgatgtcgatgtgtatacgcttcacagataaggccccaccactttgagttaactgagcttgaacatttcgtgaaattaacgacgtgcgtgcaattatgtcttcagtgctaccttgttcaaatttcctagtctttttgcccctgctgatgggtgatgtaagttgtagtagtaggttgagtctcttgccttttggtttcgatgctttgattatgattggtggaagcgtcggctcggtagtgcctgtcttactcaacatgtatgcatgatcatctagatcagactttacaatatcgggcctcatcgatggaacttcctctttgaggcagaggaagatcaccacggcaatagctgcaggattttttttctgagcccaatcttggaggagatggaggatgcggagaagcaataacggaggatagggctgcggcggcaggaacctaaggcactggcgctcctcttctttctcaacttcaatgtggttatagcaatgacgacgtgccgataacagtatcaccggagggacgcagctgccgctgtcgtcagagaggaactgggcacggggcggtcggggaccactgccagatctcgtcgttgtttttgggcgcccggtaccaaaatcatcgaactgttgaatccggcatgggtaggatcgggagaaaaaatgagcaagggtggcggggccgcgttgtcgatctaggcaacggcatcgttgaagtccaggcggcgacggagttgaagtccaagcagcgacgtcgttgatccaggcggcggcggctcgttgttcccggtggcggtggagttgaagtccaggcggcggcaccgttgatctaggcgacgacggctcgtcgttcctgcgggcggagatggaggatttcttcccggcaccaagggatgcgctcgtcgatcccgacactccaggcggcagcggctcgtcattcccggtgccggcggagttgaagtccaagcggcggcggctcgtcattcctggcggcggcggtggctcgtcgttcctagtggcggtggtggcgtcgatccagacggcgatggcgttgaagtcgccgatccacgaagttgttgcacgtttgcgcttccacctctgttctctggagtgctcgctgctcagttgctgtttggcgcatgccgccgccgccgccgacgccgtcgacagggacgaccccgttgtgacggcgacggccggccggggccggcggtttctcccatcgccggcgctgcagctgcactccgtgcaggtgaatgtggcggctcatccgtggagcaaggagaggaggaggagcagaagaagaagaagaagaagagccgccacgttgatggccgtgagcaagcatcaggtgcccaccggcgccaacccggactccaattag

SEQ ID NO: 61390 - DNA, 552 bp, Oryza sativa
  Clone ID: PAT_MRT4530_62829C.1
atggtcctttttggtgcgccagagtggctggcgccgtcctccaatatggtggtgccggccacactggcgccgtctccatgccaccgtggcactagggcatacgtgcaatgtatgatgtggcaacggggggcgccagccatactggcgccgtacctcataccacgacgccagccaggctggcgcacccctcctgggtgggccgcgcgcagcccgttctacctcgggctggaggctggcgcaacccctcccaccacggcgccagggtggctagcgccgcccaccagccccaagcacgttctacctcgggctggatccacatattggcctgctacttgtatcgggaggggtgcgccagcatcgctggcgccgtggtatgaggggcggcgccagtgtggctggcgcccccctttgccacgtcaccccttccacatatgccctactaccacggtgtcacttcggcggcgccacggtggctggtgccgccatgttgggggacggcgccagccactctggcgcaccaaaaaggaccattcctggaataagtttttctag

SEQ ID NO: 61391 - DNA, 413 bp, Oryza sativa
  Clone ID: PAT_MRT4530_6282C.1
ggacacataagtggaattgtatcatattactagatttctcaagttcaagtacaaggcagcaatgcatgattatacacagaactttttaagggggaaaaaatctatggaaaaaagcatgaacataaaaaagatctcagatatgctttcttctacattagaatgatcaggtgagtataagtcgtcaccagtcatcaaattctgctgggtgcaatgtctatcatattcttctcatctatactaaaagcttcctggtatttcacaatgatctccttgtcaaacagtcaaacaaccaagtacgcaaccgtgctaagtttcacaaatactgaaatgcagattagatagagtggtaagatcactaccagtgacacatcctgttaagagctaattcgtgccctcctattctccgcgatgag

SEQ ID NO: 61392 - DNA, 279 bp, Oryza sativa
  Clone ID: PAT_MRT4530_62830C.1
atggcaccattgtacctctcaggagccacagaatttttgcggtggagcgacgacgacacgacaggaggagcgcggcacgtgcaggggggtgggggaggggagcacggccgggatggaactccgcgagagaaaaccttgacgactccgggagtgcgccgggttctgccgccccctgatttttctgatgatacggggggactgcgcgatggcagggcgtcggcggcgtcgcggggtgaggggtcgccggcggccgcgacggcggggcgcggcggcgagtaa

SEQ ID NO: 61393 - DNA, 513 bp, Oryza sativa
  Clone ID: PAT_MRT4530_62831C.1
cagaaggttataattaattccttcaatgaatacgctccaccctgcaactctggagctttaggaactaaacacacccctactgagatccgaactccatatgtacagaatgtggaagaaccagtactacttggagctcatctaggtggaaatatgttagtttaaatgaaaaatttgcaactaacttctacaaggttattatgcattagtctatctcccaaggttgtagtgaagtgatttataaaggtctacttaattagtctagaccgttcatctttcccctgtactcctttaaaaggagtagtgatgagtggtgaatctgccaccatcccatcaccaactccctagccttttgaaatagagaaagtacatgtggggtaagagagtccatctgtgaaccacccttacaaccaaatatgtactttttacggaaaggaaaatgatagtgtgggctagagggtctacgtgtcagtaacaaatatatgtagaaattaggagatgatgtatatagaaaat

SEQ ID NO: 61394 - DNA, 484 bp, Oryza sativa
  Clone ID: PAT_MRT4530_62832C.1
gggtgctttttagttagatgcgttgatttctttagttctcgattttttggattaaatcatcctttggaatccatggtgggttgacctggttatattggtctggttaaaacttaattaggcattattaaactggtttaatggcaaaattgggggggtggatggaaaattggtgtgcccttgttaaatgaaggtttgttcctgtgggggcctcaaaagttaggcttaagtggcccatttaatggcaccgggatttaaccagataccagggttcctagtttttaattccgcgggggcaaaaaaattatttgggggtattgcctgttagcccaaatttaatttatagacatcgggctcgtttccaaattactgttagttcacttttgaaataaataaacggtttgttggcatggcttgggccaattatttatttgccctaactactagttatgacataaaatttggaatctacagttattaattgggt

SEQ ID NO: 61395 - DNA, 272 bp, Oryza sativa
  Clone ID: PAT_MRT4530_62833C.1
cgcctgcgtaccgtccgtactcccggtcgaccccgcgtccggcacaagcggcgctaccgaggttacctggcacgtagggcattccgtgacattaaaaggatgataagactgaagcatcatgatccatggactttgttagtaggaggaacaggactcattcagagaagaacgagatctacatgaccatgaagaagatttgggacgagatcaagaaaatgggttatgttcccgacacaggttctgtactacacgacctggatgaagaggttgag

SEQ ID NO: 61396 - DNA, 675 bp, Oryza sativa
  Clone ID: PAT_MRT4530_62834C.1
atgctcgaacctgttaaggctgaaattaaacgtttatatgatgcaagttttattcgtcattgtcgatatgctgaatgggtttctagcatagttcctgttctcaagaaaaatggcaaagtcagggtgtgcattgatttccgatatctaaacaaagctaccccaaaggacgaatatccgatgccagtagccgatcagctggttgatgctgcttcagggcataagatattgagttttatggatggtaatgcagggtacaatcagatttttatggccaaagaagatatccataagacagcttttaggtgtcctggcgcaatcggcttgtttgagtgggttgtgatgacttttggcttgaagagtgctggagctacatatcaaagggccataaattacatataccatgatttaatcggcaggttggttgaagtctatattgatgatgtggttgttaagtccaaggaaatagaggaccacatagccgatttgaggatggtttttgagaggactaggaagtatggcctaaagatgaatccaacaaagtgtgcttttggcgtatcggctggcctgtttttaggatttcttgttcatgagagggggattgaggtaactgtcacattccaaaatcctagtgaaagcctccaaaaattaaaatgtgcaaagttaaaagtcaaataa

SEQ ID NO: 61397 - DNA, 524 bp, Oryza sativa
  Clone ID: PAT_MRT4530_62835C.1
cgggctgcaggaattcggcacgaggcaaaaggggtacattccgtcacaaatttctaaggatgctgctacctttctggtccagtgcattgccaacactgccagttacagcacctcctagaaaagagagtgatgctccagagggccgttcacgacatcaaaaatcatcaagaatggatcctacaaagatcttacttgcattggcaatcatggcatgtatagcaacaatggggatactttattaccgtttgacacaacgcagtctttccgagaactttattgaggatgaacctcaatagtaccctgaggttgtcaatcttgcagttcattcctggtgctatgctgctgattccaagggtttaataccctccttgtatttcttttcttctccctttttctggggctttcttggtggctgagatgggtagttagatactacataagaattatagtagactgcttccatatgatgattgatgtgcatgtttatgtaactataatgctataaaatatcctctttgttattt

SEQ ID NO: 61398 - DNA, 542 bp, Oryza sativa
  Clone ID: PAT_MRT4530_62836C.1
cggtcagctaaaaaccattccaccagtcgcaaatcctctcttaattagctaccacctagcttggcaccaacaattcaacttttacactcatacctgctatctcactatatataagatgtctcatggccggccggggtgccaaattgtacatgcttatttcaaaaactcagctcaaaatggcttctaggtctcctgtgctgctgtttgcgttgatggtttgtcttgtcatcgtctcgcagggtgtcctcgctgcaagggagcttgtcgagacaaccaaagttgtggtagatggaatgaaagttgagcttcctgaaggccgcaaaggtgcagctgctgtctcggggtatggaggcggctggccagggacatacggacactatccatgatacaattgtatattctggatatataaaaggattaatttagcttaaccgtgtatatgtgcatctattttattgtgtatttagaatgtgttgtatcgttataaatctttaattttacacatgtatttaaacaaaaaaaaaaaaaaaaaacccgcggcc

SEQ ID NO: 61399 - DNA, 299 bp, Oryza sativa
  unsure (1)..(299): unsure at all n locations
  Clone ID: PAT_MRT4530_62837C.1
cccacgcgtccgctctcctcctcttcaccaccaccaccaccaccagcagcagcagagagaaccatctccatccaataatccccatgcttgcgcaccactcccggccacatcccgngcgaggaggaggaggagcngangggngtgattaatccgngctcccgcctggttggtggtggtgggatnagggnggannnntggatgtgnagtcaccggaggngcggcggttggaccncgtgatgagcttcggcgacgagtgcancatcccgaaggaggcgctggacatggtgtgagggtacgtg

SEQ ID NO: 61400 - DNA, 318 bp, Oryza sativa
  Clone ID: PAT_MRT4530_62838C.1
atgcgcggctcgatcgcttggcgcgcggcgctcccctacggccggggacgtcccgacgtgtacccccgtggcgcgtggaccgcgcgtaataagccccgtaaattaaacgcgcgatcgatcgaccacatgcgcatggccggcgccgcggccgcgggcatcgcgcggtcccctccccgtccggctccgtgcctcctgcgggtcgagagagaaatatacgggtgtgtcggccagccgcgcacgcacacgcacgggcggtgcggcggtgccccgtgcccgtatggtcgtatggccagtacgtggccgtccaccgcgagctga

SEQ ID NO: 61401 - DNA, 285 bp, Oryza sativa
  Clone ID: PAT_MRT4530_62839C.1
atggaggccctcaagcgccgcctcgacgagctccactcccgcgcccacaccgacctggacgcctccctctcccgcgcctccaagcggttcaagatccaggaccacgcctgtcagcagcttacagatgaagtggacaaggagtacaagaagatgtctgacagcataaatgaaaatacagagatgatcaaggcaaagtacaagcagatcatggcagaggcacaatcatctacatctcgtggtattagatccatccttggaatttcttatccacaatattcaccttaa

SEQ ID NO: 61402 - DNA, 412 bp, Oryza sativa
  unsure (1)..(412): unsure at all n locations
  Clone ID: PAT_MRT4530_6283C.1
atctcatcgtccatggcgcccaaggtggcggtcacggaggcgacggggcggcaggcggcgtcgttcgtgctcggctgcgtggccacgctcaccgtcatgctgctcttccagtaccaggcgccgccggactacggccgcgccgccaggtcgccggtgcagttctccacctccagagaccagctgctgctgcactgcggcggcaatggaacggcgccgcgccgccggtgatcgcacgtggcggcgaggaggctaacatcaccggcaagcctccgacgactgctactgctgtcgccgaggagcagccgccaaccaagcctcctgcgacctctactgcatcttcaccaactcatcatattncagcaaccagtacagatctttgaagaagagggcgncgagttccgggggttttcgg

SEQ ID NO: 61403 - DNA, 741 bp, Oryza sativa
  Clone ID: PAT_MRT4530_62840C.1
atggcggtggcggcgacgacggcgcacgacacggcacagcgcggcggcttcgtggcggcggcgcggcggctcgaaggcggcggcacgaccgacggcgacgcgtggagacacggggagggacacacacgggacgacggacggacggggactggagtggggagaggggaggatggtgggcttttacaggggaaagagaggataagggggagagggaagagaagggaagtgaccggtggagagggggggtgtgagtgcgacggcggcgatgtgacggcgcgcggcgcgcgggtggagatgacgacggcgcggcgcggctcggggtgcaaggcggcgcggcacgtggcagtggcgcggggcgcgaggcagcgggcgcgcggcgcgaggcgacgggacggcgcgcggcgcggcagcggcacggctcgaggcggcgatggaacgcgcacgcggcagcaggtggtgacagcggcgacgcgacggcgcggcgcggagctcggcgcggcacggcacggggctcggcgcgacggcgacggcgaggcgatgacgacgcggtgcggggcgcgaggcggcggagcgacggacgagcggcgcgtgggcgcggggcgcgaggcgacgatgagacggacgagcggcgacgggacggccgacggcgacggcgcggcagcggcgacgcgacgcgagcggcgtggcgcggggcgcgaggcagccaggcgcgcgcggctgaggaggctgaggagggggtaa

SEQ ID NO: 61404 - DNA, 394 bp, Oryza sativa
  Clone ID: PAT_MRT4530_62841C.1
gcacgaggcacacccctcctcccttcgccctcgcctctcaaacctcgccgcgacgccgccgcccgcagccccgtcggctcggcctcgccgccggtgtgggctgtgcgctcctctgctccggcggcgcagcaggggcggtgcaggcgcgcggcggcacggccgcacggcagcggtagtcctgctcttggcttcccgctttcggcgcattcgcttgtgggtagcacttagtatagtctgtatagaggcttgctgctttgctcttagtatttgctttgctgattttatctgaagttctattttaccgattcgactgaatgattagcctagttagccatcaggaatcgaggattcatttaaccgcttattgttattcaactttaacacttgcttatct

SEQ ID NO: 61405 - DNA, 1132 bp, Oryza sativa
  Clone ID: PAT_MRT4530_62842C.1
gtgcttgtgtttttttttgtttccttttggattctgcaggtcgccggtggagatgagcagcgtctgcttggagacgctgatgcccatgcacagcgccacggcgtcggcgctcatgacgtcgctcctcgctgcccctgcgtgcaggagctttggctggctctccgaaggtaataatttctccctgatctcaatcccgttaactgcttttccaatggcggtacattggctttgagttatggagcgcatttgtttgttgctggactgtagagtggaatagattaggtgcggttctaatcagaagcactgcagacaatttatctcctagaaatcatatccttttagaggctcaaaatgcagcagcaaattgactgatcatctcacatcacatttgttcttacaaccacaactgctgcagcacctaataggctaatacccatccgtacatagaaatgctcgataggaggacatgaagcagttcagaccaactgctacaacctaacctcagaatctccttcatctttcactttcttgagccaactcaaaaggtagaatttgaccaaataggcttggaacacataacttctgaataacaacgaaaccaacacgatctcacccttcaacattgacaagttcatactccacaagtgagagattgttatcctcctttacgttgaaacttgccggttcagtcacttcaatgcggccccatttgtccacagcaagcctcattgatcctttgaacatatcaatttttgcattgcggataataacagtgctgtcagccttcatcaggtcaacctgctcgttgcgggcggtgaacaggatgcagccggtctcgtcgccgatgaggcactcggcgatcctcgtgggacgcgccgccgggcccgctcccgcggcggcgcggcccttctggaccacggtcttggagctgagcaccttggcgacgagcgtgtggccgcccgtgccgggcttgagctggtccaccttgacgaacaccggcttcctcttcgccgccgccgccgccgccgccatgggtacggaaaaaagaacactggagagtagtaatggatagagataggaataggattacacggagggccaaaccctagatgaggcggggagagaatttaat

SEQ ID NO: 61406 - DNA, 204 bp, Oryza sativa
  Clone ID: PAT_MRT4530_62843C.1
atggaggacggggagacagacattcggtacaagacagcggcgacggtggtcatgacggcgacggtggtcgtggcaacgtcgatcgtaggcggtcacggcaaggcgtggcgcggcggtgatgccaatgggctgggcgcccccaatcatagtgcggtcaaggtccccgttgtgctgttgggcccaatggggaagagatctatctaa

SEQ ID NO: 61407 - DNA, 309 bp, Oryza sativa
  Clone ID: PAT_MRT4530_62844C.1
atgcagagcgcggcgctgcgcacggtggccactgtgcccccgattcatttggactcatacgcaagctgcctcgccggcgacgcgacagggcgggccaccgtggtgctccgggccttaatctctggagctccgggcccactgtttaagagcaagtttaacagaaaaaattacaagattataaccccgaagggtcgtaaccaggaaaaagaaaaaaaataccaccacccacacaccgacatcaccaacacacaagcccagaagaaggctagcaccgaccgaccaccgctaagcgtgagcggccgccactag

SEQ ID NO: 61408 - DNA, 1533 bp, Oryza sativa
  Clone ID: PAT_MRT4530_62845C.1
atggcgcttctcctgctcctcgtatcatcatcttgcctcgtcgtggcagccagtatcgccgtgctgtgctacgtcaacaatgacgccgacgagcggcttccacctgggccgcgagtgaggctgccgctcattggcaacctcttcctccacgctccgaccatggcgttcctcccgtcggcgctccgccggctacggcgctcgcatggcccggtcgtcacgctctgggccggcaaccgcccggccgtcttcgtcattggccgtgatttcgcgcaccgcaccctggtcctcgcgggcgccgccctcgcgcaccgcccgccgtcgccattcgcctcctcccgcgcgctgagcttcaaccggcacggcgtgaacgccgcggagtacggcgatcgctggcgccgcctccgcagcaacatctgctcatgccttgctgccaccgaggcgctgcggcgtcggtcggtggacaggcttgtagcgacactggagttggaggcgcgcgccggagccggcgccaccggcgttgtcgcgccgaccgatgcgttccggcacggggtcttctccttcttcgccgtgctctgcttcggcgagtgggtgcgcgacggcgagcacgacgctgtgctccgtgatctccgacgtgcccacgccgacatactcgctctcaccgtcgagctcggcgcgttccacctcgtgcccgcggtgctgatggtgccgtacttgcaccggtggtggaagctctccggcctccagaggagtcaccgtgacattgtcgcggctctcatctccgttcgccggctccggcgggagaaagccgacggagatgttgctgactcagctaccttttgctacgtggacacgctcctggagctcgagctcggcgaggacgagatggtgagcctgtgctgggagttcatgaacgccgccgcgaagacgacgtcgacggcgctggagtggaccatggcgcgcctggtgcaccacagcgacatccagcggaagctccgccacgacatcgccaagaccaccaacagcggcggcgtgggcgtctcgccatcgccgtacttgaaggcggtggtgcaggaatcccttcgcctccacccgccggcgcactacctgctggcgcacacggtggaccgcgacgtcccgctcggcgccggtggctacgtgatccccaagggagccattgtcaactacgcggtagcggagatcggccgtgacgcaacggcgtggacggacccggacgagttcgtgccggagcggttcatggaaggcggggagggcgccatggtggacgccgtctcctgcggtggcgcggagatcaggatgatgccgttcggggcaggccggagggcgtgccccggcgcaagcttcgccgtctctgtcctgcacttgttcgtcggcaggttggtcgaacagttcgagtggtggccggtggccgaggacgagaaggccgccgccgtcgacttttcagagaagaccgggctcgtcactgttatgaagacaccgctgcgggctctccttgtcccgattacttcgtcttag

SEQ ID NO: 61409 - DNA, 443 bp, Oryza sativa
  Clone ID: PAT_MRT4530_62846C.1
tgatttcctccccctcccccacgcgacgcgatctcctccccttccgaagattggggaaacgcaagcctgccaagtgtggaggcatccatccgcctgacgttcagccgtcggcgcggacgccgctgatcccgagtcgacaccaaccaggccactggctgatctacttccaagctcatgcgcgtgacagatatcttcctctccggaaattgatttgggacgaaattgatggattactaatggttgttgcaacagggtaatttgccctcaatctgaggtgcattgcgtgttgttcagtccaaattcgaaaccagataatttcttgatttttcaaatgcaccttctgctgtaacacagtaaaaaatgctggaatgtgattgcccattacatgtacatatgtgtcccccataaagatgcaccttggtatttaataaaaaaaaaaaaaa

SEQ ID NO: 61410 - DNA, 300 bp, Oryza sativa
  Clone ID: PAT_MRT4530_62847C.1
atgacggttatggtagttggaaaggtcagtaataccctccaaccaccatagggagtgaatctccaccgttccctcaaaaccctgcatccatcggcttcacgggaggttcggacgaacaaccaggttcggccgaacttggggctggcctaacctgcccacattttggctggtggccctctctgctgcttcacttcgtagacatgtgaattttggcctgattcatcgtgtcaagtctgcgttcttggccattcatacacaagtctggttctcgacatcatccgattgatctatcgtctgagt

SEQ ID NO: 61411 - DNA, 650 bp, Oryza sativa
  Clone ID: PAT_MRT4530_62848C.1
gcccactgctcttccagctctgccgacaaccacacctacaagagctacagctgaagcatcacatagggcagaggaggcatcacagtccgctcttgacggctctgaaggacaccaaggtcccaagccttaggttctgtaaatgatcctgactagggtgaccagtaaaagcgaggattgtggtttggaattatgaagagcgcatgacgatttgcaggtgattgtgagcatatcacgcgcacctagcaaagtgcttgtgtagaggagaaagggaagctagcaaaatttgtgggtgaagaaactaacagattgaagtccagtcccttgttcatgaatagattgatgttttgatgatatgaccaatctgctgctaaaaatgtgctacaggtagagagggagtgaaggggaatgacagctcgctgcaggtaaagaacagttggagtggtatggcaagtgcgagtcaggcaaatggattcttttgccattcaaccttgtctttatctggctcacgtcttagctgtgctcttacccattatccaaacttgttgtgttcatctgtttatctcattaggttgcttttaatgtcaaatcgatagaactccctgttagtacttctgcccttcacaggagtaaaaaactagtttttagccctg

SEQ ID NO: 61412 - DNA, 849 bp, Oryza sativa
  Clone ID: PAT_MRT4530_62849C.1
ggggaccacggacgccgcgggtagtgaccgtcattggttctgccccggattcggcacaccttgagctcatccgacaagggaccgccggtgcgccctggacggggatgcacggcgccggtggcttggatggtgttgctatggcgtctgaaggggatggagaggaggtggtgatagggaggagaaggatgcagtggcgccgggggcgataagaagaggcggacggatgagcgacgatatggaacgatgctctggacacgtggcgctattttactatatgtaatcttgctctcagattgagccacgtggctcaatcaggccccacggtaccgactacgttatattatacccacaaattgtgctgaaatttagtggagcttttggtgtagaaaaggcaactggtggaggacgagaggcagggagtgattccattgaatgcttgaaacatttgttttggttttctgttttcagatttcttggaagcaaatttaaccatagcatgacaaatccctagcccttcaatgaaaatatagatgctttaacagtttaaagtgtagctataccttttcatcgtatttgatatgcaaagtaggtcaacaagtgcagaaccctatggtcatccagaaaaccacgatggtgtggctttgaatgaatgtggattatctgcagtgctcagtgctctttcatatgggttaattgtcattaggaacttttgttgtaattatgtcaaaaaaaaagattgtgctgtaactataactactagcaactgtggtagtttaggtgtctgataacttttgctacaaatactatccatgaacacatgattttcactaaaaaaaaaaaaaaaaaaaa

SEQ ID NO: 61413 - DNA, 471 bp, Oryza sativa
  Clone ID: PAT_MRT4530_6284C.1
atgacggccgtgcgacaacgcctcactcccgcagtccgggagaaaggcagcgtggtggagggcggtcgcacgtggttccgaggtgatcgagcggcaccgttgcgcaggaccaagccattcgcgcggcgccgttgcacgggaccgagccggtcgtacggcgtgggaccgagccggtcgtgcagcaccatcgcgtgggaccgcgccggttgcacgcggtactgccctccaccacgctaccgctctctcgggatgtgggagcgaggtggtaccacacggccgtcctgcgcgaccgccggcgggcgattcaataggaagacgtgtggtcgcacgctcaggttgattgaagctggaggtcaatgtgggtggatccttgaggttgctttaggaggtgttgacaagatggtgcgtgttggattgctacataggcagtgtatggatgacaagcatacaaattgggccgagaacgtttag

SEQ ID NO: 61414 - DNA, 401 bp, Oryza sativa
  Clone ID: PAT_MRT4530_62850C.1
caaagaaagcaacgacccatgaaaacagggagggacacgttcatgaatggacaattttgggaggaaggagtatcacacaacaggcaaatctgaaacttgttatagggccttgcaaaagtagaactacaatataggctcaaattggtatttaattctggggcttttaggtcatatatatatatatatcagggaaaggttgggttcatcgaagggaaagaaacctaaaatcaactggctgaaatttcgagggggggacaaatgcttaaaaagggggggggaagaaggttgcaaacaaacaccaagttttttttattccggttaccaaaaactttgccgggggggggacggcttttttatacaagggacggagcacaacctttatatatacaagttataagggg

SEQ ID NO: 61415 - DNA, 227 bp, Oryza sativa
  Clone ID: PAT_MRT4530_62851C.1
gcgaaaccccacctttttttactgactacagcagggatggtgcaacatgagaggggggacaacacaggggaagatgtttcagggatggaccgatcctgaacagggcgagggggggggcaacaaggcggggggggcaaaaaacaaaaaagggtagaatcgggtggaaaaaaacacacccaaaccgtggccccctaatctaggggggaagggaagcttacaaaaagggg

SEQ ID NO: 61416 - DNA, 1315 bp, Oryza sativa
  unsure (1)..(1315): unsure at all n locations
  Clone ID: PAT_MRT4530_62852C.1
gggangcgggngaancgtgtggnccgccacgcgtccacccacgcccaagccctaggctcctcctctcctcccaatccccaatccctgttcggcttctccttcctcccctccgcggccgatcgcgatggaaccctgagctacgtggttggtgcttcaccgctggagtagagttctactatagtagggtttgggggcggcggtctcggaggagggaggaagcctttggccatggcgagcgacgtgcccatgagcccggagctcgagcagatcgacggcgaggtccaggacatcttccgcgccctccaaaatggatttcaaaagatggacaagattaaagattcaagtaggcaagctaaacagctggaggatctcacagcaaaaatgaaggagtgcaagcgtttgatcaaagagtttgatcgtatattgaaagatgaggagtcaaacaaccctcctgaggtccacaagcagctaaatgacagaaagcaatatatgatcaaagagttgaattcctatgtcaccttgaggaagacatatcaaagtagcctaggtaataataataagagggttgagctctttgatatgggcgctggaagtagtgaacctgctgccgaggacaacatccaaatagcatcagctatgacaaaccaacaactgatggatgctggaagagaacaaatgactcagactgatcaagctattgaccgttcaaaaatggttgtggcacaaactattgaaactggaacacaaactgcttcagcgctatcacagcaaacagaacaaatgaagagaattggcaatgagctggatactgttcacttttcgttaaagaaggctagccagctggtgaaagagattggccgtcaggttgcaactgacaaatgcattatggcattgctttttctgattgtttgtggtgtgattgcaattattgttgttaagattgtcaacccacataacaagaacatccgcgacatcccaggacttgctccgcctgctcaaaatttccagattagtaacaggagactgctgtcggtagaaattatcagaggtctatgatgactgtgcttgcaagttccatgcaggcggagttcagttcgtttcttcagagtagcttaattgcggtcataagatactacgacatgctgtaaaattcttagtgcctgtatattttattccctggtgtattagatatgaagtcagtagattcccgcgtctgatgcttgtatactccccggccttttggttgtgtgcataaatgcattatagagatgagatcttttaccagtcaaaaaaaaaaaaaaaaaaagttctagct

SEQ ID NO: 61417 - DNA, 429 bp, Oryza sativa
  Clone ID: PAT_MRT4530_62853C.1
attaactaaacaaacaactataaaggcagttatagtgaaagttgcaggccgactcgcgggaaaagaaattgcacatgccaagtgcatcaaaaaaggcatactacccctccaaccaattctcgctacaattgattctagctgctatccaatttgaactatatatcgagcattatgagtaaaaatatgaatatacattgacaaagaataaccaaccctgtctccccattctgttcactattctaataaaaaatgacatgagccttattttgcctaaaatccctgaaaaaaagactaaatactacctctttctataccatttaatgaaaaatgaaaaatcttttaataaaattgctatgctaagtgcgagacttcgtaggtgactcgtagggttcaaaaaggggttcaaaaaagaattaaagaaccctacta

SEQ ID NO: 61418 - DNA, 165 bp, Oryza sativa
  Clone ID: PAT_MRT4530_62854C.1
atggaggtttgcatcgacggtgcactaggggcgaaggcgactggtagacttccactagtcaaatctggccgtttcaagagactatggcaggatgcagagaagcaggatgtgccgaggccccatggtttacatatatatgaagatgttgaagtttggattgattga

SEQ ID NO: 61419 - DNA, 733 bp, Oryza sativa
  unsure (1)..(733): unsure at all n locations
  Clone ID: PAT_MRT4530_62855C.1
atcgacacagagaactcacgagacgagagaggaggggagggagaagcaaggaaggagcagagaggagagggtgggcggggcagcaatggcggagagggacgtagcacgccgccggctcgcgtcctcgcgccccatctgcgttccgtggagggagctcctacacggctgcctcccgtggctgtggttgcggaaggagaccggctgcgcggcctgcatcatctgccgcgaggggatgaagggccgcgaggaggccgtcaccatgtcctgctgcgggaagacgtgccaccaacgctgcttcgaggcttggagagcggagacaacaacgagatttcaagtctgcccgtgcccgggctgctacgacctggaccccctgtcgccgccgccgccgccgccgatgtgatcttcgggtttagggttcttaggattctaacgctttcttctccactctgatgcgtcatgtgattgtgtctggcctggatgtctggttcttcaatagtttcctctgctggtagttttcttgtcgccgctactcgccacatgattattggggcgcttcttaggattttatgttagagttcttaggatttctgatttctgttagagttccttctgaattctgaattcttttcggccagaattgttgcccttgttgcttcccatgtaacaaactgaagtctgaatatttggatatggaatatgaaagattgaagatttggggagaaaaaacaaaaan

SEQ ID NO: 61420 - DNA, 2205 bp, Oryza sativa
  Clone ID: PAT_MRT4530_62856C.1
atggccggggacgccaccacctgcgtgtccaggtggcccgacctcccggccgacccggtccgcgagacctcgggccgcttccgcgaagccgcagactacgtccacttccacgccgtctgcaagccctagcgcgacgccgtggtgtcgccgccgccctggttcttcccgtggctagtgaggtgcttggacgagaccatcccgccgcagcgaggaccctgctgggccgacgagcacaagctgctgttccgctccgtctccggccacaagcaggtcaccttacgcgtctcccgcgccagctgcctcggggagaagttggccgtgcgcgacacagacggcccaggcgggcgcgtcctcgctgtcggcagcggcggggccagccgcgtgaacccgctcaccggagccgccacccacctgccccggtgcttcccggaaaatatggccggctatcttggcagcgtggacggtgtggtcaccggcgacggcacggtgctcctctactacctgagcatgagcagttgtacattctaccgcgcggccatcctgcgggcgggcgacgacgcatggacctctgtgcacacgtgcatagactccgagacgatgtcgttctggcagcagtggagcgccacgtaccacgacggcaaggtgatcaacgcgggcaggcaattctacagggtgggcatgctcagcatagccccaggcgatgtgttcaccgggagactcgagaagaggtcgctgccgcagctgtacgacgaacctgcctcgtacagctacttcttcgagctcggcggcgagctgatgtgggcgtacgtccatgtcgcggcggcggcgttgttggatcacggccactaccctctcaagggaggcgacctggtgggaagcggcgcggtgagcttgtgggtgtactcgagggagaagaagagcgggcggtgggtgaagagggaggggcggaggttgctgggcagcagcgttctgttcctggggtggacgagcagcttcgccgtggaggcggggcagctggccggcgaggtggacggcgggtgcgcctacttgatgatagacagcgtggggcgcgggctaggacgacgagggttcctgctcctggacaggtctctccgtgggatgccacgattgtggttctcccggagacggccaagggcacgcacggagacggcagtttccgagcgctccttcccatcgacgccgcgcgtgctgtggtggacgctgccctccctggcggccgtggaggcacgttgccgggagtgcggcgccggcgctggcgtgtgctctttctgcgccggcgtcaagatctggacgctgccctggaaagggcacatctcaaccactgaggaagcatcagtaatggagatctccaaggacatggctgactgcatgggcatcaagcccaaaacctcggttcgcatcacattactcgacgacctccctcacatcaccaaggctatcatcacgccgatggacgatgatgctgatctctctgcttcacttaccccgcaccacatcgccacccagactcctaccttctatctccaccgctgcgcctccatcctcatcacgcatcttcttgccatcccgtcgctcccaatctccaccgagatcggtgtgatgtatccagggatgtcattccctttgttagtgaacaaagaaaagatagggatcttcaaggttctaggaactctgcctatgactacaggacaaattacctcagggaccaagatcatgatttggaaaggtagtgatgagaaaactgttggagagaccctgtacccaccaatcttacatccagtcattgcaactcctctgcaaatgaaaatggtggatgaccccgctctttctaatgtggttggcagagccagtaagatgattggtaatttcatgagttactatactcacctcccacatgaggccacaaagggcaaaatgacatttctcttacatggtccatgtgataaaaaagctgtggttgaagggataggaaggacccttggtcttcctgttgcgagcgtggatgcttcgtcactcatcaaggacttcccttctgactctgtctcacagatcaacacctgcatacagagacctgaatcacgtgatggtccacttctgatcttccttgaccggtttgatgagttggtccctcacaacagatgtggttcaacagttatgactgacataacaaccacccagttgtaa

SEQ ID NO: 61421 - DNA, 345 bp, Oryza sativa
  Clone ID: PAT_MRT4530_62857C.1
aaacgactaaatgaaattcccaattttacttaaaaaccaggggggtataaaaaaaaacagacttgttggggaaacaaaaataaacggggcatagggggggggggattttttcccccaccgggggcggggcaaaattgaaaaaaaaaggcccagggaaattactacggaaacccacggataactccctccaaacgaaaatataagacatttttttatggaagggggggggattttcaatttatttggggggggctggaacaggcaaaacagaatggatagaggggacaaattgggggagaccacaggggaaaacgggggggggaaaaaaataaggggggagggggg

SEQ ID NO: 61422 - DNA, 1568 bp, Oryza sativa
  Clone ID: PAT_MRT4530_62858C.1
atggcggggtcctccggcggcgccacctcctcctcctcccgcaacagcgtcgaacgattctacctgcctccccattcccgccgccagcagcagcagcggctgcggagccccacgtccccttcactgtccccgtcgccgtccccgcggtcggggaggcacaaggcggccgccgcggcgccaccggcggtggtggctgcggcggcggtgggcgcgggtgtgctgacggacggggatagcagggtggattcggacgactcctcgtcgacgtcgtccaagccttccgtggcatccacagcgactgccacgaccaccgcggctgacgtgaatgtgacggcggtggaggagagtgggaatttggagaggtttctcacctccaccactccctccgtgcccttccaatacctgcccaagacaagcttgaaaatgtggaggactggtgattgtacaaatacatcaccatatttctgccttgaagatctttgggaatctttcagggagtggagtgcttatggagctggcgttcccctgttgctaaatggcagtgactctgtaacacagtattacgtgccatatctgtctgctatccagttgtatgcagatccatcaagatctgtttcaagaaccaggcgccttggggatgaaagtgatggggaatacctggatgctagcagcgagagtagcagtgaaactgatgttgaccgattaagagtctcatccgtggaagctacacatgggatggcaaatggtagtttgcgaactgatgatgctgatggttatgcatctgcaagttctccaatctttcagtatatggagagggatcccccgttttgtagagaacctctgacagacaaggtatcaattcttgctagtagatttccagctctgaaggcattcaaaagctgtgatctgctgccatccagttggatgtctgttgcatggtaccccatatatagaattccaacagggccgacgttggaagaccttgatgcctgtttcttgacattccattgcctagcaacaccttctaaggatagcgatagcactacaccagcatgccctggttttggtggcatcagcccttgcgcaaatgcaactggcaagctatctttgcctgcctttggactggcatcttacaaacttcgcagctccatttgggcatccgatgggacccaaggacagcgtgtcacctcgctgatggaggaggctggcaactggctcagctgcgtacaagtagagcatccagatttccgttttttcgtctcccgttccggtacgtggagatgactgtaaatgtttgttagtgaaacattgccgtctgaattttcagctgccttgagcacatctgcctatggcacatagagtatgatgatatgatgatgaatgccctcttgtacgggggttgtatcagcctacatgctaacttttttcctgtctccaataagttgtctggtgtagcggtgtaggtaaccctttgtgggagagtaaagatggaaaggaaaattggagacttgtagaacttaagagggggaaaaaaagagaaagagcaaaaaaaaaaagatttttttgtt

SEQ ID NO: 61423 - DNA, 581 bp, Oryza sativa
  Clone ID: PAT_MRT4530_62859C.1
gagagctcataatggccgcttgtgaccatcattggctgaaacctcaaatcaccgtgacttctattctgtaaaagtacaactgataaagatagttttgtaatctcagacgattaataaaagcttcctttataaaaaaaaagtactttggctctcctcttgacttctattttgtaaaagaaaaatgacactcattttttccgccctacttcaattgatatggtagagctcctgcctttatcccacatcaagataatccctccatttcatattataagttttgatttttttcctagtcgaacttctttaagttcaattaaatttatagaaaaatatagtaacatgtttacataaaacaaacatattatcaaaatatatttaatattatatttaatgaaactgatttggtgttgtagatgttgataaatttttctagaaacttggtcaaatataaataaatttgactaggaaaaaaagacaaaatgacttataatatgaaaaggagggagtatttccaagccagattcttagatacctcacattaacattgcgaatcctctggatttttatacgaatttcaatca

SEQ ID NO: 61424 - DNA, 2460 bp, Oryza sativa
  Clone ID: PAT_MRT4530_6285C.1
ccggccggggctcttccattccacctcgcatttactcatcccttctctccctcgctcgctcgcctcctcgccttcttctccatctccatctcgcatcttctctttctctttctctttctctttatctctctctgttgctgctgatcaagaagcttggagagagggagggagagatggatcggtgcataggcatatgactggaggcctatggtaagtgtggaggagaggagagaaagggagatggagattttctgagatcttttgggcatataaccttttggatggtggatatggagaagaagagggagaagctggtggctgggctcacaagaagacacatgataaggagtggctcctcctcttcctcctctcctactgctgctgctgctgctgctgacaacaacaaaaatatgagtgaaggtggagatctaaacctgatatctaggcagaagaaaggaaaggcaaaggttttgaagtggagattaagcaacactgacatggacatgaaaggggaggaaggaggttctgatggagactacgatgatacagtgctctcctcactgaccacagctagcttcagcagtctgattagtaggaagagagtgaagagccttgggaaggtggctgaggattgtgatgctattgatccaccggttcctagaaaattaagatcagccataaataaacgtgccagtcaaactgtttctacatcaccgcggcatgtcaagaagaggcgccatctttcagctatcagctctcagactttccttatggatcgagaaacaagatgtaatgcaattccgcagttggcgaatcatttttcgaaggaggaggaggtagttgtggatgctttgctatctttatctcaaataccccatctttgtgaactgtcgtccgacagaggaatggcagaagataacttagatttaaatgttacttcagtgtcttattcagcaggagcaacaaaggtggatgagaaaatatcggcattgccaactgccggtacggaagtagctaaccaacctgcccttgatgaaccagtggaacgaactggcaatgtttcacaaataaatcatgtgccttgtggtggtacctgcaacaacacaaatccaactttgtcaaatgatgggcaaatacatgatatttctttgggaattgtaacgaatttaccgagccaatctaaagactacaataacagtcggaagcaactgaaagtgcagtttgataatagtacaattcatcccacaaagatagaagcccctcggtgcctggaaaattctaagaagcctgatattctggaacatgacaggaaaaatgtcaagaataacactgcccaagaaattgtgccaccggtccagacttcaaaaccttgtgcctcgcataggccatcttcaaacacactggcgtcgtgtaataatactgccgcagaaactgtgaaaggaactggagaacatgagaatctttccctcgttaataaaaatggtaccccctcgaagacatggaagagaagcattacccatgtctacatgtgtcatctcatccaaatgcatttggacaaagagaaggcatcacaaaaccgggtaaaacctgaggaagtttgtcacagtcacatttcaaggtctccagacggttctaccataagtaagaatggtgcacaagacgagaagttctacgccttgcatttcgatgtaaggctacctgttcagccatcttgcagtgtttgcgacacgaccattgcccgacaaaagatggtcagtggtaattttctgaacttgcccacttctgcggcgttatcaggggtgcagcatgttcagtatttacatcccccgatcgctccccgcggtgcaatgccatatccaattcagcatctcccttacaccagggggaatttgacgcacactgcactactacttcaacagcagatgccacagtacatgtgcaatccaaacccagccattatgaagattcagcagcagctcatgcccaatcagcatcagcatcagcagcagcagcagatgtggcagtttcaattccctcaataccatcatccaaggccagacgccgccgccgccgccgtgtcggcggcgtggcagcacagcagccggctccacgacgtctcttccctgcgtccggtggccgtgctgcctgcgccgccgccgccaccgccgccgcagatggagctcttctgctcgccgtaccatggcggcagcagacagccgccgcagctgaggttgatctagcttattagcatagcaaaactgtcactgctgctgtttctgtgtgttcatctgacaaaaaggaattttcagacaagttgacatgacatttgacagtcacagatgccaatgggtggcaaaaagctgtaattaatttgagatgttttatgttgctcgatcgaaaggtactcgagtgtagtgaagtactttttttataaaaaaaaaaaaaaaaaaaaaagggcgg

SEQ ID NO: 61425 - DNA, 338 bp, Oryza sativa
  Clone ID: PAT_MRT4530_62860C.1
gctatagatcgcgagcggccgcccataagatgaaaaaaaacatatacacttctagcgattgtctgattgatcatggggggctatcaaggtcgaattattcgcgacctccctcatggctgtcattgaggccatctccggcgcgcaactgagcgagtccgatatgaggttcacagacatgcagtcccagcgtgaggtgcaagacagtcttctgtacgcgtgccaacaggagctcaaccggcagctcaccacacgggagaggttgcaaacaatgttgcgtctcccagactcactcgctctgcggatacaccgctttcagcagctgcaggacttgagccgag

SEQ ID NO: 61426 - DNA, 318 bp, Oryza sativa
  Clone ID: PAT_MRT4530_62861C.1
atggactactcgacggtgaagcaggaggaggtggaggtggtggtgctggatggagaggaggaggcggcggcggcggcggcgccagtgccgttgccgggcggcgatgggggtgggggcggcggtggcgccgttcctggtgaagacgttcgagatggtggaggacccggcgacggacgcggtggtgtcgtggggcggcgcggcgaggaacagcttcgtggtgtgggatccccactctttctccgccggcctcctcttctccactttaagcactccaacttatccagctttctcctccagcttaacacctatatacgttga

SEQ ID NO: 61427 - DNA, 744 bp, Oryza sativa
  Clone ID: PAT_MRT4530_62862C.1
atggaggacgtcgtcaccgacgcgccgccgccgtcccgcttctccccggacgacctcgacaacttcgccgctccaccgccgcagcccacccctatcctcgtcgtctcccccgccaaccctagccccgccccgcgccgcctcctcatcctcctcatctccccgacctcgctcgcgctcctcccccacctcccctcgccgcctccgctgcacgcctccctcctcctccccgagctccccctggggcgctcccagccacccatccgcgtgtatctccatgccccctcgggcaccctcctcgccgccgcacacggccccgcccccgtccccgcccaccgcgcgcgcgccgtcgccaggagcctcgtgtccgccctccagcccgaggaggtgctggtgctcgacgcggtccggagcggggcctacaggggcaggctcgccgcggacgagcccgtggaggggaagctggagaccagggcggcgcgggggcggggaggcgtcggcgcggcccgcggcgtggcggcgctggccccgcccgggagcgtggtggacgggctcggcgccgcggtgttggcggagtgcgagatgcgcgggaaggcggcgagcatggtggtgacgtggccggagggcgcgaggccggcggagttcggcgtcatgcggcgcgtggcggcggagctcggcgtcgacccggccaaggcggcggccgggagggtcgccggccgggccgagctggacgcgctgtacacttga

SEQ ID NO: 61428 - DNA, 364 bp, Oryza sativa
  Clone ID: PAT_MRT4530_62863C.1
gattctaccgaggcatttttatttaatttgttcaaaaccacttttttaccgactaccacttttgcatgggtaaaattaaccaggcaccacggggggaaagaacagaatttctaaaagggacacaaacaggccgaaacatcaacggatttccccctcactctaactacaataaatctcaccgactttcaaaacctaggcaaaatcttggcgtaaggagctgtcaaacatggtagccgaaagggcccaactcctccatgtctacacccacaagcatccatgccctctgcgactaaattggatagagctcaaccttgacaaggcccggatggagccgacaatgccttccccttagccagaccggggg

SEQ ID NO: 61429 - DNA, 367 bp, Oryza sativa
  unsure (1)..(367): unsure at all n locations
  Clone ID: PAT_MRT4530_62864C.1
gcctcccctccacgtagatccaatcccgccgccaccgccgaaccctagcccgccccacctccctccccgccgccgccggaggcgcgcgcgcgcgcgatcggcgtcctcccgccgccgcgttcgtgcggggtggggttgggaggaggaggaaganaaccgatgcaacactaatattgtctacaggtacaaccgtgttatcttatggttcaaaggtgctcacaggcggggaggatgcttattctatatgttgtgacgggagagggggggcagcaggttgagctggacattgggcatttgaaggaatcaatgcatgcttgcttgcgagagaattaatggatagggtgaagatatgttgtgtggtgagtta

SEQ ID NO: 61430 - DNA, 225 bp, Oryza sativa
  Clone ID: PAT_MRT4530_62865C.1
atgaggaggaggatgatgaacaataagatatgcaatgcaccaccagactacaaaagcgcaataaatggcagcacgctggacgctttgctctacgatgctacgccagctaacgcagagatatgcaagatcatcaaatcatttctggacaaagacatgggcagaggatttatcacatgtggcatcaaagtcccgaggagaaagatgaggggacctcaccacacataa

SEQ ID NO: 61431 - DNA, 225 bp, Oryza sativa
  Clone ID: PAT_MRT4530_62866C.1
cttttgcagttttgttttgctgcaaattcggattcgtttttgttttggaaacgttctgaaaaatccggtgcgtgcaaacggcgtggagtccggataagttacgcgcgacttatccgattcgattacgcgcagtggagatcgtgcgggcgccctgatcaagcgacccttctctatataaaccaacccgccgtcttcacgcaatatacgcgaaatcaatctagggtt

SEQ ID NO: 61432 - DNA, 672 bp, Oryza sativa
  Clone ID: PAT_MRT4530_62867C.1
atggcgatgactctgaggccgacatgcaatgctcctcatccgggactgccagatccaatgtgggtagctaggggccaccggatgcccctgcttggtggaaggcaccctgcctattgggtcttcgacgaagaggtggagatgttgatgacctcaaagtggacagtcccctggctagacgttgatgacctcaaagtggacagtcaagttgcatatttccttatttgctcccattcactcaacaatatgcatgtcgaaggcctacaagtcagtgagacattatggacaagtaaggaacccactttgaacacaaacctccctaacacttctagtatcaatgttttctcgcattacacactttctgagaaaagatctcacaatgctcatcagccagtctctactgcacccgccggcagcctccctgccaccgctcctcccgcaccacttgtggcaccgatcattaccgttaatatggaagctttagctatgctgccacacatttcgataaagaaacaattgaaagctagaacaacaatctttgtgaaatggagggagtaccttgtgctcatcaaagaaaaaagggttagacaagccatagatttagtgaccaacaaaggtgatatcattaatttttcatctaggagagaaccattcgaggatgttactagcgcatag

SEQ ID NO: 61433 - DNA, 2456 bp, Oryza sativa
  unsure (1)..(2456): unsure at all n locations
  Clone ID: PAT_MRT4530_62868C.1
ctcgtactctcgcttccgcttcgccctgttccgactaggcggtgtcagaaactccggcggcgagaccgacgagatcccgccggcggcggcggcggcggcgctcgctccacgccgcaccacacgcggggccttcggtgngcgcccccgccccctcgcgcggatggcggcggcgcagctgctgctgggcgaggacgggagggggtacgacctcgcgcggcggctggaggcgtgcggcgcgtggcgggcgtggctcggggacgccgcccatgccgcgctcgcgcagcacctccagaccccctccacctgggacgccttcctcttcccctcctccggcggcggctccgcggccccaccccctcgcccgctcctgctcctccagctccgcgtccgcgcgctcctcttcgacaaggcctccgccgcgctcctcccccgtgccccccccccggcgggcctcaactctgtcaacgccaactatcttcagctccatgcagatgatatttatttttcattggaagatgagcaggaagatatcaatcaacaccatatgcaatctagaacctcatttagtccaagcagggagaacactatgttatctcaaagacataatcgatacgaagagttacctgacacatggtacaaacaatatgctgaaaaattcaggacatggcatggcaagttccgttcaggtgacaaagatataccaaaaagaacatcagagggaatgtccaattacctgaaggtttgcagtgtgcataaaaggaagagggctgtgtttatggatgatcagggtcacaacatctcagtcccaatgtcggaaaatggcccttcctcaaagaatgctggggactatagtaatttaacagatgatactttcattccagaaattaggtttccagctgactgtgtcccggaaagcgcaattcctagaacaagtgagacgtctaggatctacaaaatagaagttcatggggttcttgataatttaccggcgcctgttagtcgcaacactgcaatgcttgaaagatttggaatgatgcctgagtattataagaaagggaacaaatatcgagggaaagatggatccagagtagaaggaaaatctctaagccaagaacaagcaatgcttatgacaaggaagttggttgctcgctacttggcaaatgcaggatttgaaagtggaactgcagtgtgtattgatgttctttcagaaataataattaagcacatctctaagctggggcgtaacttgaagcttctaactgacagctacaggaagcaattttcatccattgaactccttaagatgttcctacagactgttggctacagtaacattggccccttgatggaaatcactaaaacgacaaatagaggggccaactaccctatgcagcaagatgcacaagtgcaaaatcaaaatgctcttcttcatgcacaacagctttcgaggcaatttgcaccccaaatgggaattaatacacagaatttgacaccacagcagcagcagcaactgctgcagcaacagtggttgaggcgcaatcaactggccagcccccgtggtcctcttacgatggcggacaaaaaccaggctatggtaaatgtgaagattgagaatacggtggactcacagattgatagcccctacggatcacttaccagacaacaattgcagcagctaaggcaccatcagcttctacagcagcagcagcagcagtttcagcagcaacagcaagttcaacagcagcagcaacaacaacaacaacaatttcaacaccagcagcaacaacagcagcagcaatttcaacaacagcatcagcagcagcaacaatcacagcaattgcaacaacagcatcagcagcagcaacaaccacaacaattgcagcagcagcatcagcagcaattggccatgtcaggaggccagaatgcccaactagcgcagcagctagcaatgtcaggaggccagaatgcacaactagcgcagcaattagccatgtcaggaggccagaatgcgcaactagctcagcaattagccatgtcaggaggccagaacccccaattagcacagcaatacaaacaaatgccatcgatgagtgcgtacggcatgaggatgccgccggtgaaagtggaagcgttccacgagctggtgagtggagattcgtctctgaaacccgatagcgactcaaacaaactcatgtctcccaagtaggtcagtcttacaccgagggaaaatcgcgtagccagcggttagctgtagtgtacaaaggactacatttgtgatctctcactgttgtttccgaagaactgaagcctttgtagttttcatcaaatccagcaaggcaagcagtgtattgtaattgtagatgtataagtggttactaactgaggtgataagatcgatgtggtaatttatcagaaacttgagattccttcaaaaaaaaaaaaaataaaaaaaaaaa

SEQ ID NO: 61434 - DNA, 209 bp, Oryza sativa
  Clone ID: PAT_MRT4530_62869C.1
atgcggctacggcttgcagcagtaggagcacttgcacccttgctgagggaagcactggccttcgcctacgcccttgtacgccgcggcgcagtccgcgtatcacttggacggctcgcacgcgcccctgtagatgaacgcggtgcaggtgtactccggcgtgcacttggccagctggccgcgaatcctacacaaacattgcagatcacaag

SEQ ID NO: 61435 - DNA, 162 bp, Oryza sativa
  unsure (1)..(162): unsure at all n locations
  Clone ID: PAT_MRT4530_6286C.1
aaagcgggaaatttggggattctactaaagaaactatagtagcctataacagaggttaccagaacatgngaaaagaaaggtcagacaatttccctttcacttggctagttgatatgttctagacagctttcaaatctaaagtacacacatcaaacgatcgcc

SEQ ID NO: 61436 - DNA, 105 bp, Oryza sativa
  Clone ID: PAT_MRT4530_62870C.1
gcgccacacccttccgtccactcgtactctagggtgtcatctaataatatgcactcataatgtacattcatttactatataagcttaaggggtaatctcaggttc

SEQ ID NO: 61437 - DNA, 389 bp, Oryza sativa
  Clone ID: PAT_MRT4530_62871C.1
gtattttttttttttttgaccggcaaacctttaatatcggatgtacaggcagaacacagagactccctcgcttaaaaacagattgcaacactgggtgttcatttaacacacacaaaggggaggggagcgctgtttaacaaaacgccaggggggaacttaatttttttgaaaagggagaatataacacggtctaactcataatgatggccaattggtttataaaccccttccaaccattatcccccaacaatgggtggtcgaactcctttgatatcacgcgtttgctcctgaaggggccgagggctttgatggcccccccccggaggatgtactggggggaaaaccccgataaggcggtgccgacaaacgggcccacccaaaaaatccaa

SEQ ID NO: 61438 - DNA, 293 bp, Oryza sativa
  Clone ID: PAT_MRT4530_62872C.1
gtgcctatcggaagcttgttaggagttaccttcctgttgtgaacaaagatcctggtgctgaacagaagttcatggattttggctacgcctacgaggttttgcctgaggactagaaacgaccaagctatgctaaatccggcgaatctcggtcgaggggagctggatggggaactggagattacagatacccatgtgagaagtgtgtaacagtagtcaaaggatttgccggaatggaagggaacgggaggccgtgttggcataagcactgcatgtcaccggtagactgataagga

SEQ ID NO: 61439 - DNA, 379 bp, Oryza sativa
  Clone ID: PAT_MRT4530_62873C.1
ttttttttttttttttttttttttttttttttttttttttttttttttttttttttttttttttggaaccctgggaaaaataaaatagatttttttattcaattccagagcctacaagtaaaataaacataacattttataatccaaacttggtccccgtaaaagttacccgtaatttagcacattaaggaacaaacaaaatttgaacagggtcatccctgggacgggatgacgggcagggttattagccctgggattttcttaattgaatggggggaggaaactctttttttcaaaagggctttatttccatttgaacaagggtcaagtagtcccttttttttaagaaatgggggtttaaaaaggtaataattgctct

SEQ ID NO: 61440 - DNA, 307 bp, Oryza sativa
  Clone ID: PAT_MRT4530_62874C.1
tcgcctccaccaccaaccccccatggcggaccagctcaccgacgagcagatcgccgagttcaaggaggcgttcagcctcttcgacaaggacggcgacggtaacgcgcgccacccaccactcccccccctctctctctctcttctcctcgtcttcctccccccacgttggggcacgcgcgcggtctctgggcggcgcggccggatcgggcgacgcggagctcgatccgggcgaattgcggtgtcgcggtagggtttcgtgtgtccaggggcgctagatccggttgatcctgtgaacgggttgggtgtg

SEQ ID NO: 61441 - DNA, 237 bp, Oryza sativa
  Clone ID: PAT_MRT4530_62875C.1
cacggcgagctgtgacacactggccaagtgacctgaccaggagaggggaggaggaagaagagtatccgccgcgtccaccgccagctcgtttccggggatgccaggcgagcaacgacaaagcaagtgcaagtggccggtgtccagcccatcacttggcacaatcgatggctagtaatatttagaaaaaaaaaattgtactcagtaataataatgttcagctaacaaaaaaaaaaaaaa

SEQ ID NO: 61442 - DNA, 206 bp, Oryza sativa
  unsure (1)..(206): unsure at all n locations
  Clone ID: PAT_MRT4530_62876C.1
gttaattttctcttcacttttgtcagtttcttcctcattcttcacatcctccttagtttccacgnctttctcacctacttgtaattcttctctnggcttttactccacttgagtagacagaggttcttgtttctctgcttttacagagcaatgatcctgactctgaggngccagcctcttcaccagctcagtatctaagtctttgg

SEQ ID NO: 61443 - DNA, 138 bp, Oryza sativa
  Clone ID: PAT_MRT4530_62877C.1
atggaggcgctcgtcggcaactaccctccgagccttgccaaaggttggcaagctgccgaaatccatctagatctgggtcaagaggagcacccttatgactattactatgatgaccccgattacttagagaatccataa

SEQ ID NO: 61444 - DNA, 646 bp, Oryza sativa
  Clone ID: PAT_MRT4530_62878C.1
tcgccggcgccggccgcccttcccctgtccggcgcggcgcggcgcgagggctgtgccaggagaggccgccccagcacaagtagtaggaggccaaccttgggcttgttcgtacctgccgcatccaccaggccaaccaacccctctcccggtcgcgcggtcgccgggtcgtgccgcgtccacgccggcgcgccgcctcgctgcttcggcccctccacgcgcggcgccggcggcccgctctaaggtgtctcggcgcctccagccgagtagccctccagtccatgcgccagcggcgccgtccggagctccagacgaagcccgacggacgaagttaaaaatcctgggcccatccctgggcgcgtgtcgtggtgcgggcgctgctcagcgtaggctgcgtcaagggcgggcgctgggggcaacgactggcggcaccgcatgccaggcaggcagcaggcagcaagtgagaccatggaacaagaacggaaaggagaagtttccattggcatgtatacttacaatcataattctgacagtgggtttgatgtccatgaaatctatgttaagaggagcagattctgggttctgttgtcatacattggcatggttttccttctcgcaagtgtctgccaactgtatctgtcaaaggaag

SEQ ID NO: 61445 - DNA, 493 bp, Oryza sativa
  Clone ID: PAT_MRT4530_62879C.1
ctctctctctttatacataaaacaaagagaatgtacatgatccatacattcctgcaaaattccaagtttccaacgtactatcccccacattacaactcaacaacagctacggcatccacatcaatgtctcagctgcaaatgtcaatgacagtattattctagctgatgtgcagtgcacggacacagttatgccgccgatatactcgattagtacagctactgatcacacacccccacccaaatcaatcaaagaatctttccgtaaagtggacaaggataaaagagaaagggaagaacaattggtgaaagtgatcaagaaaagaagggaaagtgacaaccaaatcactactaatctttttaactttcttctttcacttcttttaaccgggaaattttcagtttttttagtaacttgttgcctacgatgcatgcatgtcctagtagaaaataatcgcctacctaattaactaactacacttgcagcatttgcaaa

SEQ ID NO: 61446 - DNA, 337 bp, Oryza sativa
  unsure (1)..(337): unsure at all n locations
  Clone ID: PAT_MRT4530_6287C.1
ccttgggctgcaggattcggcncgagttcgtgccganttcngnacgagcncgtgcntgattgtataaatatttatagccggagtcgtcccgtcntcgtctactgcatgagcgccgccccnagcngggtnnccanctcggnngncnccacggngagcggggncgcgctcccgggcccccccccggccatcggcaacggnnccggcgangaagccggcgcgtttaattcctgctccgacgacngcaccaggnncgatgnngccncggccatcacctgcaccgccncncggggagccatcgttancccnacgaagaagaagaagaaaaacgttccacgtt

SEQ ID NO: 61447 - DNA, 303 bp, Oryza sativa
  Clone ID: PAT_MRT4530_62880C.1
cgaatccagcagcagaagcagcagcagcattttaacctccggcgatggggtccacgaggagggggccaaccttccgggttcttggcggcaagaccccctttcttgggcattcccggcccttcaatggccccggtcgggacattggcggcggcggcaccgggcggattaacatgagcaaggggctggggtaccggccggattgggtgaagtacctgggggcattcttggggcaaaccccggcgtacctgaggggggaggttccgggcgaattccggtgggacacgggggggcttttcgcggacc

SEQ ID NO: 61448 - DNA, 1314 bp, Oryza sativa
  Clone ID: PAT_MRT4530_62881C.1
atggggcgccgccgccgccaccgccgccaccaccgccgggacgggaccgatctgctggaggccgagccgttgttggacgactcccacctgatgacggtgcgggatccattgccagcggcgtacattgcagtatgccgtcgggactggtattcccactcctactaccgcctgtacaaggtggaagacgactcttcctcctcctcctcgccgtcgtcgccggtgacaaaacaagtcctccaccgcttcgctcatctaccgacggacgtggcctgcaagaccgtcgtctccgtgcgctcaaggtggatcgtctccgtcgggggaaaccccggcggcaccgtcctcttcgacaccgagacaaggagggtcatcaccgggccgaagctgctgtccgcgaagctgtcgcccgtcgcggcggccgtcggggacaggatctacgtcctctcgagccgcccccaatacttcgagccgtggttcgaggtgctcgacctgtcccgggccacggtggtggcaacggcggacggccgccacacgctcgatgggtgctcgtgggaggccttgccggatcccatatgcttcccttgtgtgctctccccggctgggtacctcgccccgcccctcatcctcgtcacctcctacgtgctatttctcccctatctgctcgtgtccgtgaataatatgggcaagatgacaacctatgcatttgacaccggcactcaccggtggcacaagctgtacgactacggcctgccgttcttcggctccgcgacgccactagtaggcatccgtctagtctcatccgctcctcatctcaagctatccgtcaccgagttcccggtgaaaaccgaggcacgtgaggaggttggtgtaggggaagcgctatgcttggcttccatggaggacgaggggagcttttcttgcattacattcaggcttgatgaccgcgaacaccacatgtcttatgataaagatatacacgaattctatccaaggaagatgtatttaaatctcaccacctataaaatagtggagggggagaagactgatatggacattgtagtccgctgcaaacgggacaaggccttgaagattttcagttcccatgggttctcctctccacccatcgcctttgctttatccatataaacacttctgtttcacattttggtccttcataacttgtcaaatgtatatacccatgtccatgttcatttctcatgctttctacactacatagggaaatttccttgtactgaattttccttctacactacatgtacaataaaagacctgtttgccaaaaaaaaaaaaaaaaaa

SEQ ID NO: 61449 - DNA, 225 bp, Oryza sativa
  Clone ID: PAT_MRT4530_62882C.1
atggcggagcagtggagactgcatcatgcgtcgatgtccatctcctcgtctcctctcgtcgccggcagattcattgccatccaccacttgctgagccaccgcccccactggaggagctggagaggggctctcgggcttaggctcctcttcctcctctccagcctcatcatcaacaccatcctggcgtgccctccctccatcccgaatcctcagctggattggtag

SEQ ID NO: 61450 - DNA, 642 bp, Oryza sativa
  Clone ID: PAT_MRT4530_62883C.1
atgacaacgactgaaagaatcccaaagacaaaaatgatcggggcattgcaaggtgaggaaacaagacctcctggacaatgcctccaagaagatcatgatgccaaggttgccgccatgacccatctaaatggactaggttttcatctggagagtcctgtgaggagggagagggtcatagctcgacaacgccccaaagggggaagacggcgcttgaaggatgtcccagcatgcacagacgtcgctcttgctcgcaccgagccgtcgctgcagcccaccacaccttgcatcctccccgtcggcccactggctgctcctctggcctccatcacatgggccccatctggcatctcaagcagccactgccacatcgcatcggcggcacatgttgctgctgcgaccccgcccaccaaatctagctacatctgtcgcttccagatccactcatggcgagccgccgcatcctcctcggcatgtcacggattgatggccaacaaaatcgaggctaagaaggatgtcgatacaataaatgctgatcaatctgtagttccgacggctcttatttccttacctttgctgatagttgaagctggccaggtcggcccatctggccacgatgacctttcgctgtatatgataccatag

SEQ ID NO: 61451 - DNA, 2623 bp, Oryza sativa
  unsure (1)..(2623): unsure at all n locations
  Clone ID: PAT_MRT4530_62884C.1
ggcaacaaagtttatcacaaatatatatatgcatgagccatattcatatgaaaaatgcaatgcctcgtgaacttaaatttgatttcgaatatataataactaataagatacacaagttcctcgattgaggaatttgacgacataatgtgtgctgatttaagtgtccaacttgattcaactttattctcacatgatgccggttctacacatccatgagtacggatgctgaaagcctgaaactattcacgagctagctggcttccttgattttaccatgcctcttgcagaaacacttggttctctctagaccatcctctagtaattgtggatcaaccgcgaaggttatccggagccaattcttcatccctaatccactccctgggcagatgaccacggattcctccttggccagcttgctgcagaagtcgacgtcgtcctctatgccatctagggaagacaggtccagcttcgccatgacgaacatggagccctccggcttgtgagggcaggtgatgcagtcgatctccttgagcttctcgtagcatatctccgccgccttcttcaccaccccaagggcattggtgaagaacgcatcgtccgtcttcgcgaggatgtcgggcaatgctccctgaacaaatgttacgggatctaccgagatggctcggtagtcaatgactgagtcgatgatcttcttgttcctgaggattccgttgggatcggtggcggcgatccagccgaggcgccagccgggcaccatccaccgcttggagatgccgcccagcgtcatcaccggcgccacgtcgccgaacacccccatcggcacgaacggcttgctcccgaacgcgaagtggtcgtacacctcgtcgctgatcaccattatccccagcttcctcgccgtctctgcgatcttggcgaggtggtcgcgggagtagacgcagccgcaggggttgttggggttgacgatgaccatggcgacggtgttggcgacggcgagggcctcgacgccggcgaggtcgacctcccactcgctgtcggggaggaggtcgaagtggcggaactcgaggccgctcagggcggcgcgcgacgcgtacagcgggtagccgggccgcgggagcagcacgttggcgcccggcgacgcgagcacggacatcatgatctcgacggcgtggttgcagccggcggtgagcaccacgtccgccggcgagacggcgtaggggagctcccgcgacaggtgcgccgccaccgcgctgcacgccggggcgattccggcggccggcgcgtagctgttgtgcgcgccggaggcggcagcggcggcgacggcgtccgtggcggcgggcgcggcgcggaagcacgcgaacgcggcggggtcgccgtgtccgagcggcgccacggaccgcgcgtcgccgctcccgtcgaggcaggcgtacacccggtacaccagcgcgcggatgctctgcgacctcgccgcctccatcgccgggttcgccgccccgaaccgccacgccgccgccgacgcgtcgccgccgccgttctccatgagcacactcttccatagctccatccccacacgggcaaccagggagaggcacgggaggagcacgaacagaggacgagcacggcgaccgccggccttcgatcgccaccgcatggcccgccagccgcctccgctcgccgcctccgcgcggcggcgccacccgccgcctccgctcgacgcggccgccggtctccgcgcggttccggtgccgcccgccgccccgcgcggcgccgcgcgccgcctcggctcgccgcggccgcggggccctccgcgcggggcccnncnnccnncnnnctnntncttcnntggctcccggctcccctcgggtgccccctcccggctcctttgggcgccccggggtgccgggtttggtgcgttatggggcgnnntgggggtgcggggctgtgggcggggtctgtcgttggcctctgtgtggggggttcttcctttccgttctctttgtgccatgcccgccgcctccgcccgctgcggccgccggcctccgcacgacgctgcccgccgcggcccctgaggctcggcgtcgtcgcccctgaggctcggcgccgtcgccgctcgttgttctccgccggagaggatgcagtacagttgatacctgatacctgttgtggtatcagttgcatggtactcgatacttgtgatacctgttacccagtacctgtgatacctaggaccggacacttccccctcccctctcctcttcctcctcaagcttgttgccatgttgttttcccaatctctaataacttccgtagcgctggagacaccatcatcaccgacaccgacaccatcatcacctttgacccctctcatttcccttgccttcgcctccgacaccggactaacatggtcctccatctccgtggcttcagctacagcgactttttctttgtgatctttttcatccacttctttctcgtcttctcctcttttctctgcattgcaatggcgcggggggtggagacgatggacgccggcggtagcagtgcgagtggcggaggccgaccggaacggtggggcggtggagacagtctctctcttcccttcttttattttctttcctcttctcat

SEQ ID NO: 61452 - DNA, 1273 bp, Oryza sativa
  Clone ID: PAT_MRT4530_62885C.1
atgaacaaaagatttaacccacagtaccgggcatggcgcccacccacagggccacagggccacagggccgggccagaaagcggaatcgtcccaccaacaagagactacgtggtcgaggaggaggacgaggagcgccacccccacccccaccaccgcctcctcctcgacgacgacgcggcggggttcgaccacgacgaaaccctagccgcccccgcgcccgccccgggctccccgttctccttcgcctccgaccccgaccccgaccccgacatcgacctcgagctccgcctctcctcccgctcccctcccttctgggactgcctcgaggacgacctcgccgacgaggagatggtcgggggcggattcgagtgggaggagatcgccgacgccgctgtccctgcccccggagccgtcgctgctggtggtggtggtggtggtggaggaggagatgggggccttgttggggacggcgacgtgttcgggttcctcgacgagagggagatcctcggcgcgatggaggggctcgacagcggcgacgacgaatcggggttctccgacgagccgttcgacttcggcgacgagggggacgacataggggacatcttccggagcgtggggtgggaggtgctcccggtgccgctggacgaggacgacttcgaggtgctgccggggcacgtcgcggacgccgcggcgggaggggcgccccccgcggcgcgcgcggcggtggagcggctccaggtggtgccggtcggcggcggcggggaggaggcggcggcggcgtcgcggggttgcgctgtgtgcaaggacgggatcgcgcagggggagctcgccacgcagctgccgtgcgcgcacttgtaccacggggcgtgcatcgaaccgtggctcgccatccggaactcgtgtccggtgtgccgttacgagctgcccaccgatgaccccgagtacgagaagcggcgggtgaagcggcgttcttctggtgactccgtggcgcaattgggtactcctatgcaaatttgagctaggattgcttggtgatatgtgttggttgccattctgtggaattgagaaacttcactctctaactgctcattgggatgcttcgagagtgtcatacctctttgatctcaaactttttagtgcgtagctgtcatgattggtaattgaacggtaagaaccattgctagaatttagaactgctgtaaatacgttgtgctgctccaataatacagaaaattgtttcaatgtttccccaaaaaaaaaaaaaaaaaaaaaa

SEQ ID NO: 61453 - DNA, 420 bp, Oryza sativa
  Clone ID: PAT_MRT4530_62886C.1
atgtgggcaaaagtctgccgcaaagacttatggatcaaatcaattggcacgctaacacatctgaaggcgagctttggacctgcactggagttaagcagatctaccaggccacgtgttttcagtcaacagcgacgccagcatggaagggcgggggcggcgtcgcgcggcatcagttggggaagggtcggagccgcgccggcgtctggatgggcggcttcagttgggaagggcgggggcggcgaccggcggggaagggcggggccggcgccgagcggggccagacgggtggcggccggccggccggagggcagcggcggcggaaacctcgatgcgacgatgctcggggccgtgtgcgacttgcgaggaggagacgggaagagaatagcgaaccatttttttcataatggcagaggtgggtaa

SEQ ID NO: 61454 - DNA, 1892 bp, Oryza sativa
  Clone ID: PAT_MRT4530_62887C.1
atggcggaggcggaggcggaggcggcgggggcgggggcgggggcggggccggcgaggaggacgacgagggtggggcgctacgagctcggcaagacgatcggggaggggagcttcgccaaggtcaaggtcgcccgcgacacgcgcaccggcgacaccctcgccatcaaggtgctcgaccgcaaccatgtgcttcgccacaagatggtcgagcagatcaaacgggagatttccacaatgaagctaataaaacatccaaatgtggtccagttgcatgaggtcatggctagcaaatcaaagatatgcatgattcttgaatatgttgatggaggcgagctttttgataagattgtcaattctgggagactaggagaagatgaagcaagaagatacttccatcaacttataaatgcagtagattattgccacagcagaggagtgtaccatagagatctgaagccagagaatctgcttcttaatcgtccgggagctcttaaagtttcagattttggccttagtgcgtttgctccacaaacaaaagaggatggacttctgcatactgcttgcggaacaccaaattatgttgcacctgaggtgcttgctgataaaggttatgatggtatggctgctgatgtatggtcctgcggcataatcttatttgtcctcatggctggatatttacctttcgatgaccccaacctaatgaccctttacaaactgatctgcaaggcaaaagtttcttgtccacattggttttcttcaggtgcgaagaagttcattaagcgcatacttgatcctaatccctgcacaagaataacaattgcacaaattttggaagatgattggttcaaaaaggattacaaaccaccactttttgagcaaggtgaagatgtgagccttgatgatgttgatgctgcattcgattgttcagaggagaatctcgtggcagagaagagagaaaagcctgaatccatgaatgcatttgctctaatttcaaggtcacagggattcaaccttggaaatttatttgagaaggaaatgatgggaatggtgaagcgggaaacttccttcacatctcaatgtacaccacaggagatcatgtctaaaatagaggaagcttgtggacctcttggtttcaatgtgcggaaacaaaattataagatgaagttaaaaggtgataagactggaagaaaaggccatttatctgtagcaacggaggttttcgaggttgctccatcactccacatggttgagcttcgtaaaactggaggggacacgctggagtttcacaatttctacaacaatttctcgtcagagttaaaagacatagtgtggaaatctgaatctgacgcaaaagcagcaaagaagaggtgatctttagtattctaactatccaacgctcctggatgtagttccctctttgtagcgtttgcaccatttctccaggtgacaccaaaggatatcgtcctcctggtcttgtgcgcattgatgaattttctgggatcacatcttgttgtgccaatccttgtaaaagggtgcgcttcttttttttctttttgacccttagcgcaactgtggacatgctcacatacatgtataaggccctcccggagatgcaccttgtatttgcagttgggatgtcaaataggtgtcctacatgctttggtgaccagtagggttgtgtgccttttcttttagtgctgaaaagtatataataagatcaaaatgtgaaattgggaggctatgtaacactaagctgtgctctgttcttgagaaacctagcagcagaatggcagtgtaactttgttagttcattcttttgtgaaactgtaatggcttcacacctgagctatgggtgtatgtattcaatcaagatgcaatctgattggccggat

SEQ ID NO: 61455 - DNA, 705 bp, Oryza sativa
  Clone ID: PAT_MRT4530_62888C.1
ttacgggtcccctcttaccattctgtccagctgaagaagtgaactcagatggtcttcgtttacttgcactggcaattggggcatctggcccatgataccaggcgtctcgctcattctgcttaaaatatttttgaagttgttgtttgtccgaaaaaagagatccgtgttctctcccgtcttgaatgtttcgatatttgtggcgatttggttgagtaaatgattgttttcttccaggagatgctgtgttgcactatccacgacaggaactttatgggatgtatgaacctttcctccatcatagaccttcatgtctcttatctttttccctgtataaaatccatcaggtttcttccttctctccctcccaagcccttccttcagtgtgttcagctcacggtcattccaatctgaaggcgaaccagtgacgaacttgtacttgggcgccaccgtgctactgaacgcatcccccgacgagctcctcgacgggccggccaccgatgcgttgcccagcacaccggtgttcggagagacgaacagcccagcgctgctactagtcccgttcatgctcctcggggccatcaccataccggccgcagcgccggcgccaccgcccaagtcgctgttagattggaaggagagcatgtgatggttgtacatcgaggccgtgatcccctgatggaatcccatgctggaatcggcggccat

SEQ ID NO: 61456 - DNA, 237 bp, Oryza sativa
  unsure (1)..(237): unsure at all n locations
  Clone ID: PAT_MRT4530_62889C.1
gtgntttttttctttttttttttttcaaccaaaacatnttttttttcaaagacgtttttttaaaacgagcgaacccccaacatttaattgacaagttcantcaaaattcagatattcattcactgtccaccatcaaactttccatgaatttattaccataattacattccaatttgtaaaatccaacaaaatggccttctcccttatcgccaataataacatcaaaaatttcattta

SEQ ID NO: 61457 - DNA, 2045 bp, Oryza sativa
  Clone ID: PAT_MRT4530_6288C.1
cgcgtcaaaccccaccccgaagcaaccgccgccgccgccgaatccgccaccggcgagcaaaaatacacatgccagttttttaaaaacaggtttgacacatgccaggtaattatacatatgctatatatactattaggcatcaagccttgcagccttgcacatgttccaagcaggatgattacaacagataacatacagcaggaacatgcggttgttgcaacaagagccctgcatggtgtttttttgttgtcaaagataaaaagctaccgctaatacattccagtctgacgatagatactaggtattgtctagggtaaacgaagagaacgcgcgacgccaagtacactcagcttgggctttcatcttctctgcagaacaggcctattaatatgataggtacacaggacttaacttttctccaggttgcctttttccaccctggatcctggctgtgactcagtctagggtcattggctgggagatgcaacaccggaagcgggccctccggacagtgttaacgacctccatctccacttgctccagcatcctgaccacctcggtgaacgggggacgggcatcaggatttgcatcccagcacctggtcatgatctctgcgagggcagggaggcagtcatggggtatggctgggcggacacccttgttcaccaccgcaaatgcagcttgcactgctgtcatgtttgcacaatggttcttctcttaagactgatggtgatatgtggatccattagtggaccaaagcaatctggtgccgtacaaacaaccatgcaggagctcgcatccaagggccttgcagcaaagatccttccaccaccaatctcaaggacagatttcgagaaagtcctcgccaggcagagaccgacagtgagcaagaaagacttggaggtgcacgaaaggtttacaaaagaatttggcgaggagggttgacaagattatgcgcactcacttatgcatagctgctccacagaaatgtatattttatgacttcgattgttctggttggaagttggattcacagatttgtacaattgatagcctaactatgattaattacaacctgtttattgcgttaggctatcattgcgcctctgtcgtcaacttatttcatttttactgtcacttatacttgaaattttccacaagtgtattaattaaggaataatacttaacgtggagcccttgtggtgccaaaagcttaaatgcgacatcgcctccattgtaggttcccctatagagcttcccaaaggcaccttgtgcaaatggcatccctatgtgcagcttacccaaatcaatggtccactcctcgtaatccttgagtgtctcagtggggaacctagagtccatcaaagcctgtgccaatgcatcatcactcaaggcatgcgacacacgccctggacggaaaatgctgttcccgacagaatagctagacacaatgactggacccctgaggccaggatgcttaagcatcccggtacgagagtcactagatgcaacactactgttgtccactgacattgcaaccgaaccaccgtatatgcttgtctgcatgctgttaaggctatcgatcgacatgttggagccctcccctagcttctggtagtaccccatgtcacagaagttcccgccaacatcatgcgcgccaacagcgccaacgatcccatggaatttggcaccttccgccatccttcaagagtcgctccacgactcctcgctccctcccgcagttcctcagaaggcaagcaattacctctccaattcgactcgagccaagaagaatgaatcagccggtggaatgatgccctcctcctcgcccccccacccccctggttcttcgtcgccgccgtgctccgacggggccgcacgtggggagggaggagtaaggagggcgccgccgcgctcagctcgccggacggcccgcccaaggtggattgcgaggtgaggcgaggggagaaggctttgcttgcctccgcctccgccgagcttgagagagagagagagagagagagagtagagaagaggtgagggtt

SEQ ID NO: 61458 - DNA, 498 bp, Oryza sativa
  Clone ID: PAT_MRT4530_62890C.1
tttgtttttttttttttttttaggagcatgcactgccaatttcaataaatgcttagatttaacgtacatagtaggcctggaaaaatactacgaaatcaagagatacaactgaagctctcaattcagttcagttcaaaaaattgttgccccaaatatttttccatctacaccaggaaaataaatcctaaaaactataaccaagtactgaaacaatcatccctaagaaaacaaaaattaattcatcgtcaatagtttatccaatgcacccaaaactgccatacaaaaagcaaacagtaaacttgttgtatgcttgtatgaacaaaaataaataaacaaatagcaacaatctactagatttaactcatatgtatgaaatgaactgataataagagaatgcagagaaatatatacacgaagggaggagtgatatggagtcatggatatagttaaacaaaataagaacatactagataaccatctatttgcatttatgcaaat

SEQ ID NO: 61459 - DNA, 561 bp, Oryza sativa
  Clone ID: PAT_MRT4530_62891C.1
atgggcaccgctcgggaagaggcagacgggctcggccacaacctggggaagaggtggctcgagatggtgagaagtggatcgagacggtgggaatcgctggccggagaaggggagatggtggagctcacctcacgtggaggggatggggttaggagggtgcgaggtatggtgcgcatggctggtgtggacccggagtggttacacagcatggcacatgcgctggcactggacacacggacgtggccaagaggggacgttcctggcctggggttgatcgacgccggttacgcaggcatggtgcgcatggctggtgtggacccggagtggtcacacagcatggcacatgcgctggcactggacacacggacgtggccaagaggggacgttcctggcctggggttgatcgacgccggttgcgcaggcatggtgtgcatggctggtgtagacccggagtggtcacacagcatgacacatgcgctggcactggacacacggacgtggccaagagaggacgttcctggcctggggttgatcgacgcctcacgggcgcgtatgtcgtag

SEQ ID NO: 61460 - DNA, 259 bp, Oryza sativa
  Clone ID: PAT_MRT4530_62892C.1
gatcacagcaatcgacctccaggggatcggttctattaatcatcgacgcgggttaaaaaacggggagatatgccaccgccaacagcatgatgatccttgctagcaggcggatcatttatggggatgacacaaccacgtcatggactactactaggacgggtaccgtcgccggagctgcctccaggactactacgaatcctacgatgacgcactacatccccacttcgacggcgattgccacttatacgccggtaccggg

SEQ ID NO: 61461 - DNA, 1731 bp, Oryza sativa
  Clone ID: PAT_MRT4530_62893C.1
tttttttttttttttttttaatcttttatgaatttaccaaacaccagtgcttttcacttatgacggtgacacctacgccatataggcgtgattagttatatttttttttttttttttttttttttagtaatcaccaatgattttcacatagtacagtacacaagagtacaggaggtgagatctagacgtgacagccatagctagccacacgtgcagagaaaacaaaccacaatgacgactcacgagcacaacaaacgaacacaagaatacaagagcaaataccaccccgagacgctagcttctagctgtcccctactgcatgcatgcacgcacgtcgtgcgcccgtgccgtggcgccgggctcactcgtgcagggtggcgtacgtcacgtagctggagtagtccttgaccaccctgtccgccggcgccgccgcagcgttggcagctccggcggggcacgccacgtgggtggcgctcgccgccgggcacgccttcggctggctggggaacgacgcgcactccgccggccgccgttggttggcgaagcccggaatgcgagttgttccgtgacgttgaggacgccgttcgttgatcaccgacaagcacgccgggccgaccgacgtgaaggtagttgctcgacagcgtgaggtggccgacagggggccggcggggaccgcggcgagcttgcagggcgcgtcggggatctctccgtagaggcggttgcggcccaggttgagctgctcgagcctgttggggcatgagaaggagaaggggatcgggcccttgatgtggttcatgccggcgtcgatcaacgcggcgatgctgagcatgccgagctcgggcccggctaggttgttgtagttgaggaggagcgtcttggcatcgcgtagtaccaggaataatgcccttgccctttccccatcccttcatgtcgggaattttgatacgaaaagtgaaatttatattagtagtgacgcacgaccccgctttaccatccacagcgccagttccgactagctcgctgtaagcaggatgcgctgggagatcgttagcgacattgagcttgtacaggtattcaaggcttgacaggcatggaatgtcgcccccgaagctgttggaagcggcgtggaaaaatgccagatcggggagctggtcgatgaagccttgcaacttcggtgcatgcagaccaaagccattgaaaaatacctcagtaactgtgagcttcttatctggccccggaagtgtagtgcagttgaaaccgaggtagtccgtctcaccgcaaatatcatggccggtccaggtggaagtgacgttcttcgggtcggcggtgatggtgctcttgaaccgctggatgacgaggtaagcgctatagagactttcgtttgggaagtcatgtatctgaggggtgtgtgatacagaattctggaatgtcttgttagatgcctgcatgcgagcaggttctactactaccaggaccgtgggggcggagatgagtgacaatcttgaaccgctggatgactagatagttgcggtagagctcctcgtttggaaagtcttgaggctgtgggttgtacaatggagagtgttgggtgatctttgtggatagttctgcgtttgcaggatctgcccctacggcggcgattttgtacagaaccaatactagtagttgagtaaagggaaataatctcaagtggcaagccatgtctatttcaggttcatcgataaaatcgtc

SEQ ID NO: 61462 - DNA, 489 bp, Oryza sativa
  Clone ID: PAT_MRT4530_62894C.1
ccacaagcaacaagtaacgagctaagaataagccagaaatgcttgttggtatttcttatgaccacagataaatccgcaagcgcacggaataccgctatagcagttcaccttcggatgactccaaaaggatatcaaactcaaagaatgattactgggacgggattcagggctgtcgccacctgccgcctacctctgacaaatccatgggatacacaattaaaaaaaagaagtttctccgaacccagagcagagtgtatcgacagctccggtactcctccagaattactcctagaaggaaaacttcttccgggcacccctccagagcttcccctcactctctaccttattctaatgaacaaaagatacaatagagcatcttgtagttcagctcaaagttgtgtgttggaaatgagagtgagctcctccttttataggctccaaatgatggttacattgatgggaattgtcggaaatgccccgcaaccgcca

SEQ ID NO: 61463 - DNA, 1345 bp, Oryza sativa
  Clone ID: PAT_MRT4530_62895C.1
tcactcgtgcagggtggcgtacgtcacgtagctggagtagtccttgaccaccctgtccgccggcgccgccgcagcgttggcagctccggcggggcacgccacgtgggtggcgctcgccgccgggcacgccttcggctggctgtggaacgacgcgcactccgccggccgccgctggttggcgaagcccggaatgcagttgttcctgacgttgaggacgccgtccttgatcagcgacaagcacgccggtccgaccgacgtgaagtagttgctcgacagcgtgaggttggcgaggcggccggctgggacggcggcgagcttgcagagcgcgtcggggatctctccgtagaggcggttgccgcccaggttgagctgctcgacgctggtgaggcatgagaaagaggaggggatcggcccggtgagctggttcatgccggcgtcgaacactgcggccttggtgagcatgccgagctcgtgggggaggcagccggagagctggttgttcaggaggagcacctcgaggagggagtcttgcaaatgcaagattgatggcgggattgcgccggtgagcctgttgttggcgagggccaggtagcttaacttggagaaaccgatgttcaccggtaatggcccggacaggtgattgtagttgaggaggagcgccttagaatctgtggcaccggggatgcttcgtcctttcttgtcgtcttttccgggccggaggtgaaatgtgatatctagatctaaattaacgcaataaccatgaactttagttgttacatgcgacccgaccatgtcacgactaaaatcatcctgtatttggagattgctgtcgacattgatcttgtagttgtaggcgaggcctgtgaggtaggggatgtcaccaccgaagtcgttggaggcagcatggaaaagtgcaagatcggggagatggtcaataaatccttccagcttcggtgcacgcaggccataaccgttaaagatcaccacagtgaccgtgggcttcttagtacgcccaggcaatgctgcacagtagaaaccgaggtaggtcgtgttgccgcagatgtcatggccggtccaggtggcggtgatgttcttggggtcggaagtgattgtcttcttgaaccgctggatgactagatagttgcggtagagctcctcgtttggaaagtcttgaggctgtgggttgtacaatggagagtgttgggtgatctttgtggatagttctgcgtttgcaggatctgcccctacggcggcgattttgtacagaaccaatactagtagttgagtaaagggaaataatctcaagtggcaagccatgtctatttcaggttcatcgataaaatcg

SEQ ID NO: 61464 - DNA, 584 bp, Oryza sativa
  Clone ID: PAT_MRT4530_62896C.1
tcaacccttcgcggtgctgttagaacaaccatgtggttgtctgatgtacctcaggaaggtttgggatggtatcatgtgtcagggtgtcaatctggcaatgcacatgtattgtagatgtcggtgctactagcatcttctttttctagcactgctacagcactggtcacagccacagttcagttcagaagcagggcgcacagtcaggggggcagtttctgtcacagggtattgttcacagcagtcagtttcaccagcacaaatgggtgtcaggctgttcaggcagcacacagcactagcagcacacaacacagagcacaaacagggtacttcacagcccattgtcgggcactgcaaggggtgcagggacagcgtcaagaggtacagcactcgctcaagacagcacttcgccagcacactcagcacagcggcggcggtggcggcggccatcctggcggcgaccaggcaattgaagccgtcactgctggcgtccgcagccagctttagagatcacaagcttagacgcgtggaatggcgacgtcatagtgttgtatatgtgacggtaatcatcactgtttggggggggg

SEQ ID NO: 61465 - DNA, 549 bp, Oryza sativa
  Clone ID: PAT_MRT4530_62897C.1
atggcgtctcccggcgttgtgtgtactactgtaacgccgacgtcgtcggccgggtcggaccaggtcgtggccggcggcggcgaggcggcgcggcggccggtggcgccggcggtgatggaggagcggaagcggaagcggaaggagtcgaacaggctgtccgcgcagcggtcgcgggcgcggaagcagcagcagctggacgagctggccgggcaggtggcggcgctgcgcgcccggaacggcgccctgggcctcgccgcgcgcgaggcggcgcgccggtgcgccgccgtgcgcgccgagaacgagctgctccgcgcgcgctccgtcgagctcgccgcgcgcctcgactccctcaccgacctggcgcagtgcctgcacgacgccgccgcggcctcctccttcgccgccgcgcccccgatgatgatggcgggcgccgccaccgccttccccaccggcgccgtcggcgccgccgccggcttcatgatgccccagctgccgccgccgctcctcgacgccaccaccatgggcatgcattgcaactactactactag

SEQ ID NO: 61466 - DNA, 119 bp, Oryza sativa
  Clone ID: PAT_MRT4530_62898C.1
gggacagaagaagagagtagtaatggattgtgggtggaagacgacacaggcagcaactgcatggattaattaattttttagctatatatgtatcgagactgggtacgaattccattatt

SEQ ID NO: 61467 - DNA, 413 bp, Oryza sativa
  Clone ID: PAT_MRT4530_62899C.1
ccataaaagggaactattaattatttataagaacttacaagttccaacaaacaaccacacttggcaaacaggtgcatattcgggccatttttaaaaacgcacaaagctgatatataacatgcagacgggaactcatgcggatgcaagagcatgacgaacccagtgtcagtcattcccgtacaaagggcgacaaccacaattttgtatacgaaacaaaaccgtaaacggagcaagttatatacgaattcttgctgaagagccagccacataaattgaattaattaagggattgatctgccgccggagggccattattagaaaacgacccggagacaaatcccggaggaacagggaccggccacgcggaaaatgtaataatcgacccccttcttgaggaggaacgacgcggaccc

SEQ ID NO: 61468 - DNA, 142 bp, Oryza sativa
  Clone ID: PAT_MRT4530_6289C.1
tggttataataacagggcccggaacctcctggtgaagaacaccggaacttctggcagtgatgagcagcccggaacttccggagttcttgagccagaaacttccgggcaacagagaaaatcgaaatttggggaagcaaaacag

SEQ ID NO: 61469 - DNA, 699 bp, Oryza sativa
  unsure (1)..(699): unsure at all n locations
  Clone ID: PAT_MRT4530_628C.1
aattgatcccatccaattctgtaattgngcaacttcgaattggttacaaagttgtgcccaagagggagctgaatgatccagagaatgcacttattggtgcttttgctggtgccattactggggctataacaacaccactcgatgtgatgaagacgcggttgatggttcagggatcagcgaaccagtactcccggaattgtaactgcgcccagacaatcctgagggaggaaggacctggggcattcttgaaggggatcgagccgcgggtgctgtggattggcatcggcgggtccatcttcttcggcgtgctggagaagaccaagtcgatgctcgccgagaggaggagccgcgagccaccagccgggaaggatgagtgacagattttaccctcggccatggatggatgcttcaagttttgtgtttgttttgatcgatttcacatgagaagtagtgcatctctcgaggaggaagacaatgccactttgcgtcccaatgattaaattcccattcgtttaatgaattaatattatgttcaagttttttttaaaatctgattatactacattatagcttctctctctccctgcagtttacccatgctgtatgacttgtagatgtaacagtcggtcgttgccgatcaaattgtacctttgtcaatccagatagtattgcagcagtatttacaaaaaaaaaaaaaaa

SEQ ID NO: 61470 - DNA, 171 bp, Oryza sativa
  Clone ID: PAT_MRT4530_62900C.1
tcgggccgccttgagaagaagggattctacctcaaagccatgaagctcattaacgtggagaagtccatcgccgaggagcactacacccatctgtcttttaagcccttttttggagggctcgtttagtatattgtcattggtgccgtcttcttcttggtctctgagggcaag

SEQ ID NO: 61471 - DNA, 1287 bp, Oryza sativa
  Clone ID: PAT_MRT4530_62901C.1
atggctaggaggattattttcctactgttcctcatagcgtgtgtagtcgacagaagcgtcaacgtgcattgcgagaagcaacttgtgtcatcgttcgacaaacatgacaacgcatcgtcttcactagctgagctgttctctgggaaaaggataccccttttccgatatatcaccaacaaaacatcaaggctatcaactaaagctgtacaggtcggatgggatcgagggctacaaacatccctatatgtcatatcagttgggcttggcacaccagccaagacacagatcgtagagatagacaccgggagctccacatcctgggtcttctgcgagtgcgacggctgccacaccaacccccgaacatttctgcagtcaaggtctaccacatgtgccaaggtgtcctgtggcacttccatgtgcttgcttggaggcagtgatccccactgccaagattcagagaactatcctgactgcccattccgtgtttcatatcaagatggatcggcctcctatggcattctgtaccaggacaccctgacattctctgatgttcagaagatccccggcttctcgttcggctgcaacatggacagcttcggcgccaacgaattcggcaatgtggatgggttactcgggatgggtgctggcccaatgtccgtgctgaagcaaagctcaccgacattcgactgcttctcctactgcctgccgctgcagaagagcgagaggggattcttcagcaagaccacaggctatttcagcttgggcaaagtcgcaacaagaacagatgtcaggtacacgaagatggtcgcacgcaagaaaaacacagaattgttcttcgttgatctcaccgcgatctctgtcgatggagagaggctcggcttgtcgccgagcgtcttcagtcgaaagggcgtcgtgttcgactcaggttcagagctgtcctacatcccagaccgtgcgttgtccgtgctgagccagcggattcgcgagctgctgctgaaacgcggggcggcggaggaggagagcgagcgcaactgctacgacatgaggagtgttgatgagggggacatgccagccatatccctgcacttcgatgatggagctcggttcgatctcggcagccatggcgtgttcgtcgagagatcggtgcaggagcaggacgtgtggtgcctggcgtttgcgccgactgaatctgtctccattataggaagcctgatgcagacttccaaggaggttgtgtatgacttgaaaaggcagctgattggcattggaccatcaggagcttgttag

SEQ ID NO: 61472 - DNA, 650 bp, Oryza sativa
  Clone ID: PAT_MRT4530_62902C.1
ggatcctggactatcaagaatttgttgctgtgtctatccatgtgaggaaaataggcaatgatgaacatatccagaaggctttctcatattttgaccaaaataagagtggttacatagaaattgaagagcttagagaggccttggttgatgaaatagatggcaatgatgaagacattattaatagcatcatccgtgatgtagatacagacaaggatgggaaaataagctacgacgagtttgccgtcatgatgaaggccggcactgactggaggaaggcatctaggcagtactcaagacaaaggttcagtaacctcagtctgaagcttcaaaaggacggatccatcagtgacgacacgcaatagactggacagagaaaaaaactacgcttacgttttttctttgctgtgtgctggctgttacattattttttcacacagtaacttagtggctttgtatagatagcatttgtggttttgtgcttaccagcagcgattatatttgtcagtcaggcggcagatatgtatgtacccaaaagagggcgggatggggaagcagatggtgtgcttacagtttactagaccagaattattggtacaattgtttgtagttttgtacgtaccataatacaagcggcgtgaaattctcaactg

SEQ ID NO: 61473 - DNA, 172 bp, Oryza sativa
  Clone ID: PAT_MRT4530_62903C.1
gaggtggcgcgggagtagacgaggagagtattctcaccgttcgcacgcgacgggtaggggagaagggaaggtggccgacgtcggtgctcctccggacggggatggccgcaacctcgggaaggtgaaggagttaagggagagagaggagtcgcggcgcagcgagaaacgctag

SEQ ID NO: 61474 - DNA, 2702 bp, Oryza sativa
  Clone ID: PAT_MRT4530_62904C.1
aacaccaactactcctccatctttctgtaccggattatcctaatcgcgtttactaagactccgctaaaatctcttgtattcccacaaaatttccccaaaattttttactaaaacttttttctcaaagatagaaacaactatatatccttttggtttgcaaaggttttactaggttatttgcccccctcttctagaacgcatccagaattcgtggactctgcgacccaactcacacggcgaagcacacagaattttttttcccaaatccatttattttcctctcttctctctctcgaatcgaatcgaatcgcctcgcctcctttgttgaattgaatccaagctcgattcgccgccgccgcacgccgccatgggcaactgctgcggcacgccggcgacggcggaggagggcgggaagaggaggaggagggggaagcagaagaaggcgaaccccttcaccgtcgcgtacaaccgcgcgccgtcgtcggcgggggcggcggcggggaggcccgggctgatggtgctgcgggacccgacggggcgggacctcggcgcgcggtacgagctcggcggcgagctggggcgcggcgagttcgggatcacgtacctgtgcacggaggcggagacgggggacaggtacgcgtgcaagtcgatatcgaagcggaagctgcggacgccggtggacgtggaggacgtgcggcgcgaggtggagatcatgcgccacatgccgtcgcatccgaacatcgtcagcctccgcgccgcctacgaggacgaggacaacgtgcacctcgtcatggagctctgcgagggcggcgagctcttcgacaggatcgtcgcgcggggccactacaccgagcgcgccgccgccgccgtcacgcgcaccatcgtcgaggtggttcagatgtgccacaggcatggtgtcatgcaccgcgaccttaaaccagaaaacttcctatatgctaacaagaaggatagttctcctctgaaggcaattgattttgggctatctgtgttcttcaggcctggtgagcggttcactgaaattgtaggcagtccatattacatggctccagaggttttaaagcgacactatggccctgaagttgatgtctggagtgcaggagtgatactttacatacttctttgcggtgtaccaccattttgggcagaaaccgagcagggagtagcgcaggcaattatacgctctgtggtagatttcaaaagagaaccatggcccagggtatctgagccagctaaagatcttgttaagcggatgttggacccaaatcccatgacaaggcttactgcagaacaagtacttgaacatccatggttacatgattctaaaaagatgcctgacattcctcttggtgatgctgtccgagctagactgcagcaatttgctgcgatgaacaagttaaagaagaaagcccttaaggtcattgctgagcatttgtctgcagaggaagcagctgacataaaggacatgtttgataaaatggatgtgagcaagaatggccagctgacctttgaggatttcaaggctggcatacgtaaacttgggaatcagatgcctgattcagatcttaagatattgatggatgctgctgatattgacaaaaatgggatcctggactatcaagaatttgttgctgtgtctatccatgtgaggaaaataggcaatgatgaacatatccagaaggctttctcatattttgaccaaaataagagtggttacatagaaattgaagagcttagagaggccttggttgatgaaatagatggcaatgatgaagacattattaatagcatcatccgtgatgtagatacagacaaggatgggaaaataagctacgacgagtttgccgtcatgatgaaggccggcactgactggaggaaggcatctaggcagtactcaagacaaaggttcatcggaagtggagactccgagaggagtcctagggtgcggcccggcatggaggaggcgagcaaatggcggccgacggcggagcgggagctgcggcgcgctgggaagaagcgggagagggggagaggaggcggccggcgccagagaaggggagagaggcgcccggcccgatcgcccatgaggccgcaacggcaggagcggcggccggcgccgcctctccccattcggaggcgggagcgggtggagcaggcgggcggcgcgcggccggagcaggcggagcatcggcgtcagcgcgcggcgttagcgggcgagcgcggccgcggcgcggcgagcgagcaccgactccgggcgcggccggagcagtgcggcgggcgagcggccgacgaggtagtcggtgacggagaagaatacttcaataagcttcactagagcgggtccatcagtgacggcccccaatagactgggcaaagaaaaaaactacgcttacgttttttctttgctgtgtgctggctgttacattattttttcccccagtaacttagtggctttgtataaatagcatttgtggttttgtgcttaccagcagcgattatatttgtcagtcaggcggcaaatatgtatgtacccaaaaaagggcgggatggggaagcaaatggtgtgcttacagtttactagaccagaattattggtacaattgtttgtagttttgtacgtaccataatacaagcggcgtgaaattctcaactcattaaaaaaaaaaaaaaaaaaaaaacaaaaa

SEQ ID NO: 61475 - DNA, 457 bp, Oryza sativa
  Clone ID: PAT_MRT4530_62905C.1
gaactgctcatcgaaagatgttcctgacacatacaatggcatctaataacatcaagctctaagagccatatacatacagtggagctggtggcgcttatggcgtgacggggggcggcgccgtcagttcttccaaatgaccacaaaaagaacaattcaaacattattcagcccccgaatgatggttcatatccagtgaagtatttagatcccaatgactagcattctttgtctcggcctgacttattccaatgtcatatagatacgaaccaatccttgatcaagtcattgtgctatcatcatccaatccaagtaatacatagcaatcctcatattctagtgttctattctcgtaccgattgcgttgatgtgacaaatggctgctaccttagacataaataaaccagctcattatagcctaaaactttgaaactgactagatacttaagtttacatatga

SEQ ID NO: 61476 - DNA, 309 bp, Oryza sativa
  Clone ID: PAT_MRT4530_62906C.1
ggaccaaccaaatccccccttataaaaaaaggttccagggggggaacggggggatagtataaaagcgcattctaaaccctaaacccccaaatttattccccgaaaagcataaaaaatatacaaaggcccccttacgttcgcaaataaaaaaacatgacccataatcgcaaaacctaagaaagcccccgggatttgctggaatattacaggaacccccaggcctttttgctcaccaaacaatcgaaaaaatcgaccatttgtccccctctgcggggactgaggggaaaaaacgcccgttttcaaaaccaa

SEQ ID NO: 61477 - DNA, 1414 bp, Oryza sativa
  Clone ID: PAT_MRT4530_62907C.1
atggccatgggaggcagtagcccggcggcgggcggcggattgggcgggcggcgaggcggcggcggcgccgtcgaagccgcggggttgggagcgggcggtggcccgctggcgaggccgggtggcggcacggtggggcggcagcggcgacggtggcgatgcaggaggcgcgcggtgctgagaggagcgctcgagcgttgtgcggcggcaggaaggaaaaaggaaaagtgcgacgtccgcaccgccgtggacagcagcttgtcgccggccgccgccgtggccgccgccgcggggaagaaggcggcggcgtcgctcgccgtcctcgtcaagatgtgcccctcctgcggccaccgcgcgcggtatgaacaggagacgacgacgatccaggacctgccggggctgccggccggagtgaagttcgatccgacggaccaggagcttcttgagcatttggaagggaaggcgaggccggactcgaggaagctccaccctctcgtcgacgagttcatccccaccatcgagggcgagaatggcatctgctacacccatcccgagaggcttcccggtgtgagcaaggacgggctggtgaggcacttcttccaccggccgtcgaaggcgtacacgacggggacgaggaagcggcggaaggtgcacagcgacgaggtcgacggcggcgagacgcggtggcacaagaccggcaagacgagaccggtgatggccaacggccggcccaggggctacaagaagatcctcgtcctctacaccaactacggcaagcagcgcaagccggagaagaccaactgggtgatgcaccagtaccacctcggctccgacgaggaggagcgggacggcgagctcgtcgtctccaaggtcttcttccagacgcagcccaggcagtgcggctccaccgccgccgccgccgccgccaaggaggcctccgccgccgtcgccgccgccgtggtgaacagcaactactccatcgtccatggccatcaaggtggtggtggtggtagctttctcaaggaggcaaacgttgtgcacgagttctacgacccggcagcaacgatgggttaccggccacctgctcctgctgcgcacttcgcgccaaacttcgcggtgcacgcggcaaggaacagctttggtggcccttgaaggaaaaaccaaaattacacaaaatctaaacattaccgtttataccgatatgattcacataggtgccattatattacattcttaaccttacattcatccatcagttatttgcagttttgttcaaagttgttatatcgtttccgatgctatactgtgcaaagattattactacacgccgttctaactcgaaaatgtcaattaatgtatcagtttgtacatgtatacatgcacacggaagaggtcctgatgatgcatcacttcatat

SEQ ID NO: 61478 - DNA, 645 bp, Oryza sativa
  unsure (1)..(645): unsure at all n locations
  Clone ID: PAT_MRT4530_62908C.1
gaccgccggtgactcgccggacgcaactccccactccctggacggccctccgccgacttccgccctgccctcctcctcgccggcgactcctcctgctcgccgccggcgctgtcgacggggaacgacacgggcgggaacggtggaccgtgggcgctctacctaccgacgttcgctggtgccccctacctcgggcgactgttccgtgggtgggcacgcctcgaccaacggtcttcagggactggcctcctcgaccgccgtcgaccctctccctcgtcccctacggcaaacgcccgtgtcaacggaccggcaaaactctcctggcacgcactggaaagcgacggacgtggctttcctgaaccacccggtgggacgggcttgccgaccacttcgaatgnactgggccggacttttgacgacgtgcactttcccgtttcactctactgcgtggacggaacctggtggtgaacccaccaagcaaccgggacgtgggacctcctggcttcgggaacgctcaaccctcgactcccaagccctgtcacccgaactgctacaaggggngacacgcgggcacccgcctctcgcctcaacgtattggaangacncgaactgaacgccttttgcangncctcccccaccaaagttacc

SEQ ID NO: 61479 - DNA, 154 bp, Oryza sativa
  unsure (1)..(154): unsure at all n locations
  Clone ID: PAT_MRT4530_62909C.1
cattgcatgctctcttcaaagatttttgccacactgatgatatnaaagcagccttatctcttttatangtnggancatggaanngcaggcagaaccttcccagtgcaggttccaaatcctactttggagcccttacccttccaacaagcttttc

SEQ ID NO: 61480 - DNA, 248 bp, Oryza sativa
  unsure (1)..(248): unsure at all n locations
  Clone ID: PAT_MRT4530_6290C.1
atttgaacaaagtttgtttccttctgtgccaccaagccactgccgccattcctcttccacgccgagccgccgncgncgnaccgcaccacgcaccatctgaccgccgagccgccgncgcctgcgaaggaacgccgngccatgccatgccatgccgngcctacccacggngctctagaacgcgcaccggagcgatgccgccacgacatcatcttcctccccgtcgatctggtcnacgccaagtcgagccg

SEQ ID NO: 61481 - DNA, 360 bp, Oryza sativa
  Clone ID: PAT_MRT4530_62910C.1
atggcatggccgcagacgaggaggaggggtgcaagctcaatgggggtggcgatggcctcgatacgtccgcaacaacagcccgacggtggccgcctcaaaccctcgtcccatttgcagtatgttgtcatcgtcttgtggatctcgcccttgtcgtcgagtgtgagcgatggagatcagggatgggtcaatggagcttgctgggctgccgccggcaacctctcgcccacctcgatctgcactgaagaagcacgtcggctcgatggggaaggcggcagggtcgaagaagctcgccgactcatcctaccgtccctgaccaatgttgttgtgcttgtcgtcaacctccactcgcgtgtcagctaa

SEQ ID NO: 61482 - DNA, 336 bp, Oryza sativa
  unsure (1)..(336): unsure at all n locations
  Clone ID: PAT_MRT4530_62911C.1
gcgctcccacatcctattcggatctcgccgcgccgggccgggccaccctattacgggctgcgtcttctggcatgggcgttgccaccaaccggtcctcctcctgcacctcagagtccgcagataccgcccaaccgcaggcatacaagttcctcatctacagccgtaccgggtggatcggaggcctgttcggtcacggtgtgcgccgcgcggagcatccccttcagctacgagagccagactcatnaagaaccgcgcacagacttagaccaacatcgacgaggtcccgcccacccacgcgttcaatgccgcgagggtcaccggacgtccaaccttcga

SEQ ID NO: 61483 - DNA, 201 bp, Oryza sativa
  Clone ID: PAT_MRT4530_62912C.1
atgtcggtgtcaagcgcgtcgactaaccgcgccgttaaggttttttttgatggccgcagaatcacgggcctcacccaagagagactagattttgagacggttgtttcggcgaaacgtcgaatatctgagggtccacaactggttttcaacgaggtggttagtatagggaaggcacataggacgttaaggtggatagcttag

SEQ ID NO: 61484 - DNA, 489 bp, Oryza sativa
  Clone ID: PAT_MRT4530_62913C.1
ctagtctcgagttttttttttttttttttttatcgataccatcaagaatcaccattaccttacgcccttcggcagtgtctggcattggagttcccccgacgtgcttagcgagcgcacacaccgaatgagagccaccactcttctttcctcacgcggcgttccatcgcctcgtgatcactcgtccgcggcgaggtggaagatcacggcgcggtccgtcgccgtcgcatccagcggcactttcacaggctcgcacacgaagttctgcaccgcatcttcgtccaaaaagtcccgcagccacgcctcgccttctccgataagcttggtccaaccgatgcgactacgacgcttcaccctcacaaccaaacgacattcccgcagcatctccaccgacgccactgcatcaatcgatacctgcatcgcgctccaggacggtgccatactactgtcggcatttgtgggcgtcacgtccatggccagcggcttcaggga

SEQ ID NO: 61485 - DNA, 369 bp, Oryza sativa
  Clone ID: PAT_MRT4530_62914C.1
atgtcgacaacagatgtagggttattacctgacaactcaggggcccgaacctggctgctacctcacgggatcccgtgggaacgggatgcccttcgcatcactcggggcgacagcataacgccgcatatatccccgaagtcgcgcacctcacccccacatgcaagcttccaacaaagctgtgaagccacgcgactcttcctgacgtgcgtcggccgccacttcgagctgctcgtcgaggacgtcgcccacatcgagagagacgaaagcgctatctctgatctcaccgggcacgaactcgaggaggaagactaccctgttgtcgactacgagtcagaccttcaaaccgccatgtcgacaacagttagatag

SEQ ID NO: 61486 - DNA, 1038 bp, Oryza sativa
  Clone ID: PAT_MRT4530_62915C.1
atggcggcgtcgacaagccgccagcagccggaggcgttgccgtgcctcgtcttcgactacggcgaagatggcggcgagcaacgtcgccccacgacgctgtacagtgtcgccgacggcgtgcaccggccctgcgagttcgaggagctgcgggacaagcggagctgggtgacctcgcacggctgggtgctcacctgggacccgaccactctcgccaccttcctgtggaacccgcacgccgccggccgccgcaggatcgtcctgccgtcgttcgggcagacgacgacgacgccgccgccggccgactccttctgcgcgctatccggcaagcccaccgacgacgacggcggcggcggcttcacggtggtcatggtcgagccgccgggaagctgcttcatattgttctgccacgtcggctcctcgtcgtcgtcgccggcggcatgggtgaggcacgagtacgacatcgggacacggaagatggacatcgaaggccggcagcggatgaagcggtccatccactgcatcacgtcgtgcggcggcaagttgtaccacttcatcaggtcgacagcgtacggcgtgctcgagctctcgccggagccggtgttcaccaccgtgcggatgaagccggccagcccgttcaccacgacggacatgttcgtggcctccatcttctccgtcgacgtcgacggcaagctccacctggtgttcatcttcgaaagcggtggcggtgtcgtcgccgacgtggccgtgtacagggtggacctggagaagcggaagcacgtcaggattgggagcatcggcgaccgcgccatcctcgtcggcggcaggaggaacgacatgggagcagctgggtggtgcagggctcgccgccatgggttgctgcccaacagcatctactggatgaacccgggggatcgtcggctgcgcgtgtatgagcttgggaagaggacggaagaagtgagggatcctttcaaaggcgttgctgaatcggctgatggtacatggtgccgcccgtattggatgattcctgcacgtacatag

SEQ ID NO: 61487 - DNA, 441 bp, Oryza sativa
  Clone ID: PAT_MRT4530_62916C.1
atgactagtttgacttgttcttcgtcccacatattaattagccgcgcgcgtcttcctctcgtgccaccgtggggatctgtttcagcagaagcagcagtccgccacagccgctgccgccaccgccgctgccgagccacctccaggctggtcgaacctcctgacagacctcgccagatcgtctcctcgttgctgtcccaccatgaccgcctcagcttcgtcgccgtgtgcagccagtggcaccttggcacgctttggcagcatctgctgctgccgctgccgttgccgtggctgctcaacctgatgcacccgcgcacctaccagaacctcgccgccggcgtggtgcaccaaatccccaggagagcacgcacgtgctctggtgtctcttcctacgacaatggatggctcatgggcagtaacatgaccgggacatattacgactaa

SEQ ID NO: 61488 - DNA, 1631 bp, Oryza sativa
  Clone ID: PAT_MRT4530_62917C.1
acggcgcgaaccgcttcctacgaaaccgcgatctctcgggcggcaagggcgcggcccaagggtcgaaggaggctcggccaagccatttgggccggcgcgggcgcaggaaaggcggcccattagggcgcgcggaagggggagggagcggtccggtggaccgggtgcacctcgcggggtcccgggtggggcccacatgtcggcggcaaggttcatggtggggagagcgcacgcgggtgcggtgctagggtttggtgggtgcggctcacgattggtgcgccgggtggacggatggcggcgggcccacgtgcagccgcacggtttgccgtggaccgcgcgcacaggagggaagacggagagaggaggctgactgggcgcgactcgacccagtcaagcgggcccggggctgaggtggctgccacgtggccggccacgcaggcagggacgaacggggaggaggaggaggaggaggaggaggcgcccgggatcggacggccgacgacgcgcgaggcgttccggcgagcggcggcgaaccggagcgagcggctaccgccggcagctagaggaggtggatccccgggagcgtggcggcgggaggaatcgacgtgagaggggccgacgacggtggattgcggcggcggccatcgccggcggagagaaggggaaatcttcgaggggcgatgaggactcaattaaaggcggcgggagcatctccggtgttcaaggagctcatttccggggtcggatgggtctgagcggcgccgtggaggtccggcgacgagaggcggcctccgggagtgggcggtaatggcggcggggccatgccgggtggcggcggtccttggggcggcgtctacgcgcgttcggcaggtgagcagggaaggggaacgggagggaggcactaccgagccgagacgggcgctgtgacgagcggccgacagcgcgggagcgagctctccggcctcgggccggggaaggggaggaagatgggtgcccggagtcccgcgtcacgcgtcctcgcacgcaccggtcttcccggtgctcggcggcggacggcgacggcgagagcagaggaagggcgacaatggggagaaccgaccttggcggtcaagcgctcggctggcggcagcggcggtttcgtgggcgatgcgaaagcggcgacggcgtggatgcattggacggcgaaggcggtggatcgtgcggcggaaatttgaaccgcgggagcgggaggagcagcgccggctggcgcggggcgagctgacgctgggtcaaggtgggggcggcgagctggcggtcgcgcccgtggtccaggcggtggcaggcggtgacgccgatgcgtgcagctgcagcgcgacagggcagcggggccgggaggcgtaggcgcggcagggccgacgcggcggcgaccgggcggtcggccatgcacgagcgcgcgtgcgcggatgcgagggcgcggccggatttcgaacggcggcggcgggaaatcggcgccggtgggagagcttttacgggagagagagagaaacggagagagagaaagaagacgagagagcgagcgcacgcgagggaggaaggagcggctgagggagagagatgggccgaggagaaaacggcccacaaaaatccgagggagg

SEQ ID NO: 61489 - DNA, 358 bp, Oryza sativa
  Clone ID: PAT_MRT4530_62918C.1
gcccacctgtcagtgggcttctctgacctcactttccctcttctctctccagcaaccgaagcggcgacgggcggggcggccggcaagaaaggagcggcgcgcgggtgccggccggcgggaggagaggagcggcacgcgtgcacgggctgcggttggagaggagaggagcaggacgcgcatgcacgggcagcggccggagaggagaggagcagcacgcgtgtgggggaggcgtcgctgaccacacccgggaggagaggtcgccgaccgtggccacgtgtgcgagggaggcgtcggccatagagcgcgcgagctcggtggcggagatgaagtcgttgccgccgccggcctccccgccccc

SEQ ID NO: 61490 - DNA, 110 bp, Oryza sativa
  Clone ID: PAT_MRT4530_62919C.1
agagagattgtataatatatactgtagaatgtgagagacccataggtcagacattggtcatctgttgaatgctatggatgagcgagcacatgttcgaagtagcattgttg

SEQ ID NO: 61491 - DNA, 195 bp, Oryza sativa
  Clone ID: PAT_MRT4530_6291C.1
atgaggtacggcgccaagggctcagggctaattcgccaagggagtctaaaaagagttttcggcaggaacgtcggccgaaagggggcgcctcatgccatactgcatctcgggcgaagggcatacggcgaactacaaagacttcgccatgacgagttcggcattaaggaggcccagcaggctgcccccgacctttaa

SEQ ID NO: 61492 - DNA, 831 bp, Oryza sativa
  Clone ID: PAT_MRT4530_62920C.1
atggcgtcacttaccggcgcacgacggggatggggctccggcggcgaacctcgacggaggagggatggacgaggtggacctcggccgcgcgaatccaacggcggcgacggcgcgacaacagaatcttctcctccccatcgcagcaaaagtggtgtagagatccaatatgctccaggacttattcccaatggtggtggcttagctcccccagtcatcggctatcatgcccccaagacctcaactctactacatggtctgtcgcgtgtgctgattgcagctgatgttggcaagaagagaaaaacaaaatcagctgctgctccatcggctgcaaagaagaagcccaagaagcaaaagactgctattgatgacctaccaaccgtagatccagacatagaagaattcctggagggtgaggaattggcagaagctgtagatgaagcggctaaaaatcttagtgaaacaagggtgcaaactcctccacctgaaattcctgctcctcaaagaactccatcacctccagtgcgtcccagttacaaaccaagggtatgcatggcttctatcaacgaagagaaagctaaacttgatgaattagaggctggcccaagttctactcaagctaacatcaatcggctgaacgcccggacgatagagctcttggctgagttggagcaatgcagtgcacaaatcactcttgaagaacaaaagcttgtcgacttaccgaaagccattgaagaccagaagtcaaaattaaaagcatatgtcaagcacttgactgacctgaccaaatctctgaaggtcctaaatcgtgcttttaggttcaaggcgatttga

SEQ ID NO: 61493 - DNA, 2259 bp, Oryza sativa
  Clone ID: PAT_MRT4530_62921C.1
atggcgactacagcaatagggggatggatcgcctcagcctgcatatcaaagctggttgataaggtgtgttcttatgcaggagatcagtacgaataccaacgggaagacacaaaggacaaactgagaagccttaaggagagtctactgacagtccaagaattggtatgcagagctgagagattgcaaggtagggaaacaaacattgcaaatcagttaaggggaattaaagatgctgcttatcaggctgaggatgttctggatttatttgattaccgagttctagaagcacaggctgaagtcatggacaaggtgaccactaaagctcaagtcatgggcaaggtgaccactaactcaatttcatctgccatagctggttcttcttcatcctgttcctcttcatcatcctccataaccacccttagcagtgattcaacagtaaaacggtcagttcgtgctctcaaacgattccttttctgtgatgaagatctcactaagttagctgctgcagtgactatatttaatgagattgatagtcggatgaaaacactcctggagttactgaagctagaaaacagggcaccagaacatccagttcagtggcgcacaacaacctcgatgctggacaccacaaagttttttggacgggttagtgaaggtaaacacctaaagaagttacttattcagaaaaataaaaagtccagtcaaccttatgatgttatatcaattgttggcattgctggtgtcggtaagactgcgcttgcacaaaaggtgtatagcattttttatgataaagagaaacactttgattttatggcatggctccatgtttcaaataaattcgacgttgaacgcctaataaaagagttggtacagtcagttcacctttgtacagctgctgagttgagcagcatcagtagtttagatcaagctcagaggatacttaaggacaaactgaaaggtagcaggattttggtagtatttgatgatgtatggaatgaaatgagcagccagtgggagaatctgtgcaagcctctgcagtctaccagtaaaggcagcaaactaatagtaactactcgaagtcaaaatgttgcaaacattaacggggcaaccgagatagtgcatttagatggcctagaagatgaagactactgggaacactttttacagtgtgcctttcatgatgcaaatccatcccaatttccacaattggaaagtattggtcaagaattggtaaagaagttggctggttcacctttagcagctcagacagtagggaacttattaaagtttaaactagatgaaaaacactgggagacagtcaatggaagaaaattgtggcagatagaacagaaggaagatggtattatgccagcactgaggttgagctatgtgcgtcttcctgatcatttgaagcagtgcattatttattttgccttattccctaagaattaccaacttcgaggtgatgcactaataaggatgtggagagctcatggtttcgttaacaaggaaacaccagatgaaaccgcatatcgttacatcaatgatcttttacagatttcattcatccgtaaggttgccaatatagaggatcattatgttgttcatgacttgctacatgattttgctgagtcaatctcaaatggtgaacacttccgtatagaagatgatttccatgtcagtattccaacaaatgttcgccacctatatgtcaatgcaagcaacatatctactgtgtatgcaagccttgaagaaaacatagaaataaagaaaaatttgagaagcttaataatatgcaaggcagatgttgcctcctggagctggacccgcacatctaatttcaactatgctctggaagaaacactgaaagagttaggaagcttacgggtattagtgctccgccatcctgctggtgttctgccaaacaacatccagcatatggtccaccttaggtatctggacatcaaagaaagcagagaatttacctttctgcctacatcgttatttggactctaccacttgcaagcattgagtctgcagtctcggcataaaattgattggcaagctcacattcctccaggaattcaaccatggcaatgcaaagaaaagaaaaagaacagcatcattatagaaaaactcaatcaagaatgcatatgcgtgcactcagccttttatggacaactgggtcactgcaaaaaactagtcagaccaggaacctcacaccagaaaaaagttcatactgcaccgtgttatttctaa

SEQ ID NO: 61494 - DNA, 412 bp, Oryza sativa
  Clone ID: PAT_MRT4530_62922C.1
tcggtcttcgacgccgaggggagagagagagaggccgcctggacgaacataccactgactggctcccactcgccagagcgccccgattgcggtcgggtttgatcgatggcattcatgcggatcctgatggagttgcaggacctgcgtaaggaccgtccaacatcatgcatcgcaggacatgcggttgaagacatgtttcattgacaagctactattattggaccatcatacaaagcactagctggtcgggtattctatgagaacattcattttccaccggattatccttttaaaccaccgaaggtctgtttccgtaccaagggtctccacccgatcattaatagaaatggcagcatgtgcctcgacatactcaatgaacagtgaagtcctctacttaccatatcaaaggttc

SEQ ID NO: 61495 - DNA, 749 bp, Oryza sativa
  Clone ID: PAT_MRT4530_62923C.1
cacaccgatacatcgtcgagaccaacacatagagagatcgacatcgatcgccttctaacttctaagttgtgattgagatttaaaaccgagaaccatgggaggcgggcatgacatgcacggcggcggccagaacggcggcgtgaaggggctggtctccaagctcgtcggcggcggtggccatggcggcggacacggcggcggacacgggtacgagcaaggctacggcgggcacggttaccctccccacgccggcgccgcccacggcgcgtaccctcctcagcacggcgcgtatcctccacagcacggcgcctaccccgggcacggttacgtgccgggagcctacccttcgaacgccgcgccacatggagggcacatgggatcgtaccacaccggccatggcggcggcggcgggcgtcactacggcggcaagcacaagggcggcatgttcggcggcggaaagtggaagtgaagcggctagctagctctacgtacactatacgtgcccaccagctttctgccctgctacacctacgtataatatctgcacgagtatgagtatcaaccatgtggcgtacgcgtatatatacatacctaattaagaaataaataaagtgcatgcaggcagacagatctgtgtgtatacatgagcttaatgatcagctgatgagttgtgcaaattaagcatgtggtgacgtatatatactttgtgtgtactgatatacgtacactttgcaaaaaaaaaaaaaaaa

SEQ ID NO: 61496 - DNA, 1146 bp, Oryza sativa
  Clone ID: PAT_MRT4530_62924C.1
atgctcaccgccgctccgctcctctcgccggcgccggcgccgccgccgccgccgccgcggtgccacgtggcgatccccctccgctgccacgctccaacccagcaggttgccgccgccgccgcggatcgtggcctcctcctccgcggcgccgggtcccccgtggtgaagcgcgcccccggcggctggctcctctggtaccagtgcggcgcgcgcgtcgcgctcgccgcgtccaccgacggcctgcgctggggcccacccgtggagcccgaccccctcgtggcctccaccgactggtgggcgttcgacaccgcggcggtccgcccctccgacgtgctcctcttctccggccccgacgcctccgcccgcagcggcttcccgtcctccgccgtgtactggctgtactactccggctccaccgacgagcggttcggctccccgttccccgccgccgccgccgccgccgccgcggaggacgtcccagcgctgccggggctcgccatcagccaggacggccgccactgggcccgcattgagggggaccaccacaccggcgcgctgctcggagtcggggaggaggaggagggtggcgagccccgccgagggtgggaggcgcgctgcgtggcggctcccaaggtggtgctccacgccgagggggacctgcggatgtactaccactcgttcgacgaaatgtctcaaaggcacgcgattgggttggcaaggtccaaggatggcgtccggtggaggaaggcgggcaaggtgctcgagggcggcaaggctgggtcgttcgacgaaggcggggtgcggcacgggcatgtcgtccgggaccgtgcagctgggcgctatgtcatggtgtatgagggtgttgatgccaatggacgggtgagcattgggatggctgtgtcggaggacgggctaaaggggtggaggcggtccagtgagttgccaattctgcgcccatcagacgacgatgaggggtgggatagcactgtggttggatccccgtgtttggtgcagatggatggagcatatgattggaggatgtattacacgggtgttgggagggatggtgaggctgcgatcggaatggcatattcagaggggcacggtcttcagaaatttgagaagtgggatgctgtcctcatgtaa

SEQ ID NO: 61497 - DNA, 1138 bp, Oryza sativa
  Clone ID: PAT_MRT4530_62925C.1
ttcgctaggaaggaaaagaatctaagaaatcctctcctctcttctcctcctcctcctctcctcgctcgtggccgccaccatgtcaggcggcctctacaaccaccagggtttctccccggcaagaaccctctcgccccagattaggagcaaccccgaggccgatagccagtacttgagcgagctgctcgcggagcatcacaagctggggcctttcatgcaggtgctgccgatatgcagccggctgctcaaccaagaaatcatgcgggtatcaagcatggtcaacgaccatggattcaacgattttgacaggcgtcgttatagaagtccgagtcccatgtcttcgccaattatgagacccaacctacatggcaatggatttgggccttggaatggcatacaccaagagagattaggctttcctcctcctcctcctcctgggacaagtatggactggcaaggcgcaccgccaagtcatggctcttatattgtcaagaagattgtacgcatggaggttccagttgatgcttaccctaatttcaatttcgtgggacgtattctaggaccgaggggtaattctctaaagcgggttgaagcatcaactggttgtcgtgttttcattagagggaagggttctatcaaagatgctgataaggaggagaagctgaaaggaaaacctggctatgagcacctcaatgatccactgcatatcttgattgaagctgagttgccagccaatatcattgatacaagattgaggcaggcacaagaaataatggatgaactgctaaaaccagtgaggtaccaccccatacaagtcatggtaacttcacctctccctctcattcgcagcccagtggcagcacttttcattggtcctgatgtcctcattgttgcaactgtggatgcggtatgtctatacatctggcactgtggtactcatcgtcccaaattgcagtggatctgcaatgttaagtttatgatgaagggcccaaaggatgagtcgcaagattactataaaagacaacagctgagggaactggcaatgctgaactctactctgagagaggacagtcctcatccaggaagcgtctcccctttcagcaatggtggcatgaaacgtgcaaaaccgagccattag

SEQ ID NO: 61498 - DNA, 479 bp, Oryza sativa
  Clone ID: PAT_MRT4530_62926C.1
ttcctcctcctcctctcctcgctcgtggccgccaccatgtcaggcggcctctacaaccaccagggtttctccccggcaagaaccctctcgccccagattaggagcaaccccgaggccgataggtacggcctcgcccgcttccgccgccgccgtggattgctactgtgtttcttgctgattctttgatccaaggattgcttcttgctcttggttgcgtgcccttttttcgatttgtttaggtgattggttgtgcgatttcttgggttttgtttctttttgcagccagtacttgagcgagctgctcgcggagcatcacaagctggggcctttcatgcaggtgctgccgatatgcagccggctgctcaaccaagaaatcatgcgggtatcaagcatggtcaacgaccatggattcaacgattttgacaggcgtcgttatagaagtccgagtcccatgtcttcgccattatgagacccaacct

SEQ ID NO: 61499 - DNA, 342 bp, Oryza sativa
  unsure (1)..(342): unsure at all n locations
  Clone ID: PAT_MRT4530_62927C.1
tgccnctttctcgtgccgaattccgcacgacgttgggtgagtggtcnatcgatcggaaagtgttcgatcgattgcttgcctgctttgtgatggaattggatctgaacaacctggcngaaagggtggtgganaacntgaaacgcggcgaagacnactcccgcacntctgantcgtcggtgctcnacngggaagcgtctggcgcggccatcccgcccgcggaanaagggtctaactccacaccnccgtcnccgccgccgcctcccgcggcggtgctcnanttcngcatccnganganctccgcgtccgcgtctggcgaaaaccacccccaccaccaccaagatg

SEQ ID NO: 61500 - DNA, 206 bp, Oryza sativa
  Clone ID: PAT_MRT4530_62928C.1
aagatgttaaagtcattttatttcagttaatcataactgtctttaggctttgaactcagagtaaggtgacttggtcaatgggatgtccctccacaagtcaggtgtaaggtaagcgtaggtcttggcaatagccgcataagtggcctagcgaagttccaagagtgccagtggacacacgagctgagtgtacgagtcctggacacagc

SEQ ID NO: 61501 - DNA, 118 bp, Oryza sativa
  Clone ID: PAT_MRT4530_62929C.1
cgtgcgcttgtccttctgctagacctggaccactagtttaagacccagacggctcactgcctgagctgggcgactgttactggaacctcattccctaactacaagccacgccccattc

SEQ ID NO: 61502 - DNA, 366 bp, Oryza sativa
  Clone ID: PAT_MRT4530_6292C.1
acacccttattgcaaaaacattattttgttgcttatttttttagtgtacacaacaccaagctcgaacatcatgtccccacactaaacccattttccccgacccaaagacaacccacctggtggccacaaatggatacaaccacaatccaccactggtaagatacgggcccccagtggacttgcgggggacgaagaaggtggcttacgggcaggcgttgatgctgacggagtcggcgaggagggccgccaggctgtcggggggggccttgccctagacgatggcctggaccaagaagcccaacatggtgaacatggggaggcgggcgatcttgatctccttcaccgtgaggtgcgagaacgccttgg

SEQ ID NO: 61503 - DNA, 407 bp, Oryza sativa
  unsure (1)..(407): unsure at all n locations
  Clone ID: PAT_MRT4530_62930C.1
atgaaaaaatcctcgtctttgctctccttgctattgctgcatgcagcgccactgcgcagtttgntgttttaggtcaaaatcttaggcantatcaggtgcagtcgcctctcctgctncagcaccaggtgcttatctttttttttgagttcgtagggcancngtntgggggggcggggggcgccttcttgccctcngctgcgtttcnnctgnggggcagccgtgtcttgtcccagctcttgctggtggcgcttctttctctcttccaggtctttatcgttgttcttgccttttcgcaccagcttcacctcctgctgtttggcggtctcttcgttgnccgggttctggctcttgctcttgctctgttggcttttgccttgcctttttcctctggtgtcctcccttggtcc

SEQ ID NO: 61504 - DNA, 600 bp, Oryza sativa
  Clone ID: PAT_MRT4530_62931C.1
atggagatggagatggaggtggaggtggagctcacctggatggcgctgttccagcggcgagtggtcatggcggacgcgcactgccacaaactccacgggcttctgcgcgggctgttcggtgtcctcgacgggcaggcgtggcgcgagatggtggccgtggcggaggagacgcggcgcatgctggagtccgcctcgacggagctcggcctcgccatcgccaacatgggcgcggccaccctcctcgcgcccggcggcgaagcgcccagagcgtgggcgccggcggtgccgctccgctccgtcgacgacggcggcatcgacgtcccccgcgtgtggctcgtccacttccggctccaggtggccgccgagaccgccaggcgtttgcacgaccggttggaggccacccgcgtccacgtgtgcgccgccgagcacctggtggcgctggaagaggacgacgacggcggcgatgacgatatggctccgtggatgcatggcctctccgcctccgagcaaatcgacggcctcatggaactcagagagacgctcaacctggcggtggacctcgttgccatgaccgccatggcgcgggaggaggtgttctga

SEQ ID NO: 61505 - DNA, 202 bp, Oryza sativa
  Clone ID: PAT_MRT4530_62932C.1
aaggacaaaggggtcgcccccaaggggttggttgaaaacccattccaacgggtcgggccaagacccccacaaacggggactaaaaaaaactttaaccgaaaaaccccgggggggtttgggaaaacctcttacaaaaaaaaaaggggggctttttcccaaacaccaccccgcgtcccaaacccccccttaacccaaaagcggg

SEQ ID NO: 61506 - DNA, 423 bp, Oryza sativa
  unsure (1)..(423): unsure at all n locations
  Clone ID: PAT_MRT4530_62933C.1
ccaaaaggagaatagactgaggaataggggatatgatataggtaactgagganacctgtgtgttgaaagcgtgatgcaagccgatcctgggctgtgacggaatgttgatgccgactgatgcacaggaatgtgcctgaaggtgtnttggggccggaatggggaattggctgatgtgctgtgtgctgactgtctgcggagggtgatnaatggaccagatgcgagaagctgccgactgaaactcagaattgggggggagaagtgcttgatgntgtgatgatgatggtgaatgcgccccgcctgatagcggtgaatcgccccccctatagttatagtaccccaattctatcttgaacntcctgattgtgtgtcaanccaaaagaccacgtgtgttgtttgatcttggaaaaaaaaaaaaaaaaaaaa

SEQ ID NO: 61507 - DNA, 1119 bp, Oryza sativa
  Clone ID: PAT_MRT4530_62934C.1
cacataagaaaactgagggaagtagacttacaatctctagtatacaaggacggtgccaggatatataccggggtggaatagaaaatttttcactgctacgggcagagaggttctagtaaagacaaccctctcagcaacaccgatctatcatctcactatgcttccacaaataaaatgggttttcaaaagaattggtcgtttcagaagagctttgatgtggaagggagaagatcctgaaaattacaactggaaagatgatccgaaaccctgggcaaatatgaacctgccatgtgatgaccttgacatatgcttgtttagggtaggaacgaaaattgagcttggcgacggcaacaggatttccttctagtcagacaactgtcttgatgggcagtgcccgacatagcaccatcaatcttcaagctcacaaaaaggaaatgaaatagtctaagatctgaactaaacaataaccattggcttgctatgcttaatccaatcacaacggtggaggaaatacatgaacttgtgcagttaggaggcagactacaaaatgtcattccggagaatggagtgccagatgacgttatatggaaatggacagagaatggtcactactcgagaaaatttgcatacctcgcacaattccaggggttaactacaaacaccaattatgagcctctgtggaccacaatcgcggaaccaaaacgatgcttcttcggatggcttgtacttcaccaaaaaacactcactgcggaaaacttacttcgccaatattggccatgtgattggatcttcagcttatgcactaatgctttcgaggacacaacacaccttgcaaaagaatgctcatgcaccgttgtggtatggaatcacgtgtgcaattgtatggacatcctggttccacaaccacaaatggcgcataccattgaggactggtggagcgaactttgcaaggtcgtgcctaaagcaagaaggacgcaggttctgggagccttgttgacaacatggtggaacgtttggctcaaacgcaattgaagaatcttccaacacttgtcaaagaatgaacttcaagtgactcttttagttaaggatctgatcttgttagagttgctcctttcagtg

SEQ ID NO: 61508 - DNA, 342 bp, Oryza sativa
  Clone ID: PAT_MRT4530_62935C.1
tacgaaattctctctgcaacccgagcggccctttagacaactggctcatggcaagcctgaaggaccctactgtagcgactacggcatcgaaacatataacctattaatattcttaggtggcctatacatgaacttgaacgactacaacctgtacaggtgcacgcgaattttttaatgcagagcatctaactgccactgcgacaatggtaacagatagcaaccgcccacctgaactagagcagcctccagcaaggacgaccacagaaacgcccacagcaatagtccactagatgtgcacgacctaatcactcaccatatattcaaccccatacgtgtgtaaag

SEQ ID NO: 61509 - DNA, 1403 bp, Oryza sativa
  unsure (1)..(1403): unsure at all n locations
  Clone ID: PAT_MRT4530_62936C.1
atggagcggatgccggggtgcggtgggacgctgcgatgctataggtggcagcggcgcagtgcgggggcgacggaagcggcgacggcgcgcgactggagggtcgtcggcgccccggagggggagatcgtggccgtggcaggcggcaacggccgacggatggagctccggcgacgtgggcgagtggggctcgaacggcgccgatttttgggggggaaatggggaagaaagtggaggaaggggaggacgtggggtggaccacgtctgcacgcgcgcgggagcgtggaggcgcgcggaggaagcggcgtcgtggggtggctcaagcggccatggcggcagttggagctggaggaaagggatgacagctgccccatgtcggccgaggttatgcaccgccgtgccctgcaccgatgcctccgcaccgcccctagcctagccggcatccgccgtgccctgcgagcgggcctcggccgcgccctgcgccggagccggtggcgtgctcccctcgagccctccgccgccgccagctcgcccttcgccgagcccaatgtcgtgccccccgtcgagccctccgccgccgccagctcgccctcgaggtcgcccgccgcaaggggaaggattaggaaggagaagacgaaggggaaaggaggagaggagcgaaaccctagggccaggcaggcatctccctcccgggatctcgacgcccagcaaccggaagccatcggcatggctatggcgctgcgctctctcgccgggaagctcaggccgccggtggcagccaccctccgccgggcgccggcgtcgagctccttccaccccgaggagaagctgagcagcatgacatcttctaagactaaaactcctgttgatgacaactgttttgaattgcttggggacaagtattttgaagagcggtctcggatttttgcccaattggttaaggaagatgcacggcgcacggaggagcagatcgctgcatacaagaagctgaagagggcaatggttgcttctagcttgggcgcagcgattggaatttttgcccttctcatcagatataacgagtagtatatctgatactgttgtctagtactagtctcttgagttttagatgatcaccagctggcctagtgcctttatctattttagagcactctgtttatctgattatgcagttaattttggtgttgcacactggtactgctatatcgctgtcccagaatattggaggaacttaattaagagccctctttgcttgtgtatcattgaacatggtaagtatccctgtcatgtattttcttcttcaagacaaatttcatcctttgtatgctacagacgaacaagcgagccaaagcaacagttatgagcgtgatttatnccaaaaaaaaaaaaaaaaaaaaaaaaaaaaa

SEQ ID NO: 61510 - DNA, 375 bp, Oryza sativa
  Clone ID: PAT_MRT4530_62937C.1
gcgcggacgcgtgcgctctctcattgccatcggtaagctcatatacgcgcaggtatctgagctcgcgagcgactgatacatcaacgggggaacttgcaacctgtccctaggacacaaccccaggtaggactatggcttcatgggcacggaaataggcatagcgtcctactgatccaagctccaggtcttggacaaaccattgaccaaacatgtccagagtgcgtagcaacacagccagaacgtcggactggttgggatgatatgatccatgactactcgcaaggccatcgacatactagaactgatggcctccacactgttgagcgcactgtgccaaaccataaacctgcgccaccgttaggagaacacgaatac

SEQ ID NO: 61511 - DNA, 684 bp, Oryza sativa
  Clone ID: PAT_MRT4530_62938C.1
atgacgagctccgccgtggagaacgcggccaccggcgagctacggcgtggggcatggtcgcatggacggcggaggatcctacgtggtgatagagacggcgccggcgacgagctctggcgtggggcatggacggcggaggatcctgcggggtatcacccgataccggctaggtatcaggacctgatacctcgcaggtatcacccgataccggctaggtatcaggacctgatacctcgcagggatgcactctcatccttaggctacgctcggcggcagatgatgcctttcgtcgctccacccattggcgattcggaggctgagctagctctcccgccgatgaggcgccgcgacgcgaaccgcagccacgggttgacgcgggcggcgcgcgtggataggccgacgggtttcgacggagattgccaggctatgcagcgtcggggcggcgtaggcggcgtcgacggcgtcggcggcgcacggttgggaggggtcgcgtcgtgcgccggacaacgaggagagctcggggaggctcgtccagacgcggcgccatcggcgggacaggaggctcgtgcgcgccgcgtcggcggtggtcgggagaaggatgctgtggaggagctcttcggggaggtcgctgatgcggtcgtcgccgccatggaggtcgctcatgacatcaatttgcttgtgtaa

SEQ ID NO: 61512 - DNA, 477 bp, Oryza sativa
  Clone ID: PAT_MRT4530_62939C.1
atggcggcggaggtgtggaaggcgcagttcgggaggcttgtggaggaggcggcgatccgcgtcgatggcgtgcgtgagagcctccacgccttgctgccgcaactgacgtcgtcgtcgtcgtcgatggtcgcgggcgatgcgaacaccgtgcgagatacgatccagctcgcgctggacgcgctcggcctcggggatgagagctcggtgaactacctcgcggagcagagcgccgcaatcaagctcagctacgccgagagtgacgcccggaaggcgtacgcccttgtggacgggtgccgcggccacctcgacgcggccctcctcctgctggaccatgtaggtcgtctaccagacgtgcagggcatgatcaacgccgagcgcctcgccgccgtcgccgacctcgaggccgcgatagtggccgttcagcggagcgccgagatggccaccgccgcccggcaggacgtgtccggcgccagttga

SEQ ID NO: 61513 - DNA, 2203 bp, Oryza sativa
  Clone ID: PAT_MRT4530_6293C.1
cccacgcgtccgcccacgcgtccgcggacgcgtgggtcctctcctcccccacccggcctcccccacctcactcctcctctctcccccggagccctagccctcgccctcgcctcccgctcccgccaccccgccgcgccgccctcgtcaccgccgcgcaggaccctcggtggcggcgggccatggcgtcgctggccgtctcggcgtccgcgtcggcgtcgggggaggaggtgacgcacctcgcgcagcgggaggcggcggagatcgacgagcagctcatgggcccgctcggcttcagcgtcgaccagctcatggagcttgcggggcttagcgttgcggcggcggttgcggaggtttacaagttgggtgaacatacaagggtgctagtaatctgtggtccaggaaataatggtggtgatggtctggtagctgctcgtcatcttcatcactttgggtacaagccttctgtatgttatccaaaacgcacgcccaagcctctgtattctggcctttgtactcagcttgaatcactaacaatccctttcgttcctgttgaagacctacctgcaaatttatcggaggagtttgacatcattattgatgcaatgtttggtttttcgtttcatggaacaccaagaccaccatttgatgatcttatcaacaggcttgtttcactgagtgctattgataattctgctaaaagaccagcaattgtttctgttgatatcccttcggggtggcacgttgaagagggagatatcaatggaggagggtttaaacctgatatgctggtatcattgactgcaccaaagctctgtgcaaaaaaatttaccggtccacaccattttcttgggggtagatttgttcccccacctattgtgagcaaatataagcttcatcttcctccatatcccggtacctcaatgtgtgtgagaattggaaaagctccatctgttgacatttcatctctaagagaaaattacatctcccctgaacttctcgagaatcaggtgatgcctgatccatttgatcagttcgttagatggtttgatgaagctgttactgctggtctacgtgaaccaaatgctatggctttaacaactgccgataaggagggaaaaccttcgtcaagaatggttcttttaaagggtgttgataagcagggatttgtttggtatacaaattatggtagccagaaggcacatgatttatctgagaatccaaatgccgctctgcttttctactggaatgagatgaaccggcaggtaagagtagaaggttctgttcagaaggttccagaagaagaatctgagaagtatttccacagccgcccacgagggagtcaacttggtgcaatagtcagcaagcagagcactatcattcctggaagggaagttcttcagcaggcgtacaaggaattggaacaaaagtattctgatggcagcgtgatcccaaaacctgattactggggtgggtacagattaacaccaaaactttttgagttctggcaaggccaacagtctcgactgcatgaccggcttcagtattcactgcgagaagtagataggagcacagtatggcacatcgagaggttgtccccttgactagtaaccccatcccagctctttggtaataaaaaggatctcatcttattatcaagaatcaaatcttatcccagctgcaaggagtcccaattgctcgatgatgttagtgccatgattaggtcgcgtgtttgagactgtgagtgcctgaagctctgctttttgacatgcccttcacacatctgatgttctctgaagcacagagtggatgaatccatgaaggcccttctcttggtcataagatttttctgtaaatgccattaaattttaaccgtcctgtagaaagaattatgatgagaatctcattatctcagcctggagaagactgttggacataggtcgacatcgtagtatatcgaagaaataatgttctgggaggaaataagtatttatcagcatcaagcatataagtcaataaagttgtgtgctgcaatggcattgtctgctttaccagtttgctgctagctaatagggctttgcgtgttgcgtctgtgcctattatgatagataaggctgtatgttttgggtcattcactctggtgtaagcatcgtcgtgcagttgcacaatcactgagattactagtaactctggcaagtttggtagt

SEQ ID NO: 61514 - DNA, 1099 bp, Oryza sativa
  Clone ID: PAT_MRT4530_62940C.1
atgaaaagtgtgagactaatcacgaaagacattgttagacctgcctataaccgcgggcacggctattcgaatagttttactctggccagaggtgtaccactgtacccacaagacacgattccacacatgttaccatgccctgaagtaccaccacgccactgcaaagggggaaatcgtgacagtacccttcgcacaacacaactcaaagcagtgcaccgttcctggatcataatcacccccttataaacacaaggcatggactccccagcgacccccgtgggcttatctccgccacttctcaacctgaaaagaaggattattgcgtcagcggctagggtttgcggtggaccgggtgcacggcagcggctcacggaaacgaacggccgagatcaaccctatccaaaacggacggccgagatcaaacggtccacgaccggcttacggcggacgatcccgatgacgtcagcgattcgggcggctcgggcgcgcatgctcgccggcgaacgacggcacgtcggcgcgaacggagggcaccaacgggtagagggcgacgcggcgaactcaccggtgaccaaaacaacggcggaagggcaacggacggcgccggcgacgaggaagaagcggcggcggagaagcggacgaggacggcggcgacttgacgaccacgatggcggcgacggcgactgacgacggcggctgcaacggcggcgcgacgcggctgaaccgacggcaacgacggcggcgactagggctacgcggaggcggcgctagacgcgacggcaggctaaggcaaaggtggcggcggatagaggagagctcgggggtccttttaaaggggctagcgagcggcgatggaggcccacggcgaccggcgacggcgaaggaaagctagggttcggaggagagaagaatccgattcgacctcgattccatcgagtttccaaaccgaattaggtgacgattccaaaagagaaaaggaagagggaatcaagaggatcatttcccctctatcaattcggccggagatggaaaggagcgacggaattggaaagcgacggcggcgcggctcggctagggtttgcgggcggcggcggccgaa

SEQ ID NO: 61515 - DNA, 883 bp, Oryza sativa
  Clone ID: PAT_MRT4530_62941C.1
ctatccaaaacggacggccgagatcaaacggtccacgaccggcttacggcggacgatcccgatgacgtcagcgatgacggcagcgatgacgtcagcaccggcggcgactcgggcggctcgggcgcgcatgctcgccggcgaacgacggcacgtcggcgcgaacggagggcaccaacgggtagagggcgacgcggcgaactcaccggtgaccaaaacaacggcggaagggcaacggacggcgccggcgacgaggaagaagcggcggcggagaagcggacgaggacggcggcgacttgacgaccacgatggcggcgacggcgactgacgacggcggctgcaacggcggcgcgacgcggctgaaccgacggcaacgacggcggcgactagggctacgcggaggcggcgctagacgcgacggcaggctaaggcaaaggaggcgacgggtagaggagagctcggggatccttatataggggttggaaggcggcggcgaaggcccacggcgaccggcgacggcgaaggaaacttcgggaagaacgaatccaaaacaaactcgaatccatcgatttccaaaccgaagtagaggatgattccaaaagggaaaaggtggaggagatcccggagattgtttcccctcaatcaattcggccggagaaggaaaggatcgaccgaatttggaaagcggcggcggcgtggctcggctagggtttcgggcggcggccgacgcgaggaagacgacgggtccgacaggcgggccccacctgtcagcgacagcgagagagagaggagagcggcggctcggcagactgggccggactgggccgaggaggagagagagagcggttttgggccggctttcggcccaaagccaaaagaagacttt

SEQ ID NO: 61516 - DNA, 455 bp, Oryza sativa
  Clone ID: PAT_MRT4530_62942C.1
ggagagattgctctggtaaagcaaggtccaaaagcagatccttcaaagtgtgaagcaccctgaagaaatacacacatctaccactttcaggtgatatgtcactgtccttattattagattgtgactacatggatcacactgttctcataagccctacatggattacatgatcgttgcaaggacattttcagtctactgttgaaaatgtacactaattcgacgatttttcgcatgcagtagaacaaaacttttgttaggatctaaacttgttctctgtggattagaaacatgttttgaggtagcaacaaacaaagtttccttgtctaaaagccaggctgatgcaggagataaagaccatacaacttctatattgtggaaagggccaaaggagtttgttatttttgagacagcctgacacactgctgtactgaaatccactgttatgcaagccaaca

SEQ ID NO: 61517 - DNA, 1440 bp, Oryza sativa
  Clone ID: PAT_MRT4530_62943C.1
atgtcgccaattggtgctgcagaggcaaggcggaggagatgccacggggtgagctgtccactgcgccgctatcactgttgccgttaccgccactttccaagggacactgcccaccgccaccaagggccgcccaccgccaccaagggccaccgccttttgccctcctccggtgaaagtggcacgaaatcaaaacattcacaattcagtggtatttttgcaaaggcgtacggattgatggttatagagttagaaagaaatgggatatgtctcatggcttctgcggatatccgaatagcactgttcactggatatccaaattattatccgtatccgacggaaaccccgataccatatccgtatccgtatccgggagaaaatatccgtattcgtatcctatccgagctatccgatccgaaagagagtgaggggaagctctggaaggagtgccccaaatatcgaagttccttcgagaattttacggaggagtctccccattgtcagatccgtcaccaccgcttcaccgtccgcccatgttcactgcccaccgtcggtcctctgccatccacgaccatccctctaagcatcggggacccctcccataagcccctcctaccacaacccaacaccctaatccgtatgtcccatgttggagttgggggcatcaccgacgccaaagaagacaggaagctcgtcgaagttggaggaagtgctcatctctatatctctcttttctctctctgtcgtctcatggcactgtgggtgaggtgggcccgacgggtggcgagcactatggacgtaggggcagggcgaggcgagaaggatgctgtgggtagcgagcccaggtgatgaggacgctggagacggcaggctatggcgcggcgaggagggcgaggtgggtggcaacaagattggctggtggtggtgggcggtggctaggaggatcttggaggatgctcctcgaggagggtagctcgagcttgcttggaggatgtccacggaggcaacggcctgtagaagcttggggccgtggcacgtcggagcttgggatagtggcgcgtcgaagcttgggcctccctgagctccccaccaccgtttctgccactctccgccctctttcctcgccggaatcgagtccgcgccgctctctctctccgccgccgccgccgccgagctctggtccgccgctgtcgtcgcccggacctcctcccttctcggcgccgcctccctcggcttcgccgcgtcctcgcctccctcgtccacccctccgtttcggtcgctgaccgttgaccccgtcaacccgagccgcaccaccgcctccctccactccggccatcgccgccgtcgcctcggggtgagccgtggaccgccgcctcctttcccccttccctctcctctctcggcctccgctccgccgtgccggtggtcgccagtggcgaccat

SEQ ID NO: 61518 - DNA, 1002 bp, Oryza sativa
  Clone ID: PAT_MRT4530_62944C.1
atggccatgtcgatgtcatcctcctcgccgccgtcgccgccgctgccaccgccggcggcggcgtcggacgtcgccgggacggacattctgctgtccctgctgccggagatcctggacgacatcctgacgcggctgccgctgaaggaggtggtccgcacgtgctgcctgtcgcgcgggtgggcgcggcggtgggagtcggcgtcgggcctcgacgtccggttccgcgggttctactccgccggcgccgttgccggcgtgctcgcccggtgcgccgcgcccgtggcgagcttcgacatcgaggtccgcccgcggctccgcccgcgcgccgcctactggctccgcgcgctggcggagaagcgcgtccgctcgctccagctcgccttcggctcctcccgcgccgacgagcccggcgtcttccccggcgtcggccgcgccatctacgcccgcgccgagctctccaacctctacctccgctactgcgagctcccgcgcccgccgccgccgcagccgggccaggggtcgttgttcgccgggttcccgcgcctcaccaggctggcgctcaacagcgtcaagctcccgttcgccggcgccggcgcgctgctcgagcgcgtgatcgccggcgcgcccgacctcgccgacctgctcctggtggacgtgatcaccggcgtcgtcgccgggggcgagaagaaggtggaggaggaggagccggaggcgtgggcgatccgggcgcccaagctccactcgctgacgctctggacgccggccgtcgacaacggctgccgcgtcgccggcgagctcccgctgctgaacgcggcgaacatctccgtcgacgccttcctcggaactgaagattttctcgacactctctggctggtttcgcgtgtgaaggtgctcaagttctctgtcagagacagggagaaccggaaggagtatgatttagtagtagtttttggactatgtatattggagatgatgaggaggatctttgtagagatttgttaa

SEQ ID NO: 61519 - DNA, 361 bp, Oryza sativa
  Clone ID: PAT_MRT4530_62945C.1
cccacgcgtccgcccacgcgtccgcccacgcgtccggatctttgtacatataataagctcaatgcatctctccatggtgatttttgtagatcaaataaacttatccccaaccagtttggttgtacagtcgatgatgaataacttattcaacaacaaaaaaaaaaaaaaaaaaaaaaaaaaaaaaaaaaaaaaaaaaaaaaaaataaaaaaaaaaaaataaaataaaataaaaaaaaaaaaaaataataaaataaaaaaaaaaaattggggctccctttttagaggatcaatttttactttcccttgctgtggatgcttttgttttttttttgtgacacttaattttatttcatgggccttt

SEQ ID NO: 61520 - DNA, 342 bp, Oryza sativa
  Clone ID: PAT_MRT4530_62946C.1
atggaggagatcgcgacgacgacgacgaccgagtgggcctctccgtctccctcgcggatccaccgttggctagccttgagaggagtggatcagacggtggcggtgctaggggaggcgaatccgatagtggtgggcaggagacgtgacagcggtggtggggaggcgcggcggtggaggatccgactccccatcccgcgcggcgacggcaatgaggacgagcggtggcaacaacgggaggggcgaacccggggccccctccctctcttgtgcaaatctccctgcccctaccacgacgaggacaacggcgacgatgtggacggcggcaacagctttgagcaatga

SEQ ID NO: 61521 - DNA, 5214 bp, Oryza sativa
  Clone ID: PAT_MRT4530_62947C.1
atgtcatggcacagggccggtgtcctgctgctaggggctcagtcctgcctgcctgtcccaggggttccggccgtaggtgggattgggtcagtactcttgtctatggctaggatgggttggaaactatgtcacgtctttcgtctatataccgtggtgatggccggcagcgtcacccgtcgtggtttggacatgactggtttcgtcttggagctgcggggcatgtgcgttgtcctggggtatccacatggggtggactaccagggcaggccgcttccggagcaggagggtgacgatgcagagccccacgctgcttgggaggtcactgcagtgatcctcgctggctctcccgagcggacttcgttggcagtcaccgcgggtggagattctttccccgccacttgccagagcgccgctctcctcgccatcggcactcttcaccagcgctacccggacgagttgcagcactcgcccttccgctaccaccctcgccgcggaggagcccgcgactacgccaccttccgggatgctagctcggaggatgacgctaccatcatgcacctggcgcgcatggtggaggcgtacgacgcggctcgtatcgacttccatcagatggtgcgccgtgggatggtcgagaacaacatgaagatcctggagctgcgtcaggagaacctgcagctcaagaaggacctagacgcggtggaggcgcagctgcatcagctcaagatcgcccagggagaggtctgccgccccaagcgtcgccgcgtctgccgcagccagaagatcaccgcccgcaagagcacctccaggcccgagcttgttcgtcagtccctagcgtggacttgcttcgtcgagacccctcgtgccgagcccgcgcccgtggttccccaggagggggaagcctccggcgttggtagcacggaggatgcgctgttgctcaccttccgtcctggcccgtcgcagcggagaagtgctgccaccggtgatggcaaccaacccgaaggcagcaaccaccaccaccagggcagcccacctccacctcctcctccgcctccaccaccaccaccagacaccaacgccattctcagccaaatcctcgcccagcaggccaacatgatgactgctttcctccaccacctccaaaatccgccacaacataatgctccaccaccacctccccaacactctaaactcgccgagttcctccgcatccgcccacctaccttctctagctccaacaaccccgtggatgcgttggattggttgcatgccgtggggaaaaagctagacactgtgcagtgcagcgatgaggagaaagtcatcttcgccgcccaccagctgcaggggcccgcatctttatggtgggaccatttccaggctacgcagccagaggggcaacctattacttgggctcgcttcactgccgctttccggagaacccatgtgcccgccggagtcatggcccttaagaaaagggaattccgagagttgaagcaaggcaaccgctccgtgatggagtatttgcatgagttcaacaacctggcccgttacgccccggaggatgtgcgggaagatgaggagaagcaagagaagttcttggcaggaatggaccctgagctgtccgtccgtctagtctccggggactatccggatttccaacgtctggtggacaagagcatccgcttggaagccaagcacaaggaactggagtcgcacaagtgccgcttggcgaatttccgcaatcaacagggtgctaaccaaagggtccgctacaccaatccctatccagggggatcctcctcgcagcagcaacaacagcagcagcaacctcgctccgcgcctcgacctcaattcgtggtgcgcgtcccacagccgcagcagcagcagaatcaacaagggactcgtgcgccccgtcctcctacgccaactgtgcagcctggtcaaggccgcagggacgctcaaggtccgcagcgtctgtgcttcaactgcttcgagcccgggcactttgcggataaatgcccaaagccgaggcgtcagcaaggccaagcgcctccccgctccaacaacggtgggaaggatgtcattcggggtcgggtgaaccacgtgacggccgaggacgtgctgacaactccagacgtcatcgttggtacgttcctcattcattccatccctgctaccattctgttcgactctggagcttcccactcgtttatatctgtgccattcgtggggagaaatcagttgggggtagaaaggcttaggaaccctgtgctcatcaccacccctggaggggttatgacagcaaagtattatagccctgccgtccccatagaaattcaggggattccttttccctcggatctgattctgctagacaccaagaacttggatgtgatccttgggatgaattggttggctcaattccaaggagtagtggattgtgcgagacgcactgtcactctgtaccgagggccggaacaaccggttgttttctttgcacccccaacctctgtcagtagttccgaacttcatcagataggactgtcagaaatccccatcgtcagagagttcggagacgtgtttccggaagaactacccggtatgccgcccaaacgagagattaagttccggatagatcttgctccaggaaccactcctctgtacaagcgaccctaccgtatggcagcaaatgaactggctgaagttaacaaacagttagaagagttagctctcaatgaagtcaccatcaaaaacaagtaccctcttccccggatcgatgatctgttcgatcagcttaaaggtgccactgtattctccaagatcgatcttcgttccggatatcaccaattacgtattcgtgatgaagatattccgaagaccgcattcaccacgcgatacggactgtatgaattcacggtgatgtcgttcgaggaagaccatcagcaccatctccgtctggtattgggaaagttgcgggaacatcaattgtatgccaaacttagcaagtgtgagttctggttgtccgaagtcaaattcttagggcacgtgatatctgctaaaggagttgctgtggaccccgaaacagtgaccgccgtcactgattggaagcaacccaagacagtcactcaagtccgcagtttcttaggtttggcaggatactaccggaggttcatcgagaacttctccaaaatcgctcgacccatgacacagttgttgaagaaagaagagaaatttgtgtggagcccgcaatgcgagaaggcgttcaaaactctcaaagaaaggctggtttcctcgccagtgttaatcttgccggatactcgcaaggacttcatggtgtattgtgacgcttcgcgccaaggattggggtgcgtgctcatgcaggatggtcatgtggtggcctatgcctcacgccagctacggcctcatgaaggcaactaccctacccatgatttggagttagctgcggtggttcatgctctaaaaatctggtggcactatctcattgggaatcgctgtgaaatatatactgatcataagagtttgaaatacatcttcactcagtcggacctgaatcttcggcaaaggagatggttagaactcatcaaggattacgatgtgggaattcactatcatcctggtaaggccaacgtggtcgctgacgccctaagtcgaaagagccattgcaacactcttaacgtccgcggcattccacccgaacttaatcaacagatggaagccctgaacctaagcatagttggtcgcggattcttggctgcgttggaagccaagcttaccttgctcgatcgaatccgcgaggctcagaagaacgatccggacatgcatggactcctcaagaatatgaaacagggtaaagccgttggtttcacagaggatgaacacggaaccctatggaacggaaatcgagtatgcgttccagataacagagaacttaaacagctgatatttcaggaagcccacgaaagtccttattccatccaccctggcagtacgaagatgtacttagacttgaaggagaaatactggtgggttagtatgaagcgggaaattgcagagttcgtggccctttgtgatgtgtgccagcgtgtcaaggcagagcaccaacgaccggccggacttctccaacctctccaagtacctgaatggaaatgggatgaaattgggatggattttatcaccggacttccaaagacccaaggtggatatgattctatatgggtagtggtggatcgattaaccaaggtagctcgattcattcctgtgaagaccacctatggagggaacaaactagccgagctctacttcgctaggatcgtgagtctccatggcgttcccaagaaaatcgtatctgataggggaagccaattcacctctcacttttggaagaagctccaagaagagctgggtacccgattaaacttcagcaccgcataccacccgcagacagatgggcagaccgagcgtctaaatcagatccaagaagatatgcttcgcgcatgtgtcctggatttcgggaagacctgggataagagtctcccctatgccgagttctcctacaataacagctatcaagccagcatacaaatggcaccttatgaagcgttgtatgggcgcaaatgccggacaccgctcttgtgggatcaagttggggaaagccaagtattcgggactgatatcctgagagaagctgaagctaaagtcagaaccattcgggataatctaaaggtggcacagtcccggcagaaagttatgcagataaccgacgccgtaacctggaattcgcagtggacgattttgtgtaccttcgggtcacgccattgcggggtgtacacaggtttcagacaaaagggaagctcgcacctcgaagtcgcttaccaattggagctgcccgcctccttgggcaacatgcatgatgtgttccatgtgtcgcaactcaagaaatgccttcgagtgccatccgagcaggccgactcagagcaaattgaagttcgcgaagacttgacctacgtggagaggccagtgaaaatcctggacaccatggagcgcaggaccaggaaccgggtaatccgtttttgcaaggtccagtggagcaaccacgccgaagaagaagctacctgggagcgtgaagacgagctgaaggcagcccatcctgatctcttcgccagttcttccgaatcttggggtcgagattccgtttaa

SEQ ID NO: 61522 - DNA, 353 bp, Oryza sativa
  Clone ID: PAT_MRT4530_62948C.1
atacatcaagcggaaagagggattggttcgaaagaataatgcttaagggacggctcccataagtggatcatggatcgtgtgataatatgctaaatgcaggtgagttcttcaacggagggggagagacttgtggtggtagcggcagagaaatcaagaaagctagcttcatagtgtagttatacctctacctaagaggtgttattatagtagtgtataaattaggccggagttactatttattttgtagatgataaattttgaactattggtttaagaaggttataaattcttgaagtggtactcagttattaagtcggttccaattccgcggggctagttctctccctcgtcaa

SEQ ID NO: 61523 - DNA, 4617 bp, Oryza sativa
  Clone ID: PAT_MRT4530_62949C.1
atgtcatggcacagggccggtgtcctgctgctaggggttcagtcctgcctgcctgtcccgggggttccggccgtaggtgggattgggtcggtactcttgtctatggctaggatgggttggaaactatgtcacgtctttcgtctgtataccgtggtgatgttgacgaccaggagaagtgctgctaccggtgatggcaaccaacccgaaggcagcaaccaccaccaccagggcaggccaccttcacctcctcctacgcctccaccaccaccaccagacaccaacgccattctcacccaaatcctcgcccagcaggccaacatgatgactgctttcctccaccacctccaaaattcgccacaacataatgctccaccaccacctccccaacactctaaactcgccgagttcctccgcatccgcccacctaccttctctagctccaacaaccccgtggatgcgttggattggttgcatgccgtggggaaaaagctagacactgtgcagtgcagcgatgaggagaaagctacgcagccagaggggcaacctattacttgggctcgcttcaccgccgctttccggagaacccatgtgcccgccggagtcatggcccttaagaaaagggaattccgagagttgaagcaaggcaaccgctccgtgatggagtatttgcatgagttcaacaacctggcccgttacgccccggaggatgtgcgggaagatgaggagaagcaagagaagttcttggcaggaatggaccctgagctgtccgtccgtctagtctccggggactatccggatttccaacgtctggtggacaagagcatccgcttggaagccaagcacaaggaactggagtcgcacaagcgccgcttggcgaatttccgcaatcaacagggtgctaaccaaagggtccgctacaccaatccctatccagggggatcctcctcgcagcagcaacaacagcagcagcaacctcgctccgcgcctcgacctcaattcgtggtgcgcgtcccacagccgcagcagcagcagaatcaacaagggactcgtgcgccccgtcctcctacgccaactgtgcagcctggtcaaggccgcagggacgctcaaggtccgcagcgtctgtgcttcaactgcttcgagcccgggcactttgcggataaatgcccaaagccgaggcgtcagcaaggccaagcgcctccccgctccaacaacggtgggaaggatgtcattcggggtcgggtgaaccacgtgacggccgaggacgtgctgacaactccagacgtcatcgttggtacgttcctcattcattccatccctgctaccattctgttcgactctggagcttcccactcgtttatatctgtgccattcgtggggagaaatcagttgggggtagaaaggcttaggaaccctctgctcatcaccacccctggaggggttatgacagcaaagtattatagccctgccgtccccatagaaattcaggggattccttttccctcggatctgattctgctagacaccaagaacttggatgtgatccttgggatgaattggttggctcaattccaaggagtagtggattgtgcgagacgcactgtcactctgtaccgagggccggaacaaccggttgttttctttgcacccccaacctctgtcagtagttccgaacttcatcagataggactgtcagaaatccccattgtcagagagttcggagacgtgtttccggaagaactacccggtatgccgcccaaacgacagattgagttccggatagatcttgctccaggaaccacacctctgtacaagcgaccctaccgtatggcagcaaatgaactggctgaagttaagaaacagttggaagagttgaaagaaaaggggtatatacgtccgagtacttccccctggggtgctcctgtgatttttgtggagaagaaagacaagacgaagaggatgtgcgttgactacagagctctcaatgaagtcaccatcaaaaacaagtaccctcttccccggatcgatgatctgttcgatcagcttaaaggtgccactgtattctccaagatcgatcttcgttccggatatcaccaattacgtattcgtgatgaagatattccgaagaccgcattcaccacgcgatacggactgtatgaattcacggtgatgtcgttcggtttaaccaatgcacctgcctttttcatgaacttaatgaacaaagtgttcatggaatacttggataagtttgttgtggttttcattgatgacattctggtatactcacaatcagaggaagaccatcagcaccatctccgtctggtattgggaaagttgcgggaacatcaattgtatgccaaacttagcaagtgtgagttctggttgtccgaagtcaaattcttagggcacgtgatatctgctaaaggagttgctgtggaccccgaaacagtgaccgccgtcattgattggaaacaacccaagatagtcactcaagtccgcagtttcttaggtttggcaggatactaccggaggttcatcgagaacttctccaaaatcgctcgacccatgacacagttgttgaagaaagaagagaaatttgtgtggagcccgcaatgcgagaaggcgttcaaaactctcaaagaatggctggtttcctcgccagtgttaatcttgccggatactcgcaaggacttcatggtgtattgtgacgcttcgcgccaaggattggggtgcgtgctcatgcaggatggtcatgtggtggcctatgcctcacgccagctacggcctcatgaaggcaactaccctacccatgatttggagttagctgcggtggttcatgctctaaaaatctggcggcactatctcattgggaatcgctgtgaaatatatactgatcataagagtttgaaatacatcttcactcagtcggacctgaatcttcggcaaaggagatggttagaactcatcaaggattacgatgtgggaattcactatcatcctggtaaggccaacgtggtcgctgacgccctaagtcgaaagagccattgcaacactcttaacgtccgcggcattccacccgaacttaatcaacagatggaagccctgaacctaagcatagttggtcgcggattcttggctgcgttggaagccaagcctaccttgctcgatcgaatccgcgaggctcagaagaacgatccggacatgcatggactcctcaagaatatgaaacagggtaaagccgctggtttcacagaggatgaacacggaaccctatggaacggaaatcgagtatgcgttccagataacagagaacttaaacagctgatacttcaggaagcccacgaaagtccttattccatccaccctggcagtacgaagatgtacttagacttgaaggagaaatactggtgggttagtatgaagcgggaaattgcagagttcgtggccctttgtgatgtgtgccagcgtgtcaaggcagagcaccaacgaccggccggacttctccaacctctccaagtacctgaatggaaatgggatgaaattgggatggattttatcaccggacttccaaagacccaaggtggatatgattctatatgggtagtggtggatcgattaaccaaggtagctcgattcattcctgtgaagaccacctatggagggaacaaactagccgagctctacttcgcaaggatcgtgagtctccatggcgttcccaagaaaatcgtatctgataggggaagccaattcacctctcacttttggaagaagctccaagaagagctgggtacccgattaaacttcagcaccgcataccacccgcagacagatgggcagaccgagcgtctaaatcagatcctagaagatatgcttcgcgcatgtgtcctggatttcgggaagacctgggataagagtctcccctatgccgagttctcctacaataacagctatcaagccagcatacaaatggcaccttatgaagcgttgtatgggcgcaaatgccggacaccgctcttgtgggatcaagttggggaaagccaagtattcgggactgatatcctgagagaagctgaagctaaagtcagaaccattcgggataatctaaaggtggcacagtcccggcagaaaagttatgcagataaccgtcgccgtaacctggaattcgcagtggacgattttgtgtaccttcgggtcacgccattgcggggtgtacacaggtttcagacaaaagggaagctcgcacctcggtatgtgggtcctttccgtatcgttgcccgacgcggagaagtcgcttaccaattggacctgcccgcctccttgggcaacgtgcatgatgtgttccatgtgtcgcaactcaagaaatgccttcgagtgccatctgcgcaggccgactcagagcaaattgaagttcgcgaagacttgacctacgtggagaggccagtgaaaatcctggacaccatggagcgcaggaccaggaaccgggtaatccgtttttgcaaggtccagtggagcaaccacgccgaagaagaagctacctgggagcgtgaagacgagctgaaggcagcccatcctgatctcttcgccagttcttccgaatctcggggtcgagattccgtttaa

SEQ ID NO: 61524 - DNA, 516 bp, Oryza sativa
  Clone ID: PAT_MRT4530_6294C.1
atgaaacggcagaggtccaaagtccaaaccacgcagagcaagtcagctcccgcgccatcggacgtccacgagcccgaacgcggtaaaagacacacaattgtgtgcgtgtttgcccgcatcgctcgtgttacgcgggatggctcgcgtcagcgagagcgagctcgcggaaggatcgcggacgagatggttttggccgagcaagagagaaggccgggccgcgctcttgtggatgagatggcagcagcagcgggacggcacggcgcgcgggaccgaatcaaacggaggcaggggtcgctgcacctctccccatcgggcatcggcgcggcgtcttttgcactttttttgtctttgcgcctccagatggacgcggaccacttccgggcgacgttgatgcgttcaggttcggggccgggcgaggcggatggatatggtcatatggatatggatgcaccggcacgaagatggctacttgccaaattggtgtcgggtgttcgcgttggagctcagctgctgaga

SEQ ID NO: 61525 - DNA, 3813 bp, Oryza sativa
  Clone ID: PAT_MRT4530_62950C.1
ctatttaaacgtcccccgtgctctcctcctccgtttccgccgctcgccgctcgctctccccgtcggaatcgtgctcgcgccgtcgcaccttctctccgccgtcgccgccgagctccggttcgccgccgccgtcgctccggacttcctcccctctcggcgtcgtctccttcggcttcgccgcgtcgtcgtcgacctcgtccgcccctccgcttcgctcgccgaccgccggaacgccgtcgtcctcgtcgtcccgaacgcgccgccggcttcctccgtttcggccgccgttcccgtcgtcgcccgccacccgggggagccccagaagccatcacacagacatccaaccaccgccacacacccacccagtagtcctagaacgtcgaacaaagccagacgataatttatgaaagcggccataggcacatgagcactcctcaacctcaccgacctgagcgccccggcaaaaccaaccctgagccacgcgcccccgtcatcccacactccccccacccccccgcgtccccgccacccccccgacccgccggcaaccccggcgcgccccacaccactctcccatgatgggacattcagaccacccacacaatagccagacccccaaccggcgcccgcgacgcacacagtcagcggccccacgaaagggggagcaagccttaggggaggcccccacgcctcccagtagggggcgggacgtaacccgaccgcgcccgcgggtacggctgacgcgtgggacccacggcgccggccgccgccagccgcgtgctcccggtccgccgtggaccgagaggctgacgcgtgggccccactcccgtggacccggtccgcgcgccctctcccccggcggtcttcgggcctctgttgcaaagcactaccgtacttccacatgtctagtgggtaaggcttagtttgtggctcagtcttgcctcctgggacaaggattaatgcacgcacgtgaggaatgcccgttgggttatttccggtcgtgacagctgctaactccaaatcatgggtagggtagttgccttcatgaggccgtagctggcgtgaggcataggccaccacatgaccatcctgcatgagcacgcaccccaatccttggcgcgaagcatcacagtacaccatgaaatccttgcgagtatccggcaagattaacaccggcgaggaaaccagcttttctttgagagtctggaacgccttctcgcattgcgggctccacacaaatttctcttctttcttcaacaactgtgtcatgggtcgagcgattttggagaagttctcgatgaacctccggtagtatctctggccagaggtgtaccactgtacccacaagacacagccccacatcatgtcaccatgtgcctcagtaccaccacggtacctcggaaagggggtcagcgacgacgtcagcaccggcggcggctcggcggctcggacggctcggacggcgcatgctcgccggcgaacggcggctctacggcacaaacggagggcaccaagacgtagatcacggcgcggcgaactcaccgatgaccaaaacgtcggcggaagaccaacggacggcggcggcgtcgaggaaaaggcggcggagaagatcgggtcgacggcgtcgccggtgcgccggcggtcttcggcggcggcgaagcggtggacggggacggcggcgaccttgcgaacccgatggtggcgacggcgactgacgacggcggctgcaacggcggcgcggcgcggcacaacaaacttgtccaagtattccatgaacactttgttcattaagttcatgaagaaggcaggtgcattggttaaaccgaacgacatcaccgtgaattcatacagtccgtatcgcgtggtgaatgcggtcttcggaatatcttcttcacgaatacgtaattggtgatatccggaacgaagatcgatcttggagaatacagtggcacctttaagctgatcgaacaggtcatcgatccggggaagaggatacttgtttttgatggtgacttcattgagagctctgtagtcaacgcacatcctcttcgtcttgtctttcttctccacaaaaatcacaggagcaccccagggggaagtactcggacgtatataccccttttctttcaactcttccaactgtttcttaacttcggccagttcatttgctgccatacggtagggtcgcttgtacagaggagtggttcctggagcaagatctatccggaactcaatctctcgcttgggcggcattccgggtagttcttccggaaacacgtctccgaactctctgactatggggatttctgacagccctatcccttggaattgagccaaccaattcatcccaaggatcacatccaagttcttggtgtctagcagaatcagatccgagggaaaaggtatcccctgaatttctatagggacggcagggctataatactttgctgtcataacccctccaggggtggtgatgagcagagggttcctaagcctttctacccccaactgatttctccccacgaatggcacagatataaacgagtgggaagctccagagtcgaacaaaatggtagcagggatggagtgaatgaggaacgtaccaacgatgacgtctggagttgtcagcacgtcctcggccgtcacgtggttcacacgaccccgaatgacatccttcccaccgttgttggagcggggaggcgcttggccttgctggcgccttggcttcgggcatttatccgcaaagtgcccaggctcgaagcagttgaagcacagacgcttgtcgcgaccgggaaaattgccttgtgtgtccctgcggccttgaccaggctgcacagttggcgtaggaggacggggcgcacgagtcccttgttgattctgctgctgctgcggctgtgggacgcgcaccacgaattgaggtcgaggcgcggagcgaggttgctgctgctgttgttgctgctgcgaggaggatccccctggatagggattggtgtagcggaccctttggttagcaccctgttgattgcggaaattcgccaagcggcgcttgtgcgactccagctccttgtgcttggcttccaagcggatgctcttgtccaccagacgttggaagtccgggtagtccctggagactagacaaacggacagctcagggtccattcccgccaagaacttctcttgcttctcctcatcttcccgcacatcctccggggcgtaacgggcaaggttgttgaactcatgcaaatactccatcacggagcggttgccttgcttcaactctcggaactccctcttcttaagagccacgactccggcgggcacatgggttctccggaaagcggcggtgaagcgagcccaagtaataggttgccccgctggctgcgtagcctggaaatggtcccaccatagagatgcgggcccttgcagctggtgggcggcgaagatgactttctcctcatcgctgcactgcacagtgtctagctttttccccacggcatgcaaccaatccaacgcatccacggggttgttggagctagagaaggtgggtggacggatgcggaggaactcggcgagtttagagtgttggggaggtggtgggggagcattatgttgtggcggattttggaggtggtggaggaaagcagtcatcatgttggcttgctgggcgaggatttgggtgagaatggcgttggtatctggtggtggaggtggaggcggaggaggaggtggaggtgggttgccttggtggttgtggttgctgccttcaggttggttgccatcaccggtattagcatttctcctggtcgtcaccat

SEQ ID NO: 61526 - DNA, 4074 bp, Oryza sativa
  Clone ID: PAT_MRT4530_62951C.1
atgtcatggcacagggccggtgtcctgctgctaggggctcagtcctgcctacctgtcccgggggttccagccatggccggcagcatcaaccgtcgtggtctggacctgactggcttcattttggagctgcggggcatgtgcgttgtcctggggtatccgcatggagtggactaccagggcaagcagctcccggagcaggagggtgacgatgcagagccccacgctgcttgggaggtcactgcagtgatcctcactggctcacccgagaggacttcgttggcagtcaccgcgggtggagattctttctccgccacttgccagaacgccgctctcctcgccatcggcactcctcaccagcgctacccggacgagttgcagcactcgccctaccgctaccaccctcgtcgcggaggagcccgtgactacgccaccttcagggatgctagctcggaggatgacgctaccatcatgcacctggcgcgcatggtggaggcgtacgacgcgcctcgtatcgacttccatcagatgtcatgggtgattagttttaatagtcagctctctctgtttgccgggtctgtgtgggattttcatatggtgacaaccaggagaagtgctactaccggtgatggcaaccaacccgaaggtagcaaccacaacaaccatggcagcccacctccacctcctcccccgcctccaccaccaccaccagacaccaactccatcctcatccaaatcctcgcccagcaggccaacatgatggctgctttcctccaccacatccaaaatccgccacagcataatgctccacctccaccaccacccccgcaacattctaaactcgcagagttcctccgcatccgcccgcctatcttctctagctccaataaccccgtggatgctttggattggttgcatgccgtggggaaaaagttagacaccgtgcagtgcaacgatgaggagaaagtcatctttgccgctcaccaactgcaggggcccgcatctctatggtgggaccacttccaggctatgcagccagaaggacagcctattacttgggcccgcttcaccgccgctttccggaggacccatgtgcccgctggaatcatggcccttaagaaaagggaattccgagagttgaagcaagacaaccgctccgtgatggagtatttgcatgagtttaacaacctggcccggcacgccccggaggatgttcgaatggaccctgagctgtccgtgcgtctggtctccggggactatccagatttccagcgtttggtggacaagagcatccgcttggaagccaagcacaaggaactggagtcgcacaagagtcgcctagcgaatttccgcaatcaacagggggctaaccaaagggtccgctacaccaatccctatccagggggatccttctcgcagcagcagcagcagcaaccacgctccgcgccccgacctcaattcgtggtgcgcatcccacagccgcagcaacagcagagtcagcaagggacccgtgcgccccgtcctcctacgccagccgtgcagcctggacaaggccgcagagacattcaagttcagcagcgtctgtgtttcaactgcttcgagcccgggcactttgtggataaatgcccaaagccgaggcgccagcaaggccaagcgcctccccgccccaacaacggtggtaaggatgtcattcggggtcgtgtgaaccacgtgaccgccgaggatgtgctgacaactccagacgtcatcgtgggtacgttcctcattcattctacccctgctaccattttgttcgactctggagcttcccactcgtttatatctgtgccattcgtggggagaaatcagttgggggtagaaaggcttaggaaccctctgctcatcaccacccctggaggggttatgacaacaaagtattatagccctgccgttcctatagaaatccagggaattccttttccctcggatctgattcttctagacaccaagaacttggatgtgatccttgggatggattgtgagttcggagatgtgtttccggaagaactacccggtatgccgcccaagcgagagattgagttccggatagatcttgctccaggaaccactcctctgtacaagcgaccctaccgtatggcagcaaatgaactggccgaagtcaagaaacagttggaagagttgaaagaaaaggggtatatacggccgagcacttcgccctggggtgctcccgtgatttttgtggaaaagaaggacaagacaaagaggatgtgtgttgactacagagctctcaatgaagttactatcaaaaacaagtaccctcttccccggatcgatgatctgttcgatcagcttaaaggtgccactgtcttttcaaaaatcgatcttcgctccggatatcaccaattgcgtattcgtgaagaagatatcccgaagacctcattcaccacgcgatacgggctgtatgaattcacggtgatgtcgttcggtctaaccaatgctcctgccttcttcatgaacttaatgaacaaagtgttcatggaatatttggataagtttgttgtggttttcattgacgacattctggtgtactcacaatcagaggaagaccatcagcagcatctccgtctggtgttgggaaagttgcaggaacatcaattgtatgccaagcttagcaagtgtgagttctggttgtccgaagtcaaattcttagggcacaagcaacccaagacagtcactcaagtccgcagctttttgggtttggccgggtactaccgaagattcatcgagaacttctccaaaatcgctcgacccatgacacagttgctgaagaaagaagaaaaatttgtgtggagcccgcaatgcgagaaagcgttccaaactctcaaagaaaagctggtttcctcgccagtgttgatcttaccggatactcataaggacttcctggtgtactgtgacgcttcgcgccaaggattggggtgcgtattaatgcaggaaggtcatgtggtagcctatgcctcacgccagcttcggcctcatgaaggcaactaccctacccatgatttggagttagccgctgtggttcatgctctaaagatctggcggcactatctcattgggaatcgctgtgaaatatatactgatcataagagtttgaaatacatcttcactcggtcggatctgaatcttcggcagagaagatggttagaactcatcaaggattatgatgtgggaatccactatcatcctgaggatgaacacggaaccctatggaacggaaatcgggtatgcattccagacgacagagaacttaaacagttgatacttcaggaagctcacgaaagtccttattccatccaccctggcagtacgaagatgtacttagacttgaaagagaaatactggtgggttagtatgaagcgggaaattgcagagttcgtggccctttgtgatgtgtgccagcgtgtcaaggcagagcaccagcgaccggccagacttctccaacctctccaagtagcccggtttattcctgtgaagaccacctatggagggaacaaactagctgaactctacttcgctaggatcaagaaactccaagaagagttggatacccgattaaatttcagcaccgcgtatcacccgcagacagatggacagaccgagcgtcttaatcagatcctagaagatatgctctgtgcctgtgttctagattttgggaagacctgggataagagtctccccaatgccgagttctcctacaataacagctaccaagccagcatacaaatggcaccctatgaagcgttgtatggacgcaaatgccggacaccgctattgtgggaccaagttggggaaaaccaagtgttcgggactgatatcctgagagaagctgaagcgaagaaatgtcttcgagtgccatccgagcaggccgattcagagcaaattgaagttcgcgaagacttgacctacgtggagagaccggtgaaaatcctggacgccatggagcgcaggacaaggaaacgggtaatcagtttttgcaaggtccaatggagcaaccacgctgaggaagaagctacttga

SEQ ID NO: 61527 - DNA, 5253 bp, Oryza sativa
  Clone ID: PAT_MRT4530_62952C.1
atgtcatggcacagggccggtgtcctgctgctaggggctcagtcctgcctgcctgtcctgggggttccggccgtaggtgggattgggtcggtactcttgtctatggctaggatgggttggaaactatgtcacgtcttccgtctgtataccgtggtgatggccggcagcgtcagccgtcgtggtctggacatgactggtttcgtcttggagctgcggggcatgtgcgttgtcctggggtatccgcatggagtggactaccagggcaggccgctcccggagcaggagggtgacgatgcagagccccatgctgcttgggaggttactgcagtgatcctcactggctctcccgagcggacttcgttggcagtcaccgcgggtggagattctttccccgccgcttgccagagcgccgctctcctcgccatcggcactcttcaccagggctacccggacgagttgcagcactcgccctaccgctaccaccctcgtcgcggaggagcccgcgacttcgccaccttccgggatgctagctcggaggatgacgctaccatcatgcacctggcgcgcatggtggaggcgtacgatgcggctcgtatcgacttccatcagatggtgcgtcgtgggatggtcgagaacaacatgaagatcctggagctgcgtcaggagaatctgcagctgaagaaggacctagacgcagtggaggcgcagctgcatcagctcaagatcacccagggagaggtctgtcgccccaagtgtcgccgcgtctgccgcagccagaagatcaccgcccgcaagagcacctccaggcccgagcttgttcgtcagtccctggcgtggacttgcttcgtggagacccctcgtgccgagcctgcgcccgtggttccccaggagggggaagcctccggcgttggtagcatggaggatgcgctgttgctcaccttccgtcctggcccgtcgcagcggaaaagtgctgccaccggtgagggcaaccaatctgaaggcagcaaccacaaccaccagggcagcccacctccacttcatcttccgcttccaccaccaccaccagacaccaacgccattctcactcaaatcctcgcccagcaggccaacatgatgactgctttcctccaccacctccaaaatccgccacaacagaatgctccaccaccacccccacaacactctaaactcgccgagttcctccgcatccgtccacctaccttctctagctccaacaaccccgtggatgcgttggattggttgcatgccgtggggaaaaagctagacactgtgcagtgcagcgatgaggagaaagtcatcttcgccgcccaccagctgcaggggcccgcatctctatggtgggaccatttccaggctacgcagccagaggggcagcctattacttgggcccgcttcaccgctgctttccggagaacccatgtgcccgccggagtcgtggcccttaagaaaagggaattccgagagttgaagcaaggcaaccgctctgtgatggagtatttgcatgagttcaacaacctggcccggtacgccccgagattctccggggactatccggatttccaacgtctggtggacaagagcatccgcttggaagacaagcacaaggaactggagtcacacaagcgccgcttggcgaatttccgcaaccaacagggtgctaaccaaagggtccgctacaccaatccctatccagggggatcctcctcgcagcaggaacaacagcagcagcaaccacgctccgcgcctcgacctcaattcgtggtgcgcgtcccacagccgcagcagcagcagagtcaacaagggactcgtgcgccccgtcctcctatgccaactgtgcagcctggtcaaagccgcagggacgctcaaggtccgcagcgtctgtgcttcaactgcttcgagcgggggcactttgcggataaatgcccaaagctgaggcgtcagcaaggccaagcgcctccccgctccaacaacggtggtaaggatgtcattcggggtcgtgtgaaccacgtgacagccgaggacgtgctgacaactccagacgtcatcgttggtacgttcctcattcattccatccctgctaccattttgttcgactctggagcttcccactcgtttatatctgtgccattcgtggggagaaatcagttgggggtagaaaggcttaggaaccctctgctcatcaccacccctggaggggttatgacagcaaagtattatagtcctgccgtccctatagaaattcaggggattccttttccctcggatctgattctgctagacaccaagagcttggatgtgatccttgggatgaattggttggctcaattccaaggagtagtggattgcgcgagacgcactgtcactctgtacccagggccagaacaaccggttgttttctttgcacccccaacctctgtcagtagttcagaacttcatcagataggactgtcagaaatccccatcgtcagagagttcggagacgtgtttccggaagaactacccggtatgccgcccaagcgagagattgagttccggatagatcttgctccaggaaccactcctctatacaagcgaccctaccgtatggcagcaaatgaactggctgaagttaagaaacagttggaagagttgaaagaaaaggggtatatacgtccgagtacttccccctggggtgctcctgtgatttttgtggagaagaaagacaagacgaagaggatgtgcgttgactacagagctctcaatgaagtcaccataaaaaacaagtaccctcttccccggatcgatgatctgttcgatcagcttaaaggtgccactgtattctccaagattgatcttcgttccggatatcaccaattacgtattcgtgaagaagatattcctaagaccgcattcaccacgcgatacggactgtatgaattcacggtgatgtcattcggtttaaccaatgctcctgccttcttcatgaacttaatgaacaaagtgttcatggaatacttggataagtttgttgtggttttcattgatgacattctggtatactcacaatcagaggaagaccatcagcaccatctccgtctggtgttgggaaagttgcgggaacatcaattgtatgccaaacttagcaagtgtgagttctggttgtccgaagtcaaattcttagggcacgtgatatctgctaaaggagttgctgtggaccccaaaacagtgaccgccgtcactgattggaagcaacccaagacagtcactcaaattcgcagtttcttaggtttggcaggatactaccggaggtttatcgagaacttctccaaaatcgctcgacccatgacacagttgttgaagaaagaagagaaatttgtgtggagcccgcaatgcgagaaggcgttccaaactctcaaagaaaagctggtttcctcgccagtgttaatcttgccggatactcgcaaggacttcatggtgtattgtgacgcttcgcgccaaggattggggtgcgtgctcatgcaggacggtcatgtggtggcctatgcctcccgccagctacggcctcatgaaggcaactaccctacccatgatttggagttagccgcggtggttcatgctctaaaaatctggcggcattatctcattgggaatcgctgtgaaatatatactgatcataagagtttgaaatacatcttcactcagtcggacctgaatcttcggcaaaggagatggttagaactcatcaaggattacgatgtgggaattcactatcatcctggtaaggccaacgtggtcgctgacgctctaagtcgaaagagccattgcaacactcttaacgtccgtggctttccacccgaacttaaccaacagatggaagccctgaatctgagcgtagtgagtcgtggattcttggctgcgttggaagccaagcccaccttgctcgatcaaatccgcgaggctcagaagaacgacccggacatgcgtggactcctcaaaaatatgaaacagggtaaagctgcgggtttcacagaggatgaacatggaaccctatggaacggaaatcgggtatgcgttccggatgtcagagaacataaacagctgatacttcaggaagctcatgaaagtccttattccatccaccctggcagtacgaagatgtacttagacttgaaggagaaatactggtgggttagtatgaagcgggaaattgcagagttcgtggccctttgtgatgtgtgccagcgtgtcaaggcagagcaccaacgaccggccggacttctccaacctctccaagtaccagaatggaaatgggatgaaattgggatggatttcatcaccggacttccaaaaacccaaggtggatatgattctatatgggtagttgtggatcgattaaccaaggtagctcgatttattcctgtgaagaccacctatggagggaacaaactagccgagctctacttcgctaggatcgtgagtctccatggcgttcccaagaaaatcgtatctgataggggaagccaattcacctctcacttttggaagaagctccaagaagagctgggtaccagattaaatttcagcaccgcgtatcacccgcagacagatggacagaccgagcgtctaaatcagatcctagaagatatgcttcgcgcatgtgtcctagatttcgggaagacctgggataagagtctcccctatgccgagttctcctacaataacagctaccaagccagtatacaaatggcaccttatgaagcgttgtatgggcgcaaatgccggacaccgctattgtgggaccaagttggggaaagtcaagtgttcgggactgatatcctgagagaagctgaagcgaagacaaaagggaagctcgcacctcggttcgtgggtcctttccgtatcattgctcggcgcgaagaagtcgcttaccagttggagctgcccgcctccttgggcaacgggcacgatgtgttccatgtgtcacaactcaagaaatgtcttcgagtgccatccgagcaggccgactcagagcaaattgaagttcgcgaagacttgacctacgtggagaggccagtgaaaatcctggacaccatggagcgcaggaccaggaaccgggtaatccgtttttgcaaggtccaatggagcaaccacgccgaggaagaagctacttgggagcgtgaagacgagctgaaggcagcccatcccgatctcttcgccagttcttccgaatctcggggtcgagattccgtttaa

SEQ ID NO: 61528 - DNA, 5304 bp, Oryza sativa
  Clone ID: PAT_MRT4530_62953C.1
atggtgacgaccaggagaaccgctgtcaccggtgatggcaatcaacccgaaggcagcaaccccaaccaccaaggcaacccacctccgcctcctcctccgcctccaccaccaccaccagacaccaacgccattctcacccagatcctcgcccagcaggccaacatgatgaccgctttcctccaccacctccaaaatccgccacaacagaatgctccaccaccacctccccaacactctaaactcgccgaattcctccgcatccgtccacccaccttctctagctccaacaaccccgtggacgcgttggattggttgcatgccgtggggaagaagctggacactgtgcagtgcagtgatgaagagaaagtcatcttcgccgcccaccagctgcaggggcccgcatctctatggtgggaccatttccaggctacgcagccagaggggcagccgattacttgggcccgcttcaccgccgctttccggagaacccatgtgcccgccggagtcgtggctcttaagaagagggagttccgagagttgaagcaaggcaaccgctccgtgatggagtatttgcatgagttcaacaacctggcccggtacgctccggaggatgtgcgggaagatgaggagaagcaggagaagttcttggcaggaatggaccccgagctgtctgtccgcctagtctctggggactatccggattttcaacgattggtggacaagagcatccgcttggaagccaagcacaaggagctggagtcgcacaagcgccgcttggcgaacttccgcaatcagcagggtgctaaccaaagggtccgctacaccaatccctacccagggggatcctcctcacagcagccgcagcagcaacaacctcgctccgcgcctcgacctcaattcgtggtgcgcgtcccacagccgcagcagcagcagaatcaacaagggactcgtgcgccccgtcctcccacgccagctgtgcagcctggtcaaggccgcagggacgctcaaggtcagcagcgtctgtgcttcaactgcttcgagcccgggcactttgcggataaatgcccgaagccaagacgtcagcaaggccaagcgcctccccgccccaacaacggtggcaaggacgtcattcggggtcgtgtgaaccacgtgacggccgaggacgtgctgacaactccagacgtcatcgttgggctgtcagaaatccccatagtcagagagttcggagacgtgtttccggaagaactacccggtatgccgcccaagcgagagattgagttccgaatagatcttgctccaggaaccactcctttgcacaagcgaccctatcgtatggcagcaaatgaactggccgaagtaaagaaacagttggaagagttgaaagaaaaggggtatatacgtccgagtacttccccatggggtgctcctgtgatttttgtggagaagaaagacaagacgaagaggatgtgcgtcgactacagagctctcaatgaagtcaccatcaagaacaagtatcctcttccccggatcgatgatctgttcgatcaacttaaaggtgccactgtattctccaagattgatcttcgttccggatatcaccaattacgtatccgtgaggaagatattccgaagaccgcattcaccacgcgatacgggttgtatgaattcacggtgatgtcgttcggtctaaccaatgcgcctgccttcttcatgaacttaatgaacaaagtgttcatggaatacttggataagtttgttgtggttttcattgatgacattctgatatactcacaatcagaggaagaccatcagcaccatctccgtctggtgttgggaaagttgcgggaacatcaattgtatgccaaacttagcaagtgtgagttctggttgtccgaagtcaaattcttagggcacgtgatatctgctaaaggagttgctgtggaccctgaaacagtgaccgccgtcaccgattggaagcaacccaagacagttactcaagtccgcagtttcttaggtttggcaggatactaccggaggttcatcgagaacttctccaaaatcgctcgacccatgacgcagttgttgaagaaagaagagaaatttgtgtggagcccgcaatgcgagaaggcgttccaaactctcaaagaaaagctggacggtcatgtggtagcctatgcctcacgccaactacgacctcatgaaggcaactaccctacacatgacttggagttagcagcggtggttcatgctctaaaaatctggcggcactatctcattggcaatcgctgtgaaatatatactgatcataagagtttgaaatacatcttcacccagtcagatctgaatcttcggcaaaggagatggttagaactcatcaaggattatgatgtgggaattcactatcatcctggtaaggccaacgtggttgccgacgctctaagtcggaagagccattgcaacactcttaacgtccgtggcatcccacccgagcttagtcaacagatggaagccctgaacctaagcatagttggtcgtggattcttggctgcgttggaagccaagcctaccctgctcgatcaaatccgcgaggctcaaaagaatgatccagacatgcatggactcctcaagaatatgaaacagggtaaagccgctggtttcacggaggatgaacacggaaccctatggaacggaaagcggagtttgtggccctatgtgatgtgtgccagcgtgtcaaggcagaacaccaacgaccggccggtcttctccaacctctccaagtaccagaatggaaatgggatgaaattgggatggatttcatcaccggacttccaaaaacccaaggtggatatgattccatatggcaccgcgtatcacccgcagacagatggacagaccgagcgtctcaatcagatcctcgaagatatgcttcgcgcatgtgtcctagatttcgggaagacttgggataagagtctcccctatgccgagttctcctacaataacagctaccaagccagcatacaaatggcaccgtatgaagcattgtatgggcgcaagtgccggacaccgctattgtgggaccaagttggagaaagccaagtgttcgggactgatatcctgagagaagctgaagctaaagccgactcagagcaaattgaagttcgcgaagatttgacctacgtggagaggccaatgaaaatcctggacaccatggagcgcaggaccaggaaccgggcgggcccgcccgccactctcgctgacgggtgggacccacctgtcatctccttcctcgcgccgcgcccgccgcccgcccgtgccctagcgccgccgccgccgcggattccgccgcatcccgccgtccccgcgcgcattaaagagggggaaatcactccccgtgattccctctcccgtttccccctcttttccctctctctctccctcggattcgttcgatttgaatcccgcaatcgtcgccggcgtcttcaatggcggccgagatctccgcggccgattcctccctctccggccgcgttctccccctcccgttgctatatattcgttccccgagctccgctcttccgtttccgccgctcgccgctcgctctcgccgtcggattcgtgctcgcgccgtgcacctctctctccgccgtcgccgtcgacctccggttcgccgccgacgtcgctccgggcttcctcccgactcggcgtcacctccatcggcttcgccgcgttgtcgccgaccccgtccgccccttcgcctcgcccgccgaccgccggagctccgtcgtcctcgccgtcccgaaccgcgccgccgccttcctccgcttcggccgccgtttccgtcgtcgttgtagtcccggggtgagccgtggactgccgttcgctttcccccttcccttctccctctcgggtgccgctccgccgcgccgttggtcgccggcggcgaccatcggggcgcgggtgcgccgcctcccgtcggccgtgccggcgaggccgccttcggggcgcgccccgcggctgccaggtgggcccggccgtcagccgcccgcgcccgcgggtgcggctgacgcgtgggacccacggcgccgaccgccgccagccgcgtgctcccggtccaccgtggaccgagaggctgacgcgtgggccccacctcccgtggacccgatggctgatcgcgatgaggaacagatactgtacgatacaatcgcggagggaagcagccagtattggaacgaagaagaggggaacaaggatccaaaccagtacttgaacgaggaagggaatgtggagagggatgcggaggggaaccaggaggggaacgtgcagagggatgcggaggggaacgaggaggaagaggctagtggaagacaaacacgagggaaaggggtgattccttggaagattggattcaaggaggacatccacacgtacaggagtcggatgaggagcaagagagataccgaggcgaagattgcagatcttgagtacagggtatcgagctacgagctcagcatgcaagaggaggtggcaagccgcgcctcaacggggcaggtaggatcacagagcatggacgccatgcaaacattggacgaaaccacctgcctcgttgatgatatcactcagcggacaccatgtgagctgtatattcccttcaagaacttatcaataaaggtggcgtcgggcatggccatcccaatggacccatcggggacttaccactgcaggctgattccagcaggatactccaaggtcgaagttgagttggtggaaggcgctacatcatcctccctgggcgacaagcggcgtcttgtgcaccatctcctccggctccgccatctcctcctcaggctcctacaccgactcctccgcaggcttctacaccgactcctccgcaagctcctcgtccggcttcttccaagtcaagggcccccgaagctccaccacctgcccccacaggcaacaaagaaggcaaaagttgacactgcaaaaaacaaggacctagggtacgattgcacgcaagaggagcttgacgcttatgtggcattagaagtcaggagacaattgaagcctcgaagtccagaaaagaagattcctatagttccaagtgtcaggaacttcttcaggggtatgtctgcacctgccaaagaggccataaagctatcggactatgagcgaacacttaagaaagcatcttctgaaaagtccaaaccagtccctcagcttggagagcaaccaaaccaggagatcgagccgttggtgacggtgaagattttggaatacaagaatttattaatgacaccgggctaa

SEQ ID NO: 61529 - DNA, 1929 bp, Oryza sativa
  Clone ID: PAT_MRT4530_62954C.1
atgtcatggcacagggccggtgtcctgctgctaggggctcagtcctgcctgcctgtcccgggggttccggccgtagggggattggtcaccgcgggtggcgattccttccccgccgcttgccagagcgccgctctcctcgccatcggcactctccaccagcgctacccggacgagttgcagcactcgccctaccgctaccaccctcgccgcggaggagcccgcgactacgccaccttccgggatgctagctcggaggatgacgctaccatcgtgcacctggcacacatggtggaggcgtacgacgcggctcgtatcgacttccatcagatggtgcgccgcgggatggtcgagaacaacatgaagatcctggagctgcgtcaggagaacctgcagctcaagaaggacctagacgcggtggaggcgcagctgcatcagctcaagatcgcccagggagagatctgccgccccaagcgccgccgcgtctgccgcagccagaagatcaccgcccgcaagagcacctccaggcccgagcttgttcgtcagtccctggcgtggacttgcttcgtcgagacccctcgtgccgagcccgcgcccgtggttccccaggagggggaagcctcctgcgttggtagcacggaggatgcgctgttgctcaccttccgccctggcccgtcgcagcggagaaatgctgctaccggtgatggcaaccaacccgaaggcagcaaccacaaccaccagggcaacccacctcaacctcctcctccacctccaccaccaccaccagacaccaacgccattctcacccaaatcctcgcccagcaagccaacatgatgactgctttcctccaccacctccaaaatccgccacaacttaatgccccactaccacctccccaacactctaaactcgccgagttcctccgcatccgtccacctaccttctctagctccaacaaccccgtggatgcgttggattggttgcatgccgtggggaaaaagttagacacggtgcagtgcagcgatgaggagaaagtcatcttcgccgcccaccaactgcaggggcccgcatctctatggtgggaccacttccaggctacgcagccagaggggcagcctattacttgggcccgcttcaccgccgctttccggagaacccatgtgcccgccggagtcgtggcccttaagaaaagggaattccgagagttgaagcaaggcaaccgctccgtgatggagtatttgcatgagttcaacaatctggccggttacgccccggaggatgtgcgggaagacgaggagaagcaagagaagttcctggtaggaatggacccagagctgtccgtccgtctagtctctggggactatccggattttcaacgactggtggacaagagcatccgcttggaagccaagcacaaggaactagagtcgcacaagcgccgcttggcgaatttccgcaatcaacagggtgctaaccaaagggtccgctacaccaatccctatccagggggatcctcctcgcagcagcagcagcagcagcagcctcgctccgcgcctcgacctcaattcgtggtgcgcgtcccacagccgcagcagcagcagggtcagcaggggactcgtgcgccccgtcctcctacgccaactgtgcagcctggtcaaggccacagggacgctcaaggtcagcagcgtctgtgcttcaactgcttcgagcccgggcactttgcggataaatgcccgaagccaaggcgtcagcaaggccaagcgcctccccgccccaacaacggtggtaaggacgtcattcggggtcgtgtgaatcacgtgacggccgaggacgtgctgacaactccagacgtcatcgttgggagttcggagacgtgtttccggaagaactacccggtatgccgcccaagcgagagattgagttccggatag

SEQ ID NO: 61530 - DNA, 5109 bp, Oryza sativa
  Clone ID: PAT_MRT4530_62955C.1
atggacatctctagggcaaatgaaggctacacgagctgcggcccggtagtcgagatgtcatggcacagggccggtgtcctgctgctaggggctcagtcctgcctacctgtcccggagattccggccgtaggtgggattgggtcggtactcttgtctatggctaggatgggttggaaactatgtcacgtcttccgtctgtataccgtggtgatggccggcagcatcaaccgtcgtggtctggacctgactggctttgttttggagctgcggggcatgtgtgttgtcctggggtatccgcatggagtggactaccagggcaggcagctcccggagcaggagggtgacgatgcagagccccacgctgcttgggaggttactgcagtgatcctcactggctctcccgagaggacttcgttggcagtcaccgcgggtggagattctttctccgccgcttgccagaacgccgctctcctcgccatcggcactcttcaccagcgctacccggacgagttgcagcactcgccctaccgctaccaccctcgccgcggaggagcccgcgaccacgccacctttcgggatgctagctcggaggatgacgctaccatcatgcatctggcgcgcatggtggaggcgtacgacgcggcccgtatcgacttccatcagatggtgcgccgtgggatggtcgagaacagcatgaagatcctggagctgcgtcaggagaatctgcagctgaagaaggacctagacgcagtggaggcgcagctgcatcagctcaagatcgcccagggagaggtctgtcgccccaagcgtcgccgcgtctgccgcagccagaagatcaccgcccgcaagagtacctccaggcccgagcttgttcgccagtccttggcatggacctgcttcgtcgagacccctcgtgccgagcccgcgcccgtggttcctcaggagggggaagcctcaggcgttggtagcacggaggatgcgctgttgctcaccttccgtcctggcccgtcgcagcggagaagtgctaacaccggtgatggcaaccaacctgaaggcagcaaccacaacaaccatggcagcccacctccacctcctcctccgcctccaccaccaccactagacaccaatgccatcctcacccaaatcctagcccagcaggccaacatgatggctgctttcctccaccacatccaaaatccgccacaacataatgctccaccaccacccccacaacactctaaactcgccgagttcctccgcatccgtccacctaccttctctagctccaataaccccgtggatgcattggattggttgcatgccgtggggaaaaagttagacaccgtgcagtgcagcgatgaggagaaagtcgtcttcgccgcccaccagctgcaggggcccgcatctctatggtgggaccatttccaggctacgcagccagaggggcagcctattacttgggcccgcttcaccgccgccttccggaggacccatgtgcccgccggagtcatggcccttaagaaaagggaattccgagagttgaagcaaggcaaccgctccgtgatggagtatttgcatgagtttaacaacctggcccggtacgccccggaggatgtacgggaagatgaggaaaagcaggagaagttcttggcaggaatggaccctgagctgtccgtgcgtctagtctccgggggatcgtcctcgcagcagcaacagcagcaacaacctcgctccgcgccccgacctcaattcgtggtgcgcatcccacagccgcaacaacagcagagtcagcaagggacccgtgcgccccgtcctcctacgacagccgcgcagtctggtcaaggccgcagggacgttcaaggtccgcagcgtctgtgcttcaattgcttcgagcctgggcactttgcggataaatgcccaaagccgaggcgccagcaaggccaagcgcctccccgctccaacaacggtggtaaggatgtcattcggggtcgtgtgaaccacgtgacggccgaggacgtgctgacaactccagacgtcatcgttggtacgttcctcattcattccatccctgctaccattttgttcgactctggagcttcccactcgtttatatctgtgccattcgtggggagaaatcagttgggggtagaaaggcttaggaaccctccgctcatcaccacccctggaggggttatgacagcaaagtattatagccctgctgttcctatagaaattcagggaattccttttccttcggatctgattcttctagacaccaagaacttggatgtgatccttgggatgaattggttggctcaattccaaggagtagtggattgcgcgagacgcactgtcactctgtaccgagggccggaacaaccggttgttttctttgcacccccaacctctgtcagtagtttagaacttcatcagataggactgtcagaaatccccatcgtcaaagagttcggagacgtgtttccggaagaactacccggtatgccgcccaagcgagagattgagttccggatagatcttgctccaggaaccactcctctgtacaagcgaccctaccgtatggcagcaaatgaactggccgaagttaagaaacagttggaagagttgaaagaaaaggggtatatacgtccgagtacttccccctggggtgctcctgtgatttttgtggagaagaaagacaagacgaagaggatgtgcgttgactacagagctctcaatgaagtcaccatcaaaaacaagtaccctcttccccggatcgatgatctgttcaatcagcttaaaggtgccacggtattctccaagattgatcttcgttccggatatcaccagttgcgcatccgtgaagaagatattccgaagaccgcattcaccacgcgatacggactgtatgaattcacggtgatgtcgttcggtttaaccaatgctcctgccttcttcatgaacttaatgaacaaagtgttcatggaatacttggataagtttgttgtagttttcattgatgacattatggtatactcacaatcagaggaagaccatcagcaccatctccgtctggtgttgggaaagttgcgggaacatcaattgtatgccaaacttagcaagtgcgagttctggttgtccgaagtcaaattcttagggcacgtgatatctgctaaaggagttgctgtggaccccgaaacagtgaccgccgtcaccgattggaagcaacccaagacagtcactcaaattcgcagtttcttaggtttggctggatactaccggaggttcatcgagaacttctccaaaatcgctcgacccatgacacagttgttgaagaaagaagagaaatttgtgtggagcccgcaatgcgagaaggcgttccaaactctcaaagaaaagctggaaggtcatgtggtggcctatgcctcacgccagctacggccccatgaaggcaattaccctacccatgatttggagttagccgctgtggttcatgctctaaagatctggcggcactacctcattgggaatcgctgtgaaatatatactgatcataagagtttgaaatacatcttcacccagtcggatctgaatcttcggcagaggagatggttagaactcatcaaggattatgatgtgggaattcactatcatcctggtaaggccaacgtggtagccgacgctctaagtcgaaaaagccattgcaacactcttgtcgtccgtggcattccacccgaacttaatcaacagatggaagccctgaatctaagcatagttagtcgtggattcttggctacgctggaagccaagccttccttgctcgatcaaatccgcgaggctcagaagaacgatccggacatgcgtggactcctcaagaatatgaaacagggtaaagccgctggtttcacagaggatgaacacggaaccctatggaacggaaatcgggtatgcgttccagatgtcagagaacttaaacagctgatacttcaggaagctcacgagagtccttattccatccaccctggcagcacgaagatgtacttagacttgaaagagaaatactggtgggttagtatgaagcgggaaattgcagagttcgtggccctttgtgacgtgtgccagcgtgtcaaggcagagcaccaacgaccggccggacttctccaacctctccaagtaccagaatggaaatgggatgaaattgggatggatttcatcaccggacttccaaaaacccaaggtggatatgattctatatgggtagttgtggaccgattaaccaaggtagctcggtttattcctgtgaaaaccacctatggagggaacaaactagccgagctctacttcgctaggatcgtgagtctccatggcgttcctaagaaaattgtatctgataggggaagccaattcacctctcacttttggaagaagctccaagaagagctgggtacccgattaaatttcagcaccgcgtatcacccgcagacagatggacagaccgagcgtctaaatcagatcctagaagatatgcttcgcgcatgtgtcctagatttcgggaagacctgggataagagtctcacctatgccgagttctcctacaataacagctatcaagccagcatacaaatggcaccctatgaagcgttgtatggacgcaaatgccggacaccgctattgtgggaccaagttggggaaagccaagtgttcgggactgatatcctgagagaagctgaagctaaagtcagaaccattcgggataatctaaaggtggcccagtctcggcagaagagttatgcagacaaccgacgccgtgacctggaattcgcagtggatgactttgtgtatcttcgggtcacgccattgcgaggtgtacacaggtttcagacgaaagggaagctcgcacctcggttcgtgggtcctttccgcatcattgctcgacgcggagaagttgcttaccagttggagctgcccgcctccttgggcaacgtgcatgatgtgttccatgtgtcgcaactcaagaaatgtcttcgagtgccatccgagcaggccgactcagagtccaatggagcaaccacgccgaggaagaagctacctgggagcgtgaagacgagctga

SEQ ID NO: 61531 - DNA, 291 bp, Oryza sativa
  Clone ID: PAT_MRT4530_62956C.1
atggagaacacaaacaaaaccaacaaccccctgatcacggacaaaatctacatcgatctcaacgtgtttggcagagtgagagtaaggtactacatcgcactggccacgagagcaccatcggtgaaagataacttggagtttgtgtcaacccgtgagtatgtgttgactaagaagaaggccagaggggtgccgactcacactaatccaaagaaagtgatgcagactactgagatcattcatggaaaactccaactgaagggcggtaatggtctagcgcagaagggcaactag

SEQ ID NO: 61532 - DNA, 390 bp, Oryza sativa
  Clone ID: PAT_MRT4530_62957C.1
cgtacgtgtacacacaccctgcctggttccccgtccacctccgcctccgcgaccgtcatggcgctcgccggcgtccttcccggcgcgctcagatcggcggcggctgtggacggagcggtagaactcctcgccgccgagcgccctactacacccctgcgcccacacctagacgtcgccggctgtgccgggaggacggcgaccaccgggctccagcgccgcatgagagccgggccttcaacccggtccctacagcttgaagccgccgccgtcgtctatggcgtcggtgcccgaaaggggaggaccgagaccacccggttacagcgccggattagaggccggccttcacccggggttcttccacttgacgagcctggaccggtccggggagga

SEQ ID NO: 61533 - DNA, 7836 bp, Oryza sativa
  Clone ID: PAT_MRT4530_62958C.1
atggagtataaggcgggcccgcccgccaccctcgctgacgggtggggcccacctgtcatcgcctacctcgcgccgcgcccgccgcccgcccgtgccctagggccgccgccgccgccgccgaatccgccgcatcccgccgtccccgcgcgccataaagagggggaaatcactccccgtgattccctctcccttttcccccgtttttccctctctctctccctcggattcgtttggaatctctcccgcaatcctcgccggcgcaatcaatggcggccggatcctccgcgccggtttccatctcctccggccgccctctctcactcccgacgctatataatcgctcctcgtgcttcgctcctccgtttccgccactcgccgcacactctccccgtcggattcgtgcccgcgccgtcttcctctctctccgccgtcgccgccgagctccggttcgccgccgtcgtcgctccggacctcctcccgactcggcgtcacctccttcggcttcgccgcgttcccgtcgacctcgtccaccccttcgtttcgcccgccgactgtcggagcgccgccgtcctcgtcgatccgaaccgcgccgccgccttcctccgctccggttgtcgtttccgccgtcctcgtcgtcccggggtgagccatggaccgcctccttcgcttcccccttccctcccctctctcggccgccgctccgccgcgccgttggtcgccggcggcgaccatcggggcgcgggtgcgccgcctcccgtcggccgtgccggcgaggccgccttcgggcgcgccccgcggctgccaggtgggcccggccgtcagccgcccgcgcccgcgggtgcggctgacgcgtgggacccacggcgccggtcggcgtcagccgcgtgcacccggtccaccgtggaccgagaggctgacgcgtgggccccactcccgtggacccggctgggctcggggtgcatggttttgatggtagcacctcggccatataaggaccggtcttcgggcctctgttgcaaagcactaccgtacttccacatgtctagtggggcaaatgaaggctacacgagctgcggcccggtagtcgagatgtcatggcacagggccggtgtcctgctgctaggggctcagtcctgcctgcctgtcccgggtgttccggccgtaggcgggattgggtcgatggccggcagcgtcacccgtcgtggtttgggcatgactggcttcgtcttggagttgcggggcatgtgcgtggccctggggtatccacacggagtggactaccaggccaggccgcttccggagcaggagggtgacgatgcggagccccgcgctgcttgggaggtcactgcagtgatcctcgctggctcttctgagcggacttcgctgacagtcaccgcgggtggcgattccttccccgccgcttgccagagcgccgctctcctcgccatcggcactctccaccagcgctacccggacgagttgcagcactcgccctaccgctaccacccccgccgcggaggagcccgcgactacgccaccttccgggatgctagctcggaggatgacgctaccatcgtgcacctggcgcgcatggtggaggcgtacgacgcggctcgtatcgacttccatcagatggtgcgccgtgggatggtcgagaacaacatgaagatcctggagctgcgtcaggagaacctgcagctcaagaaggacctggacgcggtggaggcgcagctgcatcagctcaagatcgcccagggagaggtctgccgccccaagcgtcgccgcgtctgccgcagccagaagatcaccgcccgcaagagcacctccaggcccgagcttgttcgtcagtccctggcgtggacttgcttcgtcgagacccctcgtgccgagcccgcgcccgtggttccccaggagggggaagcctccggcgttggtagcacggaggctctctctgttgctggttctgtgtggggttttcagatggtgacgaccaggagaaatgctgttaccggtgatggcaaccaacccgaaggcagcaaccacaaccaccagggcaacccacctccacctccacctccgcctccaccaccaccaccagacaccaacgccattctcacccaaatcctcgcccagcaagccaacatgatgactgctttcctccaccacctccaaaatccgccacaacataatgctccaccaccacccccacaacactctaaactcgctgagttcctccgcatccgcccacctaccttctctagctccaacaaccccgtggatgcgttggattggttgcatgccgtgggaaaaaagttagacactgtgcagtgcagcgatgaggagaaagtcatcttcgccgcccaccaactgcagggacccgcatctctctggtgggaccacttccaggctacgcagccagaggggcaacctatcacttgggcccgcttcaccgccgcttttcggagaacccatgtgcccgccggagtcgtggcccttaagaaaagggaattccgagagttgaagcaaggcaaccgctccgtgatggagtatttgcatgagttcaacaatctggcccgttacgccccggaggatgtgcgggaagatgaggagaagcaagaaaagttcttggcaggaatggaccccgagttgtccgtccgtctagtctctggggactatccggattttcaacgactggtggacaagagcatccgcttggaagctaagcacaaggagctggagtcgcacaagcgccgcttggcgaatttccgcaatcaacagggtgctaaccaaagggtccgctacaccaatccctatccagggggatcctcctcgcagcagcaacaacagcagcagcaacctcgctccgcgcctcgacctcaattcgtggtgcgcgtcccacagccgcagcagcagcagggtcagcaggggactcgtgcgccccgtcctcctacgccaactgtgcagcctggtcaaggccgcagggacgctcaaggtcagcagcgtctgtgcttcaactgcttcgagcccgggcactatgcggataaatgcccgaagccaaggcgtcagcaaggccaagcgcctccccgctccaacaacggtgggaaggatgtcattcggggtcgtgtgaatcacgtgacggccaaggacgtgctgacaactccggacgtcatcgttggtacgttcctcgttcattccatccctgctaccattttgttcgactctggagcttcccactcgtttatatctgtgccattcgtggggagaaatcagttgggggtagaaaggcttagaaaccctctgctcatcaccacccctggaggggttatgacagcaaagtactatagccctgccgtccctatagaaattcaggggattccttttccctcggatctgattctgctagacaccaagaatttggatataggactgtcagaaatccccatcgtcagggagttcggagatgtgtttccggaagaactacccgagaagaaagacaagacgaagaggatgtgcgtcgactacagagctctcaatgaagtcaccataaaaaacaagtaccctcttccccggatcgatgatctgttcgatcagcttaaaggtgccactgtattctctaagatcgatctccattccggatatcaccaattacgtattcgtgaagaagatattccaaagaccgcattcaccacgcgatacgggctgtatgaattcacggtgatgtcgttcggtttgaccaatgcacctgccttcttcatgaacttaatgaacaaagtgttcatggaatacttggataagtttgttgtggttttcattgatgacattctaatatactcacaatcagaggaagaccatcagcaccatctccgtctggtgttgggaaagttgcgggaacatcaattgtatgccaaacttagcaagcgtgagttctggttgtccgaagtcaaattcttagggcacgtgatatctgctaaaggtgttgctgtggaccccgaaacagtgaccgccgtcaccgattggaagcaacccaagacagttactcaagtccgcagtttcttaggtttggcaggatactaccggagattcatcgagaacttctccaaaatcgctcgacccatgacacagttgttgaagaaagaagagaaatttgtgtggagcccgcaatgcgagaaggcgtttcaaactctcaaggaaaagctggtttcctcgccggtgttaatcttgccggatactcgcaaggacttcatggtgtattgtgacgcttcgcgccaaggattggggtgcgtgctcatgcaggacggtcatgtggtagcctatgcctcccgtcagctacgacctcatgaaggcaactaccctacccatgatttggagttagcagcggtgattcatgatctaaaaatctggcggcactatctcattgggaatcgctgtgaaatatatactgatcataagagtttgaaatacatcttcacccagtcagatctgaatcttcggcaaaggagatggttagaactcatcaaggattatgatgtgggaattcactatcatcctggtaaggccaacgtggttgccgacgctttaagtcgaaagagccattgcaacactcttaacgtccgtggcatcccacccgaacttaatcaacagatggaagccctgaacctaagcatagttagtcgtggatttttggccgcgttagaagccaagcccaccttgctcgatcaaatccgcgaggctcagaagaacgacccggacatgcatggactcctcaagaatatgaaacagggtaaagccgctggtttcacagaagaggaacacggaaccctatggaacggaaaccgggagaaatactggtgggttagtatgaagcgggaaattgcagagttcgtggccctttgtgatgtgtgccagcgtgtcaaggcagagcaccaacgaccggccggacttctccaacctctccaagtaccagaatggaaatgggatgaaattgggatggatttcatcaccggacttccaaaaacccaaggcggatatgattctatatgggtagttgtggatcgattaaccaaggtagctcgatttattcctgtgaagaccacctatggagggaacaagctagccgagctctacttcgctaggatcgtgagtctccatggcgttcccaagaaaatcgtatctgataggggaagccaattcacctctcacttttggaagaaactccaagaagagctgggtacccgattaaacttcagcaccgcctatcacccgcagacagatggacagaccgagcgtctaaatcagatcctagaagatatgctccgcgcatgtgtcctagatttcgggaagacctgggataagagtctcccctatgccgagttctcctacaataacagctatcaagccagcatacaaatggcaccttatgaagcgttgtatgggcgcaaatgccggacaccactattgtgggaccaagttggagaaagccaagtgttcgggactgatatcctgagagaagctgaagctaaagtcagaatcattcgggaaaatctaaaggtggcacagtcccggcagaaaagttatgcagataaccgtcgccgcgacctggaattcgcagtggatgactttgtgtatcttcgggtcacgccattgcgaggtgtacacaggtttcagacaaaagggaagctcgcacctcggtatgtgggtcctttccgtatcattgctcggcgcggagaagtcgcttaccagttggagctgcccgcctccttgggcaacgtgcatgatgtgtttcatgtgtcgcaactcaagaaatgtcttcgagtgccatccgagcaggccgactcagagcaaattgaagttcgcgaagatttgacctacgtggagaggccagtgaaaatcctggacaccatggagcgcaggaccaggaaccgggcgggcccgcccgccaccctcgctgacgggtggggcccacctgtcatcgcctacctcgcgccgcgcccgccgcccgcccgtgccctagcgccgccgccgccgccgccgaatccgccgcatcccgccgtccccgtgcgccataaagagggggaaatcactccccgtgattccctctcccttttcccccgtttttccctctctctctccctcggattcgtttggaatctctcccgcaatcctcgccggcgcaatcaatggcggccggatcctccgcgccggtttccatctcctccggccgccctctctcactcccgacgctatataatcgctcctcgtgcttcgctcctccgtttccgccactcgccgcacactctccccgtcggattcgtgcccgcgccgtcttcctctctctccgccgtcgccgccgagctccggttcgccgccgtcgtcgctccggacctcctcccgactcggcgtcacctccttcggcttcgccgcgttcccgtcgacctcgtccaccccttcgtttcgcccgccgactgtcggagcgccgccgtcctcgtcgatccgaaccgcgccgccgccttcctccgctccggttgtcgtttccgccgtcctcgtcgtcccggggtgagccatggaccgcctccttcgcttcccccttccctcccctctctcggccgccgctccgccgcgccgttggtcgccggcggcgaccatcggggcgcgggtgcgccgcctcccgtcggccgtgccggcgaggccgccttcgggcgcgccccgcggctgccaggtgggcccggccgtcagccgcccgcgcccgcgggtgcggctgacgcgtgggacccacggcgccggtcggcgtcagccgcgtgcacccggtccaccgtggaccgagaggctgacgcgtgggccccactcccgtggacccggctgggctcggggtgcatggttttgatggtagcacctcggccatataaggaccggtcttcgggcctctgttgcaaagcactaccgtacttccacatgtctagtggggcaaatgaaggctacacgagctgcggcccggtagtcgagatgtcatggcacagggccggtgtcctgctgctaggggctcagtcctgcctgcctgtcccgggtgttccggccgtaggcgggattggtcttgctcaatttttcccaagcccataagaggagctccttgaagatgaaggctttggtgtctagctcgtgcctgccgtcaagcgcctgtggtcgtcgccctagtcttccgctgtttctcatggccggcagcgtcacccgtcgtggtttgcacatgactggcttcgtcttggagctgcgaggcatgtgcgtggtcttggggtatccacatggagtggactaccaggccaggccgcttccggagcaggagggtgacgatgcagagccccacgctggttgggaggtcactgcagtgatcctctctggctctcccgagcggacttcgctggcagtcaccgcgggtggagattccttccccgccgcttgccagaacgtcgctctcctcgccatcggcactcttcaccagcgctacccggacgagttgcagcactcgccctaccgctaccaccctcgtcgcggaggagcccgcgactacgccacctttcgggatgctagctcggaggatgacgctaccatcgtgcacctggcgcgcatggtggaggcgtacgacgcggctcgcatcgacttccaccagatggtacgccgtgggatggtcgagaacaacatgaagatcctggagctgcgtcaggagaacctgcagctcaagaaggacctagacgcggtggaggcgcagctgcatcagctcaagatcgcccaaggagaggtcttgccgcccaagcgtcggcgcgtctgccgcagccagaagatcaccgc

SEQ ID NO: 61534 - DNA, 695 bp, Oryza sativa
  Clone ID: PAT_MRT4530_62959C.1
gggagggagggagcaatgccgctggcgctggcgcagctgcaggacatcggggaccgcatcaccgaccgcctccgcccgtggagccgctccgcggagttctgggtccgcgctgccgacatctacaccagctacaaggtgtgccagctgcgcgcggggttcgtcaaggatgaggaggagcgggaggccatgtgggagcagcagcacgagcttggtgcccagaagatgtactccctctgctccgagctcggcggcctcttcctcaaggctgcacaaattctgggaaagcccgatttggcgccaatggcttgggtgaaaaggcttgtaaccttgtgtgacaatgctccagccacgcccattgatgtagttagagatgttgtggagaaacagtttggcaagagctttgatgacatatttgaatgctttgatgttgagcctgttgggtctgcttccattgcacaggtgcaccgagcaaggcttaaactatcaaaaacagatgttgctgtcaaggttcaacatccaggagctgaaaaactgatgatggttgacatccggaacatgcaagcatttgcattgttcttgcagaagtatgatatcaattttgacctgtactctgcgacaaaggagatggaaaagcagatatgcctatgagtttgactttgtgcgcgaagcaaaggcgatgggaaagaatacgagaa

SEQ ID NO: 61535 - DNA, 375 bp, Oryza sativa
  Clone ID: PAT_MRT4530_6295C.1
ccgggttgagcccacgcgcttccgaagagacgcgaaggagagagagctcctcgcccacatactctctctagccccagagagttagagagctctctatgtgaagaggatacacagctgtgtgacaaacaccgtgcatatcacagtaagagagaagatcttcgtatctggtcacgagaaattttatgctgcagcagacaagcagtactgggggtcgttattttcgctcatcccacatgaaatagctaccactgtgaagcggcgaaagaaggacaccgacaacaagccatccatcacagtcattcatgggcctcagtatggctggcacgcagacctctcactaatgagcccgatcttattgaaggtgaagcacgctcc

SEQ ID NO: 61536 - DNA, 2642 bp, Oryza sativa
  Clone ID: PAT_MRT4530_62960C.1
atgccgctggcgctggcgcagctgcaggacatcggggaccgcatcaccgaccgcctccgcccgtggagccgctccgcggagttctgggtccgcgctgccgacatctacaccagctacaaggtggcgccgcctgatcctgttccattgctccattggttggtgtgccagctgcgcgcggggttcgtcaaggatgaggaggagcgggaggccatgtgggagcagcagcacgagcttggtgcccagaagatgtactccctctgctccgagctcggcggcctcttcctcaaggaggctgcacaaattctgggaaagcccgatttggcgccaatggcttgggtgaaaaggcttgtaaccttgtgtgacaatgctccagccacgcccattgatgtagttagagatgttgtggagaaacagtttggcaagagctttgatgacatatttgaatgctttgatgttgagcctgttgggtctgcttccattgcacaggtgcaccgagcaaggcttaaactatcaaaaacagatgttgctgtcaaggttcaacatccaggagctgaaaaactgatgatggttgacatccggaacatgcaagcatttgcattgttcttgcagaagtatgatatcaattttgacctgtactctgcgacaaaggagatggaaaagcagatatgctatgagtttgactttgtgcgcgaagcaaaggcgatggaaagaatacgagaattcttacgcgtgaccaacaagaaaaagcctccagttatagtgcctcgtgtgattcctgaaatggttagcagggaggttttggtaatggagttcattgaagggacaccaataatgaatcttggcaatgaaatggctaaaaggggcattgatcctggtggtaagattgcaacaatggcaaagcagaaaattttaacagatcttacacttgcctatggtcatatgattttgaaggatggttttttccatacagatccacacccaggaaacatccttatctgcgagaacacagaggcaagacttctctttctcttcctttttttggcgatggtagctttgcttgattatggacaagtgaaagcaatgccagaggatttacgacttgcttatgcaaatcttgtaattgcaatggctgatgatgattttttgaggactaaagaaagtttcagggagattggtattgaaacatggagtatagctgataatgagctagaagaattatttcaattatcccttagaatgtttgatactagtttaccaccatgattaactgctatgtcacccttcgccgaggattcttcactaaataaagttggagtgcagaattgcttactaaatggtgtctctattctattcttttatttgaagagcttccctgaagagctattttcagtgcttcgaactatacaacttttacgtgggttgactgttgggatgggcctcagattctcatgtgctcagcaatggaagcctattgccgaggaagctttgttgaagtctgggagactaaaagattactaacaaaggcgatggaaagaatacgagaattcttacgcgtgaccaacaagaaaaagcctccagttatagtgcctcgtgtgattcctgaaatggttagcagggaggttttggtaatggagttcattgaagggacaccaataatgaatcttggcaatgaaatggctaaaaggggcattgatcctggtggtaagattgcaacaatggcaaagcagtaagccccttcagctcgtacgcgtgccgcccgcctttgcttggtgtaggatgcctttctccaggcttgctccccgccctggcttcttcctgttctgccggtgctcggacggtgcctggcttgtttctggccgtctggaagcgatcccggggggttgacgacgtccttttagtatttagtgattccattcatttccacaccacttcagatgtttgagttggtgtgccggggtgttgggcttcgcaacagcccgtgtccctcctcttgtcccagaagaggttcctcaactacccctgaggatttttggcaccggcgcgaggccaggagtaactgctatgtcacccttcgccgaggattcttcactaaataaagttggagtgcagagcttccctgaagagctattttcagtgcttcgaactatacaacttttacgtgggttgactgttgggatgggcctcagattctcatgtgctcagcaatggaagcctattgccgaggaagctttgttgaagtctgggagactaaaagctgcaagatcaagaaggccgcggagaagttttgtcaggagactgttttcgagtgacaacgagaaccaaggaacatgatattacaattgtttcatataacaaatgtcatgtattttgaagtgacattaataacaggctcaagcccaattttttatgatgcatatatgcatataagactacacatatttcctttgtgccatatggttttgacacgataatacttttatattttggaaggtagactcaactaaaaaaaaaaaaaaatgtattgtggaattttcctgagaataatgtcttgttggtaggtcttgccaaaaaaaaacccccaaaaaaaaaaacaaaaaaaaaaaaaaaaaaaaaaaaaataaactcgaactagtccctcgtgc

SEQ ID NO: 61537 - DNA, 536 bp, Oryza sativa
  unsure (1)..(536): unsure at all n locations
  Clone ID: PAT_MRT4530_62961C.1
ataggagcaaaccttatttcttcaatttgggctggagaaatgccagcactgcgatatatatccacggattttgataatttactctaagcacatcaacctatttacctaatttgtacaacaattgatcgattaatccatatttattgctcccacacggggctggacactggcttatcactggagccatctgcatagtacaaaggctcagatgtggaacaacaccacttcgccgtcgtcgactacgccaactccggcggacagtcgaacccgaacgccctgacgccatatccgccgaggtgaatggaaaacatgtcctccagccatgtgatcccagctgatgctgcgcctgcgtagatgctcggaggcccggcggaggccatgctctcgntgatgtacatagtcgccgagaccggcgtcacaagccctgaggtgacgtcaccgcctatgttgatctcgagggaccggatacgcggctaattaagatcgcacacgtttgncatgttggggctaaaaacctttgtgctacacggttgtga

SEQ ID NO: 61538 - DNA, 246 bp, Oryza sativa
  Clone ID: PAT_MRT4530_62962C.1
atggcatactatctaacagaaaaggctatgaatacacgttgccacccaacccacatgcaaccaccttcactggatctacctgagcggctgagcatagttcgtcatgccaaatcttggccgaaccacaatgatgatgcattggtgggtggcacagctgcggttggtgcaaatattgcagggaatgttgtctcgaagctagagaaacttcttgatgacggccatctctggcgaggcgaaggcaaataa

SEQ ID NO: 61539 - DNA, 108 bp, Oryza sativa
  Clone ID: PAT_MRT4530_62963C.1
atggcgtccttcggcgccctaggtgttggcctccatgtgcttgaagttgtcgccaggggaggcggaggcatagagggaggacttggcatcgcggtaggcgtcaggtaa

SEQ ID NO: 61540 - DNA, 279 bp, Oryza sativa
  Clone ID: PAT_MRT4530_62964C.1
atggaggccacttccagaagtgatcacatcctctggaatccagataagcaaaatatagatgaagctattattgcatccaatgcatggggcatctacaaaggcacgaagcacgcgagtaaagaggaagacgagccgtcgcagacgaacagggagcagtcgcgcaaagcgcttcccaaaaaccttattgccgccttctcccggtgcaggacgtcgaaggcagaggttccggagacctgctctcccgatcgcaggtgcacgccggcgagcgggatggtgtaa

SEQ ID NO: 61541 - DNA, 1581 bp, Oryza sativa
  Clone ID: PAT_MRT4530_62965C.1
tcgtcgttcggctcgtctcctcccccgcgactataaaaacgggagctttgctgctgcgccggccggcccaccacctccggtccatctcggccgccgccgctgtcgctgtcgcgatcgcgatccccgcctagatagacttccccaagaacccgccgccgccgctgcaggggtggcgtggcatcgcgggagaccagctcgagccttcagcctcttttgcgccgccgccgccgccgccggtcgatccgtgttcttggctcaggcggcgtcaatggcggcggcgaatgggagcgcctgcggcggaggcggcgtggacaaggagaaggaggagttcaagcagatctacggggtgctcaaggaggagctgctcagggaccccgccttcgagttcaccgactcgtcgcggcagtggatcgatcgcatgttggactacaatgtacctggagggaagtgcaatcgtggtctctctgtggtcgatagctataagctgttgaagggcaccaatgttctaagtcaggaagacatgtttctcgcgagcactcttggttggtgcgttgaatggcttcaagcttactttctcgtgcttgatgatatcatggatgattctcacactcgacgtggtcagccttgttggtttcgggtgcctcaggttggctccattgctatcaatgatggaattatccttcgcaaccatatcacgcgaatgcttcggctccactttagaggaaaactttactatgctgatctccttgatttattcaatgaggtcgagttcaagacagcttcaggtcaattgctagaccttatcactactcacgagggagaaaaagatctaaacaaatataacataggagttcaccgccgcattgttcaatataagacatcctactattcattttatctgccggttgcttgtgcactgttgctatctggagaggacttgaccaaatatggtgctgtagaagacattcttgttaagatgggaatatactttcaagtccaagacgattatctagattgttatggtgaccccaaatttattggcaagatcgggactgacattgaagattacaaatgctcttggctagttgtgcaagcccttgagcgtgctgatgagagtcaaaagagcgttctatttgaaaattatggaaagaaagatccagcctgtgtggcaaaagtgaagagcctctacagagaactaaacctagaggcggtctttctggactatgagaacgagagttacaagaagttgattgcggatatagaagcccagccaagcatagctgttcagaatgttctgaagtccttcttgcacaagatctacaagagacagaagtagggggggtttctgtgcaggaagctgtccattgttgcatgtttcttctctagcaactgatgttgtatgttgcaatttgctgatcttggataataatgttgcaaggtgttatttcgggtgtgatggaccgcttggtgtagacattagacaataatacatgagctgtttgtcttgttattagcaaaaaaaaaaaaaaaaaactcaagactagctctccctgcctccctccccctcgggcccagggtaat

SEQ ID NO: 61542 - DNA, 1111 bp, Oryza sativa
  Clone ID: PAT_MRT4530_62966C.1
gaaaatccttcattttgtgacctctttactcattgaattttaggcacggcttcgtactcaatatagcatttaactcttagtagctggcaacaatagatgttatataagaagtccatatggtcctcaacatggtccaaagccttcctcgtattcgggaagggcatacataacagtaagcacgttttactgttttagcattttaattacaagcagtttggtacacgacacactgaaaagatgagcgttttaagtatcaggcatcatatggttagatggagtggatcagtccgcggtccagctctgctccactatctcacgaacttttcggttgtattcccgcttgttctcactgaataggcgggcagcttcagagttggcaggtgaatttgggtttggatcgcaaagcagcgactggatggatgtgagtatagcagctacatcatatatggggctccactggttttgtagtatatctaagcatatgctcccatcagcataaatgttaggatgaaacatccgagaaacaaatcgcactgtaggtggcttgttaggataatcttcagtaaactgaagtgtcagcttgaacgtacctccatcccaaggagtatcatcagggccaaaaattacagcattccaaagcattatattgttgtcctgtggggccccacttatgccagctggaggatcctgcatcagtcgtttgaaatccctcatcaacctcttccttgctggcgtcgacatattcaccctccgatcaaatccccccgcgccgccgcagatcccgcgggaatcggcgatgggccgatcgatcgatggccacccaccctcgcgctggtgggtgccgatgggtgggggactcgggcggagtggattggatcggagcggagcggagcggagcacttcagaagaaagtgagaagattcgagaagggaatcatggaggaaggaggatagcgagtagcggatttggggaagacgcgacacgcgagaaagggagggaggatgattttacgcgactcgccaagagtttttttttttttttttttttttttttttttttttttttttttttttttttttttaggatgaattcaaccatagcacccggccgg

SEQ ID NO: 61543 - DNA, 406 bp, Oryza sativa
  unsure (1)..(406): unsure at all n locations
  Clone ID: PAT_MRT4530_62967C.1
ggattaaacgacacgctttgccaactgacaggtcaaacaaatggacaggtgatacccatcagtaaacttgtacatggccaaaaaacagatttacaggggggatacctaacagtgatctaattaccttttaagtacccggggagattttttcaggccacagtgaaaaagaagagaacacattcagtctccaccaggacacccctattggcttttacagggtatttgaaaacaaaaatctccacatttggcaattgaccagatttgcttattggtgcccntgcttaaaaaggattagcgtggacatctgtgccggttgagtgactggtgacattgggcttggttgggccccgtccgggctggggtgtgtgctggggtgattagcttggggcgcgcgcgcggctgtgtg

SEQ ID NO: 61544 - DNA, 167 bp, Oryza sativa
  Clone ID: PAT_MRT4530_62968C.1
tcggtaactgggcccaaattctgtagcttgcctatctggggttcagaattcaagcaggttgcgtccttaatatgggggcgtatgttagcactctttggcattatgttatattgctcgaattaaagacatatctggagatgttcttgcactcggcatagacttgtggc

SEQ ID NO: 61545 - DNA, 312 bp, Oryza sativa
  Clone ID: PAT_MRT4530_62969C.1
atggggactagagatggaacatggaagacgatgaccggaaactgccgaggacggcggactactggacggaggaaagggcggcgccgtatctggtcaggtggctcagatgagatttctccggtgaggatagaggagtactggagcagtggtcggggaaaggagaatggagaaaataagtttcagcctactgggcttgatggctcgttgcggcggtgcccactgggacctactaggagactgccacgaagcacgtcgcagagcggcggcggtggtagctgcgacagcaacgtggcagggggcagcggagcttga

SEQ ID NO: 61546 - DNA, 3795 bp, Oryza sativa
  Clone ID: PAT_MRT4530_6296C.1
tagttttctcaaaaccatagcaaacttgcaaaatacccccacctttccccttccctcctcccctcactccctctcactctcttgtctccactctcctctcctctcctcgccgcgagcgtgagctctcccctctcctctcttccaatccaagaagccaagaaaccccaatgcatctccgcctcctcctcctcctcgtcggcgtcgccgccgcggcggcggacgccgacgccgacgccgacgcgctgctggcggcgaaggccgccatgtcggacccgaccggcgcgctggcgtcgtggggcggcaacgggaccaggacgaacaccaccgccgccgccgcggcacactgcgcgtgggcgggcgtgacgtgcagctcccgcggcgcggtggttggcctcgacgtgtccgggctcaacctctccggcgcgctgccggcggagctgaccgggctccgcgggctcatgcggctgtccgtcggcgccaatgccttctccggccccatcccggcgtcgttggggcggctccagttcctcacctacctcaacctctccaacaacgcgttcaatggctccttcccggcggcgctcgcgcgcctccgggggctccgggtgctcgacctctacaacaacaacctcaccagcccgctccccatggaggtggtgcagatgccgctgctccgccacctgcacctcggcggcaacttcttctccggtgagatcccgccggagtacgggcggtggggccggatgcagtatctcgccgtctccgggaacgagctctccggcaaaatcccgccggagttggggaatctgacgagcctcagggagctgtacattggttactacaacagctactccggtgggctcccaccggagttggggaacctgaccgagctcgtccgcctcgacgccgccaactgcgggctctccggcgagataccgccggagctcgggaagctgcagaacctcgacacgctgttcttgcaggtgaacagcctcgccggcggcataccgtcggagctgggttacctcaagagcctgagttctttggacctatcgaacaatgtcctcaccggcgagattccggcgagcttctccgagctcaagaacctgacgctgctcaacctgttccggaacaagctgcgtggtgacatccctgatttcgtcggcgacctgcccagcctcgaggtgctgcagctctgggagaacaacttcaccggcggcgtgccgcgccgcctcggccgcaatggccgcctccagctgctcgacctctcgtcgaacaggctcaccggcacgctgccgccggagctctgcgccggtggcaagatgcacacgctcatcgcgcttggcaacttcttgttcggcgccatcccggactcccttggtgaatgcaagtccttgagccgtgttcgtcttggggagaactacttgaacggctcaattccgaagggtctctttgagctgccgaagctgacgcaggttgagctgcaagataacctcctcacaggcaatttcccggccgtgtccggcgctgcggcgcctaatcttggggagatcagcctgtccaacaaccagctcactggtgcgctgccggcatcaattggaaacttttctggtgttcagaagctgcttcttgatcggaattcattctctggtgtcgttccacctgagattgggcgactgcagaaactctccaaggctgaccttagcagcaatgcgcttgagggaggtgtaccaccggagattgggaaatgccggttgctcacttacttggacttgagccggaacaacatctctgggaagatacctccggccatctctggaatgaggatactcaactatctcaacctgtcccggaaccatcttgatggagagatacctccatccattgcaacaatgcagagcttgaccgcggttgacttctcatataacaacttgtctgggcttgtgccaggaactggtcaattcagctacttcaatgccacatcttttgttggtaacccaggcttgtgtggaccgtacctcggaccatgccgccctggtgttgctggcaccgaccatggtggtcatggtcatggcgggctatccaatggtgtcaaactgctcattgtcctaggcttgttggcctgctccattgcatttgctgtcggggcgattctgaaggctcggtcgttgaagaaagccagtgaggcacgtgtgtggaaactcacagcattccagcgcctcgacttcacctgtgatgatgtgcttgactgcttgaaggaagaaaacgttatcggcaaaggtggtgctggaattgtgtacaagggggctatgcctaacggagatcatgttgctgtgaagcgtctcccagctatgggccgtggctcttcacatgatcatggtttttcagcagagatacagacacttgggagaattcggcaccgccatattgtgcgtttgctaggcttctgctcaaacaatgagactaatttgctggtttatgaatacatgcccaatggaagcctgggggagctgctccatggcaagaaaggcgggcaccttcactgggacacccggtacaagatcgccattgaagctgcaaaggggctctgctaccttcaccatgattgttcccctttgatacttcaccgtgatgtcaagtcaaacaatatccttcttgactcagactttgaagcacatgtggctgactttggccttgcaaagttcttgcaggacaccggtgcatctgagtgcatgtctgccattgctggctcttatggatacattgctccagaatatgcatacaccctcaaggtcgatgagaagagtgatgtctacagctttggtgttgtgcttcttgagctggttactggacggaagcctgttggggagtttggagctggtgggcggaccggtgaatgggtgaggatgatgaccgactcaaacaaggaacaagtgatgaaggtcctggacccaaggctctcaacagttccacttcatgaggtcatgcacgtcttctatgtcgctttgctctgcattgaggagcagagcgtgcagcgtccaacaatgcgggaggttgtacagatcctcagcgagcttccaaagctagctcccaggcaaggagaagtgctttcacacgctgtcgatggttttgcatccaatcctccagctccagttccttctgggtctgcagaagcactaactggtgatgcgaaagatcaacagcagcagcaaacaaattcagagtcaactacacctcctgatctcatcagcatatgagtaaccaagtctaaaattgctgtcaaccttttgttgcaaagttcgcaagcttcagtatcggaaacttatctaggtatggatttaggtcttggtaagtttttaggtgttctgtgctgtacatattccagtttggtgggttgtcctgttaccagtttgtttcctttggtgctgcaatgtaggattccgtagcgagtttcggtactttagagccttttatcatccatcttcaatgtaggcaatggctttctatccaatttagaatcaaaatctaagctttactgtggaaccaagtttcctttaaagcacttcctgagttcctggtcctgtgtaaacagttcaagttgggtcctttaaattgagaaacccatactagaatgccatcatggaaaagcacccttgcatggtgaacagatatgcactaaatcaagcaaagtcccagtattctgctctttttattcttttggagctgaatgagatcaaaaaaaaaaaaaaagggcgcgcccataaaagagtatccgagcatgcgtgcgtgctgcat

SEQ ID NO: 61547 - DNA, 241 bp, Oryza sativa
  Clone ID: PAT_MRT4530_62970C.1
ctgagcttgaagcagcagatcgaggtagacatggccgccgtcaccatggacctctcgtgcggcggcgcttgccattaaggccttctctaatgttttcagccagggtcgcatcaccatgcgcaagttagcggcaaatcctaagcccgacgcgtctgagatcccttgttacggcgccaaccgcttgctctacctcggtccgctctcaggcgagctcgcgatctacctgaccggtgagttccct

SEQ ID NO: 61548 - DNA, 105 bp, Oryza sativa
  Clone ID: PAT_MRT4530_62971C.1
aagcataaagtaggtttgaaggacaaccaatcagaaaatccaagaactcctctatctcttcctcacgccatggtgccacggtgataggggtatcaccctatcgat

SEQ ID NO: 61549 - DNA, 236 bp, Oryza sativa
  Clone ID: PAT_MRT4530_62972C.1
tgaaagagtatagcaattagcccacttagcaggttgtactgatttcaagttctactggagcaaattgcagtgtccctaagcagagcatgatgggtgtaggaatcttggtagatatttgcataggccatatcattaatctccgacctctaaccattatgtgttcaattcatggaaagaggatttcgtgccatagctcaccacaacacgtttcagatccaatctatagtatttatata

SEQ ID NO: 61550 - DNA, 502 bp, Oryza sativa
  Clone ID: PAT_MRT4530_62973C.1
cacggtaaaaaacgatgtgtacagcttcggtgtcgttctctttgaactcatcagcaggaagaaacctgtatatcattgtcatgacaagaatcgtcgactcatccctgaattcatcagagcttacgagacagccaagagtgggaaggcaatgtttgatgaagggatcatggctgaagaagatatcgctgtccttgaagagattgggaggctggcaatggagtgcgtcagcttggaaatcgatggaaggccgacgatgaaggaagtggctgaacgccttaagatgatcaggagaatgaaggagagctcagccatgggagcagcgagatgctaactgaagcagaagctatagaaggctgttggcatcgctgaaaccgaagatgaagccaactgatgggccacaactgattgttccctttcagtctttcacctgagagatcgtttacagagtatcatcagaaacatagtgtgtactggttggctgttaactgtgttatataacata

SEQ ID NO: 61551 - DNA, 193 bp, Oryza sativa
  Clone ID: PAT_MRT4530_62974C.1
atatatatcaagactatttttgaattctcagccttttctcataaaagggaaaaatataactgccaaccaatttcagaaattctcactaccactcatatcatattaacagaatttcatatcatcatttaagaactacattatttttttttacactatctcctatttacaatactttatccaattcacaactttt

SEQ ID NO: 61552 - DNA, 1133 bp, Oryza sativa
  Clone ID: PAT_MRT4530_62975C.1
ttatcttattctactagtactagtagggatgaaaggaaggtaatgtaatagtggagtttttgttggacctgagtgcaactcagtgtctgtcggcttttgcttctgcttctgcttctggttctggttcgccttcctagttcctacccccaccagcaagcagcagctgaggtgaggtccgtggcgttggagtgaggactgaggaggaagaagagggcgggatctagggtaccggatgcgctggctgtgctgagtgagagtagagatgagcgcgtctcggttcatcaagtgcgtcaccgtgggggacggcgccgtgggcaagacctgcatgctcatctcctacacctccaacaccttccccacggactatgttccaactgtttttgataacttcagtgcaaatgttgtggtcgatgggagcactgtgaacttggggttgtgggatacagcaggacaagaggactacaataggctacgcccgttgagctatcgtggcgctgatgttttcctgctggccttttctctgatcagcaaagcaagctatgagaatgtttctaaaaagtggatacctgaattaaggcattatgctcctggtgtgccaataattctcgttggaacaaagcttgatctgcgggatgataagcaatttttcgtagatcaccctggtgctgtacctatttccactgctcagggcgaagagctgaggaaactcattggtgcagcggcatacattgaatgcagttcaaaaacacagcaaaacatcaaggcagttttcgatgctgcgattaaggtggttctccagcctccaaagcaaaagaagaagaagaaaaaggcgcagaaaggatgtgccatcttgtaattaaatggtagacagtgcagtgcagatcgatgtatcccttcatttgtagcctctggcttcaatcgtcgcttgtttgtataattacgctagatgccaccggcagaagatataatatagtcctcctgcctttgtggtgttggtctctaaggtcgtccagactccagagtccagacgcacttggtttcttttgttctatctataatcaatctatctatatctgctaaaaaaaaaaaaaaaaaaaatcgagactagttctctctctctctccctcgtgccg

SEQ ID NO: 61553 - DNA, 624 bp, Oryza sativa
  Clone ID: PAT_MRT4530_62976C.1
atgggattacggagcgcactcactctttggaccgcactcaagaagcggttcgagaagttgaagtacaccatcctaccccaagcaggactgggctcgccagaggttcacgaacttcaagagcgtctccgagtacagatccggttgtcacggattacggatacgacaacgctctccatcttccaccctagcgctgtgcagagtgctcgtaactacaggcaggcatcatacaaggagtatgacgagatgatcgacatcatgcagttgtctgagtcccatgacgaggttctccgcaagaattttgtctcccagccgcctggcatgagtgttggccttgatgtcaatgttatcagttataaggtctacaagcccgtccagaggaagaggggcaagcgtggtgggaagaaggcagtcgagaagtcagagagaaaagctccagctgcccagggagcacagggaggcaagggcaagaaggaagccaagccacccgcaatgacaagccgtatggccagcaggatcagacatgctacaagtgtggcatttggggccactagggccgtatttgcgaggagccccaacacgtcatcgacgcataccaggccagtaggaaggccaaggcgtccatag

SEQ ID NO: 61554 - DNA, 639 bp, Oryza sativa
  Clone ID: PAT_MRT4530_62977C.1
atgagcgcgtctcggttcatcaagtgcgtcaccgtgggggacggcgccgtgggcaagacctgcatgctcatctcctacacctccaacaccttccccacggactatgttccaactgtttttgataacttcagtgcaaatgttgtggtcgatgggagcactgtgaacttggggttgtgggatacagcaggacaagaggactacaataggctacgcccgttgagctatcgtggcgctgatgttttcctgctggccttttctctgatcagcaaagcaagctatgagaatgtttctaaaaaggcaataaaatcttgccgcccactttctttgctctctctccatgaatggatacctgaattaaggcattatgctcctggtgtgccaataattctcgttggaacaaagcttgatctgcgggatgataagcaatttttcgtagatcaccctggtgctgtacctatttccactgctcagggcgaagagctgaggaaactcattggtgcagcggcatacattgaatgcagttcaaaaacacagcaaaacatcaaggcagttttcgatgctgcgattaaggtggttctccagcctccaaagcaaaagaagaagaagaaaaaggcgcagaaaggatgtgccatcttgtaa

SEQ ID NO: 61555 - DNA, 111 bp, Oryza sativa
  Clone ID: PAT_MRT4530_62978C.1
cgcacatttcagaactcaatctaatataatttgggcctaattctataaatactcggggtctcgtgtccaccttaacaccagccaccttacataacatactttcaactcaca

SEQ ID NO: 61556 - DNA, 1293 bp, Oryza sativa
  Clone ID: PAT_MRT4530_62979C.1
atgggtctgggaggagggggagaggggacgaagccgccactcctgttctgccgcagcatgccacctcccctcccgccagattcggcggagcagatcagagcgcactgccacccgccgtcgctgtcgttggctcgaagaggggagggggccgggataaggggcctgaactccggtcagaccaccgacctgtggccggttggtcttggtcgtgggcagagacaggcggtggtgtggagaagatgcctgcgggaggcaggggaggcggcggacctcctgcatgttatggaccaaggaatcgaatgcaatgcagagaaggaggtggagcgcttcgccgggtggagtccttgccaaaaggccgcatgggtgaagatgcggcgaaagcctcggcacacgggcacaggttttgccagagtaccgaacctcgttgtcgagaggcctagcgggccgctacgtcctcaggggattttgccagatagatgggccgagccatttaagcccagtaggggcccagccttcggcgctcggcgccgaagctggtatggtaccatcgacttcggctgctgcgccgcaaccaccacgttcggctcttgccgcttcaacggggcaggcgctgaacgcggtcgaagcggcaaaggcggcagcaatgtcaagggcgctccagaccagggtggagatcctttcgacaagtcaaccgatggtgccccaagctgcttcgccgcggttacatcccaccccaggtctacccgcaagcgccgattcaagtcatgcaagcaccagcgtacttcaccggacaaatgtcgcaagcaatggccgaaggagcttcagctttgcaagcgcagcttcaggcttttcttcagcagctcaaccaaccccacaacactccagaagggcttcgccatggagttaaggaccgcaattcgacttcggcaacgccactcaagcaccaaccattcgaccacaggcaccgacaccaggcttcggaacgaatcagacaccgaaccagggggcgaaaaggggctgccgctgaatgggggaatcaagattcgtccaataccaccccagttcaagttcccgcctgttccgcgatacccgggcgaaacagacccaaaagagttcatatccatctacgaatccacgatcgaagccgctcatggcgacgaaaatacgaaggcaaagtcgccgctgctcaagcccaagtacaagcgcaggccgccgaaccggctcctctcgccgttcgccagtctcagccgccgatccaaggacaaccgccaagaccaagtcaagctcccatga

SEQ ID NO: 61557 - DNA, 321 bp, Oryza sativa
  Clone ID: PAT_MRT4530_6297C.1
atggatgcatcccagaccgtggttccgagccgatggcccagcaactccagcgaaatcgcggacgtgctcggggagttcaaccttcaatcaggaaaatcaccatacatgaaagaagaacatatgttaggccagcatcgccatatattgaaactgaaaggagggggatggggacttgggggaggaggaagaggttccaacgcggagaaggtttgcttgcctttcgtggtccatggcctccccggaactgcttcgcctgagctccgtcgaacggcggcggcggcggcggcggcgtcggcggcggcgaggaggagtggtgtgtag

SEQ ID NO: 61558 - DNA, 268 bp, Oryza sativa
  unsure (1)..(268): unsure at all n locations
  Clone ID: PAT_MRT4530_62980C.1
cacctatccaatattaggcctatgcaataaactattgacaaaatgtatcctttagagcctgtattaggttcctagtaaatttgactgacttgtacaaatctatggaaattctgattctgagcagtagtgtaaaatagtttcaccaaactttggtgtgtaaagtaaaatcaacatatacaaatatatgtgatccaagaagatnaaaaaaaaaaaaaaataaaaaataaaaaaaaaaaataaaaaaaaaaaaataaattttataataata

SEQ ID NO: 61559 - DNA, 6036 bp, Oryza sativa
  Clone ID: PAT_MRT4530_62981C.1
aatttcccgactgccactgggttcgcattcttccttaggacgagatggctgggcagtagctctgtcggtcgaacctttttgttgtaagttgccgaagtgcttgtggcatatttgcgcatatgttctagagcttcgactctcaccccctcgaggagtttgagtgacacctcgcgcccttcttcgcctccagagaacatcacccttggcgaattagcccctatctctgttagggtcattgcttcatcgccatagataagcatgaacgggttgaacttggttggccttgtgggggtcgtacgaagggcccagagaacagatagcatttcgtccggcaatttaccattcgctgccccctcaagccttttctttagcgcctctaggatcttaccatttgcgcgttcggccaccccatttgactgtgggtgcgcaaccgaagcgaacctgatttccaggtttagccctttgcacatctcattgaacttgtcagagtcgaattgcttgccgttgtcggtgatgaattcttttggtattccgaaatggcaaacaatgtttttcctcacaaacttctgtacagctgccgaagtgatcacgccgagtggttcggcctcgatccatcgggagaagtattcgattgctacaatcgtgaacttgtaaccgtttcgcgccatagggaacaggccaatgatgtctagcccccatctggcgaaaggccagattggtgcgataggctgctgctcatattggggggtagtttggctttgactatgccgcagacagctttcgcacttcttggcttgctcaacacagactttcagcacggtgggccaatacacaccctatcaaaatactttggaggccactgttcttgcggcctggtgtgcgccgcagagcccctggtatatttccttcgccatttcttcaccttcggcaaaggagatgcagcgaagcaagggttgaagcaccccggagcgatatagctggcccgagactaacttatattttacggctctgagctgtaggcgctccgcttttgcttcatcctccgaaagccaaccattcttgaggtatttaattttacgaacggggttcgccagtcctctgggtcttcccctagctctacctggtcgattgccatgatgtctaggatctccacaggcacacttggtgcgtataggacctcaaaaatggtgcctggcgaatacgggcctccacaagcagcagatttcgccagggcgtctgcttcctcattctggcctctaggtaagtgtttgaccgttatgctggcgaagcacttttccatagatcgaatagcctctagatacctcttcatcccctcttcttttgcctcaaaggatttgtcaacatgacttgccaccaatttggagtcagttcggacgagcaagcgtcgaacccccatagctttcgccttttttaggcccaacagcatagcttcgtactctgccgcattattggttgtgtcgaactgtagccttgcggcgtaccgaatcggcacgccgcctggcgaagtgagtaccgccgcagcgcccgccctcttgtgcgaccacgagccattggagtacatcacccaaggttgttcaacgggctcaggttcaggggcgaatggcggtgtccattcagccacgatgtcggctaggatttgggacttgatggcagtgcgggcgacaaaatgcaagtcgaagggagataactccgccgcccactttctgagccagccagtaatttccttgccccgaagcacttcgcccaaaggatactgcgatggcaccgtgactttgtgggcctaaaagtagtgtttaagcttgcgcgaagccatcagtagggcgtaagcaagcttctccatttcgatgtatcgtatcttcgccccttgcaaagcttcggaaacaaaatacactggtttctagcctgactctgtttcttgaacgagggctgcactgactgccaccggtgaagctgctaggtagagtagcagttcgcttcccggtgctgggctgaccaaagcaggtgggctctacagatattgcttcagctcgtcgaacgctgcttggcattcgggtgtccaggtgaactttcccgtgccccggagggtcttgaagaaaggcaagcctctttcggccgcatgaaaacccaacaacttgcccgcgcgaataccaaaaatacacttctcaggatttaatttcatacccgccgcgcgtaagttgtcgaaagtctcctgcaagtcggacgcatggtcgaaagccttgtggctttttacgacgatatcgtcgacataagcctccacattttgccccagttgcttgtaaaagaccttgtacactagcttggcgaaggttgccccggcgttcctcaggccgaaaggcatcctgaggtggcaaaaggtgccgaacggtgtgatgaaggctgtcttggggatgtcggccggattcatgtggatctggtggtagccggagtatgcatccaaaaaattcatgagttcgcagccagctgtcgagtccacgagctggtcgatctacggtaagaggaaatcgtccatcgggcacgccttgttgaggtctgtgaagtcgacatacatgcgccattttctgtttgatttctacaccagtaccggattcgccagtcactcgggtggtcgatctcctggatcaccccagccttgagcagcttttgcacttcggctttcgttgcttcttggcgatctgcggacatcttgcgcagcttctgtttccttggcttagcatccggtttgaccgccagatgatgcatgatgaggtctgtcgaaacacctcccacctcgtcggggccccaggcgaagatatcaatgtttttcttgatcacctcaaggatgctgtcagcttctctttcgcccatgtcagccccagcgatacaagtcttttgggatcggcatcgtcgacctgcaccttgattaccctgccgtgaggggcgggcttcggcgcatgcttcgaccggtcatatagttcgacctcaacattgtgcactgctctgttgattgcggccaagtcgccatttgacgtggccgaaggttgaaaccccttgaccacgatcactcctgcagggctaggcatcttgagcttgagataattgtggtgggagatggcttcgaatttgttcaaggttgcgcggccgaagatggcgttatagttgtatgggatgtcgacaacgtcgaacagtatttgctcttcacgcctgttttcacctatgccgaaagctaccaccaattgtgcttggccttagacttgaactacttctccgtcaaagccacgaagcgaggacggtgcttgggtgagggctagggtatgcaatcccatcttggcatatgctttggcgaagatgacgtcagccgaacttcctccgtcgaccaggattcgccgaacttcgaagccagctaccttagccgagatcaccaaggggtcttgatgtgggaacaacactctttcgacatcttctggcccgaaagaaatctgctggttcaagtacttcttgcgaacggactgctgatggctgcttgcttgctgggcgtcgaatttcttgcggagggcctgaacttcttcgacagccatcacggccttgcctgcacgatcggttctgaattttctccaagtcatgggagcttgacttggtcttggcggttgtccttggatcggcggctgagactggcgaacggcgagaggagccggttcggcggcctgcgcttgtacttgggcttgagcagcggcgactgaggccttatcgtactcggcttatattgcttgtcgtcgcttggaatcctcttcaccccttacgtatctgtcaatgatatgaagcaggtgctcgagtgtctgtggctccttgttagcgatttttcttgtgagttcgcccttgagcagtccagccgaagcggtgttgatgacaaatgcttcgattatgtcctgaacttggcattgggcttgcgagaagcgacgcatgtactcccttatggacttccccggcctttggcgaatgccgagtagatgttgttgcgtcttcggctcctcataggtgcctcgaaagttaaggacaaaaacatcgtgcaattgctcccatgagtaaatgctattagctggtaaattgaagaagcaagaacgggcgatgccgcctagagtgagatgtattacctttgccttcgtattttcgtcgccatgagcggcttcgatcgtggattcgtagatggatatgaactcttttgggtctgtttcgcccgggtatcgcggaacaggcgggaacttgaactggggtggtattggacgaatcttgattcccccattcagcggcagccccttttcgccccctgccttgctcacggcaccttactgtagaggcccatttggatatggcgtggcgaagggcgaagtcatggcttgcgcgtgcggttgggctacagtgttcggctgcccggccccgaacggtgacgcttggtgcgccgccatggatggatcgaatgaaggctgggcccatgccatggcgacctggttcggtgtctgattcgttccgaagcctggtgtcggtgcctgtggtcgaatggttggtgcttgagtggcgttgccgaagtcgaattgcggtccttaactccatggcgaagcccctggaccaggcaggttcgatggtagccaactgggtgcaccttgacttgtgttcccctccggttgggctgaaggggttacttctggagtgttgtggggttggttgagctgctgaagaaaagcctgaagctgcgcttgcaaagctgaagctccttcggccattgcttgcgacatttgtccggtgaagtacgctggtgcttgcatgacttgaatcggcgcttgcgggtagacctggggtgggatgtaacctgccgaatactggagaatgggggccgaggcgaccttggcttgccgggtcgcttggtatgcctgctgctgctcttgcatttggcgaagcatgtccaggaatcgcgccatgttctgacgcacggcccccatgtcagcttcggcttgcgctttgaggttggagttgacttgcgcggcggtgagcgcggtcggagcttcagcctaccgcggcgaagcagcttggggcaccatcggttgacttgtcgaaaggatctccaccctggtctggagcgcccttgacattgctgccgcctttgccgcttcgaccgcgttcagcgcctgccccgttgaagcggcaagagccgaacgtggtggttgcggcgcagcagccgaagtcgatggtaccataccagcttcggcgccgagcgccgaaggctctgcttcctcttcggctgccatctccactcctacttcactctccttacgccttgccaccttctcctttgcgaccttcttcggtggcattcgctctcagtggtttcgctcagaggtccccacggtcagcgccagctgttgtcgaatagacaaatggttacccttatgatggggacattattgagggcacactatgtcctttatacatacgggcccctggtggtggcggcggtgctggtggcggttgtggtggcggcggcgctggtggcggatatggtggcgaaggagatggcgacgacgacggcgggccgcggcgctggcccggcttgtcaaggacctcgccgccacgagacctccggcgcagcggcctcattgatgctccctccacaacgtcgacgacccggacagcgcgctgcacctccagatccgagccaccgaggccggatctagccggctggcagctggcaacggtggcggatggtggcatcttgtggaggtggggaaggagtctggcagtggggaaggagaccgggtgtgggcgcgacgttgacgacgggaagatctgtggcagtggcctaggccagatcgctgaagggacaatgtagtcgaccggcgacgatccttcttgtgctgattggttgtgtgggtttggataggcaatcactgccgaaagcctcgccgagccgtttggccggctgactgtggcatcgccttttggcgtcgttcccctccctggaggcat

SEQ ID NO: 61560 - DNA, 528 bp, Oryza sativa
  Clone ID: PAT_MRT4530_62982C.1
gcacgaggacccgcggggctacatgacgcagcagctgacggaccggagcgacgtgtacagcttcggcgtgctgctgctggaggtgatcacggcgaggaagccgctggagcgcggccgctacgtggtccgggaggtcaaggaggcggtggaccgccgcaaggacatgtacggcctccacgagctcctcgaccccgcgctgggggcctcctcggcgctcgccggcctcgagccgtacgtcgacctggccctccgctgcgtcgaggagtccggcgccgaccgcccctccatgggcgaggccgtcgccgagatcgagcggatcgccaaggtggccggcgctgggggtgcggccgccgccgagtcggcggcgtcggactccatgagctacgccgctagccggacgccgcgccacccctatggcggcggcggcggcgacagcgcgtcggagtatagcggcggcgggctgccgtcgatgagggtggagcccaagtgaagatggtggatttgtttccaacgttttgtgtacagctt

SEQ ID NO: 61561 - DNA, 327 bp, Oryza sativa
  Clone ID: PAT_MRT4530_62983C.1
ctagcacaaatgattaatccatgaaactgatacataaacattaaactaatgatgaaattaagatcatcactgtaccagagtactaccttatcctatccatcttgttcagtactcctaacaaatcgatcacgtcatcaggtatggatcgaatccatcacccaaaatcctaaccaattaatgccacgcacgaactcaaatcattactacgctgtttctcaactatgcgcatgcagatcaactgtgattggcttacaatatacacaaattaaatggcattatccatttctcttctccccaagacgatccatctcacgaaccaaaactaat

SEQ ID NO: 61562 - DNA, 435 bp, Oryza sativa
  Clone ID: PAT_MRT4530_62984C.1
ggagcgccacctggttgctggtgccggcccgcaagctcttcctcctctcccatcccgacgccgaagacgacctcgccggccatggtcgccctccgctccgacgtcctccacgccgtcaaatccgccgtctctctccatctatccatcggccggctccccgcctgcacgccgcggtcgagtcgctggccgccggactacgcgcgcgcggatcgacgaggaggtccgcaagctcgacgggaagattgctgacgctgaagagaatttgggtgacattgaagtgcgtgaggcccatctagccgaatccttgtacttcataagtgtcaggcagaaggtaaattgtatgcatgcttggcgtctgtatgaagtgcatgacaatgcatccggaagcatcagctgttgccacagctattcttgatacaataagatctagagctg

SEQ ID NO: 61563 - DNA, 371 bp, Oryza sativa
  unsure (1)..(371): unsure at all n locations
  Clone ID: PAT_MRT4530_62985C.1
gntgaattcttctggggttgggtattttttttgccgggaaagcacactccagtagtggcaaatgaatcaatcactcctgggggaggggatccaagtttttgaccagttttgacgaatcctcacttttcttttttgcacacatttccccaaccaacaaccttactagaacaggataaactaatacttttaagcccagatctagcaataaagcccaccaccaattaactaatcaaccggttccatgagctaaaccagggtaagggaggcagtgacccaccaatgtagtagaactagtacgaggttttaatcatccggtaaaaaatcacaaaaaaacgaagaacgaaataagggcatgcattttaggggcactt

SEQ ID NO: 61564 - DNA, 1092 bp, Oryza sativa
  Clone ID: PAT_MRT4530_62986C.1
atggcgcatgctaagagcaatggatatcaagccagtgatgccaccagctcgctcgacgctctgagagagctctacggcaacaccttcgccgtcgtcaagtccatggctctcaaggccgccatggacctcggcatcgccgacgccatccaccaccacggcggcgccgccactctgtcccagatagtcaccagggtcgcgctccacccgtccaaggttccatgcctgcgtcgcctcatgcgcgtgctcactctctccggcgtcttcgccgtccagaagctggcgcccggcgatgccgcagcccctgccgacgaggccgaggcggccgtctacgcgctcacgccggtgtcccgcctcctcatcggcgccgggaaccagggacacatgatgtccatgctgctccacccgaacttcatcacccccttcttccggatcagcgactggctccagcgcgagctgcctggcccgtgcatcttcaagcacacccatggccggagcttgtgggagatggccgacgacgacgccgcgttcaacacggtcgtcaacgacgggatggcgtcggacagtatcttcacgatggacatcctggtcagggagcatggcgaggtgttccaggggatcagctcgctggtcgacgtcgccggcgggaacggcacggcggcgcaggccatcgccagggcgttcccggaggtgaaatgcagcgtgatggacctcgcccacgtcgtcgccgaggctcccggtggcaccggtgtcgagttcatcaccggcgacatgtttgagagtgttccaccggcaaacgctgtcttcctcaagggtgacaacgactgtgtcaagatactggggaactgtaagaaagccatcccaactagagacaagggagaaaaggtgataatcatggatatagtggttgggacagggccgtccgaccaaaagcatagagatgtgcagatcttgtatgatgcatacatcatgtttatcaatggtgccgagagagatgagcaagagtggaagaagcttttccttgaagctgggtttagtgactacaagattatgccaattatgggattcaggtcaatcatcgaagtctacccttga

SEQ ID NO: 61565 - DNA, 837 bp, Oryza sativa
  unsure (1)..(837): unsure at all n locations
  Clone ID: PAT_MRT4530_62987C.1
cggtntcgtggatctcccggctgtcggcatcaccccgctcctaccgggtagggcttcctccttcttgctgcttttggctgctgcttccgcgccatccatcctagtgaccacatcctccgccaccgccgccaccgccgatccccatccatcgcgcgagcatggtcgccgtcgctcgtcctgctgcttccgccgcatccaatgaaatggtttgtgggatatgtggcagtggtcatgaccaagatagaatggcaaaatgtattcggtgcaatgtctatcaacattgttattgcttcccagtggtgacatatgatgttcctgatgaatggtgttgttgtgagtgccaaaacaagtccaattgggaccaaactcctagtcaaggtgggcaaactatcaggaatagagtccatcaagatagcctgaaaattccaaacaagtttgaaaatgccaaagtgaaatacatttcttatgaagaggtgtcattattgaataataatgagagaccaccaaattgtaggtcaaattttcatgtgcgacgtacaaatagtcatgtccgtcctgcatctcctccaaatgcgaaacagtcatctagtaggagtgacaatcgtgcttatagccagttccatcggaaatttccaaatgggcagcagtccccctgtaggagtgacactcaagggccttttctgaaacgaggtgatggtgcaagtcagaaccagacagagattgctggtataaacatgaaacagaaagcacaatcaggtgagatgcttcgtccatgtcatagaagcagagcaattagaggaaaaaatgactttcaggntcaaaatgagcagagggaaa

SEQ ID NO: 61566 - DNA, 592 bp, Oryza sativa
  Clone ID: PAT_MRT4530_62988C.1
cccacgcgtccgcccacgcgtccgaccacgcgtacgcccacgcgtccgcatggagcaatctatcatgcaccaagtgcagctcgatgctgtctctgttggcgagcgccaagcttaggcacaggccgatgcgggtaccaatgggccctgcatgtgtggagcgtacactcagcactgcatcactccatgcaaagatgctactaggcatcgcggctctcggtagagcgtaccatgatatctatatcgcaggatacatcaagtgacacacatcatcatgcgtgtcatgtgctagaatcagaagtagtctatggctgatcagttgcataaccgggctatttgccccatggtgcagtctatcatgcagcaagtgcagtttgatgctggctttgttggcgagccccaagctcaggcccaggcccaggtggctctcaatttgccctccatgtgtggagtctaccctaggtactgcagcactccatgcaaagttgctactggtattgcgttcttggtagtgtgtacatcacacacatatagttggataataagtgtacacatcatcgtgtgtgtcacgtgtaaattgatagcttcgtgtcga

SEQ ID NO: 61567 - DNA, 223 bp, Oryza sativa
  Clone ID: PAT_MRT4530_62989C.1
gggcatagcgccgagccgccgactggctgtcgatggaagcagcggcggcgggatggagcacgaggttcacgcctccctcctcgccggccgtcgccaccacgacacaccttcctcctcaccagtcacgtggaggggtttgccagcgccgactggacgtggatggaggcggtggcaggacaaaacacgagggtcaagcatccccgcccgccgtcaccgccgctga

SEQ ID NO: 61568 - DNA, 1365 bp, Oryza sativa
  Clone ID: PAT_MRT4530_6298C.1
atggggcatcacatgactggaagaatctacttaattatattaaggtgtagaatatcaggtattcaagttcatggggataatttggttgaccatggtagttcaggggtaattcggattttttttttagatttgcaaaggtaccttattgtgattgataatgtatggtccatatcagcttgggaagctatactatcaagactgctggataacaagtgcagcggcagaatcattgtcaccactaggatagagcatgttgccagggcgtgcagctcagctagccttgaggaagactactacatccatcgaattaagcccctccaattcgaagatgccaagaaattgttcattaatgcagtatttggccctaaacaagattgcccacagcatttggtagaaacaatgcacaagatattaacaagatgcactggactaccgttggctattgtctgtattggcagacttttggcaggctacagggcttgcatgatgtatctgagcattttccttgaagattatgatattggcaagaatagactgttgtacagatggattgccgagggcttagtttctgagcaacgagggctgacactcatcgaagttgcagaagcctactttgatgacctggtgagcaggcatatgattcaaccaccctgtgtcgaaccctatggcaaggagccaaagtgtcgagtacacgacatgatgcttgatattactgtgtcgaaggccttagaatccaactttgtcaggttggtaggaaaccaatgccaaggtactaattcatatggcagtgttcgtcgtttgtccatccacagtgatgaccaagggtatggcatcgacaatacaaaattgagtcacatccggtcattgaccacttttcgccccagtggtcatcgaaggctattggataaactatccgagttcaccctactgagggtgctcgacctacaagattatataacagaattgcctagccagataaacaagctacatcatttgtacactctatggttatatgaaacattgcttaacaaggtcccggaatccttggtcgatctagagaaacttgagcgcgtaggtttcacaaatagacatgacccaacaatacttctgaggctaccccgtcacattaggaaaatgaaggtcttacaacagatatatagtttcgaactccgtaaggatgacgttcaacttgctagagagatcggtgaccttgtacagttgcaagttctcggtgtcatcctcagttgctccaattgctccaatgagcaggttctcatcgagctcgccaaatccataggaaggtctccacgagttgtttatggatggcatgcgttttcaggcaaacaacatgaattttctccttga

SEQ ID NO: 61569 - DNA, 581 bp, Oryza sativa
  Clone ID: PAT_MRT4530_62990C.1
aaaaaaaaaaaaaaagggccttggaaaacaaggggccaaagccccccaaaaaaaggggtttttttttttttaacccgaaaaaaaagggtatttgggtttttaaaacaaagggaaaccttttaaaaggggggcggggcccgaaccctccgggggggggggcccaaaaaaaaattccatttcaggccccttgtaaagaagggtcttaattttggtttggggggctaaaattttacgtgcccccccaaggggggggggccctcaacgttttgaaaaaccggccacttatggaaatgtggccccttgggcccggggggggaaaaattttccccaaaaaaaaaattggggcccttttacctcccgggcccacggttaaaaggggagaaaatttttcgggaggggggggccccccccaccccttttttaatttttgaaagaaaaacccgggggggaaccccggttttacagggagcccaccccggggggggtaacccaaaattagggggggggacacacccccgtggggaaagaaacccccctccaagggggaaaattgccccgggtgcccccccacccccccccaa

SEQ ID NO: 61570 - DNA, 2580 bp, Oryza sativa
  Clone ID: PAT_MRT4530_62991C.1
atggggtcagagtgttgggctcactttgagaagaaggctgacaacatggcagagtgcaggcactgccataacttgctcagctacaagaatggcacctcgcgtctcaacaggcactaccaggaatcctgccggaagcgtggcaggcagcagggctctcatcatggtgcatcggcgttctcaagatcgagctctgatgatttgggtgagcaaacagcggctgctgctgctgctgaagatcagctcatcaggatgatcgcgctgcacgggttcccttcctccatggtggaagacgtggagttcacaagatttgttcggatgctctgccctgacttcaagatgccgtcgcgagacgatgtccggaagaggtgcgatgagctcttcgaccgagaaatgagcagcttgaaggatgctattgggcgtacgcctgggcttgctagcttatcattaggaaaaaccacaactgcctgggggaaagttgcgtatttggctgcccacttcattgatgaagagtggaatttccattgcagagttatacaggtgtttaaggcattagaagtggaagatgacaccacctatggtctcagtaagatattggatatcaaagattacatcatagacatcccagttacagattgggagccggaggactatgagcatccgagatataagctcgtctatgttgaaaacttactcaagaattttcagagcattcttaagaatgctccctctgtagatctagtttctaaggagaaggctgggcagaaggcagagtgcaggcactgcaagaagcagctcagcttcaagaatggcacctcgcgtctcaacaggcactaccaggatacctgcccggcaaggaagcgtgccaggcagcagggctctcatggtgcatctgtgcaagcggggattcacgatttgcaggatgcgccggctttctcgagatcgagctctgataatttcggtgagcaaaccgcggctgctgctgctgctgctgctgaagatcagctcatcaggatgatcgcactgcacgggttcccttcctcgatggtggaagacgagcagttcataagatttgttggaatgctctgccctgatttcaagatgccttcgcgagatgatgtggaggagaggtgtgatgcgctcttcgaccaagaaacgtgcagcttaaaggatgctattgcacgtacgcctgggctgctctccaacatcaaacctatcccttatagagcttgtgaagctgaaaagaaagattcagaatggatcaatgcatctaggaaagatgatagtgatgatgaagatattgacgaagaacaagctcctgatatcgaggactatgatatgcaatcccatcttgaacaaacaaaagaatatatggacaagttttttgaggattcatatttatcacaaagcatatcgcttattctagacccaagattcaagctcgtcaacgctgaacgccttctaaagaaagcttccctacctccagatcgcatttcggaggttcaagcagcagtcgttcagctctttcaggactacagtaatcagggcagtgcaaggcagcacaccaatcataacaatgaaaatgtaatggacatcgatccattccagcaaattgataacagtactttccaaactgttggtcaatccagtatggagcatgatcacaggagaacagaacttgatgcttacctgcgagaaaagaccgttccaatcaagcaagagaatttcgacattctcaaatggtggaaggagaactgtcacagtccaagttcaatcaccaccaagaagcttagaaccataatgcaaactctgggcctgaacccgatgaaggcggagctacaagacattattagcgaggtggacgctgacggcagcggcatcatcgacttctacaagccggcccagcgcagcccattactgctcatcgtccccttccttgagccagccagtgcatgcacacaagggccacgtagcgccgccccgcacgccgcgccaaagccgcatcgcgccaaactccacgaaaaccgccgcgccctctccgggagacacggagccacgtcgccccgcgtcacccccgtcttgtcgccgttccatcccgagctctcgcggacgcgcgtcccttcgctgtcgcccgtcgtcttgtcgtctgtctcctcccgggaagccgccgagctcgcgcctccctctcactcgcgttccatcgccaccaccccagagccgccgcgctattctcccggcgccgccgtcgccggtggagcctcgccggagttctccgccgccctccctcagccgccggtcgcctcgccgcgccccatcgccgagacgcatcgctatcccagaccgagccgagcaaaagagcgagaggaggaagaagcaggcctcctcaagcctctgccaagccggccccaccttcctttactccttcctgccactgacgagcagggcccgtgcgccttttcctctctagcagccaccgacaggccttatcacgaactttcgttgccgacggagtatgaagatgaagacatcgacccgaccgccgaggagcatctccaggagcaagctgagtatgaagacttctag

SEQ ID NO: 61571 - DNA, 641 bp, Oryza sativa
  Clone ID: PAT_MRT4530_62992C.1
cggtattgttccacaccgttagcaacggcagagcgtagggcaggttcgtcgtcaactggagccttattaatatcaccgtaacaaacatatgggccttgttgactgctccgaagagccatttaccagtagatcatgaatacattgctgatgttgctctagcccatatctttgaccgcggacttgaggaagtgttctttcaccatggcgcgtaaatcgcactgtggcggggggaggacacactctagggtgaagacattgtataactaaagccaacaactttactgcagctgatgcacgcggactaaacagaatttatggaggactgcaagataaaccttctgactggaggcttgccgaagaagcactgcttaatggtcgttacgaatacggacaacgcaatatggagcaaggaagcaatcattaacaacctccagccatgtccggtaaactaggcgtcgccaaagttcaacgaggattacgaggcctacgtccaaatattttcgttggcgcaggtgaccatggtaatcctggggaagagcatctgggagtgggaacttgctcccttggtcttgaaggctttgggcctactgacaactgagctggcgccttagattcccttccaaaccacatgttgatgctgg

SEQ ID NO: 61572 - DNA, 159 bp, Oryza sativa
  Clone ID: PAT_MRT4530_62993C.1
taccaggtcctaggaattgccacagggtgcgaccacaactgcgtgcccagcaggacagcagtgggggcaggacagctagtggggcaggactgcagtgggggatagggtaggatgcagcacaaggccaatgagtgcaaggtccacagctggctgcgagac

SEQ ID NO: 61573 - DNA, 945 bp, Oryza sativa
  Clone ID: PAT_MRT4530_62994C.1
atgccggagtcttggagagacgcggaggcgaacgcctcagcggccgcgccgccgtcgtcggcctccgtcgccgcggcggactcgagcctggggaatggcaagggcggtggcggcgccgcggcaaggggagagcgcgcggcgtcagcggcgtcggcgtcggcgtgggtgccgttccacttccacaagctgttcgcgttcgcggacaagactgacgtggcgctgatggcgctggggacgctgggcgcggtggcgaacggcgtcgcgctgccgttcatgacggtgcttttcggcaacctcatcgacgccgtcaaccgggtgtccatggtctccctcgagttcatttacctcgccatcgcctcctccgtcgcctccttcgtccaggtgacatgctggatgatccccggagagcggcaggcggcgaggatacggaacctgtgcctcaagaccatcctgaggcaggagatcgcctttttcgtcaagtacaccaacaccggcgaggtcgtcggcaggatgttccggcgacaccatgctcatacaggacgccatggcggcggcgacggcggcgcgtcatccgtcgtcgtctccgcagccgccgccgccgcgcgccgcctccccgtcggcgtccgcaagccgcccctccacgtcgtcgtcacgggggagcgggcttcatcagcagccacctcgtcgacgagctcccgcggggacagcgtcatcatcgtcgacaacctcttcacggggcgcaaggagaacttcgcgcaccacctcgccgacccgcggttcgagctcatccgcgggcacgaacctcatcccctgccggcgaggccgcgcaagccgaggccgtcggggcctcgcatccgcctctgcctcctctgcctcgcggtcgttggcggccgcctcctcatcccccaccaccgccgtgtccgcttcacccgcttccgcccgtga

SEQ ID NO: 61574 - DNA, 288 bp, Oryza sativa
  Clone ID: PAT_MRT4530_62995C.1
atgccatttcatccgttttgggttgtaacgattggaggatgtcagtattatcagtgggaggatgaaatggtggacactggagtgcaaacacctcatgcccctgctccaattcatacagttcccctacaagcagtggcaccacctggtggtttccctactactccactgcctatcaggcaagatcaagctactggagtggacattagggtgatgcagcagcttaagtggcttgaaaagatggtctatgtttgcatttttcttactttgtatgctattttcaagaagtag

SEQ ID NO: 61575 - DNA, 297 bp, Oryza sativa
  Clone ID: PAT_MRT4530_62996C.1
gattctatcagcggccccttttttttttttctaaacaaagttaccacaggggggaaaaaactagaagcccggcgccaaataattacaaaaattccactggtaataaacagctctattgttcattgcatagcatgtcataacccaaaacgaggtgggtctaaaaaacttttccaggggataaactcccaaaccaaaccaaggatgaacactatcttaacaaggaccaacaggggcaaccaacctatcatccttcggatgaccgggactcaacaagttcccctaggaacaggaaaactt

SEQ ID NO: 61576 - DNA, 693 bp, Oryza sativa
  Clone ID: PAT_MRT4530_62997C.1
atggccggcggcgagcgacggcgcgcgaggcgcctggggtggcggcggccatatctctcttgcgcaagcgctcccctcgtcggccatatcaccgacaccctcccctcgtcggagctctgcaagcgccatggcggctccgctgcttctggtggtggtggtggtggtgaggacgagaagctccacttgctccgccgcctcctcgcgcggcccgacatcgccatcgactccacgcgcctcgcgcgccgccgcgcgcgccgtcgcccgccgccggccatgcgctgtctgtcgccgctccgcccgtcccgtggcctgccgccgccgccgctccgccgcaaggacgagggagagccgagaggaagaagaggaacagccaagagtggagaaggagaggggaggggatccggcgagctcagcttggggggcggcgggagcagcgtcgtcagcgtcgctccgcccaccgcccgccgccgctccatttcgccccactgccgctccgcttcctcccgtcgcccaccgccggccgtcgctccgttcaccgctggccgccgcgccgcttcgctccgtcgccgcgccgccaatcgtcgctccgcttcctcccgccggccgcttcgtcgctgcttcgctccgtcgccccctcggcgccgccgctcgcccttctctcctggcagtgtagggggagagagagggggatag

SEQ ID NO: 61577 - DNA, 298 bp, Oryza sativa
  Clone ID: PAT_MRT4530_62998C.1
ggtccttcttttattatttttttacccccttttcaaaaaccaccacaagagggggagaggaacacataacgaggagggactgccacttttaacagcagcgggaggctggacaacgaaacaaaaacaaaaaacgccccaccacaacccccctttatattaacacagaattaacacacattaacccccccgggaaaccccccccccccccgcctcgggggggccacaccagaacgcgacaaaaaaaggggtagtggcgtaccaatactcaaaaacgctcaacggagtaggaaaaggaggc

SEQ ID NO: 61578 - DNA, 372 bp, Oryza sativa
  Clone ID: PAT_MRT4530_62999C.1
atgacgacgacgtgcgcgagtgaaggaagatgtgtaatttcgaagggatctaaacaaggcctctatgatgatggtggcggcgacagcggtagcggattcagtccctctgctgccgagcacaagcgacacgagcagattggcaacctcgccgtcgagctcaagcacccgcgccttgcttcggagccatcagccatggtaccgaggttaaggttaaggtgccctcaggcctcatggacacaccagaggaccaataacatggtgaccatgagctgtttgcttggctttcagcttcagaactcaaaagggaaaaatattaaagtgaacaggggaactgggatgggaacatggaattggaagaagccgcatccgtaa

SEQ ID NO: 61579 - DNA, 275 bp, Oryza sativa
  Clone ID: PAT_MRT4530_6299C.1
gcaataggtaccataccgctacaggatgatcgctgtgatgaaagctcttgccgaagcgtcgacgatctgggcgctagtacattcccaaggatgtcgcgcaggaacattaagcggaggtatccaaagattgcaatcttctattgacggcggatccatggagtgccagagcactaggccgccagccctttacccgattatgacggtgatgcatgctgttatgattacagagaggtcagaaatacagataatgcagggcacctacacacagacaatcc

SEQ ID NO: 61580 - DNA, 1281 bp, Oryza sativa
  Clone ID: PAT_MRT4530_629C.1
atggcggcggataagagccctatcgacgaggctcccttctatggtaaacatgagcaagaagatctagggacgatcgcgtacagcgcacgtgctccctccagcgtaaggaacatgctccctcaagcggcaggtggcttcaccaagccatctgcttctacaccggcaacctcatggaccgctgcatgcgcgtcgatcgctgatctaccctcgcagggcaggtggcttagcctggcgctcttcaccaagctatatgcttctacaccatcaacctcatggaccgctgcatgcgcgtcgatcgctgagctactggacatcggccacctcaccttcagcggctatggcctgacggccatcggcctcatcatcttcgtcatcctcttgggcgacaacctcgacaagctcctccccggcacggtggtggagatcctagggtaccaggttttgctaatctcttcggtgatgtgcagtctcaactctacagtgacaacagtgttgggatatctgagctatggtgaggatgtgcaggtgaaggtgacactgaacttacccacggggaagctgtacaccaagatcgccatcttgacgacactgatcaccccgctggcgaagtacgcgctcgtgatccagcccatcacaatggcgatagaggacaagctgtcggcaatgatggcggcggtggctgacaataggaacaacgggctaaccagggtgctcaccagcagccgtcgttgtcaacatgacggtgctggcgtgcactttgcccttcttcggctacctcatgttgttcatcgggttctcactgaacgtcgtcgttgccatgttgttcccgtgcctgagctacctcaagatctacatgccccgaggaagagttgtccgcttcgaggtggcggcgattgttgggatactggtcattggagtgtgcgtcaccatcgttggcacctacacttcccttcaccagattatcggcacattttgatcgggcatttgtgggtatggtggcacccaacatcacttcatgaccatggtagggatagtgatgatgatgatttccgagacagggattatgatgtggcagctcttgctaataacttgagccaggcattccgatatgtgatatataacaatgatgatatggaagagaatcaagggacacttgaacgggatgatgaggatgtctattttgatgatgaatcagcagaggtcgtaatatgttctctgcgactgggagatgaccttaaaacttactttggtatcctctttttttttttgcccttgggctaa

SEQ ID NO: 61581 - DNA, 1585 bp, Oryza sativa
  Clone ID: PAT_MRT4530_62C.1
tgcagtgaattcggcacgaggtggaaaagaataaaaaaaggaaaagaaaagaaaagaaaagagagagaaggtgtggtggtggaaggaaccctagcggcggcgaccggctccgatggcccctccaccgccgtctccgtccccatctccggcgagcggcgcgcagtacgcgcaccagttcctgaacacggcgctctcccagcgcgggccctccgccctgccctacgcggaggacgtgaagtggctgatccgcaaccacctcgtcgccctcgccgacgctttcccctcgctccaccccaaggccgccctcttcacccacaacgacggccgcgccgcccacctcctccaggccgacggcaccatccccatccaccacgccggcgcctcctacaacctccccgctgtcctctggctcccggagccctacccgcggtcgccgcccctcgtcttcctctccccaacacgcgacatggtcatcaagccccaccaccccctcgtcgaccgctccggcctcgtcgccaacgccccttacctccgctcttgggttttcccctcctccaacctcgtcgatctcgtccgatccctctctcacctgttcggcctcgacccgcccctcttcaccaggagccccaatcccccacccccttccccttccccgccgatccctgccaccccgctccctcgcgtccacccctcctcctcctcctccccctccccatccccctacagattccctgcctcgccccagcttgccgcgcgccccccacccaccgaagaccccgctgaggtctacaagcgcaatgccatcgctaagctcgttgacatggcctatgccgatgccgccacgctgcgcccagtccgcgaggctgaggtcgacactctcttcgccatgcaggctacgctgcgcagccggggggaggtggtctctgatggggtgcgcaagatgggggaggagaaggaggcacttgagcgccgcctgcaggatgtaatgatggccacggacctcatggaggcgtgggtcatggagaacaccaagggtgctgccggcgacactgaagcggacgaggcaattgagaccgcagatgtactgtctaagcagatgcttgagtgcactgctgcggatttggcactcgaggacaccatttatgcgcttgacaaggccattcaggagggttctgtgccatttgatggctacctcaggagcgtgcgagcgcttgcacgggagcagtttttccaacgcgtcctgtcaaccaaggtgaacaaggcacaacaacaggctcaggttgctagaatggctgctcgggcaccacagtatgcatcataggaccggtgaggggtaacttgagtatacttactttgatattgcctttgtctaccaactctactatagctgtcccagtgtaaagttcgtttgctctttgcacatcttttttggggtggatgggggttacttactagatattggatggatgatcccatgtcaaataagaaccttagttgggagtgctgccctggatcttgtgtacgatttctgtacttcaatacatatcttcagttttgttctttgtgataaaaaaaaaaaaaaaaa

SEQ ID NO: 61582 - DNA, 417 bp, Oryza sativa
  Clone ID: PAT_MRT4530_63000C.1
ggcgaggcctccgggccggccccttcaccctccccctccctctcctctcctttgcctcaagccggcagcggcgagctgtctgttgtcttccctgtcgccggcggggcgccaccaccagccgcctcctcctaccactctttccgttttgcccccgccgcccgctcccgacccagcagctacggcgccgccgccgctgcctcgccgcccgctcgatccgccgcccaccgtcgggctgctgcctcccacagccatccctctaaagccgaccctaattcgtcggccctctgccggattttgggttcgctggcgcaggagaagaagaggtggacgccagagttggagaagaagagcatgaatcatgaagcacatccagtgatccaaaatttacaagatttgaggttctattttctgtcaaca

SEQ ID NO: 61583 - DNA, 268 bp, Oryza sativa
  Clone ID: PAT_MRT4530_63001C.1
atgaccctgtccatgaagccgcggaaggtgctggtgcggaaggcgatgaaagaccgcaagaagaagaagggccccaccaagcccaccccatggaagtgccccctctgccacgagctcttcctcggggtgcgcgagggtaaccgccacttcgaggagtgcgaggcggcgaccaaggccgcgcgcgccgccgaccagaggaagatggacgtggaacgcgctcgccaagaggagctcgtgggatccaaaaaggccgccccaccgaaggaag

SEQ ID NO: 61584 - DNA, 1291 bp, Oryza sativa
  Clone ID: PAT_MRT4530_63002C.1
atggcggcgacactcgcaggccgccgcctcctcctgcagcgatccgcggcggcggcgggggggaggtggcggctgctggggacggcggcggaggcgtcctcctctccgggagggagggaagaggcgggcgggggagggggagatgagatctacctgaagaagccggcggcggcggcggcggtaacgacgcgggacgagacgtcggtggcgatgccgatgtcgttcatgacggggtcggtggtggggaagcggttctaccgggaggccaccgtgcggcgcgccgacgacggcaacgggtggtcggtgatgctcgactaccgcaccctcaagtcgccggcgaagcggccgctcaagctgcagtcgcggacgctcgccatggccatcgccgccgagtgggagtaccaggtcatgatccccatcttctgtttgattggccctcgattggttatgctgctcaactgtagtgtaagattactcaaattcggatggaagatggaagcagatggaatccggccttttacaatgcctcttatgaagcttgcttgcactgcactggaacgagttccattgacacgaaaaaaaataattgataatttgatgaagaaattccaccaagatttggtattctgccgttcacctgatgataatgagctgactgtaggagtttatcaaagacagaaggagaaaattgaccctatactagactgggtaaacactgagtttggcttcaagcctgttgtatacacaagcttttttggtggaaagcaagatgaagggttagctaatgctgtagaaactgttttgaagaataccaccgactttgagttggcatctattgatgctatggcagcagcagcccattccctggtaatccctctcgcaatattcagagggaagctgggaattgagcaggcaattgaattgatcagacttgaagaagatcaccaggttgatagatggggcttggttgaaggaggtcatgatgttgatattgccgatctcaaagtgcaaatgtcatcagctgttgtgtttcttttactttcatggcaactatagttacttatgtagcgaatctacggatcggttggtttttttttgtttgatctcgactttcgagcttgtatcaacttttgtgacgactggtagaataagacttccctgcagatggttaatagggagacagagctccagaatttaatctgttggattctggtgtctcaaacagtatgtttgttaagatataaaaactcaacctgtggaataaaaaaaaaaaaaaaaaaaaaaaaaaaaa

SEQ ID NO: 61585 - DNA, 2538 bp, Oryza sativa
  unsure (1)..(2538): unsure at all n locations
  Clone ID: PAT_MRT4530_63003C.1
cccgggctgcaggaatcggcacgagggtctacctatacctactactacctgtcatcttctccttcttaatcccaactaaatgcggccataaacgaagaagatttgcactgatacccgcgctgatacaagcaagcatccggcgatggcggcggcggcggcggcaagggggagcgtgtgggagatccagcagcgggacgtggaggccgcggggctggccgacgccgacgcgggcgccttcgtcgcggcgcttcgctccgccgccgccgttgcgacgggtgggcctgacgccgcgtgggaggccgtggcggcgggggtgctgcggccggagcacccgcacgcgctccaccagctcgtctactactccgtctacgccggctgggatcgcgccgcccggggcccgccgccgtactggttcccgtcacagattgacactaaacaaacaaatcttggtagactgatggaagcacatggtcctaggttgttaggatcatcatataaggacccagtttcaagttttcacctcttccacaagttctccgtagagcatcaagaggtctactggtcaatggtgctgaaggagatctcaatcaagttccaacaagaaccaaagtcaattctagatacatcagataaatcaaggaaagggggaacatggctccaaggtgctgtgcttaatattgctgaatgttgtctgttaccttggccttcccaaaacaggacagatgacagcacagctattgtttggagggatgagggtcttgacaatcacccagtgaaccgtatgtcactgaaggagcttcacaatcaagtgattacagttgctactgcgcttgataccatgttccaaaagggggatcgaattgcaatagacatgcctatgacatgcaatgcagtcatcatatatttggctattgtccttggtggttttgttgttgtgtcgatagcagacagttttgcacctcaggagattggtacacgcatgagtgtgtcaaaggcgaaagctatttttactcaggatttcataattagaggagggaagaaggttccactatacagccgtgttgtgcaagggacttcatctaaagctgttgtaattcctgcaactggaggctttcttggggtttcactaaggaatggtgatatgtcctggaaagatttcctttcttgtgctgctggaaggtcgtccatttatcccacagtttatcaaccttcagacgctctaactaatatactattttcttcagggacaactggagaaccaaaagctatcccatggtcacaactttctccaataagatgcacatgtgatacatgggcgcatttggatatccagccacaggacatattttgttggcctactaatcttggatgggttatggggcctatactcttgtactcatgctttttaagtggtgcaacgttggctttgtatcatgggtcaccacttggtcgtggtttttgcaagtttgtacaggatgctggtgtcactatattaggaagtgtacctagcttagtgaagtcatggaaagctgggaattttactgaagggcttcactggaccaaaatcaggtactctccacgacaggagaggcttctgatattgatgatgatctatggctatcttcgcgtgcctcttacaagcccattattgaatgttgtgggggtactgagctggcatcgtcatacattcaaggcagtcttctgcgttcgcaagcttttggagcttttagtggtgcatccatgtccactgggtttgtcatacttgatgaacaaggaactccatatcctgatgatgtaccttgtgctggagaagtgggcctcttccctttatattttggcgctacagatcgacttctcaatgctgacaacaataaggtttgttttgatggaatgcccatttacaatggaaggcaacttcgacggcatggagatataatccaaaggacagtaggtggttactatattgtgcagggaagagcagatgacactatgaatcttggaggaattaagacaagttccgtggaaatagagcggatatgtaatagagccgatgaggctctactagaaacagcagcggttagcatcaaacctgctggtgggggaccagaacagctggctatcttggctgtgctaaaagatagatcaccaccatgtgatgcaaatgttctcaagagcaaatttcagagagccatccaaaagaacttaaatcctcttttcaaggtgagctatgtcaaaatagttcctgagttcccaagaacagcttcaaacaagctgctaagaagagtactgagggatcagctgagcaaagaactctcgaatcgcagcaagctatgaccgacgtgacatattcaacaaggaccacaacaacaacaccaatagtagactttagtccaaagcaaggtagagatgaggagccatacggacagtnagggtaattcaaaatcgctttcaaaatgccctcttgcttgtcaatnggtaatattgaattatgngtgtgtcaaaaaaaaaacagccntttgattaagggncctggttctt

SEQ ID NO: 61586 - DNA, 1323 bp, Oryza sativa
  Clone ID: PAT_MRT4530_63004C.1
atggcggaggaggcggcgcaggagcagcagacggaccccgccgcctcccgccccgtccgctgcatcgtcaaactcggtggagcggccatcacgaacaagggagagctggagagcatcgacgcggcgagcttgcggtcggcgtgcgcgcagctgcggcaggccatgtcccacggcggcgcggcggggaaggttgtggggatggactggagcagacggcccggcgatccgaccggcccggtcgtggatgtggagggcttgtcggagatgggaggcttggggctcgactccaacttcgtcgtcgtccatggtgccgggtcttttggtcacttccaagcaagtagatctggagtccataaagggggtcttcattcaacacttgtgaaggctggctttgtggctacaagaatttcagtcacttctctcaaccaggagattgttagagctcttgcaagagaaggaataccgtctgttgggatgtcaccgtttgcttgtggatggtctactaagcaaagaaatttttgcacttacagcttgaatcagtggatgcttctcaaatcatgctatcactccatgttggctttgtccctgaaatgtttcaagaatagggaaagcattgcatacttccacagctctacttatgttttcttcatctacattaaaaagaacataaaaaatttcttccaggttttgcatggagatgctgttcttgatgaattgctggactgcaccattttgagtggggatgtcattatacgccatcttgcacagcttctgagtccaaaatatgttgtatttctgacagatgtccatggagtatttgatcgtcctccatcagacccgaatgcagtacttctcagagagatagcggtggatgaaaatggcagctggtcgattgtaaaaccagcattgaaaggcaacaagaaaggagtggagatatctgtagctgcacatgacaccactggcggaatggagaccaaaatattggaagctgctgcgatagctaggcttggagttgatgtgtatattacaaaggttggtacagaacattcactgagagccttaaaaggggacacgagctcagaagattggcttggaaccgtcatacgatcttccagatagaattcttggcctatcattttcgggagtaagcatccattggcaaatattttatcaccattattgtaggacggttgtgaagctatgagctgatcacctgtcaaatgattcatggggttattattgctgaatctcatagcagacaatgaggcagagctcggtgttatgctacaagtaacagtcctacgacattataataagtaacct

SEQ ID NO: 61587 - DNA, 1642 bp, Oryza sativa
  Clone ID: PAT_MRT4530_63005C.1
tgccgcgacgcccccgctcccctcctttttcccaaagaagaaagggacgagccccctttctctccctccttttccccttcttcctcccgccggcgtcatcctccctccgccctgtcgccgattggacgcgagcgccgagcgccagctcgcgccttgaccgcccaagtcggttccaaaccgacattgccgcccttaaagccccgggcgccctccctctcttctccctcccatcgccattgtcgccgccttccgagctctgtctcgcctccgccgttcatcgccaagcgtcgggaaatccgtagctcgagtagcctccccgtagctagccggcgccgccccgaccgttgccgccgctcgcagtgtgctcgccgccgtcgccgcccgtgctccgtagcacccgctcgtcgccggcctcgctcggcgtagctccgcccaatccgacgctagcaacggattcccgtagccgcgtagatgttctcaccgccgggaattggcccctcgtgacctcgtcgccgtttcccccttttgctctccgccggttgccgccgccgaaatccgccgccgacggactccctccggcgaatccaagccgttggctcgctccgtctctttcttcctcgtcatcccggtgtacgccccgtcgcccctcatcgtcgcaaggcgccccggagaaaccgccgccgcccgccgtccattcgcggccggcgccttcgtcttcctcccgccggcccgcgtggcagccacgtaggcgccacgtagacgccacgtcggcgccagctcggccgagatcgggtcgggccgaccccggtcagcccctcccttgcgtctcgatattcgtgcaccctgtgcgagtatcgacggacgccttcaaacttaaaatctgaaaaaacttcttgggtaaaactcgggttttacaaaagacttggaaaacccgacacctgggtcggtgcttgcgaactaaatgaatttccaaaaccgcggaccgggggacgtaccgggtgtacggttttccgctctcgcacttaaggaccgtttccttggaatttcatccaaacataagacaagtacgaccacatgggttctgccttgcagacgggacaaagagattaagtgcgatcctatcaatgcataatatttttcaagcaacataattaaattcaaatataggctcaaggtgttcaaaggtggcttgccttgcttgagatcttgagcttgatcctcgaaatcctcgcactgcgggtcttcgggctccgaaagcgtgcagagtggcggggtcgggttgatgacgacggcgatgacggcggggtggtttggagcggggcgacgacacgggcggtaggcgcggcagaggctgacggcggcggcgaccaggcggtcggccaccacggcgcgcgcgcgcgggaagcaacgggcggcgcggcgatttgagcggcacggcttgggcacgcgtgctggctcgcggggccgagcagctgcgcggcagggcagcggggccgggcggcgcagacggcgcaggcgcggcacgggcgatgtccacgcgggcgcgcgcacgcgaacaacggcgcgcgggaagcggcagcgagggagcggagagggagggctcgggctattgaatccacctttccgaggcccaaccaccaac

SEQ ID NO: 61588 - DNA, 843 bp, Oryza sativa
  Clone ID: PAT_MRT4530_63006C.1
atgccatcggcccctctcaacgtcgtcacggcattggcatgccggctgccctcaccaagctccgactccaactccgttgtgggaggccatgcgcccgtcaatactcgcacagggtgcacgaatatcgagacgcgactagatggttacaaggggacacgatataacaattatcaaaggaaggatcaaatgcaacaaattagcctcacggctcgcggtggaacgcgcgcacggggagggactgaccggggtcggctcgacccggtcttggccgagctggcgccgacgtggcgcctacgtggctgccatgcgggccggcgggaggtagacgacgacgccggccggaacggacggcggacgacagcggcgagcggcggagcgaaccacggcgatacaggcggaagcgagcacaccgggtggttgcacgagacgaggggagacgagccaactgctcggattcaccggagggagcttgacggcggcgaattgcggtggcggcaaccggcggcgggagaagggggaaacggcgacgaggttactaggggccgattcccggcggcgagagcatctacgcggctacgggaattcgatgctagcgttggattaggaggaaacgcatcgagggaggccggcgacgagaggcgcttccgagctcgggcggcgacggcggcgagcacacgggcggtcaaaggagagggctggcgctcggtggtcgcggccaaagcggcgacagggaggagggaggaggatgacgccggcgcggcagaggctgacggcggcagcgaccaggcggtcggccaacacggcacgcgcgcgcgggatgcaacgggaggcgcgtcggattga

SEQ ID NO: 61589 - DNA, 516 bp, Oryza sativa
  Clone ID: PAT_MRT4530_63007C.1
cgggctgcagggctcttcgtcgtcatcgtcatcgtcatccacgccgccagctccggtgacgacgacactgcgccgacacgacggagaaggtggagcttgtgtaccttgacgacaaggtgctcgacgagctccttgcggaggactacagctaccgcaacaacaacaactactgatccggccgtcgatgaactgagacggatcgacatggggccggtcgtcggtacgctcgctgaaacgagacccggattgctatcaataagcaagcagaagaaaaccgtctcctatatatagcttcttctgttggcacaagcatatatgggcatgcatgacacatgctactgtgaattgacgggtgtgtgctgtgtgcagactactaaaccacgcttgcaagttgcacgtacgacgtggttgtcaagagcatgcagtccacgaagcagagaaaaacacctggttcatcagtctcatgcatcacccatcatctgcctagcagctagtgtatttatcagtcatgcatgg

SEQ ID NO: 61590 - DNA, 1511 bp, Oryza sativa
  Clone ID: PAT_MRT4530_63008C.1
aggcaaaagtccaaacggcatttcttctctgggcttagacagaacagagtacatatttattggtttcacggcaatgagtagccaatgacagatcagttgacacaagatagggtcagacagaagtaacgctccactccaagggagtgactggtgagcagctgttggccgctgccccatagccaggcatcagctatagaatgactgttcgtctggggcccgatgtgattcccaatttctcaagcagaaatcctgaattggagcaccatgccattgcaagttttgagtattaccacggctgaacggttgcaacttgcagctgaacccaaaataactgaattagcatttcaatagatctactcttcagaaaaagcatttgtacatgtaatcttgcagtcctactaacggtcccaacagttgtacagtcctataatacaacaagccaatgccaattagttgaagatgtactacagcacatatcgtccaaacaccgaatatgatgacaatgcattgatggctcaggatttggagggtaatcctattgaatttctttcatggagagcctgtggcaggtggcttgggtgtctgatttttctggttagctgcagcttgcgcagcagagccctttgcgttactttcgctggccattgacttcttgatcagagtaagcctctccctgtgaatatcattgacatgcggcttcttgtacagttttatttcatctccactgaagcctggcaaggtaatattccagcttctctctgcatggaggagtacatcttttgcttctaaaatgcttgactttctatgttttgctaaagaacaagcaaatgttgcaacagattcaacaaaattttctgcaatgtccataagaacattttcaacttcaggatcaagcttttctgaaggatcaatctgtgcaactaattcatgtatactcctcttggaaagcagtcgattaccagatcctccagcatccacatcgagagcagtttgctgctgagaaatttgttgcgggtcccggagggacgtagtctgttgactttgctgcgaggaatgttgtggctgattttgttgttgctgctgctgctgctgtagcttttgttgctgctgctgctgctgctgctgtagtttttgttgctgctgctgctgctgttgctgtagtttttgttgctgctgctgctgctgctgctgttgctgcaaatgttgatgttgtggtagtttttgctgctgctgtgttaaaagtgcattctgtgggtgcgaaattgcaggagcatggtatggtcttggatgtggcctatgttgagggggcctaacttgtgaacttgcaatctggctatcagatggagatggtgctgttgaagatggaaaatttggccttgtctgctgtggcagactagagattgctcctggtctcacctgagatgtgttaatggaaccaactgtcccaatattttggatcccaggggaaggctgcctaggctgaagaccataatcattactaagaatcttca

SEQ ID NO: 61591 - DNA, 516 bp, Oryza sativa
  Clone ID: PAT_MRT4530_63009C.1
atggcggcgggtctcccgcggctgtttccttccccgttggccgcgctctctcactcccaaccctatataaaccctccccgcacctccctcgtctgtttccgccactcgccgccctttctccccatcggaatcgagctcgccccgtcgtcctctctctccgccgtcgccgtcgacctccggccgggcttatccgctcgccgggaccgtcccccgcctcggcgtcgtcccctccgggtttttcgcaccggcggcgaccccgtccaccgcctcgccgagctcgccgaccgccgaaacaccgccgtccccatcaacctgagctgcgccaccgcctccctcctcgccggccacctcctccgtcgctcccttgacccggggggtgcgggcgcagcctcccgccgaccgcgccaacgtggccgcctccgggcgcgccgtgtggccgccgcgtggggcctggccatcagccacccgttccttcgggtgcggctgacgcatgggacccacggcattggctggtga

SEQ ID NO: 61592 - DNA, 314 bp, Oryza sativa
  Clone ID: PAT_MRT4530_6300C.1
ccaaggcataggtccaggatttatcccagaaatattggacagatcacaaataggtgagagagtaacagtgaccactcaagaagctatctacatggcaagaatgttggcatgggaagaaggattgctcgttggaatatcttcaggagccaacgcagatgccatcttgaaggttgcagcaagggaggagaacaagggaaagatgatcgtgacgatgttcttcagtggtggggagagatacctgaattcggagctatttgctcaggtgaaggaggaatgcattaacatcaccaaggcattctgtttgacatgtgtat

SEQ ID NO: 61593 - DNA, 262 bp, Oryza sativa
  unsure (1)..(262): unsure at all n locations
  Clone ID: PAT_MRT4530_63010C.1
ncgtagattttctcaaatgatctcattgaagtgtgcgtacttagtcttgcggcttgttactcggtatgcgatagcagagtatatatttttggacagcttcatcctatgcgaataggagaaacttatgagagcagtgttttgctcttcattggctaaaattctactagcatgtcgcattcatatatttccaagtggctttttttccctggtgtggctggggtagttaaacctttaaaaaaaaaaaaaaaaaaaaaaaaaaaaa

SEQ ID NO: 61594 - DNA, 1287 bp, Oryza sativa
  Clone ID: PAT_MRT4530_63011C.1
tcagggtccttggtaaggattgaacccctgaaagcgaaagtacgcctgaaggtcatcatgctgttgctgcgtcatgttgttgatgttggtgaactgagcatcagcagattgctgccattcttgcgtttgggctatgtgttccgcgaggtcgtactggatctcccccgtctgcacatcaagggtgtccattctcctagtaatttcacccaagtcccaacgtgaggaacttgagcgccattcactttgagggttggttgtccccccagtggatgtcatgaggcgcatgccaccggtcctcactggcgcctgcccaggttgagactccgatgctatggcgtggagcttgggtccatcctggagcatccccagttggtgtccaacctgcctcatacatcccgcatttggcaacgggatttcatttgtacaaccggggaaaaagtatatcaaagatccatctgctccatgtttcaaaatatgcccttgcactagataggcctcatcaatacgcggacgagcggctgagataagagcaatttggtcgctaacgacccctagcccttttgctatccgagtaatcagagaagtgcactcaacaggagcagagaactttatactttctaaccattgccttatcatacacttcaaaattggagcaccagaaatatcttcccaaaacctatttttctcgaacccagaaattcctttctggagatcgattttccaggaatcgtgaaaaccaagaagtgtactcaagcctttccatgtgagtgtgaactccttatggaaaaagcgaaaagaaataccatcttctatctttttcagcaactccggtgagtatactcgcgtgtgagcatactcccggtcgctcagcatgtagtaggcttgtctctcccgatcactgacaaggtcgaggtcagcgtcactcaggagttgtcgcggagcgtcggcgtcttccattgagacatcagctgatgaacgagtactagacttgtcatgacgacttgattgagagcctgaccctttgaacagacgagacagtcgcctcctcatacttaccaggctatccgtcttgggtggctccacttcgaccacttgaatgttctgcgggtttggcccgtacttgattctgagcatggagcattgttccgtcctcggttgaatctcaaacttttcctccttcccgttgatatggaaacggatactctgcgttcccatgtcaatgttggcccctgcggtgctaaggaacggacagcccaggatgagcggcgtctccttccccgtgtccat

SEQ ID NO: 61595 - DNA, 1497 bp, Oryza sativa
  Clone ID: PAT_MRT4530_63012C.1
atgtcccacgatcacctggacgcggcagctggaggagctttcttctttaaaatggtccaaggagccgttgatctaatagagaagatggtctccaatatgggttggagcgaagaacgactccagacccgtcagcgaggcatgcataccatcaaggagattgagttacttgctgccaagttggacctcctcatgaagcgattggacgaccacgagaaacggccacaagaaaccgtcaaggccttagactctcacgtcacgtgtgaagtctgtggcggcacgggtcattttgggaatgattacccggaatcccatgaggaggcgatgtacatgggcaacaacaacgggtaccgtccacaaggagatcaggggtggaaccaaccacgcccatattatcaaggagaaacccagctagctcagttagcatccttagtccttgcaaatgaaactggaaggattccgaggcaacccaactcctccgttgaaaatattaaggcgatcacgatgaggggaggtaagtccactcgtgctctgccatatcctaaccctgcaggagctaatgggatatcaaaagaagtgccatctagtgagtcggctgacaaggaggttcagctagagaaggtcgtgccgcaggagtactgtgacatgctgagcgaccgggagtatgctcacacgcgagaatactctccggagctgctgaaaaagataggtatggatgttgaatttcgttctatttggaaagcggttggttggcagagatttgctgtgaaaggaatttctgggttcgagaaaaataggttttgggaagacatttctggtgctccaatttgcaagaaacctagagcgaatgatatccataatcctacacttaggctcatgcacaaatggattgctatgactttctttcctagagggtatcatttgtacaactgccatgaactaaccattcccctgcagaccatagaagaatctcgtgcaggtggagcatacagggagacgcgcaacatgacaaggaacgaacgagagagttcatcatcctcaacacccatacagatgtatgaggcaggttgggcaccaactggggatgcacctggatggacccaagctccacgccacagcatcggagtctcaacctgggcaagtgccagtgaggaccgatcaagtggtgtgcctccatctctaagtgaatggcacttgagttcctctcgttggggggacaaccaaccctccagatcaagtggtgtgcctccatctccaagtgaatggcgctcgagttcctctcgttgggacttgggtgaaataactaggagaatggacacccttgatatgcaaacgggggagatccattacaacctcacggaacacatagcgcaaacacaagaatggcaacaacctgctaatgctcaattcgccaacatcaataacatgatgcagcaacagcacgatgaccttcaagcgtacttccgctttcaggggttcaatccttatcaaggaccctga

SEQ ID NO: 61596 - DNA, 426 bp, Oryza sativa
  Clone ID: PAT_MRT4530_63013C.1
atgaccgtgggcacggctgttcgaacacccgtggggatcagccacgtcgggagacctccaagctttcatgacaaggcatttcgaaagccgatacaggtttaccatatgccgacgagaggggtcccagaccaacaacaggttaggtcccagaccatactgtgccaggaagcccaggggtcctccccgacaccaccccggcgaatccacatgtctctcggcatcaaggaatcggtccttaagtgcgagagcgggaaaccgtacacccggtacgttccccggtccgcgattttaagtttgaaggcgaccgtcgatactcgcacagagtgcatgaatatcgaggctcaagatgttcaaaggtggcttgccttgctcgagatctggagcttgatcctcgaaatcctcgcactacgggtcttcgggctctga

SEQ ID NO: 61597 - DNA, 345 bp, Oryza sativa
  Clone ID: PAT_MRT4530_63014C.1
atggcatggacggtggaggatgcggccatcagtgacgagcttcggcgtggggcctggatgacggagaggacacgaccgccgccactgagctccgacgtggcgtggacggtggaggatgcagccgccggcgacgagctccggcgtgagacgtggacgatgggaccaccggcgacaatgccttggtgcccggctcctgatacctcgcaagtatcacctaatacgtggtatcacatgatatctcgcaaatatcgcctgatactggttaggtatcaggacatgatacctcagaggtatcaggacctgataactaattggtatcattctgtcctaacgggattccgttga

SEQ ID NO: 61598 - DNA, 1063 bp, Oryza sativa
  Clone ID: PAT_MRT4530_63015C.1
gcgcgacgacgaggcgtgcccgtcgacgaccaccaccaccaaatccacaacggacgacgagccggcggcgccggccgcgacgacgccagcggtgacaacaacaacaacagtcatccacgacgacggcgcccctgccccgccgtcgccgaagaggcgcaaggtggcggcggcggcggctccggctccggcggtggtcgacgagagggcgcggctgaagcggaggatcgcgtgggtggcggacaagatcgcgacgcaccgggacgaggtggagacgagtaggagtacagtcatgttgggctacggacagatcccgagctcacaactgcattacaaaaggaaagcggaagccaggacttggaccaatcatcacaggcgcgacttgggaactaggccgaaaccctaaaactcatcgtagccggcttgctcctggaagaactcctcatcagcaggatccgcttcatcttcttcagcaacacgcgcggtcccgagtgggacccgcttgtcagcggctcggctcaccgtgcggagggagcacgcggcgcacgcgcgtgtgcggggaaagggatgcggtgcacgcgcgtggttcgtggtgaaacggatgcggcgggcccacgcgcagcctcacggcggggtcggcccgacccgatctcggccgagctggcgccgacgtggcacctacgtggctgccacgcgggctggcgggaggaagacgaaggcgccggccgcgaatggacggcgtgcggcggcggtttctccggggcgtcttgcgacgatgaggggcgacggggcgtacaccgggatgacgagggagaaagagagggagcgagccaacggcttggattcgccggagggagtccgtcggcggcggattgcggcggcggcgcccggcggagaggaaagggggaaacggcgatgaggtcacgaggggccaattcccggcggtgagagcatctacgcggccacgggaatccgttgctagcgtcggattgggcggagctacgccgagcgaggccggcgacgagtgggtgctacggagcacgggcggcgacggcggcgagcacaa

SEQ ID NO: 61599 - DNA, 1689 bp, Oryza sativa
  Clone ID: PAT_MRT4530_63016C.1
atggctaacaagactctctgtgaattcgctgctccctctgctgacaatgtggccattgggccgcaaatcaacatgggagtcgtggatttcgacttgaagtccagcctcatcactatggcgcaggctagcccgttctatggcaagcctaatgaggatgccaatgctcatctgcaacagttcctagagatctgtagcacgtacaccatcaagggcgtcagtcccaacgccgtcaagttaagactgtttctgttctcccttctcgggagagcgaagcagtggttctatgccaaccgtgctactgtcaatacctgggtcaaatgttctatggcattcctctcgaaattcttcccgatgggcaaaaccaatgcccttcgtggaaggatttccagtttccagcagacaaggtacgagtctattcctgaagcatgggaacgaattaacaagattgcaaaagaagcgccatctagtgactcggctgacaaggaagatcagccagaaaagaccgtgccgcaggagtactgcgacacacggctgctgtcgtttcctcaacggagtaggaaactgtcagtggacgagcaattcgcttgttttgttgaagtaatccagaagatccacatcaacatgctgttgttggacgctatgcaagtaccaacatatgcccgttatctcaaggacatactcaacaacaagagaccgctcccaacaacggagttcgaccaggccttgtgcgatcttggagccagtgtcagcgtcatgccaaaggacgtctttgacaagctcaacttcacagtgttggcaccaacaccgatgtgcctacaactagctgacttgtcagtccgttacccgtcagggatagcggaagacgtgccagtcaagatacgagatttcttcatcccggttgatttcgtggtgttatacatggacatggggaaggagacgccgctcatcctagggtatccgttttttagcaccgcgggagccaacattgacgtgggaacagggagtatccgttttcatatcaacgggaaggagaaaaagtttgagtttcaaccaaggacggaacaatgctccatggtcagaatcaagtacgggccaaacccacagaacattcaagtggtcgaaatggagctacccaagacggacagcctggtgaagttcatgcagaatttcctggagaaggaaacaacgatgcccaggaaccgttattggaggaagccggtaaaaccaaccctatcggccaaaaagctagagcagtcggctcagaggaagccgccgtccgcatcaaagccaaggaaggttgggaaccaactggggatgcacccggatggacccaagctcaacgccatagcatcggagtctcaaactgggcaagtgccagttaggaccgatggcatgcgcctaatgacatacattgggggaataaccaaccttccagatcaagtgacgggggagatccagtacaacctcacggaacacatagcacaaacgcaagaatggcaacaatctgctgatgctcagttcgcaaacttcaacaacatgatgcagcaacagcacgatgaccttcaaatgtactaccgctttcaacgggatggtatctacggatggaaggagttctactcggacaagactgggtttttaccatatcatgaggggttcgatatctccgagtcctacttagagatcaactga

SEQ ID NO: 61600 - DNA, 958 bp, Oryza sativa
  Clone ID: PAT_MRT4530_63017C.1
gcacgagcccagaacccgcagagaaaagaagagagagagagagagatcagaggagagagagagacagacagagtgcggcgccgaggaggagaggagcaataatccaattccaatccattcctccgcgacctcgtcgtccgatcatggccatggccgcctccaggttgctgtgggcttcccgcgccgcctcctacctcaagatctccactttccccagggccttctccaccgtgctgaaggatctgaagtatgctgacactcatgaatgggttaaggttgagggtgattcggcaaccgttggaattacagaccatgcccagcaccatttgggtgatgttgtgtatgtggagcttccagaagttggcagcagtgtatcccagggaaagaactttggtgctgttgaaagtgtgaaggcaaccagcgatatctactctccagtatctggagaggtggttgcagtgaacgatggactaggcgatgaacctggattggttaatacaagtccatacgagagtgggtggatcatcaaggtcaaggttagtgattcaggtgagctcaattcattgatggatgacgcgaaatactcgaaattctgcgaggaagaagatagcaagcattgaacaaataccagtgacttgtgatctgcaaagaatgcgccttgacccttttgtcaatgcttgtgatgtgctatcgagcacttatctttaccaccggctgctcctgaaatcagcaccgatcaacacatgaataaattagtgttggcattgcctcttccacaaagagttgcaaacttcgaacctgtaaatgacatgagtttcgttatttctttgtagtatcgcgtgatttcatcttcaattgtagctctgccgcctctgctccgtttatttctgaaacgtgtgcttcgtttacttctgaaaaaaaaaaaaaaaaaaactcgagggggggcccggtacccaat

SEQ ID NO: 61601 - DNA, 903 bp, Oryza sativa
  Clone ID: PAT_MRT4530_63018C.1
atgccgcgcctgcgccgtctgcgccgcccggccccgctgccccgccgcgcctcccgttgcttcccgcgcgcgcgtgccgtggtggccgaccgcctggtcgccgccgccgtcagcctctgccgcgcctacccgcgcctgccgcccatcccgaggccggagagattactcccgcgccgtcagcctctcgtcactgcgcccgcccgcacgctagccggcgccgccccgaccgttgccgccgctcgccgtgtgctcgccgccgtcgccgcccgagctcggaagcgccgctcgtcgccggcctcgctcggcgcagctccgcccaatccaacgctagcatcggattcccgtagccgcgtagatgctctcgccgccgggaatcggcccctcgtgacctcatcgccgtttcccccttctcccgccgccggttgccgccgccgcaattcgccgccgtcgggcatcctccggcgaatccgagccgttggctcgtctcccctcgtcctgtgcaaccacccggtgtgctcgcttttgcctgtatcgccgtggttcactccaccgctcgccgctgtagtccgccgtccgttccggccggcgtcctcgtctacctcccgccggcccgcgtggcagccacgtaggcgccacgtcggcgccagctcggccaaaaccgggtcgagtcgaccccggctagttccggtcggtactagttcggggcgtgacacgtcagctcccgccaccgccgcgctccctgtcgccctccacgcagccacgccgccgcccgccgccagccgccaccgcggcaccctctatgccagccgccgccgccgcccgggctcagccgcctgggctcgctctgtttccatcccggacaatagtgaatacatcctagcatttgccagcaaagccgagtaa

SEQ ID NO: 61602 - DNA, 493 bp, Oryza sativa
  Clone ID: PAT_MRT4530_63019C.1
cccacgcgtccgatcaaatccagcaacataacggtcaaagaagaaaggacagaggtggccagcaacggcggcgacaacgtccacaaaggcagtggagggagtggaagaggagatggggatgaagacccgctggacttcatcatcgacgtggacttagtgaagtaataaagttagcaagcacgcttatttacgatattctggtgacatcaggaaagctatcaatcaagtaccttaaattcttgtgaacaaggtgccgtgtacaatatcagccctgatagatacaaggagatactgaatacacttgatcttagaaaggacttctttttcagttactcataccatatcatgacaagtcttcaaaaaacttgagtgatccacaggaaggctggagcgtatatgagtcaacttttgtgtggaatgaatgtgttacacaagggatacacaattttcttggaaagttcttgtggactactacaatagtttgcagaccgaa

SEQ ID NO: 61603 - DNA, 477 bp, Oryza sativa
  Clone ID: PAT_MRT4530_6301C.1
tcacgccaagccgacctcggtctccgccgcccgcgcctctcgcgctgagtcggcctccgctgccatcagctgcgcctctcgccaccgcagccgctgctgccgaatgcccagccacctcgccgtcgccatcctcacctcctccactgcagccacgtccacggtcgccacggccaatgccacaagccgtccgccatcgcagcctgcagccaccagcacccgatgtcgccggtcgcgactccacaccgtcgccggcctccatgacgccctcccgctgccgcacgacgctggcctccacgacaaccacacgccgccggcctccacgacgccgtcgcagtcgatgccgccacagccgtcgccaccgtcaccaccgccaaaactcgccgccgagctaccaggacgccgccgtccgtcgttgggggaccggatccgggcaccacagcaccggatctggacgccgccagtcggcgtcgacgccat

SEQ ID NO: 61604 - DNA, 1674 bp, Oryza sativa
  Clone ID: PAT_MRT4530_63020C.1
ggttgctactctatgtttgacttaaaattttggtagcggatggacaaatttgatacggtatcaaaccaaaacgtccatatgtttccaagacagtaagcggcgaggcaatttatactctagatgtataatcttgaacattttcttccgaaaaggagcaatcacgcaggcaaagtctcaagcttgaatttgaagcctgacaacagcggttagatgaattgcagaaaaggaaaagaagcaaaaacaaatatggtgcgattcttcctgacgcatctctatacaggttcatttttgcaacaaagaatggcagaaatgcctgaggacttcttcaccaatgcttatttctccaggctatcatatcatattagaagaaataatgccgccatcttctcgttgtcagcctatggaagagtagctctcaattccttcctgtctgccccaaatgactccacaccaaaacccttgacatatacattcgtaaagagctcagaagtatcaggcataggactctcctttgctttcgcaatggcatcatcgacttcttttctgatttctttctccatgtccttgagctcagcagcagttgctaggtcatgagccaaaatcaacttcctaaccctttcaattggatcacgctcctgtcttacacctgagatctcatccctggtacggtaagtgcttccgggatctgacatagaatggccatggtacctgtaggtatccatttcaagaacaattgggccatttgcaatagcatgctcttttgcgaatttgcatgcctgcttcacagcaagaacatccattccatcaaccttcaatccaggcacataatcaccacgcttgtagtaggcagggctctttgctgccctccactcagcggttcccatcccataatggttgttttcgcagaccaatatagctggcagcttccaaagagccgatatattgagggcctcaaagagctggccctggttcgcggcaccatcaccatagagggcaaacgtagcagtttcctctttcctatacttctgcgcgaaggcgagaccgcatccaaggggaacctgggcgccgacgataccgtggccaccatagaaattggcgtccttcttgtagaaatgcatggatccgcccttcccgcgggagcacccagcctggcggcccatgagctccgcgaacgcggagacgaggtcgccgccgcgtgcgaggtaggtgcagtgatcgcggtacgcggtgatgatggaatcggagcgggtgatggcggcctccatcccgacggcgacggcctcctggccgtcgtagaggtggcagaacccgcggatgagcttggccttatagagggaatccgcggcgatctccatccggcgcatcacggacatgtcgcggaagaaggtgaggagctcggccggggtggtggtgacgtcgcgcgagggcgggtcgacgatgtgggaggtgaaggggaccgaggtctcgatggtgagcggcgccgtggagtccgagatcgagcgcgccgcgatgagcgccgtggcctgggcccgcgcgggggggacgcggcggaggaggatggccgcagccatggctatggctgcctagggtttcgcggcggcgacggcgaggtggatttgggggtgggtggggaggaaggagataggaagagagatttttcctggataaataaac

SEQ ID NO: 61605 - DNA, 164 bp, Oryza sativa
  Clone ID: PAT_MRT4530_63021C.1
tctactaaaggtgtgataaggctaactgttttgtaacttatggctagttgaagttgaatggttggcttcggggtattaacctcattggcagtggttaccctggccagtttagtcttgaatgtaattatggctggtgtaaatagtaccaacaagctgaactcact

SEQ ID NO: 61606 - DNA, 518 bp, Oryza sativa
  Clone ID: PAT_MRT4530_63022C.1
gggcccccccgacccggttttttaatattaaaaaatttaaaaagaaaacaaaatcgattttggggggggggagaagaacccaaaaggggggaaaaaattaaaatttaggaacaaacaaaaaggggggcggggaacggtggggaaaaacttttgatttgggggggggggggggaaactactacgaagggaagggaaacccaggggggtaaacccagcccggacgggaaggggggcatttgggcggggggggggggtttaaaaggaagttttgggggcggggccaccgccggggccggggccggggccgggctggtcggccctgccctggaagggggggcccgcctggccccttttgggggcggggtgggcgggggcctttttaattctggggcgggcctggttaaagtaattgggggggcgctggaaaccctggggcccccttttggcaaagaaggggaaaaaaaaaagcccggcgagggccaacgcgccggaggggagaaaaccgggaaagggaaacc

SEQ ID NO: 61607 - DNA, 259 bp, Oryza sativa
  Clone ID: PAT_MRT4530_63023C.1
tggtggtcactggcgagaacttgctgagaaaaggcgaaagcatggtggagtggggagaggaggcggcgaaggagcaaagctctgcgatcgacttcctggtgatcaagcacttcgtcggcgaggccttgctggtgctcggcacggactacctcgcctctgagtgtgccatcggcatcaacctagaagccggtggatatcacatcatcgagaccagcaaaacgtacgagctgatcgccgccatgttccgtgggctgtaccg

SEQ ID NO: 61608 - DNA, 426 bp, Oryza sativa
  Clone ID: PAT_MRT4530_63024C.1
atgcagaagggccaccatgaccactacgacatggacgctgtgacgacagaacagcatctactcatctggccggagaacctgaggaactctcccatccctcttctttccttctctctatccccttctcctatgtcactacgcacaccggctgcagaatgctcgcaggtgtgctacctgagtgatgggacgatgggccaccgattggccgaggggtccacgtcgtcgccacctccttcgctggctttgcccgtgccgcccatgccaccgattgtgctccatggccagccgcaccatggggaggagacgcccaaggtccgcttctcggtgtcaatggcaacgagtctgactccggctgatcagatggctcggagtatgacgacgagcaatccatctctctgtcgacgccaggggcggaggcaagcctag

SEQ ID NO: 61609 - DNA, 554 bp, Oryza sativa
  unsure (1)..(554): unsure at all n locations
  Clone ID: PAT_MRT4530_63025C.1
ttttgttcgcgcccacttgcagccaggccaccgccgccgccgccgaccgaagcagccgacggcgaccaccgccgcggcgagggatcggtgcgtaagcttggcggcgggccgatccgcacgcgggagggagcgccgtagccgcccttccccccaccctctacaccccctcgccggcggcgaacacggcgcgcgatgggaggcgcgcgcgcgcaggtgaacaagccgcacaagacacgctttgccttcaaggcgttgcgccacgcgcacaagatcgataaggtcaggaccgggaagccggagggcagccaccgtgccgncgtcaagggggcccgcgccgcgcgcgttcagcggagcaaggcgatccgtgatcagaaacgtgctgctttgctgaaggagaagcgctcttccgttggatcttcgagtgcgccccgtgtcgtgttctttttggcctttcctcgtcggcagatgtcagatcacttgccaaagaccttttaaccattgcttctggtgatgaagagacaccaacttcttccagctgtgctttgctacatata

SEQ ID NO: 61610 - DNA, 274 bp, Oryza sativa
  unsure (1)..(274): unsure at all n locations
  Clone ID: PAT_MRT4530_63026C.1
tttgagatggatatgaagtncaagcccccaatttgttctggncgtttgataaatttgtcatgctcttgtccgttcctgtagtattggnggcnttttataatggngtcnttggactgtaatcaatcttggtgtgttttcctgtaatattncgttttcaagctgtgttttggtattggttncttctggaattgaagngatgngtttnntgncaaaaaaaaaaaaaaaaaaaaaaaaaaaaaaaaaaaaaaaaaaaaaaaaaaaaaaaaaaaaaaaa

SEQ ID NO: 61611 - DNA, 543 bp, Oryza sativa
  unsure (1)..(543): unsure at all n locations
  Clone ID: PAT_MRT4530_63027C.1
tcgcccctgccggccgccgcctccccttcgagtgccgtcgtacggcaagagagggagggctcgacggcgacgagggagagcatagggaggccgccgaggagcagctccacgcgcctagtcgccgtcgcctcacgtcgcgccgccgcgcgtntgccatcgcccatcccaagctcgcgccaccgccccccatgccgagtgtcgccgttccccatccgtgagcgtccagccgccgcccctcccaagcgcgatgtcgccgtcgcttgctgctttcccgtgctgcctcccacgccatcagcatctgcggtcgacgggaaggaaggaaaggggaaaagaagacaagaaaagagaaggaagaaggaaggagagagagagaggaagaagaagagtagagactgtgatgtgggtctattgttattttagagatgattaatagagagtctgttggagtgagtatctagtttaactaggcaaattagatgaagagttggctatatgggtgtttagagactctgatttggagaagcagtaaaaaaaaaaaaaaaa

SEQ ID NO: 61612 - DNA, 1065 bp, Oryza sativa
  Clone ID: PAT_MRT4530_63028C.1
cccccaccccggcgcggcacaccgcggggcccatggcggccccctccgcgcggaaccccgccgtcccctcctccaaccttcctccttgcgtgtgagctggtgacaccgccaccaccaccgccggaccgacctcctggcgctagcccaggacgcagccgcccttttccacctgcgccacctcctcgcacgcccccgtcctcgggtcgtgcagccgcaccgccccctcgcaccccctcgcccacaccgccatcctcccgtcccccaccatcgccagcggctgcgccaccttctccctgcacaaccacctcacctcctcctccttcttcttcttcctcttcttgcttcgcccgccgcgcttcgcctccgctgccgccgccgtcgccggtggccacgtcgacgacgcggagcagcccgtcgccggggctcacgacgcagatcatgtcgccgccagcgcagaccctgaggcctggcctgctcagcccgtccatccgcctgacgacctcgccggagtacgcgtccatgagggtgatgtcggtgaggtcctcggcgatgtggtacaccgcgccgacgacgaacgcgtccccgccgccgccgccgccgcggcgcgaggctgatcccgcgaagccgccgcctttaaatagcctcctatccgttgctctcccatccccatcccctcctcgattcaaatcgtctcctctcttcccaaccaaaccctcctcccaaaccctagaaattccactcctctcccgcggatctcccatggcgtcggcggctggagatgggctccctccggggctcaagttcgagcccaaggacgacgagctcgtcgcccgcttcctcctcgcgcgcatccagggtaagcccctccctctccacggcgtcatcctcgacgctgatcccctctgcgcgccgcccgccccgccgccacagcccgttcttcctcctgctgcggtggtgaactctgtctctgatggcgccgttcctcctcctgcaccggtggtgaactgtgactctgacgtcaccgatgaggatgagttgcagagctttgtgcctgagttctccgcg

SEQ ID NO: 61613 - DNA, 2121 bp, Oryza sativa
  Clone ID: PAT_MRT4530_63029C.1
atggcggcggcggctggagatgggctcccgccggggctcaggttcgagcccaaggacgacgagctcgtcgcccgcttcctcctcgcgcgcatccagggtaagcccctccctctccatggcgtcatcctcgacgccgatcccctctgcgcgccgccatggaggcttcttgcggatcatggcaggggcgacgacgcgttcttcttcgccgaggcgcgggccaagaacggcaaggggagccggcagaagcgcacggtcgagggcggagggtactggcaggggcagaggatgtgcgtcgatggtgagaggctggtcgtccccgatggtggcggcggcggcggcgtggagatcgcgtggcgcaagtacgtgctcagctacttcgcggatggcgagaaggggagctcggggtgggtgatgcacgagtacgccatcacggcgccggctgacctcgcgtcgtcgacgacgcggctgtatcgcatccggttcagcggccacggcaagaagcgcaagagggaaccggaatctcagagcgacaaccaccagatcgcagtggcggagactgctatgctcgaggacagcgcgccgccgccacagccggttcatcctcctgcagcgatggtgaactgtgtctctgacgacaccgatcagggcttctccggtgccgttcctcctcctgcaccggtggtgcaccataccaatgactctgacgtcaccgatcgatactcttccctggtgttctctgatcaacccgggtcaatctatgaggatgagttgcagagctttgtgcctgagttccccgctcgcaacctgttcgtctctttgccagaaggaagccatgaagctgaaccggcgcaatctgtgtcgtcgttagctgatgttggaggtccagagaacatggatgatcagagctgctccggcgtggtgtttgctaatcttcccgagctgatcgtcttgccatcggcgccatcgctggacaatcaaaacgacgaggcgccagtgttctttgagtttccagagagcatggatgacattgttggctgctttgacttcgccgccatggacaaccagagctgcactagcgccataccagaggagccctttcttcctcctgctgcaatggtgaaccatgacgatggctatgcctctaacaacgccgatcaaggttgctccggcgcctttcctcttcctgcagcagtggtggaccttcccaatgagactgacggcgccgatcagagctgctctggcgtgggggacaactctaccctgttgttttctgatgttaccgggtcaatcgatgaggatgagctgcagagttttgtgcctgagttcgccgcgagcaacctgttcgtctctctgccacaaggaagctgtgaagctgatgctgaagctgacagcggtggtggcgtagcgccggcgcagtttgctgaatttggaggttcagagagcatggatgattcttccatgatgtacccgttgaactttccagcagaagccggtggcggcggtggccgtgcagcaccggcatcgtcttgggtgtcatcgcagcacaaccaaaatgatgaggcgccaatgttcttcgagcttccagagagcctggatgacatggttggctgctttgactttgccgccatggatggccagagctgcactagcgccgtgtcagagactgctctgatcgaggagctcgttcttcctcctgcagcaatggtgaaccatcacgatgactctgtctctgacatcgccgatcatggctgctccggctccgttcctcctccttcagcagtggtggacctccccaatgactctgatcagagctgctccgggtactatgaggctgagctgaaggttccacttgagtacgccgcgcgcaatccggtcgactctcccgcaaaaggcggcaatgaagccgaagttgacgccagcaatggtgcagggtccatgatgtcgtcgccggacaagcagaaggagcactcctcatcgggcgtcatggacgtggaggctattggttttggagttccagacagcatggatagcctgagctgcatcgacttcgccgagacaatggacgacctgagctgcatcgacttcaccattgatgatgagctgttcgatctatggagctag

SEQ ID NO: 61614 - DNA, 833 bp, Oryza sativa
  Clone ID: PAT_MRT4530_6302C.1
cgcacgaggcttaatacttaatgagagttgagcactacacttggacaaatcaacatatgctattgcggatctctatttacatgtcaccacagaattttgaaacatttgtattagctgaggacctaatctcgtagtaatctcttgccacagctaatttgtcaatttgaactgtgatactcttgtcttgcctctgcgtgtgttaaaaacgtggcgataggttaaccatttgttaaaataaaataatcatgtcttagatggtttggtaaattttatggatgcatgtgggtgccagttggctcatattgacctcattccacttcacatcaaacctaataaggtgttgcatttgttaatgtatgcatctgaattatttgtatggaaatgaacagaatgggggcaatacgacctacatcactaggaaagcggtagcgcctctgtagttagtcagttgtgcactttttaaaaatgagcagtggatgaagcatttgattgtacgctagtgtgataagctgccctttggtaatacacgtggttctacatggtccttttatagaaaattgaaaagaactttggtcctatagtttaattaactcggacgcgagtcatctacctatcctgcgcagatacttttatggagctgtaatgttttggttgttaatttggacaattatgcttactggtagcccaattcatcgtcatcactaaatcattcagttggtccaagtctaaatttcagtgtggtgtatggcccccttgcctcatgtatgttattatcatcaaattgagtatctactgctcattccagtcacaaatacatgtttatacataagtgc

SEQ ID NO: 61615 - DNA, 1366 bp, Oryza sativa
  Clone ID: PAT_MRT4530_63030C.1
gcttctcctccgagtgtgggctcccccagccctgtcagtggctgtttttcgttcatccatgctgggggctctggtccaggtaccaccggcacgcctctccccgcatgtgcgtgtgcctagtctgctagacacggctggtcctagcgaagtattcatgcgtaccggccccaggcgtcggtgctgcttccttctggtccgttggtggcccctccggctttcccctctttatgttccagtctattcggtgtcgacgctcttacattttagtgttgcaaggttcagctccaaccttccacctgtcgaactcagtaacgctcaacaaaaatgagcttgcattccgatgccccccaccaccgtattccttagagatagaagtagtgtcttcctcgttcaaacttctaagacttattttcagcatattgtcattattcaactcaggtactttgtacactacagcgccaatacttctggagaaggtaccattggttcgtgttagaacaacatagcgcagacaattaccgaacctgccacatcctaatgcaatttcataggatttctccagacattcatcaattaatttttgcttgtgtgacaatgttgcttgtccacgagaaatgacttcctcaggatccagttccagtaacaagttacttgcctgatcaaacaactttctgttgatattgacatcaaactcaatgtccaaatctttcaggccactgctgaaggccttgctattcggaatggtccatctccacagatccccatcctctataaacttgaaaagcttgtgtacggtttcaagcttgttatcaggtagatatttcaccccattaaaagaattgccacttctatgattccataaactactacctattgtcaagagtttgttgctaaagaaatcaaatgcgattgttgctccactgcgttgcatgtcaatcaccttattgacattttctccgagtgtggggttcccgcataaactttcaaaggcagttttatgatgatccaagattgtgacactctcgacttttggggcaatatcagtgacaaaaccaggaggcccgacaaagtctaggagataaacatctttgatttcatcaaatggaagagcatcactcctgatggggtcgtagacggtgttggggaagaagcagacggggagcgcggcggcggagaagtagaggtgcgcggcgagcgccgcgaacgcgccgtccgggcacgggtagtggtacagcacggccgagaccctccgcgcggacggcgcgaaagccatagcctatcgctatagcacccacctggagatggcgacggcgacggcgacggcgacgacggcggcggcggcgaaacgacaggcggcgggtttatt

SEQ ID NO: 61616 - DNA, 1995 bp, Oryza sativa
  Clone ID: PAT_MRT4530_63031C.1
atggcgtcggcggctggagatgggctccctccggggctcaagttcgagcccaaggacgacgagctcgtcgcccgcttcctcctcgcgcgcatccagggtaagcccctccctctccacggcgtcatcctcgacgctgatcccctctgcgcgccgccatggaggcttcttgcggatcatggcaggggcgatgaggcgttcttcttcgccgacgcgcgggccaagaatgggaaggggagccggcagaagcgcacggtcgagggcggagggtactggcaggggcagaggatgtgcgtcgatggtgagaggctggtcgtccccgatggcggcttggagatcgcgtggcgcaagtacgtcctcagctacttcgcggatggcgagaaggggagctcggggtgggtgatgcacgagtacgccatcacgacgccggctgacctcgcgtcgtcgacgatgcggctgtatcgcatccggttcagcggccacggcaagaagcgcaagagggaaccggaatctcagagcgcccaccacgacgacggtcgagcgcgctgcgccccacagatagccatgcccgagactgctctgctcgaggacagcgccccgccgccacagcccgttcttcctcctgctgcggtggtgaactctgtctctgatggcgccgttcctcctcctgcaccggtggtgaactgtgactctgacgtcaccgatgaggatgagttgcagagctttgtgcctgagttctccgcgcgcaacctgttcgtctctttgccacaaggaagccatgaagctgaagcggacgtagttggtggcgcattgccggcgcaatctatgtcgtcgtttgctgatgttggaggtccagagaacatggatgaccagagctgctccggcgtggtgtttgctaatctttccgacctgatcgtcttaccaccggtggaagccagtggcgcagcacccgcgccatcttgggcgtcatcgctggacaatcaaaacgacgaggcgcctgtgttctttgagtttccagagagcatggatgacattattggctgctttgacttcgccaccatggacgacccgagctgcactagcgccatatcagaggagccctttcttcctcctgcagcaatggtgaaccatgacgatggctatgcctctgacaacgccgatcaaggttgctccggcgccgttcctcttccttcagcagtggtggaccttcccaatgagactgacggcgccgatcaaagctgctccggcgtggtggacgattcatccatggtgtttgctaatattcacccgttggactctccagcagaaggtggccatgaagccgaagccggtgccgggggtggccgtgcagcaccagcgccgtcttgggtgtcatcgctggacaaccaaaacgacgaggcgccaatgttcttcgagcttccagagagcctggatgacatggttagctgctttgactttgccgccatggatggccagagctgcactagcgccgtgtcagagactgctctgatcgaggagctcgttcttcctcctgcagcaatggtgaaccatcacgatgactctgtctctgacatcgccgatcatggctgctccggcgccgctcctcctccttcagcagtggtggacctccccgatgactctgacggcgccgatcagagctgctccggcatggtggatgattcccttcccgggtactatgaggctgagctgaaggttccgcttgagtacgccgcgcgcaatccggtcgactctccctcaaaaggcggccatgaccatgaagccgaagtcgacgccagtggtggtgcagggtccatgatgtcatcgccggacaaggagaaggagcactcctcatcgggcgtcatggacgtggaggccactggttttggagttccagacagcatggatggcctgagctgcatcgacttcgccgagacgatggacgacctgagctgcatcgacttcaccattgatgatgagctgttcgatctatggagctag

SEQ ID NO: 61617 - DNA, 598 bp, Oryza sativa
  Clone ID: PAT_MRT4530_63032C.1
tgaaactacagctaccaaaacatatgtacttaagtaccaagtgtcaaagtgtgtggtgcagttccaaaagctgtcccattattttctccaggaagctgaatggtcacataataattacaagccaagctttgaagagcaggtggctttgtctacaaagacttcgacggtgcaattgttatgtgtgtctacgacggttggccggggtgacgcaatatcaagtgaagcattccagtgggcagcaagcagtagtaccgtgacatcatgtgcaaagatattacgtttcatgaatgacattgcctcttttaaggtatgtgggaagaacaaaggcgatatggtgagcactgttgagtgctacatgaatgagcacaaggtcataagtgaggttgcctttgccaagctcgattcactgatagaagatgaatggagaaccatgaaccacgctcgctatgaacaccaccagctactcccggtagtgcaaagagttctgaacatggctatttccataatgttcttttatgacaagagaaaggatgcatacacattctccacacatctacaagagattgttaggagtctctttgtcaatcccattcccata

SEQ ID NO: 61618 - DNA, 602 bp, Oryza sativa
  Clone ID: PAT_MRT4530_63033C.1
gatgatggaacctacatcctcatttaaatttcttatgcacccatccaccgtttcttgttaatgttacaaatgggtaatgacaacagatatccatatcctgaggtctttttaccttacctcccaaaatgtacccagtgacggcaacagctacaaaacaccatactgaacagaaagcagaaccagaaagctacataccatgatcaaagttaatgatggaattgcttgctcgcacttccacaaaataacaaagaaaatggcagccaaacaataacagttcagctccaaaatttgagcacagcaattgaataaaccgacatccccccctaaagcaccaataagaacacagaaacatgttgaccatgaaaggtcccccactatagcatcacttgagactgttgaggttgttgccttgacaaggcaggacgcccacatcaacttcctcgtttctcctgccaagcaaaaatgttttgcacaactggacaaccgatactatcgaatcagacctgcacagtaaatcctgtaagaagtctttggtgttactgaaacttcctcaagcctgcaatggtctccacaggctagcgaacaactttacatttctttga

SEQ ID NO: 61619 - DNA, 2037 bp, Oryza sativa
  Clone ID: PAT_MRT4530_63034C.1
atggcggcggcggctggagatgggctcccgccggggctcaggttcgagcccaaggacgacgagctcgtcgcccgcttcctcctcgcgcgcatccagggtaagcccctccctctccacggcgtcatcctcgacgccgatcccctctgcgcgccgccatggaggcttcttgcggatcatggcaggggcgatgacgcgttcttcttcgccgaggcgcgggccaagaacggcaaggggagccggcagaagcgcacggtcgagggcggagggtactggcaggggcagaggatgtgcgtcgatggcgagaggctggtcgtccccgatggtggcggcggcggcggcgtggagatcgcgtggcgcaagtacgtcctcagctacttcgcggatggcgagaaggggagctcggggtgggtgatgcacgagtacgccatcacgtcgccggctgacctcgcctcgtcggcgatgcggctgtaccgcatccggttcagtggccacggcaagaagcgcaagagggaaccggattctcagagcgcccacgacgaacacggtcgagcgcgctgcgccccacagatcgccatgcccgagactgctctgctcgaggacagcgcgccgccgccacagcccgtccatcctcctgctgcggtggtggactgtgtctgtgacgtcaccgatcagggctcttccctggtgtttcctgatcaacccgggtcaatctatgaggatgagttgcagagctttgtgcctgagttcgccgcgcgcaatctgttcgtctctttgccagaaggaagccgtgacgtcgtggcagaggctgctctgatcgaggacttggcgctctcgccacagcctgttcctcctcctgcagaggtggtgaaccaagctgatgactccgatggcgctgatcagggctgctcgagtgtgtttgctgctcttcccgacctgatagtcttgccaccggaggaagcctgtggcagtggtggtgcagcaccggcgccgtcttgggcatcatcgctggacaaccaaaacgacgacgcaccagctttctttgagtttccagagagcatggatgacatggttggctgcttcgacttcgcctccatggacaaccagagctgcactagcgccgtgtcagagattgctgtgctcgaggagccctttcttcctccacctacaatggtgaaccatgacaataactctgtctctgacggcgccgatcagagctgcttcggcgtgggggacaactctaccctggtgttttctgatctaaccgggtcaatcgatgaggatgagcttcagagttttgtgcctgagttcgtctctctgccacaaggaagctgtgaagctgatgctgaagctgacagcggtggtggcgtagcaccggcgcagtttgctgaatttggaggtccagagagcatggatgacccgttgaactttccagcagaagccagtggcggcggcgaccgtgcagcaccggcatcatcttgggtgtcatcgcaggacaaccaaaatgatgaggcgccaatgttcttcgagcttccagagagcctggatgacatggttggctgctttgactttgccgccatggatggccagagctgcactagcgccgtgtcagagactgctctgatcgaggagctcgttcttcctcctgcagcaatggtgaaccatcacgatgactctgtctctgacatcgccgatcatggctgctccggcgccgttcctcctcctaattcagaagtggtggacctccccaatgactctgtcggcgccgatcagagctgctccggcatggtggacgattctctttccgggtactatgaggctgagctgaaggacgccagcggtggtgcagggtccatgatgtcgtcgccggacaagcagaaggagcactcctcatcgggtgtcatggacgtggaggccactggttttggagttccagacagcatggatggcctgagctgcatcgactttgccgagacgatggacgacctgagctgcatcgacttcaccattgatgatgagttgtttgatctatggagctag

SEQ ID NO: 61620 - DNA, 264 bp, Oryza sativa
  Clone ID: PAT_MRT4530_63035C.1
aacaaggaaatttttatttttatataaacagaataacatttttttttcgggcgcaaagtttgacctatgaataccaaaccgcaaaaactatccaaaatttttttcctaaacaaaaacgaattagggccccccttttttttcccaaatttttttttctgggtggacacacttccaaaaaccctttgacccaacaaaaattttggaaggatggcctgaaaacccaggggagcctccaaaaagggggggcaaacataaaaccccctg

SEQ ID NO: 61621 - DNA, 2234 bp, Oryza sativa
  Clone ID: PAT_MRT4530_63036C.1
gtgggtaatgacaacagatatccatatcctgaggtctttttaccttacctcccaaaatgtacccagagacggcaacagctacaaaacaccatactgaacagaaagcataaccagaaagctacataccatgatcaaagttaatgatggaattgcttgctcgcacttcgcttgctatatcgacgcccaccatctccaccaccatcgctccgcttctcctctcccatctctcgcttcgctccgcttgcctagggtttcgcctcccgccggcagccgcgcccccgccgccctcgcctcagatcccgccgccggcgacccccccacgatcctcctcccccgccgcccgccgatcccgtcgagctccggttcggtgtttgctcccctactccgccgccgcgacgcctcgggcttgcagagtctgcacaaaataccaaagaaaatggcaggccaaacaataacagttcagctccaaaatttgagcacagcaattgaataaaccgacaatggaggtggaggcggcgaggagggacgcggcaacactggacccggagctgctgcagctcccggagctctagcatggcgcgctgttgaagttgccgccttgacaaggcaggacgcccacatcaacttcctcgtttctcctgccaagcaaaaatgttttgcacaactggacaaccgatactatcgaatcagacctgcacagtaaatcctgtaagaagactttggtgttactgaaacttcctcaagcctgcaatggtctccacaggctagcgaacaactttacatttctttgaccttcaaactaattccatccatgtaccacaagaattcaagccagcacgagatatttcaaaatggcgctaaaagtagttagtgaaccagtgagggaggttataccccagttttacttcaaatatgggcgccctgctccaaaagatttgaaggagcaatgcttatctagaatagatcacctcttttttgcaggggagggactccagattcaagaatttagatcagtcacaaaagatatatgcaaacttccatcgttcttctccagtgttcttttcaagaagatcgatgctgcaggctctggaactgtcacaaggctgttcaaattctatacactgcttcatggtgaagcaatatctgtgttgattttgttctatttacgtggttctttgtacttggaactcaatctgttatacctagaagtaagggatgcgtttgttgattactggatcaatgataacaagattacaatggacacagctagccaaatctttgaaatattaagaaagccggattacaattatctcactcaggaggactttaagcctgtcttaaaagaacttctggcaactcaccctggattagagttcttgcaaggcacccctgagtttcaggagagatatgctgagactgtaatatacagaatcttttattccataaatagagctggaaatggccatcttaccctcagagagctaaaacgtgggaatttaattgctgcgatgcagcagctggatgaggaagaggatatcaataaagtgttgagatacttctcatacgagcacttttatgtgatatactgcaaattttgggagttggacacagatcatgattttttgattgataaagagaaccttatcagatatggaaatcattcattaacctaccgaatcgttgatagaatcttctcacaggtcccaagaaaattcacaagcatgacagaaggaaagatgggttatgaagattttgtttactttattttgtctgaggaagacaaatcatccgagcctagccttgaatactggtttaagtgtattgaccttgatggaaatggcattttaaccaccactgaaatgcaatttttctatgaggagcaattgcaccggatggagtgcatggcacaagaacctgtgctttttgaggacatattatgccagatgattgatatgattggaccagagaacgagtgctactttacactacgggacttaaaacggtgtaaactctcagggaatatattcaacatcctattcaatctcaacaaatttatggcatttgaaactcgtgatccattcctcattcgccaggaacgtgaaaatccaactttaaccgagtgggatcggttcgcacatagagagtatattagattgtccatggaagaagatggtgaagatgcttcaaatggaagtggtgatgtgtgggatgaatcgcttgaagctccattttga

SEQ ID NO: 61622 - DNA, 1206 bp, Oryza sativa
  Clone ID: PAT_MRT4530_63037C.1
ttactcctccatctcttcgccctgagacggcgcgagagccccggagtaaaagcccaggacgcagccgcccttctccacctgcgccacctcctcgcacgcccccgtcctcgggtcgtgcagccgcaccgccccctcgcaccccctcgcccacaccgccatcctcccgtcccccaccatcgccagcggctgcgccaccttctccctgcacaaccacctcacctcctcctccttcttcttcttcctcttcttgcttcgcccgccgcgcttcgcctccgctgccgccgccgggtggctcgtcggttcttcttcccacccgcggaggacgttcctgatcgggagcgagtggagctttgtccatgtcgtggcgttcggcgttagggaccagaggttgatggtcctgccggggtagtcgtggtggacggcgacgaggcggccgccgagcgcggcgaggccgaggttggggcgctgcccgcggtggcgctggtcggcggggagcgggccgtccatcagcgccggcctccactgctccgtcgcgaggtcgaaccccgcgatggtgtcgcactcgacgccgcggtcgcgcggggcggaggtggtggccggggagaggaagtggaccaccccgccgacggtcgcgctgctccggctgatcccgtgctcgatcctcatcggcgggtggctccgcgtcgccctccactggcagccgccgccgccgccgccggtggtgatggtgaggacctcgcttgactgggacccgttggcggcggcgtagacgtggagcagcttgtgctcgccggtggcgggcaccttccccagcgtgtacccggaggagacgttcctccccgtcgccgccgagcagcccatcgagaggtcggtcaggtcgccggtggccacgtcgacgacgcggagcagcccgtcgccggggctcacgacgcagatcatgtcgccgccggcgcagaccctgaggcctggcctgctcagcccgtccatccgcctgacgacctcgccggagtacgcgtccatgagggtgatgtcggtgaggtcctcggcgatgtggtacaccgcgccgacgacgaacgcgtccccgccgccgccgccgccgcggtgagggcactgcatgtcccgccacgcgccgcaatacctctgcaacgcctcgtcgtcaacatgggccttctcctccgtcgtgcggtttctcggcggcgccgccat

SEQ ID NO: 61623 - DNA, 783 bp, Oryza sativa
  unsure (1)..(783): unsure at all n locations
  Clone ID: PAT_MRT4530_63038C.1
tgggtaccccctcgaggncccggccgggnnatcacagcctctcaaacaagtctctcattgtctttccacctatacaactttgcccaataagccctctccagtctctaaaccaccaaaatgcactgcaacacactctctcttgccgctgtggctctcctcgccagctccgtcaacgcccacggtcacgttgccaaggttatcgctggcggccaggagtacactggtggtatcccccacggtgctccctccaacgctgtcggctgggctgctggaaaccaggacaacggcttcgttgagcccgctgcctttggcactgccgacatcatctgccacaagagcgccaagcctgtcagcaacgctgtcactgttgccgctggcgatgttgtcaccctgaagtgggacacctggcccgagtctcaccacggtcccgtcaccgagtacctcgctcctgtcagcggagacttcgccagcatcaacaagggaagccttcgatggaccaaggtcgccgagaagggctacatctctggtagcaaccccggcaactgggcatccgacgagctcatccgcgacggtttcgcctggaagttcaccgtgccccgaaacctcaaggccggcaactacgttctccgacacgagatcatcggacttcactctgctaataacaacaacggtgcccaagcttacccccagtgcatcaacctcaaggtcactggtagcggctcccaggctctcagcgggtggtggcgacttcaccaagttctactctgccactgaccccggcat

SEQ ID NO: 61624 - DNA, 619 bp, Oryza sativa
  Clone ID: PAT_MRT4530_63039C.1
agacaggcacacgacttcgcgagaccgtgagccggcggcggagcatcgcgctccgcgcaccgccagcgcccaccgctcggtgcccgcgccaccgcttctctgccgtcctcggctcctcgcgacctcgcccccaccgttttcgccgtctcataccgccactatcttgcggcgctgtcccgccgtttcgcggccgtctcgcagccacggcgccatcccgctgtttcgccgccgctacaaccactgacgacgacgccacagccacaccgacgagccgacgacgcctcgcctcagcagtcccagcagcctagcgacgagccgacgagcctaaatcgatttgatttcttttgtgctgcagatttacgatggatcgaatcatcaaatgcaagtagctgttttgtgattgaactaagtactgtactgatggactgatgtgtgttgctgttctgtgatgactgatgaatgatgattgatgaactatgtactgatgatggagtgatagctcatagcagattagcagtatagcactgaataatagtgtatattgtataccttgtaccatggttttttgctgtaatttttttagaatatttgttatgcaaattatatgaagttatagagg

SEQ ID NO: 61625 - DNA, 378 bp, Oryza sativa
  unsure (1)..(378): unsure at all n locations
  Clone ID: PAT_MRT4530_6303C.1
atggcgtcgaccgcggactggcggcagtccagattcgggtgctggggtgcccggatccggtcccccacggacggacggcggcgtcctggcgtcgtggaggccggcggcgtgtggttgtcgtggaggccagcgtcgtgcggcagcggncagggcgtcatggaggccggcgacggtgtggagtcgcgaccggcgacatcgggtgctggtggctgcaggctgcgatggcggacggcttgtggcattggccgtggcgaccgtggacgtggctgcagtggaggaggtgaggatggcgacggcgaggtggctgggcattcggcatcagcggctgcggtggcggtgacctcggtctccggaggcatggcggcttcggacggctag

SEQ ID NO: 61626 - DNA, 897 bp, Oryza sativa
  Clone ID: PAT_MRT4530_63040C.1
atggacaatcattcaactcccatcgatccatccatcggcggcggccgcgtagaacacataggcgaccacgtactcaggcatcgctatagcacaagccttgttgacgtgacttcgccggagcagaagcggtgcacgccgcccgcgctcggcagcggcgtctggcaggaggacgtgcatctgaccatcagccatcacgggaagaaagccgaggtcgatggctgtccgagcacatgcatgcacgggcagatggagaaccacaacggagaagaagcagatccatctacacacatgaagaacacacacaagagaaaacatctaccggtgatgctgtctaccggataccgccatgtcgtcgagatgcgccgatgcccccatctcgccaactgcggcttctcttctgtaatgcgcgccgtaccctcgccggcgatcgcaggagcagccacgagtgtcgcccgagctgtttctgatccaggagacggtggcagtcgctgggatgttgctcaaggagccgtcgacatgccaccctgctgtgacgcactgaaggtccccggagcagtcgcggataccgtcgaggtgcccgtacgccgttcgtcaagtctggctgtgattctttcacttcatcacgccggagttgccatgtcaaccgatctgttggcgctgatcgcaagcgtctgtcaagctcgatgccactcgtcctcaggactgatgccatctgttcgagctgccggtgatgattctactcgttgcgatctcgccgagatattaaacgtcgtcgccttttgccgaccgctgcctcgcaacaccgtcaatatctacccaccctcgccgccgttgcaatcttggtgcccacacgctgtcgtcaagcccggccatgattctttctcgtcatcaggctga

SEQ ID NO: 61627 - DNA, 2880 bp, Oryza sativa
  Clone ID: PAT_MRT4530_63041C.1
atgtcgcgccaccccacacgaggtggccggccccccacgcccccgtccagtgaggcagggtgcaaggctttcatggcaagtctccggaatgtccggtggcccccgaagtttcgtccgaaccgcactgagaagtacgacggcaacgtcaacccctccgagttcctccaaatctacactacgatcatcgaggccgtggggggcgacgatcgggtcatggcaaattattttcccatggccctcaagggtcaggcacggatctggctcatgacccagccccctgactccatccactcctgggaggacctgtgccagcagttcgttacgaacttccaggtttttgttgggttgggctgttttgggccttctatgggctatgtctcccccgtcccctcctcgcccaaatgcgggtccccggccctgactcccccatgggtcaaaaatcacacccgcccccacccctgtaggacgacgagtccctctgctcgtgcatacaacgtttctgccaggtccgcaacactatcccgtgcatcccggcccacgtggtcgtctatgcattcaggggcggcgtgcggcacaaccacatgctcgggaagattgcctccaaggagcccaagaccaccgccgagctcttccagctggcagacaaggtggtttgaggaggcgtgggcctggaacatctctggctcaggcgcagcggcttcggctgcccccgagccctcttcccgctctaagccgcgggacaagagaaagaggaggaagtcggcccgctccgatgatgagggccatgtccttgccgtggatggtgcctccaggcccctgcgtaaggagaaggccaccggcagcaagccgggcgccaccacccccgacgaaagccgttcagcggacaagtggtgctcgatccacaacacttaccggcacagtcttgctgattgccgcacggtcaagaacttggccgagcgcttcaggaagactgatgaggagaggcggcagaatcgccgagagggcaaagcccccgtgacctccgctggcaaccggcaaggggaggccaagaaaaaggcccccacgatgatgatgacgatagcgaggacctggagttccaggctcctcagcaaaccctttaaggccatgaagcgagaacttctcgctgtggcgccaacccacgaggcggcccgccgggcacgctggtcggaggtgaaactcaccttcgaccagagcgatcaccccacggtgctcgcccgtggggggaagttggcattggtggtttcccccaccgtgtacaacgtcaagctgaagctcgtcctgatcgacggtggggcggctctgaacaacatctctccggcggcctttgaggccataaaggccccggggatgaagcttcagccgtcacttccgattatcagcgtgatgccaggacacacgtggcccctgggccacatcgagctcttggtcaccttcatcgaccgtaccaacttccgcaccgagcggctagactttgatgtggcgaatctcaatttgccctacaacgcggtcctgggaaggcccgcgttggtgaagttcatggccgccacccactacgcctacctccagatgaagatgtcgggccccaacggccccatcaccatctgcggcgacgtgaagatcgccctggtctgtgcggagcagcgcgctgacaccctggcggcggcctctcggccagaggaggacggcagagccccggaggcctccacatcatgtgcctccaagaagcggatcacctcgagcgacgaggtgcctgtcaaggagataccccttggcggtgacccgtccaagaccgccaaggttggcagttttctagtctcatcacgaggcatagaagctaatcccgagaagatatgtgcaatagagaggatgcgccccccccaaagcaaacttagggatgtgcagtgcgtcaccggatgcatggctgccctaagtcgcttcatctcgaggctgggagagagggcgctacccctgttcaagctcctcaaccgctccaggccgttcgtttggatggaggaggctgagcaagctctcaaccagctgaaagcttacctcacctcccctccggtcctagtggccccggggccagaggaaccactgctgctctacttggccgcgaccccccaagcggcatgccccgacgccaccatgggggagcaggaggccctggcgggtggccccgaggtcccttgcgcggatgcgggaggaagccccctggggccccaagaattgactgccctgagactggcgcccctgacagcaaagatagaccccgccgaaaggggcctagatgcactttcagcgctacgggacgcaaaaacccgataccctcaagctcagaaaatgctttatgcagttctgatggcctcgaggaagctacgccattactttcaggcgcatcgggtttccgtgtgggccatcgaactagcggagttcgatctgcacttcaaaccacgacacatgataaaaagtcaagtcctagctgactttgtcgctgagtggacaccaatggacgatcccgacctacccctcgacccttccccctccgaaggcggggaggacccgaacaccgacatcggggtaatgcactttgatggttctttgaaccttcaaggtgccggagccggagtcacactaacctcgccaagcagggacgtccttaagtacgtcattcctctcgatttccgagcaacgaataatatggcggaatacgatggactcctcgcgggattaagggcggcagcaagaatgggcatccgcggcctcctcgtcctgggcgattctcagctagtggtgaaccaggtctacaaggagtaccagtgcaccgacctgcagatggacgcctacgtccgtgaagtgtga

SEQ ID NO: 61628 - DNA, 5397 bp, Oryza sativa
  Clone ID: PAT_MRT4530_63042C.1
gtggaggaagaggtggtggcgtatactccctcaccttccggaagtgaggacggtagcgggagtcgcgaccctcgccaccaccgctggaactctccgacccctcctcgtcgatgtcccggacggcaggaggaccccaccggttcggaggattagccctttccccgctggcggacaggggcaggttacgccgcgccggggtgcgacgccgcctcaactacaatgatggcggcacaccccacggcacactctaggctgtgggggctctcctgcggcacccttcggtcgttctagagccggaaaccctagtccggcggtggctggatgacgtgacccacttggtcaccaccgccccgcgacagctggccgccgacgccggcgaccggcccgcgaccactggtacttcgcgtaccacctacaaccctctcctcatcggccaggaggagggcccgtcgttccgccatgatctcacggtggttgacggtcccgacgtcatcgaggcccacggagagccacgggcgtcacgacagtctgtacggggaacaggacgctcgcatcaacatcgagcgccgcagggacaagcaccgtgctacccgcgtggggaaggcacctcctcatcaggaatgtcgcgccaccccacacgaggtggccggccccccacgcccccgtccagtgaggcagggtgcaaggctttcatggcaagtctccggaatgtccggtggcccccgaagtttcgtccgaaccgcactgagaagtacgacggcaacgtcaacccctccgagttcctccaaatctacactacgatcatcgaggccgtggggggcgacgatcgggtcatggcaaattattttcccatggccctcaagggtcaggcacggatctggctcatgacccagccccctgactccatccactcctgggaggacctgtgccagcagttcgttacgaacttccagggtacgtaccctcgcccgggagaggaagcggacctgcacactagggatggcaacgacgacgagtccctctgctcgtgcatacaacgtttctgccaggtccgcaacactatcccgtgcatcccggcccacgtggtcgtctatgcattcaggggcggcgtgcggcacaaccacatgctcgggaagattgcctccaaggagcccaagaccaccgccgagctcttccagctggcagacaaggtggtttgaggaggcgtgggcctggaacatctctggctcaggcgcagcggcttcggctgcccccgagccctcttcccgctctaagccgcgggacaagagaaagaggaggaagtcggcccgctccgatgatgagggccatgtccttgccgtggatggtgcctccaggcccctgcgtaaggagaaggccaccggcagcaagccgggcgccaccacccccgacgaaagccgttcagcggacaagtggtgctcgatccacaacacttaccggcacagtcttgctgattgccgcacggtcaagaacttggccgagcgcttcaggaagactgatgaggagaggcggcagaatcgccgagagggcaaagcccccgtgacctccgctggcaaccggcaaggggaggccaagaaaaaggcccccacgatgatgatgacgatagcgaggacctggagttccaggctcctcagcaaaccgtcgccacgctcgacggaggggcgtacgctcacgcctcccaccgcagctttaaggccatgaagcgagaacttctcgctgtggcgccaacccacgaggcggcccgccgggcacgctggtcggaggtgaaactcaccttcgaccagagcgatcaccccacggtgctcgcccgtggggggaagttggcattggtggtttcccccaccgtgtacaacgtcaagctgaagctcgtcctgatcgacggtggggcggctctgaacaacatctctccggcggcctttgaggccataaaggccccggggatgaagcttcagccgtcacttccgattatcagcgtgatgccaggacacacgtggcccctgggccacatcgagctcttggtcaccttcatcgaccgtaccaacttccgcaccgagcggctagactttgatgtggcgaatctcaatttgccctacaacgcggtcctgggaaggcccgcgttggtgaagttcatggccgccacccactacgcctacctccagatgaagatgtcgggccccaacggccccatcaccatctgcggcgacgtgaagatcgccctggtctgtgcggagcagcgcgctgacaccctggcggcggcctctcggccagaggaggacggcagagccccggaggcctccacatcatgtgcctccaagaagcggatcacctcgagcgacgaggtgcctgtcaaggagataccccttggcggtgacccgtccaagaccgccaaggttggcagttttctagtctcatcacgaggcatagaagctaatcccgagaagatatgtgcaatagagaggatgcgccccccccaaagcaaacttagggatgtgcagtgcgtcaccggatgcatggctgccctaagtcgcttcatctcgaggctgggagagagggcgctacccctgttcaagctcctcaaccgctccaggccgttcgtttggatggaggaggctgagcaagctctcaaccagctgaaagcttacctcacctcccctccggtcctagtggccccggggccagaggaaccactgctgctctacttggccgcgaccccccaagcggtgagtgcccccctcgtagtggagtgcgacaaagaccatccgtgaaccacaagcgacgagcccgatcatgggaagggactaggggccccattaatcggtgatggcccctcgtctcccgacggcccgagcctcgatgctcctggcccctaggcatgccccgacgccaccatgggggagcaggaggccctggcgggtggccccgaggtcccttgcgcggatgcgggaggaagccccctggggccccaagaattgactgccctgagactggcgcccctgacagcaaagatagaccccgccgaaaggtgcagcggcccgctattttcagcaccaacagctatgtcaacgaaggatttttcggacattccgaaaacttttcggacaagtccgaaaatttccagtaccaacaacatcgttctggatgttctcggaaaatgcggctttcctagaactcaaggaaacgaaaacgtacaaaataccgtttgctcatttgccgtatcacatcacatcaacgtattcggcgggatatgcattacgctaactcatcgctacgggacgcaaaaacccgataccctcaagctcagaaaatgctttatgcagttctgatggcctcgaggaagctacgccattactttcaggcgcatcgggtttccgtggtaacgtcctaccctctcggtcgggcagatcctgcacaaccgagagggtactggacggactgtgaagtgggccatcgaactagcggagttcgatctgcacttcaaaccacgacacatgataaaaagtcaagtcctagctgactttgtcgctgagtggacaccaatggacgatcccgacctacccctcgacccttccccctccgaaggcggggaggacccgaacaccgacatcggggtaatgcactttgatggttctttgaaccttcaaggtgccggagccggagtcacactaacctcgccaagcagggacgtccttaagtacgtcattcctctcgatttccgagcaacgaataatatggcggaatacgatggactcctcgcgggattaagggcggcagcaagaatgggcatccgcggcctcctcgtcctgggcgattctcagctagtggtgaaccaggtctacaaggagtaccagtgcaccgacctgcagatggacgcctacgtccgtgaagtgtgacgcatggagcgccatttcgacggactcgagctccgacatgttcccaggcgcgacaacgcagtcgctgatgagctatcgtgtctcgtgtcagcgcgagccccactccccccaggagcctttgaagaaaggctcacgcagccgtcggcgcgctcggattccccgagggtgcctgatgccgaaatccccacccgacgcctcgcgagccatagtcctcggggcccgagggggtcaaccccgaccccccacgtcaggtcgcctagatggccgacatctgggcatacctcgacaatcgcactcttcctaaggatcacgcggaagccaaaaagctcgtgcgcatctccaagcgctatgtgctagtataagggaccctctacaggtgcggtgccaacggagtcctcttgaagtgtatctctcgggagcaaggcatcgagctcatcgccgacgcccatgagggagaatgcagggcccactcggcctcgcgcattttggtcgataaagcttttcggcaaggcttttactggccaaccgctctccaggatgcccaggactgcgtcaggcgatgcaaggcttgccagttccatgccaagcaaactcatcagccggcccaggctctgcagctcatccctctctcttggcctttcgtggtctggggtttggatatcctagggcccttcaaggcggcccgtggcgggtaccaacatctgtacgtcgccatcgtcaaattcaccaagtggcccgaagcttacccgatcatcaagatcgacaagcattcgaccctcaagttcatcagaggcatcacatcccgatttggagtgccgaaccgtatcattacggacaatggcacccagttcaccagtgaactattggtgactactacgacaacatgggcatcaagttatgcttcgcctcacccgcccaccccaagagcaacaaccaagtcgagcgcgccaacgccgagatcctcaaaggcctcaagaccaaaacatacaacgtcctcaagaagcacggggactcttggctagaagaactgcctgtggtgctgtgggccaatcggaccaccccgagtagtgcaacaggagaaacccctttcttcctgatatacggcgccgaggcggtcctactgtcggagctctccctaggctcggctcgagttgcgctgtacaatgaggcagatcaggatgggctccgtcgtgatgacctcgactatctggaagagcgaagaaggcgcgcggccctccgggtggcgtgctaccagcagagtctgcagcgctatcatcagcgccacgtccgggcccagttactgcaagtccatgacctcgtcctccgccgcgtccagtcgcgcttaggattgagcaaactctcaccaatgtgggagggagcatacaaagtgatcggcgtcccccgaccaggctcagttcgattggccacggaagacggcacagaactacctaacccctggaatatcgagcaccttcgccaattctacccg

SEQ ID NO: 61629 - DNA, 510 bp, Oryza sativa
  unsure (1)..(510): unsure at all n locations
  Clone ID: PAT_MRT4530_63043C.1
tagatggtacatgtacacctgttgggctccaatgatgcaccactgagtccggtcgatatgcttgcgaagttgcaatgctctgtccactgctgttcgactcacgaagatgcttccaccacgtaaagttggaaatttgttctcacgccaccactgttctgtcttctgcacaaaaggggggaccacataattcctgtttggacgcgtggttccgacggcctgttgcccaccgcgangattggaacgaacttggcacataggaacactatttggagcaggacatctgtctgctggatgcagctggctgactgcactgtttgaggtgtgtgtacgtgcaggatgagtggtgtggcacaaaggatggtatccattgccttgccctgctggtgtgctgtgttctgcngctggaacacatggttggaatgaaaccttgccaagtgatggtgttaagacctgtgctagactgggaatatgaaagctatgtttatcctttaaaaaaaaaaaaaaaaaaaa

SEQ ID NO: 61630 - DNA, 843 bp, Oryza sativa
  Clone ID: PAT_MRT4530_63044C.1
atggcgacaacgacggcgacgacacttgcggccagcgccggcgacggttcttccccgccgtcgcggtccaccgtcatgaccatcgcggcgcaggcttatcacgtactcaagatcaacggtgcaagggggttcaaaaacttcattaggagagacgaattagagcgatcggaatatctcaatgatgactactttgccattgctgcccatgtaatcatcccaaaggaaaagccatctgtcgtcgtaccaccgtcgaacatgcatctgcattatggtgatctcctcgtaagcaaagaaggcaccgatgtcaagttcctggtcggtggcgagatgtttgcggcgcaccggttggtgctggcggcacggtcactggtcttcaaggcagagcttttcgggccgacgaagaaaggcaccatagatgcgatacagattgacaacatgaaagcacgagtgttcaaggctctacttgggttcatctacacagacatttggccagagataggtcatggaaaagacaatgtagctatggctcaacagttgcttgctgctgcagacaggtatggcttacagaggttaaagtttgtctacgaagataagttgtgcaaccacattgatacatactcagtgtcaaccatgttggtgctagtggagaagcaccattgttgcaaactcaaggaggcatgctctacgttccttagttccatgagccctcctattgttgaagatccaaattccagcatatttggtagtgaattgaagaagacggtttcttcttcagagaaccatggaagtcaaattaaccgtacagatattaggattcaactgtggcaaaatgcagatgtctag

SEQ ID NO: 61631 - DNA, 529 bp, Oryza sativa
  Clone ID: PAT_MRT4530_63045C.1
ttaatcggtgatggcccctcgtctcccgacggcccgagcctcgatgctcctggcccctaggcatgccccgacgccaccatgggggagcaggaggccctggcgggtggccccgaggtcccttgcgcggatgcgggaggaagccccctggggccccaagaattgactgccctgagactggcgccccttcacaaacttctcccggccaaccacaagtagatcggtggctcgggagcgacacatgtccgaaaattccaactcagcaccaacagctatgtcaacgaaggatttttcggacattccgaaaacttttcggacaagtccgaaaatttccagtaccaacaacatccttctggatgttctcggaaaaattatcatagacggtgctacaggccttgccgacggcctaggacgtgtggaagctgagggttttgccgatgtggaagccctagaagtggaaggcctagaagagagcagacatcatgtcctcgcgggacctagctatattgtcacacagcttctcccacagtga

SEQ ID NO: 61632 - DNA, 1845 bp, Oryza sativa
  Clone ID: PAT_MRT4530_63046C.1
atggcgacaacgacgacgatgacacttgcggccagcgccggcgacggttccccttcgtcgcggtccaccgtcacgaccatcgcggcgcaggcttatcacgtactcaagatcaacgggtactccaacaccttggaagccggccgccaccacgccctcagctcctgtccgttcagcgcaggaggccacacctggcatgtcagctactacccaaacggaggccgcgacagcaacaagaactgcatctccatcttcctcgtgcttaaggacatcgtcaccgaggaggacgtgatggcaaaagttacattcagcctgctcgatcgatacgggaatccggtgccgtcgtacacctatcacacccaattacgtaacttttcaacatctcctagtagggcaaagggtttcgaaaactttattaggagggacgaattagagcgatcggaatatctcaatgacgactgctttgccgtcgctgtccatgtgatcgtcccaaaggaaaagccatctattgtggtaccaccgtcgaacatgcatctgcatttcgttgatctcctcgtaagcaaagaaggcactgatgtcaagttcctggtcggcggcgagatgtttgcggcgcaccggttggtgctggctgcacggtcaccggtcttcaaggcggagcttttcgggccgacgaagaaaggcaccatagatgtgatacagattgacaacatggaagcacgagtgttcaaggctctgcttgacttcatctacacagacatttggccggagataggtcatggagaagacaatgtagctatggctcaacggttgcttgctgctgcagacatgtatggcttacagaggttaaagtttgtctacgaagataagttgtgcaaccacattgatacaggctcagcgtcaaccatgttggtgctagcggagaagcaccattgttgcaaacttaaggaggcatgctttacgttccttagttccatgagccctcctattgtggaagatctaaattccagcatatttggcagtgaatcggagaagacgaagtacagatatttgagaaatgagaagcgggctcacacgtatctagaacgtaacagtggagctggtgacaaggtgtttctcgacaagtgcatcttggtctcagtttataaaggagtgaaacttatgtttggtaagcgaggtgggactacgtgtgcactagcgcagtggctgcaccgtatgggcctcgaaattcagcaagagaaaggacccgcaggccgcagctcatatgtgcgccgtgctccggcctcatcgtcctatgctggctgctgctgctacgatgccaccggccagcggaacgcgttggcgttctggaaggtgcggttcgatcgggcgcgaggacacgtcgtacgtgtgatcgatgctgatcacggcagtgggcgcgacggttggttctcgatcgaggtggcacggcatacggtcaaggatgagatcgtcggcttgagacgccatgtatgctgccgctcacccctcgtcggctccgctggctggccgcgtacctcgagggcgcgtacgacgtattacgacgtacgcgccgacaaatttacgtacgcgcgcgcgagcgacacaagccccacggcgaggcagctgcacgcactgcctcccgccaatcggcgcacagggcctcgcaccgacgacgaagaacgtcgacggccagggcaccatgcaccgacgcgtactgcgtcaccatatgtacgcgggcagaagtctcgtcgactcgttgctgtccgcggtggaaatgagcagtacacctgggagctggaattggaacagttggtctggcacgacaacggtctggccgcaaattcatattga

SEQ ID NO: 61633 - DNA, 140 bp, Oryza sativa
  Clone ID: PAT_MRT4530_63047C.1
acggccgaggcgctcgcgcggaacgaggctgcgggaccagagccgggaacgcggaaccggctcacttccgcagcgctggcgtgcggaaccgtggcaccagcatatttttactacgtgacactgtacccgacactgtttcg

SEQ ID NO: 61634 - DNA, 1866 bp, Oryza sativa
  Clone ID: PAT_MRT4530_63048C.1
atggacccctcgtcggcgggcgccggcggcaactcgctggcgtcggcgtcgtgcggcgacgcgcagaagcggcgggtgtgctacttctacgacccggaggtgggcaactactactacgggcagggccacccgatgaagccccaccgcgtgaggatgacccacgcgctgctcgcccactacggcctcctcgccccggccaagatgcaggtgctccgcccgctccccgcccgcggccgcgacctctgccgcttccactccgacgactacgtcgccttcctccgcgccgtcaccccggagacccagctcggccaggtccgcgccctccgccgcttcaacgtcggcccggactgccccgtcttcgacggcctctacgcctactgccagacctacgcgggggcctccgtcggcgccgccgtcaagctcaaccacggcacccacgacatcgccatcaactggtccggcgggttgcaccacgccaagaagtccgaggcctccggcttctgctacgtcaacgacatcgtcctcgccatcctcgagctcctcaagctccatgagcgagttctgtatattgatattgatatccatcatggagatggagttgaggaggcattctacacaacaaacagggttatgacagtctcatttcacaagtttggggattatttcccgggaacaggggacatccgcgatattgggtattcagaagggaagtattactgcctgaatgtcccgctggatgatggaattgatgatgacagctaccagtccatcttcaagccgatcatcagcaaagtcatggagatgtatcgtcctggtgcagtcgtgcttcagtgcggcgctgattcgttgtccggtgataggttgggctgtttcaatctctcaggcaaaggtcatgctgaatgtgttaagttcatgaggtctttcaatgttccgttgcttcttcttggtggtggtggatataccataagaaatgttgcacgctgctggtgttacgagacaggagttgcacttggtgaagagctacgggagaagttgccttataacgagtattatgaatattttggtccagaatacagtctttacgttgcagcaagtaacatggagaacagaaatacaaacaagcaattggaggaaataaaatgcaacattctggacaatctctcaaaacttcaacatgctcctagtgtccaatttgaagagcgaattcctgaaacaaagctacctgagccagatgaagatcaagatgatccagatgaaaggcacgaccctgactctgatatgctgttggatgatcacaaacctatgggacactcagcaagaagccttattcacaacatcggagttaagagagaaattactgaaacagagaccaaagatcagcatggtaagagattaacaactgaacataaagtaccagaaccgatggcagacgatcttggttcctccaagcaagttcctgccaccagctcttatgccacggattcctgcatgctattagttacttactccgaggtgttgtatgactgtttcttctgtaggagtttacaaattacaactgtttcttttgttgaagaattccaaagtgtccaggcaatactggacgtggagacattagtctgatcaatgtactgcagagtacagaacatgtaacatgacccaagttacagtgtatagtcttttagactgttagatggaactttcagtcgaaatgcctgtgcctacttgtgtgtgctctctgttggttgtttttcgttaaaatattttgttccggtttatcatgtacttcctacgtttttatgtatgagttgttttaaagagacaaataaatctattttttaatttataatagttaatacttaattaatt

SEQ ID NO: 61635 - DNA, 285 bp, Oryza sativa
  unsure (1)..(285): unsure at all n locations
  Clone ID: PAT_MRT4530_63049C.1
ttcggcacgngctcttgccgaattcggcacgngcgncnctgcagcanaaggatccccaatttccgcganaaaccctcnnaattctacccggnctcccggcgcgtcagtngttccccnatngaggcagcanaaacacccgccgcggcgctcttgtctccgcccgccncccncgcgtccncgngggggnntgggactcccagtgctacctctctccccttcgaccggaggacgtggtgtcgcctcccatcaagggtcttggacngggccatccaacttggncaatgt

SEQ ID NO: 61636 - DNA, 826 bp, Oryza sativa
  Clone ID: PAT_MRT4530_6304C.1
atgcctccggtgaccgtggtcaccgccaccgcagccgctgctgccgaatgcccagccacctcgccgtcgccatcctcacctcctccactgcagccacgtccacggtcgccacggccaatgccacaagccgtccgccatcgcagcctgcagccaccagcacccgatgtcgccggtcgcgactccacaccgtcgccggcctccatgacgccctcccgctgccgcacgacgctggcctccacgacaaccacacgccgccggcctccacgacgcctgcacagcaggcctcgccacccacgaggccgcacgaccgcctccacgacgcctcaaccaccacggccgttgcctcgccagccaaccgtcgcagtcgatgccgccacagccgtcgccaccgtcaccggctgccgtcggcagccgccgccgccgccagctagatctggctagagacgtcattgcctcctcccgcatcgccgacgtcaccaccggctctcgcggcacctccaccaccacacccgtcgtccggccacgcctccgtgctcggctaccggagctagctccagcagcgtctcccgccaggtcgtcaccgcccaaacccaccgccaaaactcgccgccgagctaccaggacgccgccgtccgtcgttgggggaccggatccgggcaccacagcaccggatctggacgccgccagtcggcgtcgacgccatgccctgagctcctaccgtgccgacgtcccgaccgtcttgaccgtgaacgcgggagagagagcccctccgccgccgtccttgcagccggcggccgcgaggctggggaacgttctcgcttgttaa

SEQ ID NO: 61637 - DNA, 263 bp, Oryza sativa
  Clone ID: PAT_MRT4530_63050C.1
gttcctttattcgaaggttgaaggggcttattgcttgggtgtgtttcagaatggaaaagatccgacaacactattagggggaattgtggtgcgtattatttttgcattcatatgtccggttcattaagatgatgactctgggtaatcactaattcgtttagttatgtgtctgctttttctctttatttactttttatctttctcttttcatttattccattctgttctttatttcttgtctttttctttattttcatatcttc

SEQ ID NO: 61638 - DNA, 2216 bp, Oryza sativa
  Clone ID: PAT_MRT4530_63051C.1
ccaaaaaaaattccccaattccccaactcgatccgctcaaaatcgcgcatccaaaccctcgccctcctcctcgccgccgccgccgccgccgacgacgaccatcccaccgaccgcgcgcgcgcgagggggctctactaccaccggcgatgcggcgggacgacgccgctggcggaggcggcggggggttccaggagctgttcgactcggtgcgccgctccatctccttccgccccgggggcagcgccgccgccgcggccgccgccctcgacgagcccgcctcggcttccggcggtggggggttcagggggcggatcagcacgtgcctccgcaagtccagggggatggggctgctcgggatggtggcctccaagagcccctcacccccgcgccgccgcctccttcccccgccgcgttcgccgccgcccgcgccaacgaagtctctctcgccacagcctgcggtggtgtcccaagggggaggcggtgcgggtggagtcggaggaggggaggaggaggaggcgaacccgccgatccggtggcggaagggcgatctcctcgggagcggcgcgttcgggtcggtgttcctcggcatggatcttgattccggcgagctcctcgccgtaaagcaggttttgatcgggagcagcaacgcaacgagggagaaggcccaggggcacataagggagcttgaggacgaagtgaagctactcaagaacctctcacaccccaacattgtttggtggtgtttgatctatctggtgtgctttgagcagcgatatattggaacggtgcgggaggagaactcgttaaatattctgctggagtttgtgccaggaggatcgatccagtcactcctcgggaggctcggatcattccctgaggctggagcaaatatacttgttgataataaaggatgcattaagttagcagactttggggcctccaagcaagtggagaagttggcgaccactgccaagacaatgaaagggacaccatattggatggccccagaagtaattgttgggagtgggcatgacttttcagctgatatctggagtgtcggatgcactgtaattgaaatggcaactggtaaaactccatggaatcaggaaattcaagagcattttgttactcctttcagggaaccagaactgagatctactgcatcagacttattgctgcacccatttgttacaggaggattggaagatcttcaccaggttaatcatgcaacacacaaggaaacctctgagcttccggcatacgatatgccaactggtgacctgggcttgaatcattctggcaacccaagtaacttgaattcctataagtcatcagacatgagaccaatatgggatgggcacagcagtgatgacatgtgtcagtttgctgacaatgacgtggtaatggttggatcgagcttcaaccctatgtctgaaccatttgatgactgggaaagcccagaacaaagatctagtcaatcaagggaatttggaggattagccaaacatgttgaaaataacatgtctgaaaatgattttactttcccatgtgagggaggctgtgaagaggatgatgaactcacagaatcaaaaataaaggaatttctggatgaaaaggccatagatctaaagaaactacagacacctttgtatgagttctacaacacagtaaatgctggactttctcaaggagttggtgaaacttgccaagtagacaacattactgatttgcaattgccccttcaaggaagatcacctccaattcagatggagggagttgcagcagtaggaccaaccagcgatattctgaagagtgccagtccaaagagctgcactaggcgtttctcaagaagcggtgtggagaatggtcgaattttaagagaaattgcttcgcctcaactcaataagtttgaggacaaggtccacgatattcaagacaatcccagcattagcttttctgaaagacagaagaagtggaaagaagagttagaccaagaacttgagatcgggagaggtgggcatttggatttgaagccaggctgtcacgatttgcccacaggggaacagtttactggctgtttcgcctacaatatgcagctttatgttaacgatgccttggcgattttgggagccctccaagtgtggcaggatggcttatgcgcagaaggaatagttgtacttttattttttttccctttctcttcgttgtttttgtaa

SEQ ID NO: 61639 - DNA, 525 bp, Oryza sativa
  unsure (1)..(525): unsure at all n locations
  Clone ID: PAT_MRT4530_63052C.1
caccagcttcgtttacttcaacagcctataatgtcttgggacgcgtacgttacctcctggcaggcactgccnaacgtcggccacgccgccatcgtcggcaaggctggtccttccatctgggccaaggacgccgccttccccgccaacctgcaggccgctgatgttctctccaccctggccaacaaccccccaggccctggtggtcacaagctcgctggctacgtcacctctggtgcccccaacgctggtcccgcctcccccggttccttctccgtcttctcccctaccgaggagttcaaggccacccgccctcagttcatcgttgcctggactaaccagaccttctgcatcgttgtctgcgccgagccccagaagcccgcttctgggcattgtctcgccctctttccgcaacattgaccatctcctcggatccggttactaagcaactcttgtctantagaacaaaaaaaaaacctcagggaaaaacagttctgttttcttcttgtactttgatcaaaaaaaaaa

SEQ ID NO: 61640 - DNA, 234 bp, Oryza sativa
  Clone ID: PAT_MRT4530_63053C.1
atgccgccggtgacgccctggtcgcctcagctgccgcgcgcggcgcagggtccagggggcgcgggcaggcacagcctttactgggacggcgcgcgcacgtttgattgcctctctccacactgttcgccgtcgtcgtcgtcgtcgtgcgtgttttggacgcactcgcggaagcagagctaccgagctagctgtgggaaagttagctgcgtctccgacaggcttcctgatgattga

SEQ ID NO: 61641 - DNA, 777 bp, Oryza sativa
  Clone ID: PAT_MRT4530_63054C.1
gcccagaaatggaaacaaacagttttatgagttcacgatgaacattcacaagaaattacttgcaagcatgtgtcacatggttctaacaatcctaacaattgaagaggaaatttcaacatttcatagtgtttgttcccttcatcttcttgctatttattctcttctttataattagacttgactggtttcctggatgatggccttgcattagaaccaaagctacctcaaaatcaaacagctatctttcctcgtttggaccacttgcagaactttccagattgttttttttgttgggtgatgggttcatgacatcctcacttctaaacccaagctctgacatatcttgctttgccatcaggtttctctccatcctacattccaggtacttcttcgagaactgccgacatttttcggactgaaatccagttgatttaaggcacgcaagataatctttcttctccaagtcacactcgtgcaagtgatccagtgggaacactcccttttcgggaggcacaggcctcacgccccgatttccaccaaacgcaccgcctgcactcatttccaatggtgatactttctcagtgctcaaaccgccccaccagaacttcccagatgagtagcaaccaaggggggaaatgcggattcagttgaaaccctaaacaggatcccctcccctgccctgctctgctcgccatctgtagaatggcgcctctccattgttcagccaaggatggagcaagtagcggaggagacgagacgggagattttcgcttctaa

SEQ ID NO: 61642 - DNA, 2130 bp, Oryza sativa
  Clone ID: PAT_MRT4530_63055C.1
atggccggagaaggaggagcagaggaggagaaggtgtacgtggcggtcggaggcgagccggagaggtgcttgccgacgctgaggtgggcgctgagctacacgccggccgggagcacgctcgtcctcctctacgtccaccgccccgacgccatgatccccatcttcactggagcaagggtacctgtgtgtgttcttaaggatgaagtcatcaacgttcacaggcagaaggagaggagcattgtccaggagaggctaagaatattcactgccgaatgcgagtctaaacaggttcatactgaggttatcatagctgagaacgacagcataggacttggcattgtgaagttaattgaagaacataagatcggcacactcatcatgggagctggatattatgggcactactacgagaaagattttcgcgtgcggtcaaaaccggttttcgcgagcaggccgaaatcaagcacaggtgagttcaaggtgaggacaaagcttgcgactattgtggaggaacaagctcatccatcatgtaagatcttgtttgtgcacggtggaaaggagctgtccacaagaccaagactaatcaacatcagggcggcgaggaacgagaacggcgagattcctcgtgcagcatggcgtctggatgatgaggaagtggaagaagagtgcagatgcagcgcattatcttcttcctcctcgagcaccgccagctatggtgctctcaagctcgagaagctagacaatcccgtcatagagaagttggagtcgtcgtcgccgtcctccgctgaccatggcagcttgttaaccctcatggcccctgcctcgctcgtcgccctaaacgagatggtgaacgagatgatcctcgccggcatgtcgccggagctgcggcgggctccgttcggcgccggctgcgacgacgacggccaggtgaggaggtcgttgcacgccatcatcggcatcgacgccgcgctggggctggaatggaggaacctcgaggaggtgcactggaggggatacatggagtacaagaccaccaggtggctccacacgctggagtacgtccgctgcgtcgccgccgtcatgcaccgcggtggccaggcccgcgcccgggcgctctcggcggcggcggagaagcccgtcgagacgctgctcgagttcgccacggccgtcagcagggtgagcggctcgccggagaagctcttccacatgctgcacatgcacaaggctctcgcgcacgcggcgccgctcctcctcgccgccttcatcggggacgccaaggagcggttcgccggcgagctcgagcgaaccctagcgtcgctgggcgtcgccgtgcgcgggatactcagcaagacgaaggccctgatccactcgtacggtggctcgcctggacagaacgtcgtcgtcgtcgtcgtcgtccccgacggcggcggcatacacgtggtcaccagctacctcgcgaggtacgtcgagctgctggctcagcacgccgcctcgcttaacgtcattctggccggcgacgtcgacgtcgacgacgacgacggtagccagagccagatgatgtcaccgctcggccgcctcgtcgccggcgtgatcggcagcctcggcgtgatgctccggagaacggcggagctgtacgaaacagaaggaggtgaaggtctccggcacctcttcctgctgaacaacgagcacgccatcctccaagccatcgagacgacgacgctgctacccctagcagccgagtggacgcaggcgtaccgccatgggatcgagcagcacaagcaggggtacatacaaacatgggccgccgtggctacttcctgtctaccacgagatgatcctcctcctcctccgacgtcggcgaagaaagccggcttcctacgccgccgccgtcgctcgccgccgttgagagaattcgcggcgtctctggaggagaccagcgttgagcagatgcagtggaaggcggccagtccgcatctccgcgacgagctgcgaagagccgtcaaggagtgcgtcgcgcaggcctactccgagttcatggacaagcatcctacctccaatgctggcgaggagttcgctaccgtcgatgatttgattctacgctgccagatagatcaaatccttgaagggtga

SEQ ID NO: 61643 - DNA, 333 bp, Oryza sativa
  Clone ID: PAT_MRT4530_63056C.1
atggctagatatgttatcccaattattgtaatgaagaaggccgacagtcccaacgcttctccggaactccgctggaagaatatcgacacttcggcactcctccgtaaaagtgtcagagaaaactccgatattcggggcattcctttcagagcttcccctcattgtctactcaaccctacgtaccaaaatagagctgaagttctaaaaccttcacatgatggttggaatggcggttatggaggccggtgcgcttctaaccgtcattgggaagccatctgggacgtccacgtggaaggtggagataaggagttgacggttaaagtttgcatttaa

SEQ ID NO: 61644 - DNA, 5369 bp, Oryza sativa
  Clone ID: PAT_MRT4530_63057C.1
atgggtttcgtctctggcatcgacgccttcatcttccctcctgggcaggcgtttcggttcggcagcctcaacttcatcaccaacgacttcagcaagatttgtctccttgactcggatgcgaaccagtcaggaagaggccaagtatctgccccgttcggtatcccgaactcggccgagatctactccaagattttctcaaccgagtcggcttcaaaccactcggacgagatgcaatctactccgacacgacgtgatcaaggcgacggagcatatccctcaatcccgatgaagctccccgatgatttggccgttgttttcaccacaagggcgtcttctccccgtaggcctagacgagatccggcctcggccccgatccgatctagctctagggaagttggtgtcatactccagcctctcgaaacggtttcaacggaagaattggactgctatcttagctcccccggtgtcgattctcgaccgacggagatcctcgagtacgacgacttcggctaccattacgactacagcaacctcgacgacttcgacgaaggctacgaagacaactacacgcctctcttcttcggcattttcatggctgataatgagacggcagaacagcgtcaagctcgagaagcagaagaacagcatacacgacaagaagccgagggccgccgactggaggaggagcgactagcacaggagcaagactggctgcagtgtgagcaacaggagcgcgaatgggccgcaaaggaagctgaggactggcgacagcgcgccttggaagctgggcgacgagcacgagatcttatcggacaacaagacattgaagggacggcggtttttcgcaccccgcagcataacgtggtagccgcaatcacccttctagacactctacttcagcaagatgcgcccaaccacgtcgtcaacatcttaaaccagaccaagaccatgatcaccgcctcggtcccagtaaattcttcaagcgtccgtacgctgactggcagcagagttccacctctttgatctcaagactatcaccaaccaagccttagtattgccagtgcaggatctagtcgcaggagcagatcatgatgaacgatctgtttgttcacctgccgatcgacatagggagcgtcgggccgagcagccccgctctccgcgtcgcaggcgtctcgtcgatcttcacgatactatcaaccagcgtcgtgcgacaagaggccacatcccccaccattcaccagatcgttaagactaagggtatccgccatgaactcttagtcggcaagtttggacgcaagcctcccaagacagtcaaacagatgttcgaaaaagccaatgagtacgccaaagcagaagacgccgttactgcttccaagcagttgggcagcacctggaagccaaagaaagatgcgccgactatagggggaagtggaagtgccaatcacaaggatcgcaagcgtaagccagaggaacttgtggcaactactacgccatcctcccgacagcggtcacgcgtcaacaccttcgacaagatcatgaatgcacaatgcccacatcatccgaactcaaatcacgtagccaaagattgcttcgtctataaacagttcgcagaacaatatgccaagaacacacgcaagccgactgacggagatcaaagcacgtcgaagaagaaggatgatgaagatgataccccgactggttttcaagactctcgtaaggaacttaatcacattttttgtgggcccctggcttacgagtccaagcgaaagcaaaagctgactgaacgagagatcaacgccgcccagcccgacacgcctcaatatcttctgtggtcagagacggctatcaagtttgaccgctcggatcatcccgaccgagtggtccacccggggcggtacctcctggtactagacccagtggttcataacgtcacgctccgacgatccctcattgatggcggcagtgcactcaatatcctcttcgccaagactttggacgatatgcagatccctcggactgagttgaagccaagtagtgcgccctttcacggagtcatccccgggctatcttctactccactcggccagatcactttgccggttaccttcggcactcgagagaactttcgcacagagaacatttgcttcgaagttgcagatttcgagatagcgtaccacgctatactcttacgcccgacgttagccaagtttatggctgtcccacactataccttcatgatgatgaagatgccaggacctcgaggaatcatatctctgcggagcaacatcaagcaagccgttacctgcgacaaggaaagctgcgagatgcccagacacgtgagatcacgctcgctcgagaggagatccgactggctgcatcaacagcaaccgaaggagaagtgcctgcgcccaagatatcaaagagcggagaaagcgatgccaagactaagaaaattcctcttgatccctttgatcccactaagactgctactaataaagatatttttgcgtggaaaccatctgatatgcctggtattcctagggaggtgattgagcactctttacatgttaaggaagacgctaaacccattaagcaacaactacgccattttgcacaggataggaaagatgcgatcaaggaggaattgaccaagctgttagcagctggcttcatcaaggaagtcctacatcccgactggctggcaaacccagtcctggttcggaagaagataggacaatggcgtatgtgtgttgattacaccgacctcaacaaatcttgtcctaaagatccctttgggttacctcacattgaccaggtagttgactcaacggccagctgcgagctactcagttttttggattgctactcaagttatcatcatatctgcttaaaagagtccgactgcttgaagacctcattcatcacgccttttggggcttactgctacatcactatgccttttggattgaagaacgccggagcaacttatcaacgcatgattcaaaggtgtttttcaactcagattggtcgcaacgttgaagcttatgttgatgacatagttgtcaagaccaagcagaaggatgatttgattacagatctagaagagacctttgcaagcattcgcgccttcaggatgaagttgaatcctgaaaaatgcatcttcggagtaccatcagggaagctgcttggctttatggtgtcccgtaggggtatacaagccaacccggagaagatcaacgccatcctcaacatgaaaccgccaagttctcagaaaagatgtccaaaaactaactggatgcatggcggcgcttagccgctttgtttcacgactcggcgagcgggggatgccctttttcaagttgctaaagaaaaccgacaatttccaatggggacctaaagcccagaaagcctttgaagactttaagaaacttcgcacaactccaccggtcctggcttcaccacatccgcaagagccgctgttgttatacgtgtcagcaacgtctcaagttgtgagcatggtcctggttgttgagcgtgaagaagatggccatattcaaaaagtccagcgaccaatttacttcgttagagaggttttggccgactccaagacgagatacccctaggtacaaaagctgttatatggcgttttaatcaccgtcaggaaattatcccattacttccaaggttactcggtcacggtggtcacatcgttaacactcagagacatacttcataatcgcgaagcaaacgaacggattgcgaagtgggccctagagttgatgtctttggatctatccttcaagccacgaacatcaatcaagtctctggccttggcagattttgtcgccaaatggactgaatgccaagaagacacgcctacggagaagatggagtactggactatgcattttgacgggtcaaagaggctttcaagtactggagcaggagtcgtcctgatttccccgactggagagaggttaagctacgtattatggatacatttctttgcatcccacaatgtggcagaatatgaggcacttcttcatggattaaggattgcggtatctttagggattcggcgtctgatagtttgtggagattctcagttggtcattaatcaagtcatgaaggaatggtcctgcctcgatgacaatatggctacttatcgacaagaggtacgcaagttggaagacaagtttgacgacttggagttaacccatgttctccggcatgataatgaagcagccgacagactagccaatttcggttcaaaacaagaaacagctccttccaacgtgttcgttgagcatctttatgaaccatctgtaccaagaaaagaaacgaccgaggcggtagatactcaagaagtaaatatgattgacgccgactggagagagcccttcatcaagtttttgaccaagcaagaactccctcaagataaagacgaagccgagcggatttccaggcgtagcaaactttatgtcatgcatgagaccgagctgtataagaagagcccatcaggaattctgcaacgctgtgtttctttggaggagggaaggcaattgctaaaagatatccacttaggcatttgtgggaatcacgctggcgcacgaaccattgttggcaaggcttatcggcagggttttttctggcccatcgcaatatccgacgccgacaaaattgtgcgaacatgcgaaggttgtcaattttttgccagacaaattcatttaccagctcaggagttgcaaactatcccattgtcctggccgttcgcggtctgggggctcgatatactcggccctttcaaaaaggctaccggtcgtcacactcatctttttgtggctgtggacaagttttccaagtggattgaagccaagccagtcgtcacaatcacagcagacaaggctagagacttcttcatcaacatcgtacactggttcggagtacccaaccgaattatcacagataacggtactcaattcactggtggtgtgtttaaagatttttgtgaagactttggcatcaaaatttgctatgcctccgtagcgcatcccatgagcaatgggcaagtcgaacgcgctaatggtatggtacttcaaggaatcaaagcatgagttttcgaccgactgcgtccctacgccggcaagtgggtagatcagctgccatctgtactttggtctctgcgcactacgcccagtcgggccacggggcaatcaccgtttttcttggtttatggtgcggaagccatgctgccgagtgaggtagaattcgaatccttgcgatttcgcaacttcaaggaggagcgctacgaagaagaccgagttgatgatctcgaccgactggaggaagctcgtgaagcagccttgatt

SEQ ID NO: 61645 - DNA, 384 bp, Oryza sativa
  Clone ID: PAT_MRT4530_63058C.1
atgagaagaaccgggcctgaatctacggtatatcatccttttgaaccatggatacctgaactcagcaagcaacggttcatgtcgatccaaaaacctatccgttccaaactgaccgagttggctacacctacacggtgcgcaaccaagacgtcacctgggctggggctggagcaggtgcaggtgcaggtgaaggtgaagaagatgcagcgttcgacggcgggtgcgacgtgtagctcgctcaaacgaatgggagagacaggatcagcggagcgttccctgacccggcattactgccctgccgcaagtccgcaacgtgatacactggtgcaaaaaggctctgagcatgatctccaacttttaaatttaactttagatattaattaa

SEQ ID NO: 61646 - DNA, 3765 bp, Oryza sativa
  Clone ID: PAT_MRT4530_63059C.1
atgcagagtggaaatcaccctacggatgatggcagtccaacacaggacagttcaaacttgactgctcgagccaattcaaaggaattatcgcggttagcaagatcgaaaaggaaaagaaaactagacctgagaaggagcggatctccatcgaccaaaaattactccagtgcggatgaaacaaatgctcttcaaaggaaaagaaaacttgatgaaaaaaggactgggtttcaaatgagcaacaatgagtcaagcgcagacacaggaaatcccctgcaaagctcaaacttcactgctgaagtaaactcaacggaactcgcacgcttatcaagactgaacaggaaaaggaaacttgaccttagaagaagcggatctacattgaataacagttcgacctgttcaaatccagcaaatcacactgaaaggtctagaaaagaaaaatatcagatcccatcaaccaacatggaaacgaatagtctcaagatgaatgatcgaggcaaggttgacttacctacactaaagaaaccacctacttacctttcaaatctgatgtgcaaagaaaaaggaaagagatcgaggaactacatggacaatatcagagtatataactccatgtttgcatttacctccatgggaggaaaagttgacagagagataaacaatgggtctggaccatatgttttccgcatgaatggccagaactaccaccgaataggtactctactgcctgaagaaggcgataaacctcgctgggcgcaactttacatctatgacactgagaacgaagtcaaaaacagaattgacgcatcaacatcatcccataatagagaatcaatagattcacacattgtcttaggcctaaagaacatgctggacagagaaaacgtactagcacaaacattcagaatggcaagagatagattcaaagaaggtgactatcataatgtaagcctacgacttataaggaagcgtggtggagatggcaggcagcataacatgccatcggcatcggaagtggcagcactgattgttaatgacacgagtgagaaccaaaaaggacgtgacataattgttcattataaagacacagggcccagaagaatatcagaaaaccatccaaaattcatggcaatgcagtacccgttgctatttccctatggagaagatggcttcacaaacaaaatattgtacagaacccgcatttcattgttcgattttttatttaaaaggaactacaattgccttctaagcagttataacccattagttccaaagagggatttcacagcccatatatatttttcctgcaagaaaaacaaaggccaccgtttcgagatgaaaaaatataagtgcagaatcccaaccaaggaagaggccgcgaaggatttaaacttggaaaatttcaataggccggtccatgtggagaaggaaaagtcaaattccccatgcatgatagagaacaaatgcatcagaattttccccaagaaattcccaagtgaaccacccgtggatgaggatggattcccacataccagaagaagagccaatggcaggtccataaagaaaggaaacgttaagctagccaacagatatgtagtcccttacaatagagacttgctggtaaagtaccaagcacacataaatgtcgagcggtgcaatcgatctaagtcaatcaaataccttttcaagtacatgcataaaggcgacgaccaagcaacagccctaatcgaatctgatcatgatgagatcaagaagtacctggaatgcacgtacatatcaggacatgacgcatgttggcgaatattccaatttgagatgcactatcgatatccatctgttgagaggctaccattccacctggagaacgaacagcaagttattttcccagactcggcagacttaaggaagattgtaagaaaagaaagaataggagtcactaaatttacacagtggatggaaacaaacaagatcaatgatgaagcaagggacttcacttatgctgaattcccatcaaaatgggtatggaagaacaaactaaaacagtggaacaagcggaaaaaaggaaaaatgattggtaggatctactatgcacatccagcaagcggagataaatactacctaaggatgctactgaacacagtgaaaggacccagaacattcgaagaaatcagaactgtagatggagttgtacacccatcattcaaatcagcttgcgaagcattaggatttcttgacgatgacagggagtgggttgaatgcatccgagaggcatccaactacgcatcagggaaccaactacgacatcttttcacaacaattttatgtcactgtgaggtaactgatccgaagagaatatgggaaagctgttgggaggatctaggtgaagacatagaatacaaacagagaaaaaatctcaactatcctacgcttcgcctaacagagcaacaaaaaaagggacatgctctgatagaaatagaaaagctgatgagacaagctggaaaaacacttgaggaataccctgatatagagctaccaaaatgtgctgaactacgggaacttggaaacagacttctgaatgaagaaatgagctatgacaaagaccagcagaaggaggaacatgatagcatatttggtaaacttaatgcagaacaaaaggctccaatggcaaacagaatttgcttcgaggcgctagacagaagtctaagggacatactaaggtccaagggtgaagataacagcacaaagccattcggcggtatgactgtggttctaggaggagactttcgccagattcttcctgttgtgcgaaagggaagacgcacgcaaatagtaaatgcatcaataaaacggtcctacctatggcagcacttccacatcttcaaacttacaaggaacatgcgcctgagctgcatctcaagagatgaagacgagcaaaaaaggactgcagatttcgcacaatggattttgaacattggtgatggcaaaacaacatcagcggatggagaggaatggatagaaatacctgatgacctgatactgaagaaaggaggtgatccaaaggaagaaattgtgaagagcatatatccaaacttggtacagaattataagaaacgagatttcttagaacagcgagcaattctatgcccaagaaatgagacagcgagggaaattaatgaatttataatgaacatgatagaaggagaggagataacatatctgagctgcgacactgtatgcaaagcaacaactaatgacagtgaaaccgatgtcctatatccaacagaatttctaaatagtctaaacttccctggaatgccaaaccatgtgctgaaactgaaactaggccttccagtgatgctactgcgaaacattaaccaaagttcagggttatgtaatggtacacgaatgaccattactcagctcgggaaaagattcattgaagcacagatcataacaggaacacatgtaggagaaaaggtatatatccctagaataataatgacgccaacagagtcaggatggcccttcttgctaaaaagaagacaatatccactcagtgtgtgcttcgctatgaccatcaataaaagccaaggacagtctctaaacatggtaggactatatctgcctaagcaagtattcacgcatgggcagctctacgtagcgttctccagagttacaagacgagatgggctacggataatgctagatgacaatgaaagcccaggtgaacatatggtcaggaacatagtgtacaaagagattttctag

SEQ ID NO: 61647 - DNA, 1606 bp, Oryza sativa
  unsure (1)..(1606): unsure at all n locations
  Clone ID: PAT_MRT4530_6305C.1
aacgactcgcacgagacggtgcgaacttctattgatagagcaggaaaaaattacaagattacaaccctggagggttataaccaggaaaaaggaaaaaaaataccaccacccacacggtgacatcgccaacacactagcccaggagaaggctaacaccggaccggccgccgttaagcgtgaccgaccgccactagaccaacaaagggacacagacgagatcgcctgaggggtgagacagcacaacaacgcccttaggaggggggataaccatcgttgtcggtccgaccaaggtcgaactgggtttttacccgccgctcaccacctgcgaatccacggctgacgcaccgatgctccaccaccactcaagctctgccgacatgtgagacccctgcaccggcgtccccagccggccagctttcgtgtgccgaagaccgcgccacacccgccggcagctcctcctcacaccgaggtcgcctcctccaccaccggccgagcctctcgcgccaagtcggcctcctccaccggacacgcctctcgcgccaatccggcctccctccatcggctgcgcctctcacgccaagccgacctcggtctccgccgcccgcgcctctcgcgctgagtcggcctccgctgccatcagctgcgccttatctgcgccaagcatggcctacgactacttcctccaaacgatgccacgctggccagatgcagccgtctgccacaccctcgactagccgtccgaagccgccatgcctccggagaccgaggtcaccgccaccgcagccgctgatgccgaatgcccagccacctcgccgtcgccatcctcacctcctccactgcagccacgtccacggtcgccacggccaatgccacaagccgtccgccatcgcagcctgcagccaccagcacccgatgtcgccggtcgcgactccacaccgtcgccggcctccatgacgccctgnccgctgccgcacgacgctggcctccacgacaaccacacgccgccggcctccacgacgcctgcacagcaggcctcgccacccacgagggccgcacgaccgcctccacgacgcctcaaccaccacggccgttggctcgccagccaaccgtcgcagtcgatgccgccacagccgtcgccaccgtcactgctgccgtcggcagccgccgccgccgccagctagatctggctagaaacgtcattgcctcctcccgcatcgccgacgtcaccaccggctctcggcggacctccaccaccacacccgtcgtccggccacgccttcgtgctcggctaccggagctagctccagcagcgtctcccgccaggtcgtcaccggccaaacccaccgccaaaactcggcgccgagctaccaggacgccgccgtccgtccgtgggggaccggatccgggcaccccagcacccgaatctggactgccgccagtccgcggtcgacgccatggccctgagctcttaccggggccgacgtcccgaccgtattgaccgtgaacgcgggagagaaagcccctccgcctgcgtccttgcagccggcggccgcgaggctggggaacgttttcgctttccgggtaccgagctcgaattcgccctata

SEQ ID NO: 61648 - DNA, 1167 bp, Oryza sativa
  Clone ID: PAT_MRT4530_63060C.1
atgtcaacaacaagctcgtcaaaaaccgccacgtgccctctctgccacgccgacgtgctgctgccacggcggcggtcagccggctcctcgacgcacagaagccacgacctcgacgacggccccgctccgccgtcgccggagtccagctgccgcagcaacgccgcggtgtgcgggtgcgcccgctgccggcgccctgatctgatcagtcccggaaccggcatgcggatgaggaacagattcggcgatggccccaacaggatatcagcccagagtggagcatggctgtgccgagagcgcacggcggagacttgccggagcacaagtagccggtccggccgctaccggcgcctgcagcctgcagcggtcgccggaacacgacgcgccgaactcataaagcggctgcaagagctctgccacccagcaaataaccttccaaattgttctgcttcttggcaaccacagcgacagcggcagaaaacaattgatcgaattccagatagcctagattgtggggtgacaatggaaaggggcaagaacaagcgtgatggaagtgacaatgggctcatcttctctaacctaatgcacggtgttgctgccggcatctatgggtatcctcctcaccagggatacactcaggctcagagctacctactgctgccggaagcatatccacctcctccgtggacataccctctttctagtgcttaccctcctcaacctgttggttacccttcaggtggctaccctcctgcagtctactctgactcgtatctgcaccaaggtagcagagttgcgcgggagcaatgccctctatcatattccaataatgctgtcacttgcagggaggatgggcaaatgaactgtgaaaatggaacagtaaatatggagaaaagtgcaatgtcctcaaataagatggctactagtctactaaagagttgcggcaatgtgatgccatgcagaaatatggagagaagtggcccagccatgtataaggtggacatgcgcggcagtacgaagcaattctctatgggcagcaagatgatgatgtgtctgattgtgtttggatgtctgatagctgccttggatatgtttagaaatgttgcacaaaaacagatgttttctgtcgttagtttactttcttttgtagtcgcgacctatgtctgctag

SEQ ID NO: 61649 - DNA, 828 bp, Oryza sativa
  Clone ID: PAT_MRT4530_63061C.1
atgacagggagtgggttgaatgcatccgagaggcatccaactacgcatcagggaaccaactacgacatcttttcacaacaattttatgtcactagaaaaaatctcaactatcctacgcttcgcctaacagagcaacaaaaaaagggacatgctctgatagaaatagaaaagctgatgagacaagctggaaaaacacttgaggaataccctgatatagagctaccaaaatgtgctgaactacgggaacttggaaacagacttctgaatgaagaaatgagctatgacaaagacaagcagaaagaggaacatgatagcatatttggtaaacttaatgcagaacaaaaggtagcatttgattcaataatagagtcaaccaacaaggggttgggaaaactaatgtttgtcgatggctacggtggaacaggaaagacttacctgtggagagctatcacaaccaaactacgttcagaaggaaagatagtactcacggttgcatcatgtggtatagcagccttacttcttcatggggggagaacagctcactcaagattccacatcccactaattgttacagaagagtcaacatgtgacatcaaacaaggatcgcacctggcggaactacttaaaaaaacatcactcatactgtgggacgaggctccaatggcaaacagaatttgcttcgaggcgctagacagaagtctaagggacatactaaggtccaagggtgaagataacagcacaaagccattcggcggtatgactgtggttctaggaggagacttccgccagattcttcctgttgtgcgaaagggaagacgcacgcaaata

SEQ ID NO: 61650 - DNA, 372 bp, Oryza sativa
  Clone ID: PAT_MRT4530_63062C.1
atgctactcagggccggccctgggcctaggcgggttgtgcgaccgcctagggcccaggccagaggggacccatcacttatcccctcccaccccagcccggccaacaggcctagccacagcccagagccccagacgcgcgcctcaggccgccctcaactgctcagcgaatcagcgatcagccagggagcagtgcgcgtgcgcgtgcgcgtcacttcgcctgccgccctgcccaccggccctacaccacgagaactgcagtgcaggcccaggccgagccgcgtcgcttcgtcgccgtctcgccgatgccctagtccgcgagaggccgccgtgagtgccaagaccgcatcggccccactagcctatagcgcctga

SEQ ID NO: 61651 - DNA, 906 bp, Oryza sativa
  Clone ID: PAT_MRT4530_63063C.1
atgagcaacaatgagtcaagcgcagacacaggaaatcccctgcaaagctcgaacttcactgctgaagtaaactcaacggaactcgcacgcttatcaagactgaacaggaaaaggaaacttgaccttagaagaagcggatctacattgaacaacagttcgacctgttcaaatccagcaaatcacattgaaaggtctagaaaagaaaaatatcagatcccatcaaccaacatggaaacgaatagtctcaagatgaatgatcgagtaagtaaggaaggaaacattacaaggaataaggttgctgtaccaccaaggaagaagaaaaaatcaagcgtgaaagaatggaattttggcaagcctacatgcacatgtcaacactgtggtgcacttttctggtatgaagaaagaactcgtggcaaaggaaaagggccaccttcttttagcttatgctgcaaacagggcaaggttgacttacctacactaaagaaaccacctacttacctttcaaatctgatgtgcaaagaaaaaggaaagagatcgaggaactacatggacaatatcagagtatataactccatgtttgcatttacctccatgggaggaaaagttgacagagagataaacaatgggtctggaccatatgttttccgcatgaatggccagaactaccaccgaataggtactctactgcctgaagaaggcgataaacctcgctgggcgcaactttacatctatgacactgagaacgaagtcaaaaacagaattgacgcatcaacatcatcccataatagagaatcaatagattcacacattgtcttaggcctaaagaacatgctggacagagaaaacgtactagcacagacattcagaatggcaagagatagattcaaagaaggtgactatcataat

SEQ ID NO: 61652 - DNA, 533 bp, Oryza sativa
  Clone ID: PAT_MRT4530_63064C.1
tttttttttttttttttgttggagaaataacattatgcccgttcatcatgccatggtgtttttgttatgtacacagaagaacaaaatggtatatatatgcacgcaaaacatgtgtatatatgacggtatacatacggtatatccgtatatatccagtatgcatacctcgacgtacgtacatgggtatgtatgtcactgagttatctactagctagggaggagttatatttgcttggccatggcgttgaggatgccgagcgcgtttgcggtgaggtggaggaggcccatgatgtggccgcggacggcctccctggcgccgccgccgccggcggcctcccccttgaacccttccatgcacatgttgtcgtcggtgagcgccgcgctggcccacgtccgcacgttgtccacctcgaacctcaccttcctcctcgccgccgccgccgtcgacgacgactcctcgccgacggcgacgcgggccatggcgtccacgcaccgccgcagcgcgtccacgccgtcgccgagctcgctggcgc

SEQ ID NO: 61653 - DNA, 279 bp, Oryza sativa
  Clone ID: PAT_MRT4530_63065C.1
cggacgcgtgggtgcgaagtgatcatgaagccgcgtccgtctccggcggcggcgtctttcagcggcgttacggcgaggctccgggcgcacctcatccggcttaccgtgttcctgatcgtcttctccggcgggtactcggttggcatcatgtcgtcgtccattcggccgcctgggagcaagccgtcgcagaccgtcataccggcgcgcgccgggcaccttttcgggaccggcttcttcaaggatgttccggggagcaacggcagcgctgcgggggggggg

SEQ ID NO: 61654 - DNA, 777 bp, Oryza sativa
  Clone ID: PAT_MRT4530_63066C.1
ctagatgcccaagccatccggatggccaaattgctccaccggcagccacgagctgacggcaacgacggtggggtcggcggtgcggagggacatggcggcctcgtgccagtggcgggcgatctggggcacgcactgcacgcgcatggcgtccttgaccctcccggcatcggaggcctcctcggcgttgcgtgggtggtcatgggaaagcaggtcgttgtcgagggagacgaggacgcaggcgaacatgtcagtggggcccggctgtggcggcgagggcgggatgagaacgaggaagtaggaagggtagacatgggggtactcgaagcgcatgaggagggcgatgagctaggcgagcttgttgcggaggaagggaggggaggccgtggaggcagaggtggaggagcgacgatggaggggtctcgtcgcgggcgtgggtgtagtaggcgagcacctcggtgcgcacggccgggaggcgggggaatcagaggcgagcaggatggcctgctcgaggtcatccatggcggtggcggtggtggcggaggaatctgggctggggcagaggggggaaaggaagagaagggaaggggaggcagagttgggggaccgccgccgccacgggggaccgcctcaccgccatgctctcacccatgctcgtgtagctgctcaagaaaagggggagaaaatttggaagaacaaagagttgaggctgacacgcgggtcccactgccatacactcagaatagagatgatgaatggagaggctgttggagtaaataa

SEQ ID NO: 61655 - DNA, 276 bp, Oryza sativa
  unsure (1)..(276): unsure at all n locations
  Clone ID: PAT_MRT4530_63067C.1
atcaaaatatcgatccatgagagtatgtatgtcagttcgtaccacttcactcgnggcaggggaaagtcgaaangcttattcacgactcatntagcaaaaattgacgntaangcctttctnaaagttcttcaaacaagctttgacaattggaaagttacaccgaggggtctgaaaacaaaangtgcagtctgctgattggagacaagccgnatttngcttacgnttcatncaagggaaanggnacacctgggaggggtctttgnccttcccagaata

SEQ ID NO: 61656 - DNA, 257 bp, Oryza sativa
  Clone ID: PAT_MRT4530_63068C.1
agctgacaatggaaaacaatttgcaattgtacccaaaattcaacaatcttgtcagcctgactcttggtcaatggtgtttggatgcgaacttctatggattggttgtcttccttcagaacgcaccaaaactggagaagctaactctggaacttgaaaaggtaaatcgtttcatccatatgtatactgacccttctcgagagatctttcacaaacacacatgtcaatcagggatgtagcttatttgttttctttctata

SEQ ID NO: 61657 - DNA, 271 bp, Oryza sativa
  Clone ID: PAT_MRT4530_63069C.1
acgcgtccgcacacgcccatagtcgcgtcgcaccgaagcacagtagagaaggagaggagcggagcgccatcagccgtccgatcgagtgatccgagggctctcgctctctccacctctgctgctgctgccgctgccgccgcggcgcgggcgctcgcggcgagggtgacgacgacgaggggttacgccgtgtccgcggcgtctactgcgatgaggcgggcggcgtctgcagtggaaggtaagggcgctacggtgatgacacatgcgaaggacg

SEQ ID NO: 61658 - DNA, 568 bp, Oryza sativa
  unsure (1)..(568): unsure at all n locations
  Clone ID: PAT_MRT4530_6306C.1
cttttgtctcattgtctcctccgctccttgcgccgctgccaagacgagtcgcggctgaacaggggaggggcggcgatcttcatctggcgagcagagcatgggaggggatcctgttgatgaagctcccgtaactgaagaagaaccaccaacagtttccataattgatgtattctgagactgatttctctttcaaggatgccaacaaactgtgctctcttgttcggaagcagaaagcacttgccaaaaagaaaaggaaatggctgcggtctctgattccaagggaagacggtctcatcaaacctatcaaacgacccaagtttctaaaagatgcgcaagtgcaccatttacaccattcttggggtttcaaattgtactgattggaagcttgctgtctactaatgtgatcatgtcttgtaaacaaatgatctatttgttgctcatttcaaaatattgaattgttttgtaatatcacaccatgggtacttttatgctttattacntgaagcactaagaacataaatggatgatcaggtggcatttcaatatatggttctatgtattcatcttt

SEQ ID NO: 61659 - DNA, 2748 bp, Oryza sativa
  Clone ID: PAT_MRT4530_63070C.1
cgtcttcctccgccttccccgaatcccccgctccccgacaccacaccgcgagatcctcctcttccagatcaagcacccaccctacctagggtttccaccccgccatggccgaggtcgcccgcgcctcggcttccccacctcccgcctccgcctccaccggcggcgaccgcaagcgtggccgctcctccccgtcgctcccgccgccgccgcccgggccccctccgcaggtcccgcatgggagcaagaggcaccgcagggacgaggggggcgggggcgggttcgatcggcgccgcctcgggccgggagtagggtacgacaacccggacgataggaggtatggaaatgatcatggtggtgcaggaggaagaggtggatatggggatgagagaggtcagggtagaaacttcaatcgtgcaccagattggactgattctggacgtggtggatggaatgatggcccggctaactctcgtagggaaggcctcatgtcttacaagcagttcatgcaggagcttgaagatgatgtttcgcctgatgaagctcaacacagatatgaggagtacaagtcagagtacataacaactcagaagaaagcgtactttgaccttcataagaacgacgactggctgaaaaacaagtaccatccgactaaccttgaaattgtcatggaaagcagaaggaatgaacttgcacgaactgctgcaaatcaattcctccaagatttgcagaatgggagtttagacattggtccaggattaacaagttctgcaacaaacaaatctgggaatagcgtagatgatacggatgctaatggaaaaaaggggaaacttggaaagagccaagatgatttatattatgctgctcctaaggctcatccagttagctctgagccccgtcgaattagaattgacgttgagctagctcaagctctcatttgtaaacttgattcagagaagggtattgagaataatgttctgtcaggtagtgatcatgacagagcagagaaagataagtcacatggttcaatgggaccaatcgtaataatacggggttcatctgctgtaaagggtcttgagggtgctgagttgctggacactcttgttacctatttgtggcgtatccatggtgtggattactatgggatgtctgagacaaatgagcccaaaggtctaaggcatgtgaaagcagattcaaggacgtttaatggggctagctcaaatgcagctgaatgggagaagaaacttgattccttctggcaagataggattcaaggccaggatccaatggaaatattgaaagcaaaggataagattgatgcagctgctagtgaagtgctggatccacatgtgagaaaaataagggatgaaaagtatggatggaaatatggctgtggagctaagggctgcacaaaacttttccatgcccctgagtttgtccagaagcatctcaaactcaaacatgcggatttggttagggaactgacttcgaaagtgagagaaaatatttattttgataactatatgagtgatcccaaggcacctggtgggatgcctatcatgcagcaacctgctccaagggagaaagtcagacagcggccaccaatagagagtcggctgagagatgagcgtggcaatcgtaggtttgatagaaatgattcaccaacccatgatggatccagtgacaaccctgatgatgcatatgattcttatggtgatccggttatgcatggcgcctttcctccggatattcctgctcctccagtgttgatgcctgtgcctggtgctggcccactaggaccatttattcctgcaccacctgaagttgctatgcgtatgatgagagatcagggtggaccaccaccttttgagccaactggtggtccacgtcctaggagaccagggaggggtggtcttccaatgggtggcccatcaccaattcttgctgctcctttaccaccccctcatatgcatgatccacgcaaaatacgaagctatcaagaccttgatgctcctgaagatgaagtgactgttatggactaccgaagcttgtagaggaattggagacacgatccttttttgtatctgggaaactgtaggtaatattacagaccgcaacaagacggcattcatttctagatttttttgtgaacgcaaacaggtaggactttgaggttcggagctctgttactgtctgtaaaatggatcacaggaaaacctgggacaaggagcatattctcattcaccaatcaccactcacctgaaaagaaaacattgtgaagtttgttctttgcaaaaaagttcctagcactgtccattccaaccaaatgtctacaagcctgccatatcatcaggtattcgtaccgtatttgtatattcagctactgggtgtgagtagattggaacctgatacatcggcgtatgcacagactttctatgaagcccgttatgaagaacatttgttccccatctgctaagtttgagttcaaccttgtcagcttgaagagtgtcccagttcaccagtcagtattgtatcagttcttgccatttgatcaagcttagtgttgtcccattccttaccattgttgaagcttctggtcaaaatggggatatatacccctcggatgactggagaatgacttaaggccccttgctttttttagcagaataaaagaaaaaactatgggcccaggaagaattgttttttaaaaaaaaaacaaaaaaaaacttctaggggggcccggtcccaata

SEQ ID NO: 61660 - DNA, 244 bp, Oryza sativa
  Clone ID: PAT_MRT4530_63071C.1
ggggaaaccaaaaaaatcatttttggaaaaacaacaacttttttttaaattttttaggggacacaaaaccaacttggacattattttggggcactaaacccatttttcccaacccaaaaacaacgaacttggtgggcccaaatccctccaaccccaattaacccctggtaaagttaccggcccccaatttaatttgcggggacaaaattgggggggtacccccaagggtttttttttaccgggt

SEQ ID NO: 61661 - DNA, 528 bp, Oryza sativa
  Clone ID: PAT_MRT4530_63072C.1
atgtgtcttgtcctcccgacgtgtgaggccacccacaccttaccgtggcatgagccccatcccatcacgccgagcgacacgggcgtcattccttctcaactatcaacgacttctggccgtccggccccaccaaggggtagggatctctcgaacggaccagcgtgggaagagctggtccgagtccaaacgagaggcagaaagctgctcattaatggtgacgaggcggggcagacgcatgccatgccctttgctagcatgcgcacgcccatcgcattaaataaggcgtgccacggccgacgggacattattaaatgcggtggttgggcgctgggaacgcccacccaaggagtacgagcgaatcagagcgtagaggggcttggggcagcccgacccctagagtgggaggcagccgctactccaaccccgggcccgacccccctcgggggcaccacgtgggtttggagcggccttctccctcgggggacccccgggcccatatcatcgacagatacaaagataatcggctaa

SEQ ID NO: 61662 - DNA, 501 bp, Oryza sativa
  Clone ID: PAT_MRT4530_63073C.1
atggccgtcacggaggccgggggccggcgagcggagcgacgatgggcgggcagcgggcggagcggcgctgggccacgggcgggcggtgggctctgcggccacgaccacggcagttcctacagcggcggcaaccatggcctcgacgggaggagagaaatgtggagaggggaggcggccggcggaagatgggggaggggagaggcgtcgccttcctccagacgggccgacgctgtccgtcgtcgtgcacgacgccgcagccgcgtcgaaactccacctccacaattttactcggataccatgataagagcagaagtaaatttcacatggacattcggcacagctctggatacagacacctcaattaacaaaccaaaatgcaaggcggcaaccaaaccactgttctacctccaagccgtcgtccgtcatcccctatactgctgctccatctcgtcggcgtgcggccagattgccagaagcagcagcttcccggcggtggtctag

SEQ ID NO: 61663 - DNA, 639 bp, Oryza sativa
  Clone ID: PAT_MRT4530_63074C.1
ccggccgggatagactgctggcataggctttgctcgtcgtctaagctcaagcttacagcttcaccatccttaactttgcagtcgacatgaccgagattaggagcggaatatacgggtgcggagggatcggtaggctcgctggcagaatgatcctacatagcacggatgattacaccatcaacgcatataaccctgtactaacaaccgatgacatctacgctacatcgtggaactgccactacctgtgcaactggttcgagcgtgaggtctcgagctaacataatagaatcaatggatctcctaatgacttgtgtatctgtgtttcgagcaatccgcctcaccgttagccttgtctggatccctgacgagactggggctgctatggtaatgctgagcacagtcgcgaaaggcacctgctatctacactgtacgggcccatgggtgacgatgactggaagaattgctgacaagggcgtgatgagctacacacttgcgaagagaactgaagctctggatgctgcgcgcacacacaacagccgcacttggaaagggatttggcatcggatgtgtagtctaggagacacttgcactttccggtggctttgtgagccgtgcaaatatctgtactgatgatggtct

SEQ ID NO: 61664 - DNA, 984 bp, Oryza sativa
  Clone ID: PAT_MRT4530_63075C.1
atgcccctgctgggaaacagcaagcgctctgtgggcgcatccaggcccctgcgcatccaagttgttcttcttggttctggttggttagcggagagcagcagtgaggaaggccgcgtcgggctggggacacctgcaccatcacaacatccgttgcctggtggcgcactcacccgtcgtgtggatacctccaatctccaggaaccactgcccaccgctgtgtctaagctaccttctcaggacaaaaatgcttctgttattgtgatagttcccggatggtcttctgatgataataacttctcggaggcagtgaagaaactgttgtttggccgaataggggcagaccactcagttgatcaaaaggtgccaccgccagcagtgagaacagtgattgtacatatctttggtagatatggaccatatctagctcgtcatatggagggattgactgcgcaagcccatcttaggcgtcaagaaatgacatttgaaccaaatatgtgccacagaggtataatcaaggagagagtggatgaactcttggagccagcgaggccttcctctccgaagtgctgttcttgcgatcggcctgctgactggataacatcatgctgctcgttgatgctatgctcgtattgcatgccggacaagtttcatcagaagcacaagcgaggacatagccgggaactctgccgcgcgcaaggtgccattggcctgctcaatccccggagtccgttggaggaggaaacgaggtacctgatgaaaaatgacatgctctgcaagcgagaaattattctacaggttgaggacgaggagagcgggagaacacgggagtgcgacattttcgtgctcagaagcatgttacctctggctgacctgtggaacaggaagcgcttaaacaggctattcacgtgtggctatcacatgaggtggaatggggtgctcgacgagctcttcagaacggagaacaagctatctttcatgaagtag

SEQ ID NO: 61665 - DNA, 3360 bp, Oryza sativa
  Clone ID: PAT_MRT4530_63076C.1
atgtccgggagcgaggccgtcccgccgccgccgcctgcggccgcggcgtcggccaccaccggcggggggcggtcgacgaccaccgtcatgaacaccgtcgccatcgcgctctcggcgggcctcgtggcgctcgcggtggcgtcctactcctgctgcctcctgctgcggcgacgacgacgcgaggaggaggacgacggcgaccgcgccgcgaagcgggcggtgggggcggcggcggcggtggcggcgagagtccctagcgatgtcgggagcagctcccgccagcaccggtcgccgccgccgagctcgacggcgtcggacgcgatatacctcgacccgctcacgacgctggtggaggtgcgccagcacgaaaagagcccggacctccgcccgctcccgctgctgaagcagccgagccctgacctccggccgttgccgccgctgaagcggccggaatcgcaacccccgcctccgccaccgtccactccgccgttgaccaccacggggtattccaccgacgaggaggaccaggccacgtactacaccgcgccgaagaccgccatgtcgtcgttcagccggagcacgagccagcacagcacgctggaacaaacagccatgccgcccatggccgcgcctgcaccgccgcaaaccaatcccccacgacctgttcgtccgccaccgccgccgcccccgccgaggcagaggctgctccggccgctcccggcagaatcgccgccgcccgccgcgctggccaatctggaactaaccggttcccccgtcaaacccgctgttgaagacaggggaggcgagaattccggcgccgcgcggccgcccaagccgccgcacctgaagccgctgcactgggacaagctccgggcaatctccggccgcaccaccgtgtgggatcaggtcaagaactccgacacattccgcgtcgacgaggaggcgatggagagcttgttcctgaacagcggcggcggcggcgcggggagctcggacccggcggcgaggagggggggatccgggaagcaggagaggcggttgcttgacccgaagcggctgcagaacgtcgcgatcatgctcaaatcgctcaacgtggccgccgacgaagtgattggtgcactcgtgcgtggaaatcctgaagatttaggatctgagttctatgaaacactagctaagatggcaccaacaaaagaagaagaattgaaactaaaaggttatagtggcgatttgtcaaaaattgatccagcagagcgctttctgaaagatgtacttggagttccttttgccttcgagagagtggatgcgatgctgtacagagcaaattttgacaatgaagtgaattatttaaggaaatcttttggaacattggaggcagcctgtgaagagttaagaagcagcaaactttttttgaagctgctagatgcagttctaaaaaccgggaaccgcatgaatgatggaaccaatcgaggcgaggcgagggctttcaagcttgatactctcctaaagcttgcagacatcaagtcaacagatggtagaacgacattgcttcacttcgtggttaaagagatcatccgatcagaaggcttcgattctgatcagagcgcggttaatcctggcagcggcagcaaggaacagttcaaaagggacggcttgaaattacttgcagggctcagcagtgagctctccaacgtgaagagagcggccacactggagatggacacactgagcggcaacatcctgaggctcgaagccgatctcgagaaggtgaagcttgtcctacagctcaaggagacttgctcagatcaaggcgcgagcgagaacttcttccaggcaatggttgtcttcctcagaagagcagaggcagagatcaagaacatgaaaaccgcagaggagaacgcgttgcgcctcgtgaaggagacgacggagtacttccatggcgacgccaccaaggaggagcctcaccctctgaggatattcgtggtggtggatgaattcctcctgatactggaccgtgtttgcagggacgtcggcaggacgccggagagggtgatgatgggctccgtagtacaacaaatgcataatttatccacttcaagccctgggaaaatcccatattacaaaagggtccctcccttcttttcgatgcccataccgcggcttcccctcctcctcaagatcgccgccgcgaccgccgccggcgcgttggcgctcattgtcgcggcggggctccggcgggatgacgccgtcgcctccctccggcgggagatacgcgacgccgtcgccgccctcgtggcgagcaacgaggacggcgtcgtcgagggggagggcgaaggcgaggacgccgccgaggccccggcgccgtccgtgctgatcacggggttccgcgcccacgggaagagctcgctggtgaacacggcgtgccgcgcgctcgcggccgaggaaggcccgctgctgctgcgcgcggaggcgtcgccgccgggcggcgggtccgacggcacgcggaagcggcggagggtgaaggcggcggtggccggggatagcggtgacgcggggacggacgaagccgtggtggagcttctggacgcgcctccgctccccgaggcgacgagggccacgagagctgacatcgatgcggcgatcagcggggggaacccggagtgcgtggtgctggcgctgcgctgcgacgcgcccgcgaaggagcggaacgccgccgtgaagcgcctgccggagatctccgccgccgtgagggcgaaagttgtgttagaatcagggtattgcaaatgttcatggagattcctttgtttctctctttcttccacatctatgaagaccttgctattaccatattttactcagcatatgttagcaaagatgaatatatttgttgacgagcacttgttaacaggtctgaatttgattgttgtattgactttcaagaaggccatgagatcagcaagacaagctgaagagctcatacgagaggtttcattcagggcgagaacagattgtgtctacttcatcgagaactacacctggaacaataatggtcccaaccttcgccatcctcctgtcatcaagaacgactttgagacacatttcacggttctgacaatcattcgacagtgccttgagttcatcaaattaaataggagtcaatccaagcgggaggaaaatggtgagaagggtaattcaggagatgttaaaggtatactggaaaaagtcttaacagcaaatgctaaatcttcaggagaacttagcgttaaacctgcactggaaaaagtcttaacggcaaatgctaaatcttcaggagaactgagcgttaaacctgcagatgtcaaacctgttctgactgttcaatga

SEQ ID NO: 61666 - DNA, 447 bp, Oryza sativa
  Clone ID: PAT_MRT4530_63077C.1
atggacggttgcagatggatggtggggtgctcggcggcaggtggggtggcggcgctcggtggcggggtggtggcgcccggcgtcggcggtgctcggctatggcgcggcgtcgctctctgtcgcggcagggaaggggcatgcgacaggagatggatcgatccgatccaaagatctgacagcgccttgagtggaagtgagttcaaccgggtggacggcattgagagtgccaaggtgatttgggatacacttcgcaacttgcatgaaggcacggatagcgttcgtgagtccaaggtggagatcctaaaggggcaatatgagcggtttgtgatgttggatggtgagagcccaagtgacatgtatgatcgattgagcaagatcatcaatgagatcaaggggcttgagtccaaggacatgaccgataaggttgtgatcaaaaagatgctataa

SEQ ID NO: 61667 - DNA, 499 bp, Oryza sativa
  Clone ID: PAT_MRT4530_63078C.1
gttcaaaacatcaggatagaaaattcattgctcatgctattaccgcagcaagtacgtgatataaatccgaactatctcttgcccgccatcgccagccatcaagcagctggacggcaccatcatccatgtcatccgtcatcaaacaaacgatctaattgcgtttaaaaaaaactaaaagggggtatgaagaagaagacgtagcccaacccaagccccatctacggcttgtggacatcaataaccatctccgtctcgacgacctcggccttcttggcaaacctggcgacatcggcaccctcaacctttccgtacatggtctcggcgattataccagtaatctggtatgggtcaccattggaagccgggcggcggtcctcaaagtatcccttaccctcggcagcaacagcgcgggggatacggacagaggaaccacggttcgcgacgccccaggtgaacttgtcgtaagaagccgtctcgtgcttacccgtcatacggagct

SEQ ID NO: 61668 - DNA, 366 bp, Oryza sativa
  Clone ID: PAT_MRT4530_63079C.1
atggttagaagacgctggcgaacaaaacccgttgccatcaaagccgcacgttcgtcggtccgtggcttggaagccatccatcggcaccggcgtggtggacgtcttccggcgacgagacctctccagatccatccatcgccctacagctggttggaggttgttggcgcgcctcctcgccaccgtgccgacgggatcgctgatatggggcgacgatggccggacctgtccacacgctgggtcaccgtctgcccgtctgggatcgccaccatgccgcgtcacaccttcgtcggagagggtggtcgtctgattcagtgcccttcaaatccgcaggtgcagtcgaagcagattggagacgaggtctcctga

SEQ ID NO: 61669 - DNA, 910 bp, Oryza sativa
  Clone ID: PAT_MRT4530_6307C.1
ttcccgcgtcgacccagcgtccggcgctttttgtctttccccttcctcaaaaagggggagggggggtggtggaggcggaggcggaggcagcagcagcagtgcggtagtgcaagcgctagtggaggagttgggaggaggccccctagggtttcccgagaccgcctccccccgcgcctgcgccgccgctcgccgagcgcgcgctccgtgcccatcatggtgaagaagaaaagaactgggtctggcagcaccggtgagagttctggagaggctccaggagctcctggccatggttcttcacagcgagctgagagaggtcctcaacagcatgggggaggacgtggttgggtgcctcaacatggtggccgtggtggtgggcaataccagggccgtggtggacattatcagggccgtggagggcaaggttcacaccatccaggtggagggcctcctgagtatcagggtcgtggagggccaggttcacatcatccaggtggtgggcctcctgactatcagggccgtggaggatcaggttcacatcacccaggtggtgggcctcccgagtatcaaccgcgtgactatcaaggacgtggtggtccacgccccagaggtggaatgccacagccatactatggcggacctagggggagtggcggacgtagtgttccttcaggttcatcaagaacagttcccgagctgcaccaagccccacatgtccaataccaagccccgatggtttcaccaaccccatcgggagctggctcatcctctcagcctgcggcggaggtgagcagtggacaagttcaacaacagtttcagcaacttggcacccgtgatcaaagttcgaacagccaagccattcaaatagcaccaacgtcaagcaaatcagttagattcccgttgcgccctggca

SEQ ID NO: 61670 - DNA, 447 bp, Oryza sativa
  Clone ID: PAT_MRT4530_63080C.1
ttgattggcaaagagaaagcaaagcacatcgcgacgccgacctctataaatacctccactattctcccccacccccctcgcctccggcctcctcctcgtccccaacttcgccgccgccgtctctcgcctccgcgccaatgcgccaccattccccgccgccgccgccggacctctcctccgccgtgggcgagatccacccgccgctcgcctccgccgcgcgctcttcctccaacggtggaggcagcgggggctccttcaccgcgctgctggggctcccgacctcccaggcgatggagcttctttttcccaccggcggcggcttcgggccggcggccccggccggggttcccggcgacccgcaccttgttgaccgggcagcccggttctccgcgtttggcttccctttggccggccttcccggcggcttcttcttccccttcccctttc

SEQ ID NO: 61671 - DNA, 423 bp, Oryza sativa
  Clone ID: PAT_MRT4530_63081C.1
atggcggcggcggcggcggcggcgcagtggtgcggcgcggctgggctagacaggtgggtgggccggtggcggtgtaccttgtcgccggcggctctgccggtgccgtcgcggcggacgaggaggaagggcggggtcgtcggctgcgtgtccgttccaagggaggtcgccgcggccgcggcggtggagccggcggcgccgccggaggctgaggccgagacagaggaagaaggtgtagagtgcgaaggttgcaacggcgcagggtggctgctctgcgacttctgcaaggggaagaagaacaacgtcaagtcggagagcagccggatctaccgccgctgcccgacctgcaaagccgcagggtacatcctttgcccaagatgcagggtctacaaatgcatcacttatccagagagcaatgactcatga

SEQ ID NO: 61672 - DNA, 181 bp, Oryza sativa
  Clone ID: PAT_MRT4530_63082C.1
gaagctcatttcattcgtcagggaacagcaggattacaatcttcagtcacaaggtgctcgatacaagctggggctgactgccactcacccagcctgcaagggcctccatcatcaaagcatccaggccatgaggatgccatctagcccggccgcctttgaacctcccatcaacatctcgtag

SEQ ID NO: 61673 - DNA, 828 bp, Oryza sativa
  Clone ID: PAT_MRT4530_63083C.1
atgaggagttgcacccctccaaccctaccagccaaatcaacaggtgaatccataccgtccatctatctgcatccacatcgccctgatccaggaaccgaacaggcgcatgcgagaaaacggaacccaacaggcgcggtgacaattgcgagagacgcgagagagacctcactcctcacgagcgagcgagattaccgccgcggcgccaccctcatcctcactcctcatgcgacgagatcggtagattgcgcaatcctcaagggagcggcgcgccgagcacccctgccgccgcgccgacgcaagcccggctgtccgctgctttttgcttgcgcaccgactggacctttgaacgaggacaacgatcgtaggttttctgatcagggagctttctctaggaacgatagccagggagcaacaggggcagtcctacgagatgttgatgggaggttcaaaggcggccgggctagatggcatcctcatggcctggatgctttgatgatggaggcccttgcctgccgggatgggatacaacttgcccgggagaaaggagtcttaagaatccaggtggagacggactgccaagagctaaccaaactgtggaagcagggtggctctcaaagatcgcatgttgcgtcgattatcagtgatgctatagagcttagctccagttttcatggttttactttactgtacaccccccgatcttgcaatcatgtagctcatgtattagcgaagcaagtcacggctgatgacaggctgggtgagtggcagtcagccccagcttgtatcgagcaccttgtgactgaagattgtaatcctgctgttccctga

SEQ ID NO: 61674 - DNA, 636 bp, Oryza sativa
  Clone ID: PAT_MRT4530_63084C.1
atggagttcgacatggcaatggacatgatgagccaggagcagctcatgcacatcatctcacagctagacagtgcactggcgagctcgccttctccatccacgtcgccgtcggcgtcgccgccgcgacagtcaccggcggctcatgttccagtacctccaggtctactcaacactacgatggtttctacttctcgagctcaagcggcgccgtcggcgccgttgcatccggtcgccgccacggctgcggtgcagtcgtcgtcgcggggcattatgtacacgacgacgcgccagggcgtcatcgacgcggcggaggaggaggaggcggcggcgccgcggccgcggcggcgcaacgcgcgggtgtcgagcgagccgcagagcgtggcggcgaggctgcgtcgggagcgcgtgagccagcggatgcgcgcgctgcagcggctcgtccccggcggcgcgaggctggacacggcgtccatgctggaggaggccatccgctacgtcaagttcctcaagggccacgtccagtcgctggagcgcgccgccgccgcgctgcacatgcacggcggccacgccgccgccgccggcttcgccggcgacgcgggagacgccgtctactcctgcccgtcgtactacgcctag

SEQ ID NO: 61675 - DNA, 324 bp, Oryza sativa
  Clone ID: PAT_MRT4530_63085C.1
ttacaagaatagacccaatccacggaacggttgcgcgggagcgaggacgagcagccggtcccgcaggccggggatgcggtaccacgccggtcccgcgggcgtggtgagcgcggcaacgctcccgcatgccagatgtgtgggaccggcgctcccacatgccgcccccatctcggtttcccgaattggatccgatatcctcatgggctccatggctcccgtgcatcggctccgcggtaccgactcggtcccgcaggccagttgtgcgggaccggctcggtcgcgcatctcggttccgcgcgaccggctcgggttccgctcccgcat

SEQ ID NO: 61676 - DNA, 705 bp, Oryza sativa
  Clone ID: PAT_MRT4530_63086C.1
atggcgagcggcggatccgctctctcgggactctccggcgccggatctgctccccaccgcccctcccacgtgcctctgccgccgagcgccgccaccgctcactcccccgtgccgctcccgaggaccggcgacagatccactctcccgaggctcactggtgcgggatccgcttcccgccacccctcctcacggtcgctgacgctgagaaccgccatcgcccctccccgtatagctgacgttgagagctgccgccgccccatccctgtgccgctcccgaggtccggcaacggtggatccgccctcccaaggctcgtcgacgccggatccgctccaagccgttgctgttgcccctctcccgtgcagctgctggatcctccttccctgcaccgccgccccctccatcctcgtcatcatcacccgactcggcccactccggccagccggatccaccaacagggaggctgggtcaccagacctggaggccacagcctccccgttggccgatgcggcggtgatggaaccggcggcggccggcggtggtggaggcaactatggccggcgacggtggagagtgaagggtggctggcaggaacgtgtgtgctcagctcctcatcaggttcatccaaggacacaaagcaaaggcactggccagcccgctgctcgcagatgtcgctctactgcgtacccggacagggaggactttag

SEQ ID NO: 61677 - DNA, 562 bp, Oryza sativa
  Clone ID: PAT_MRT4530_63087C.1
ggccgccgaagctgcgcggtgtgcatggagaccctggagtgggcggcgatcgggccgtgcggccacggcgaggtctgcgccggatgcgcgctccacatccgcgtcttccagaacaaccgcctctgctgcatctgccgatcgccgtgccgcgtcgtcgtcgtcaccaaccccgacgccatcgccgccgccggcggcggcggctggcccgccgtctcctcgcggctaccgagcgagggacgggtgggcgagtactggtaccacaccgggatgggggccttcttcgacgacgagcgccagtacgcagcggcgaaggcggcggcgcggctggggccgccgccgtgtggagatgcaaacgagaaccctcctcctcctccgccgccgcattgtgtcagatcgaggcactcagttcacctcaagagttacctgaaggtctcgcagatgtgcacaatgtgtttcacgtgtctcagttgaagaaatatcttcgtgttccagaagaggctttattttcgccgtttgttgagttgtcccgtttcgcgtgtagtttcggagcccgaagacctgc

SEQ ID NO: 61678 - DNA, 247 bp, Oryza sativa
  Clone ID: PAT_MRT4530_63088C.1
cccacgcgttcgtggacgcgtgggcggacgcgtgggcgactacgttaggctcgactagccgcatgatgtggaagcagggaccgctgaagaaagtatgtgctatctagatgcgtgcctgtggtaacagtgaagggagccaatgctgtgatcctccggctgccactagaattaccgatgcctatgaaccgtaccacttacaagggccgagatagctagcttgatatgcattgcacagacgctacggggc

SEQ ID NO: 61679 - DNA, 1070 bp, Oryza sativa
  Clone ID: PAT_MRT4530_63089C.1
gtggatcccccgggctgcagctcgtcgtctgctgtgttgcgaaacagaagataaagcgaaagggaccaaaccgaccggcgggaggttcggagatggccgcggctgcggagacctcggcgaaggtgggggcgccgagaagatggtctcttcaagggaagacggcgctcgtcaccggcggcacccgcggaatcgggcgtgcggtggtggaggagctggcggcgctgggggccaccgtgcacacgtgctcccggaaggaggaggagctgagcgagcgcctcaaggagtgggaggcccggggattccgcgtcaccaccttccgtctgcgatctctcggttcggggaccagcgtgagcgcctccttccgccaagtcgctgacctcttcggcggcaagctcgatatcctcgtaaacaatgtggggacaaacataaggaagccaaccactgaattttctgccgaggaatactcttttatgatggcgactaatcttgaatctgcgtatcatctgtgccaactttcgcatcctcttctgaaagcatctgggtcagggagcattgttttcatatcatcagtctgtggattggtagctgtatttagtggttctctctatgctatgacaaaaggtgcaatcaaccaattaaccaagaacctagcatgcgaatgggcgagagacaacatacgatccaactctattgccccgtggtatatcaggacttcacttaccgaaggacttttggcaaataaggactttgaaggtgctgtggtgagccgaactccacttaggcgtgttggagaacctgaagaagtatcatcgctggttgcttttctttgcatgcctggttccagttacattactggccagacgatctcggttgatggaggtatgaccattaatggactctatccaagttaagattaatggactatcaagaagacggtatgttcctgctgtccagaaacggccatatatgttgttcttgggctttgccaagcagagcgaatattgtgtaaactgacatcaccatgaatatatatttcttgtgcgtttgaagaaaaaaaaaaaaaaaaaaaa

SEQ ID NO: 61680 - DNA, 654 bp, Oryza sativa
  Clone ID: PAT_MRT4530_6308C.1
gggacagaagatcaaggagatgttcacttctgaatactttcagagcatgcagtaggctctgcatctacaactatacctctctacagggagatcattcaccctaagatcccgcagctggcggttatcggctattcagaaagcttggcaaacctgtacacatcagaattaagggccaagtggctcgcacatttcatggatggtggcttcaggttgccaagcatcagtgtgatgcagaatgatgtccaggaatgggagaagttcatgaagcgctattctcgtgcttactttcgcagatcctgcatcggattccttcacatctggtacaatgataagttatgccgggacatggggtgcaacccgaggaggaagaatggattttgggctgatttattcgacgttcatggccctgttgattatattgatcttcaccccaagaaagagtagtactttgggctcggagtcgtgtggaataattttatcgtctgatcatgcttgttttaagattattactacctgctttcttggatttctgttgttttgcatagtgcaaattcagtaaaccgtgtttaggggaggatgaaaattaaactcgttacttgttagctcgctcaattcgtggctgactcggctaggttcgactcaactcgttacatc

SEQ ID NO: 61681 - DNA, 981 bp, Oryza sativa
  Clone ID: PAT_MRT4530_63090C.1
ccgggctgcaggaatcgcacgaggggtttacaagatgatgcatcatcctaggatctagggaattactgcatggttcggttcagcacatgccagagagtcgtcatcggcgggacgaatccctgatatcatccacatattcaaatgggtatggtggagatgaaagctctttcagtgggtcagaagttgactacattgatgaaggaggtagcccaagtgactcagatgcagtcagtccaatgtcgcgacattcatgggattacatcagaagacacaacagtcctcactcagcctctatttttagcagggcccattcacattcacctgagtcatctgtgatcagggaagccaaaaaacggctttcagagagatgggcaatggtatcatacaatgagatcaatcaagaacaagtacctttgcgaaggagctcaaccaccttgggtgagatgctctcccttcaagtagctaagaaagaagaagctgttgctgggataatttctgtttcaagcaaccggtcaagtggcacagaaaatgagttggccatgaaagatgcatgcaaatctactttaagagagtacgatgaaaatgggaagagctctccaaggaatttagcaaaatcaaaatctgtcccagtgtcttcatctatatttgacaacgtagcagtgaatgctcaatctgcaaattctgaagggactccgaaggtgtttacaaagtcaggtagagcaaaattatctttcacggggaaaatatcaagttttttcttcccaggcaataaaaggccaacaaaagagaaaacttccctctcatctgatagctcaggcgagatatttggatgtatcgggcacatggtgccgcagtctgatcacaatcttggtcctgatgaacaaatggctttttgcaaggatgaagctgataattccaccaatcatgctccctgttctacaaaagatgctggttccatagaaagacctgtatcttctgact

SEQ ID NO: 61682 - DNA, 185 bp, Oryza sativa
  Clone ID: PAT_MRT4530_63091C.1
atgtcgccaagaagcgcaacctgcaaatggggagcaagagctcatcggacgatagggaaacagatgaagaagggagcaggagaaggctcgccggcgcgtaccggagatccgcgagacgtcgccggagatcccctttccgagtcgccgtcgccgccgccgccggcggatatgggtgctgggagtga

SEQ ID NO: 61683 - DNA, 1005 bp, Oryza sativa
  Clone ID: PAT_MRT4530_63092C.1
tataatttggattttattggaattcaagaaactatgaaataggatttcaacaataatctcctgaattatataagtggaaagaaattgtttgattggaccttgttacctgctagagggagatctaggggaattctctgttgataagaactagtgcttggtccaaaaagtggaaatcggggattactgtctcaaaatacatttgcttaatcaaaaagacaaatgggaagtggaaataataacagtctatggaactgctcaacctgaacagaagagtgaattccatctggaattggctagattctgtcagaaattgagcaagccagtaattataggtgtggacttcaacattactagctaagaggatggaaaaaacaaaagaggagggacaaacaagtggagcttcatttttaatgcaattattgaacaatccaatttaagagaaatcaacatgggtggtagaaggtttacttggtgctataatcgtgatcatcccacttatgagtaattggacaaaattttcattaacatggagtggtagaatattcacccacttacaagagtcaatgctttagagagatttctttctgatcatgtcccacttatggtagaatgggggaaaacagaacttctaatcttcattttaaatttgaactaagttggttcataagggaagacctgtcaaaagtagtaggacacacttggcttcactctgggaagggaggaactaatgtagaaagatggcaaaatagacttaaagcattgaggagagtcctcgaagggtggaataaaaattgggaaggattatacaggaaaaagaaaaaggaaattttggaaaaaaaaatggacgagattgattagacatctatcaagataaaattggacaacatatccaaaatcacaaaaacaggatgcagaaaagttggtgaagccttttagcaatctaatgggacttcttgaagattttcataggggaactggatattgaacgtttaaatcgtggagtga

SEQ ID NO: 61684 - DNA, 1554 bp, Oryza sativa
  unsure (1)..(1554): unsure at all n locations
  Clone ID: PAT_MRT4530_63093C.1
aacaagtcaggcaagaagagtgattctgggattcgctcgggcaaacaatcgttttcgtaccagtcgactcctcagagatcatctagggacaacagtaacaatcactcattctcagtatctgctactcctctagaaattgatgtccagggtggttcaccaaagaagatagctgaagaaacaccacaggaagtgcctctcagtcgcctcgcagcgcttaacaaaccagagatcccagtgcttctgcttggttctgttgcttctgctgtcagtggagttatcttcccaatctttgcgatacttttatccaatgtgatcaaagcattttatgagcccccacaagtgctaaagaaggatgctgagttttggtcatcgatgttcttagtgtttggggcagtgtacttcttgtcacttcctattggctcataccttttttcagtggctgggtgtaggttgatcagaaggatcagactgatgacttttgagaaggttgtaaatatggagattgaatggtttgatcatccagaaaactcaagtggatcaatcggagcaaggctatcggccgatgcagcaaaaattagggggcttgtgggtgatgcacttcaactggttgtgcagaatttagcaacattagttgctggtttgttgattgcttttatatcaaactgggagctatctctgatcatcttggcgttgataccactcatcggcgtcaacggatggatccagatgaagtttattcagggattcagtgcagatgcaaagatgatgtatgaagaggcaagccaagtggcaaatgatgcaatgaaatgtgaaggaccactaagaacaggaatcaggacggcgataataagtggtatcggtttcggtgtttctatcttcctgctgtttggagtctatgcagccagcttctatgccggtgctcggcttgtcgaggacaggaaaacaacatttcctaacgttttcagggtgtttcttgctctcacaatggcagcaattggggtgtcacacactagcaacctcacatcagattcttccaaggcaaaatcagctgtatcttctatattcgccatcgtagaccgtaaatctaggattgatccaagtgatgatgctggagtgagcttagaaccactaagaggcgatatcgagttccagcatcactgttgcntcttgttcggagcagaggcggtagtcggggataatgaaaccatggtcggggagcgtggagctcagctatccggagggcagaagcaacgcatcgcgatcgcccgcgccattgtcaaggatcccaagatcctccttctcgatgaagccacgagtgcgctcgacgcagaatcggagcgcgtcgtccaagatgcgctggaccgggtgatgatgaacaggaccacggtgatcgtggcacaccggctgtccacaattcagggcgcagacatgatcgcggtggtgaagaacgggatgatcatcgagaaggggaagcatgatgcattgatcggcatcaaggatggagcttacgcctccctcgtcgccctccatgtttctgctgctgccatttcgtag

SEQ ID NO: 61685 - DNA, 1830 bp, Oryza sativa
  Clone ID: PAT_MRT4530_63094C.1
atggaagaggcccgcgcgagaatcgtcgcctccgccgtggccagattgaacctagtaccgtgggcgacgcggacgcatgccactccggccgctgccctcgcgccgcccgtcggcgacatcccgcacgcccagtggcgggggctacccgacgacgtcgtcgccagggtgctcgtccgcctccccgtcctcgacctgttccgcctcggttacctcttctccccgcgctggctcgacatctggcgagccaacccgctgcatctccacgaccgccagttcgcctctccccggatcgccgccgacgacgtcgccgacgccatcgccaacgttctcgagctccacgtcggggacggcgtccagttcgtaggcgtacaaggaggcgttgggagcgacgacgacgacgatggagatggaggtggaggcgacgaggtagttggtgcggatggcgacgacctgggcgtcatcgtcaaccctggcctggtggatgacgacgacgatggtggcgatgatcatgacgggggcctcgacgtcgccgaagacgaggcagcagttcaaaacgccggagtcgtcgacgattctggaccgggggtcgccgtcgaactcgaagaggggccagaagatgaagccagtggagtcgaagacgaatcagcagatcaagccggccgccaccgccccccatcccctggaggcataggcgccgacgacggcgtcatcagcgacgacgacctctacggccacgacgacatcccagctggtggttacgagatcggccgcgtctacagcttccgagtggagaccacgcggtggcgcctcgaccacctcgaccgctggtgcgccgcgctccagcgcggccgtgttcgtgaggtcatcctcgccaacctcgccatagaagggcaccccgacctcccccagggcatccgcgactgcggcacaagcctcaagggactccacgtctccttcaccgtggaagcggaccacatcgaccccctcgtcaatctccgcggcctcgggctgtgcggctgcgccatcaaccacggcgtaatctcgcgagcactccggcccgaatcggaaatccgggggctgacggtcgatttcaacaggcagctgggagacgtctccgtccagaacacgcgcctccggtctctggagatgttcgacaacctgatggagggcagcacgatcaccgtggacgacgccatccaattccggaaccttgacctgtacctgacgaggccatccaggatctgcatcgttgacgcgcccagcctgcgaagaatcggctctctcgatctcttcatcaccgtcttggagatcaaaggcgttgtgattcaggctgggatggtgcagcgtcctccaaagaagcgttctgtcaggattctcggcttacgggtgaactacacagagatgggtcacagggtgccccgtgagatagagcagattctgaagtgtttcccactcttagagcaactggagatcatgagagacgatgaggttacacaagaagaaaggctcctcgaagcggatgatgaacacatctatcaagggaacaatttcttccgtgaccttggttgtttcaagcatcacctgaggcggatatatcttacaggtttcagagggggcaagtatgaacttgctctgggcaaagccatcctcgacgaagctcgagctgggacacagttcaaaatgttactcccactaggcagcaataccgacaacatctcgaaccagcaaaggtggcttatcgaacatttcagaatgaacactccaaatgatgctgtcagagacgggcatgtgtccattattctaagtttggatgattggacttggacttga

SEQ ID NO: 61686 - DNA, 3675 bp, Oryza sativa
  Clone ID: PAT_MRT4530_63095C.1
atgtcggagtcgagcagggcgttcggagtgaatgcgtcgtcgtcgtcgtccggcggcggcggcggcggcgaggcggtggctggaacgacggggaagaatggtggcggggggagcgtggcgttccaccggctgttcgcgttcgcggacggcacggacgcggcgctgatgctgctcgggacgctgggcgcggtggcgaacggcgccgcgctgccgttcatgaccgtgctgttcggcggcctcatcgacgccttcggcggcgccgcgggcggcgacgtcgtggcgcgcgtctccgaggtgtcgctccagttcatctacctcgccgtcgcctcggccgccgcgtcgttcatccaggtggcgtgctggatgatcaccggcgagcggcaggcggcgcggatacggagtctgtacctgaggacgatactccggcaggaggtcgccttcttcgacaagcacaccaacaccggcgaggtggtgggcaggatgtccggcgacacggtgctgatccaggacgccatgggggagaaggtgggcaagttcgtccagctcctcgtcacgttcctgggcggcttcggcgtggcgttcgcgcaggggtggctcctcaccctcgtcatgctcgccaccatcccgccgctcgtcctctccggcgccgtcatgtccaatgtcgtcgccaggatggcgtcgctcggccaggccgcctacgccgacgcctccgtcgtcgtcgagcagaccatcggctccatcagaacagttgcgtcgttcaccggcgagaagcaggcggtggcgaagtacagtaggtcactgaagagagcgtacagctccggcgtcagggaggggctcgccgccggcgtgggcatgggcacggtgatggtgctcctcttctgtggctactcattggggatttggtacggtgccaagctgattctggagaagggatacaccggagctcaggtcatgaatgtcatcttcgccgtgctcaccggctcgctagctctaggtcaggcatcaccaagcatgaaagcattcgcgggagggcaggctgcggcatacaagatgtttgagacaatcaacagggagccagagatcgatgcgtacagcgccacaggtaggaagctagatgacattcagggggatatcgagttcagaaacgtttacttttcgtacccgacaaggcccgatgagcaaatattcagagggttctcgcttgccatacagagtggaacaactgttgcattggttggacagagtgggagtggaaaatcaacagtcatcagcttaatcgagcggttttacgaccctcagctcggtgaagttctaattgatggagtgaatctcaaggagttgcagctaaggtggatcagaagtaaaattggccttgtgagccaggagccaatcttgtttgctgctagcattatagataacatagcttatggcagggataatgctacaaatcaggaaattagagctgcagctgagcttgctaatgcctccaaattcattgataaaatgccccaggaggctcttgacagggtcatgtcaaaccggaccaccgtcatagtcgctcaccgtttgaccactgtcaggaatgctgatactattgctgtcatccatcaaggatcaatagttgaaaaaggttcacaccatgagctcataagtgatccagatggagcgtatagccaattgatacgcttacaggaaaacagtcatgattctgaggatgcaaattaccagaacaagtcaggcaagaagagtgattctgggattcgctcgggcaaacaatcgttttcgtaccagtcgactcctcagagatcatctagggacaacagtaacaatcactcattctcagtatctgctactcctctagaaattgatgtccagggtggttcaccaaagaagatagctgaagaaacaccacaggaagtgcctctcagtcgcctcgcagcgcttaacaaaccagagatcccagtgcttctgcttggttctgttgcttctgctgtcagtggagttatcttcccaatctttgcgatacttttatccaatgtgatcaaagcattttatgagcccccacaagtgctaaagaaggatgctgagttttggtcatcgatgttcttagtgtttggggcagtgtacttcttgtcacttcctattggctcataccttttttcagtggctgggtgtaggttgatcagaaggatcagactgatgacttttgagaaggttgtaaatatggagattgaatggtttgatcatccagaaaactcaagtggatcaatcggagcaaggctatcggccgatgcagcaaaaattagggggcttgtgggtgatgcacttcaactggttgtgcagaatttagcaacattagttgctggtttgttgattgcttttatatcaaactgggagctatctctgatcatcttggcgttgataccactcatcggcgtcaacggatggatccagatgaagtttattcagggattcagtgcagatgcaaagatgatgtatgaagaggcaagccaagtggcaaatgatgcagtgagcagcataaggacagtagcctcattttcagctgaagagaaggtaatggatttgtacaagatgaaatgtgaaggaccactaagaacaggaatcaggacggcgataataagtggtatcggtttcggtgtttctatcttcctgctgtttggagtctatgcagccagcttctatgccggtgctcggcttgtcgaggacaggaaaacaacatttcctaacgttttcagggtgtttcttgctctcacaatggcagcaattggggtgtcacacactagcaacctcacatcagattcttccaaggcaaaatcagctgtatcttctatattcgccatcgtagaccgtaaatctaggattgatccaagtgatgatgctggagtgagcttagaaccactaagaggcgatatcgagttccagcatgtgagcttcagatatcctacacgaccagatgttcagatctttgaagacctgtgcttaacaattcaatctggaaagactgttgctcttgtcggagagagcggtagcgggaaatcgacagcgatatcattgcttcagaggttctatgatccggatgcaggccatatacttctagatggagtggacattcaaaagtttcagctaaggtggctaaggcaacagatgggtctagtgagtcaagaaccagctctgttcaatgacacgattcgcgcaaacatcgcgtatgggaaggaaggggatgcgacagaatcagacatcgtatcctccgcgcaattggcgaatgcgcacaagttcatcagctcattgcatcagggatatgaaaccatggtcggggagcgtggagctcagctatccggagggcagaagcaacgcatcgcgatcgcccgcgccattgtcaaggatcccaagatcctccttctcgatgaagccacgagtgcgctcgacgcagaatcggagcgcgtcgtccaagatgcgctggaccgggtgatgatgaacaggaccacggtgatcgtggcacaccggctgtccacaattcagggcgcagacatgatcgcggtggtgaagaacgggatgatcatcgagaaggggaagcatgatgcattgatcggcatcaaggatggagcttacgcctccctcgtcgccctccatgtttctgctgctgccatttcgtag

SEQ ID NO: 61687 - DNA, 1268 bp, Oryza sativa
  Clone ID: PAT_MRT4530_63096C.1
atggcgacgcagcatctcgaactagccaacgaaaaattcctagctactccaatagcccacttcaagatagcaattagtgttggcccagggctcggcaaaatcctgggtccgccagtgagcctcctagctcttcctcagggaggtctgcaccgagggctgcctcggcttggaggtctcttcttgccaagctgctgcaagctggcaagaattatcaaacttgtgatctttcttataggcatgtcaactatttccgatcagaagaaacggaccttagaagcccttcaacaacgttatgctgctgcaaaagctaagaaactgcaagacaagcctaggtgtcagacaaggaataaagatagtgcgcccaagcccaatcttgatgcatcaaggaaaggcaaagctccagatttcattccatctcgaacttctgctccgtttccttcaaaaaaaggtctagcaatctccagttcttctgcttcctcaggtgccttcttaggctctaacatacatagatctgatttggacagtatggatgttgtgcacaatgttgtttatgacataattcagaaaggtggagatgctggaaaaattaccaagggagccaaaaagttaaagctggaaaaagggattctgctggataactatgttcacaggggtcctagattagttgatgcacaggcaaaatctttgttaattcattcaaagcgatcaaaaaggcacatgtcacttaagcaacataagaaatgtgggtcatttgatttacctgagacactccgcaagtttgacctctacaagccaatgcatgagatgtggaaagagtatatcacagagcttaccaaaagcacaccgaaaaagcagttatctgaaaccctcctctcagcagatcttcatggggctcttgtaatagtggcagaatgcaaatcagcctcttcttatcaaggcgtatgcggcatcatgattcgcgatactgcagagacttttggaatcatatcagatgacaatcgcttccgagttgtgccaaaagctgggtcagttttcatcctccaagcagactgttggaaggtcacgctgatcggtgacaaactgtcacccagggagaagctgaaggagaaccagcgtcagcagcgagtgcaggcacagatcagatagtagagtttttcatcctttgtctgatgtaattttggttgttttttctcccccagaaacatgtacagggtttagttgtttaggtgttgttactgaagtttaatggtaatctccctcttcacacc

SEQ ID NO: 61688 - DNA, 665 bp, Oryza sativa
  Clone ID: PAT_MRT4530_63097C.1
ttgcgcgcccccgtatccttgcccgtaagtttaaccacatgtttgcagtcccgtacctcctcgggttcgtacccggttggcggttccgtgttctgtcccctgtcggaaggagaacctggaaatggtgctgacccggttcggccgaacctgatggccgacggcggcacacgtggccctgcacgagattgacggccttcgttccttcgtgcttcaaactgcagggcgcctgcggcttgtgccccagcttcccacccttgacgcttccagaatgggcattcgagaagcgccttccgcgaccagatatccccgagatatccttgccgttcgaacagattcgttgaccccgagaccggccttcgaggctcaaccaccgaccacgcttgaacaggtgtctggatgagatcacgaccactacctctttccggcaaccgcgaggtggaaaccttgattcttgttcagagattgatgaatccgctcgctccaagttcggttaactggaacctgcaacgggtgttatgacacgtaacgtgtaactgtaacaccaaaactgagggaaaagataaccctcccttctggctgttccattgaccgagtagaaacctgagttcaattattccaaccactccagagaaaccaaactttgattttccaaaaaaaaaaaaaaa

SEQ ID NO: 61689 - DNA, 357 bp, Oryza sativa
  Clone ID: PAT_MRT4530_63098C.1
cagacacgtggtcagaagtatggcgccaccgggtggctcgtcaacaccggttggtccgggggaaggtacggattttgcttgctgatcatgctttcatctaccatgaagatcatttaatccatacactccagagagttcttatccatcaactacaagaagaccgaagtgctcttcctcgagatgccaatcttaatcaccggctttccgtctataattgtcgacacgatcaacatctggacggacaaaggcacgcacaatgtgacactcctttatctagcttgttctgtcaaaaagaatgctctggtgttcttcaactacaagatccggggagacagtagactgactgacaatatcctg

SEQ ID NO: 61690 - DNA, 438 bp, Oryza sativa
  Clone ID: PAT_MRT4530_63099C.1
atgccgaggagctcggaggaggcggtggttggaagcggcagccggttactggggatggaggagacaacacctagcggttggcagcacctagcggttggcagatgtgtcgcccggctgggggacgtggatccggcgcccgacggtcgggggacagaggcggtggccactggcggtcggggatggaggccgcggcaccgccgctcacctcctcctcgccagcgcacgccgtcgagccctcctcaccgctgcatcgagccgccgcacatcgtcaacacctccttgccattgctacttcaagaaaaaccggatcgagaaataagagaagggggagagggagaaagaagggggaggaggatggggcaccaccgttgccgccacacgccaccgaaccaccgccgccggctcgcccgagggccgtcgggtcctctaccgccgcca

SEQ ID NO: 61691 - DNA, 246 bp, Oryza sativa
  Clone ID: PAT_MRT4530_6309C.1
atgaagccagagctcaaggtgaccttcatggcgacgatgctgagagttacactaaggatgaagctcaccaccattgatcgtggcgttattgtttccgacaatgatggcacaggctctgcctcaaaggcatgctctgttgaaatgccttcctggaaatcattgacaggctccattgtattggtgatctacaagagagatgataagggcacaactgcaaaggggaaaaagcttggagtcagcgagtga

SEQ ID NO: 61692 - DNA, 303 bp, Oryza sativa
  Clone ID: PAT_MRT4530_630C.1
atggtggaggatggcggcggtccgacagcaggaaggcgggggatgcggcggtggctcccgtcggcggccctagaggctgcggcggcggctcccgtcggcggcctagaggttgcggcggcggctctcgttggcgctggcagccctaggggctgcgatggaggacaaaggcggcttccgacggtgccggcggcactaggggctatggcggcggctcccgtcggcgctggcggccctaggggctgcggcagctcgagacagtggcagtctgtgcactttgacggtggatgcctaggattcgggtga

SEQ ID NO: 61693 - DNA, 1152 bp, Oryza sativa
  Clone ID: PAT_MRT4530_63100C.1
tatgatgtggtaatccctatgcttgtgagaaatactagcaaaagtaagcttatgaatgatgggaaagtgttacatatgtgttgtgttgcccatatccttaatctaattttaaaggacggatttgatgagtagaaagatgcaattgagaacatccgttgaaatgtagcttattggacatccaccccaaaaaagatagaaaaatttgaggagatagctaagtatgctaaagttactatagacaaaaagatatcccttgattgcaagactagatagaattccactctcaaaatgcttagttttgctgtgccctacaaggctgctttcatgagagcaagctgtgtagacaagtaatatgagtctttgccaagttagaaagaatggaagtttgctgaggatgttgtgcagaggcttagattgtttaatgacataactgagatgttatctagaactgagtatgtaactgctattatttatttcaccaagattgttgagattagaaagaaaattatgtggtggtcagtttgtggcaatccattagtagaggccatgtctgttaacgtggtaaccaagtttgataagtattggtcagacattcaagaactaatgggcattgcaactcttcttgatcctcgctttaaaactctaactctgcttatgtgttatgagtctttacttggtacaactggtaaagaatgcataaggacaaggttaatgaaatgaaaatttcaatggctcaattgatgtgtgagtaccatgttaaggaggatgaagatgtcaccaaatcaacaacaccttcacttgttggcacaaatgatttcttatccagcctttagtgccgtgctgcaaccaaaaggccagatctagaccattacttggatgatgatttggtggatattcatacaaataatttcaatgtttcaaattggtggaaggtggctagaactcagttccctattttgaggaggatagatagagaagtatttgcaattcatgttagcacagttgcttcagaattagctttagcactagtgggagagaccttagtgagcatcttagtcggctcactactaagatgttagaagctctaatgtgctcacaagggttcaaaacaagtacaaaggtatatataatttgcacttgtgttgttataaa

SEQ ID NO: 61694 - DNA, 534 bp, Oryza sativa
  Clone ID: PAT_MRT4530_63101C.1
atggtgtgcgacccctggatcggcgtcctcattgtcaatcccaccgagaatctggggagcatgaatctcgacgtcgtcgatcattgtcatgttgtcgtcgacctcgaccgttgccaccctgagttcgccgcccatggtggttgtcatcatgctggctttggcgatcctgccggttttggtcttcgctgggacggcctcctcggttatcatcattattgcgtcgaggtggagaacggcgctgatgttgatgagcgtcgtcctattctcgttgttcccgccggcgcccgttcaagtggtcgtgtagatcgcgattatcttggggtggcggggtctgctgacgaggccctcaaggcaaggtgttgcgggggttacgaccgggatctcggctcggatgttcactggggtcctcgttggcttcaacgttgccgtcgacgtgcacctcttctcctcgagcaggaagtcaagggggatcctgagccggtggttcagtcgtcgccacaacgcgctgttgagattcaccactatggatcgtag

SEQ ID NO: 61695 - DNA, 514 bp, Oryza sativa
  Clone ID: PAT_MRT4530_63102C.1
ttttattagcattggccaaagccgtcgccttactggttgttgccatcgcgccatggggcgtgttagtgcaattggaatgcgacgcccccgacaagaagagcttgaccaaggtcctcctctcccctgtagataagcgcttggatgaggcagctcaagccatcaacaagggcgccgactacgatgcggctgctgccccaccagccaaaaaggatgaagaggaacctgacacgattgagctgccaatctctcacatacctgatctatgaatggaccaacgatatgagaggaaagacaactgaacctcactagcctactaggccgcaggctatgctgacctctgtgacatcccagcttacaagtataaggtgactagcgaacacttgaacgcgtgtagtttacaagacatcacgttatgagcgagacgccaaccataaagtaatggctactactacatctccggaattggtcgactatcggacacgtaccgagtatcaacggttatttatgaataaat

SEQ ID NO: 61696 - DNA, 975 bp, Oryza sativa
  Clone ID: PAT_MRT4530_63103C.1
atggcgacctaccggccgggcagcaataccctcctcaagtccgactccatcctcgagtatgtgctggacacgacggtgtacccgcgggagcacgagcgcttgcgcgagctccgcctcatcacgcagaaccatcccaagtcgttcatggggtcgtcgccggaccagatgcagttcttctccgtgctactcaagatgatcggcgccaggaacgccgtcgaggtcggcgtcttcaccggctactcgctgctcgccaccgcgctggccctccccgacgacggcaaggtggtggccatcgacgtgagccgggagtactacgagctggggcgcccggtgatcgaggacgccggcgtcgcgcacaaggtcgacttccgccacggcgacgggctcgccgtgctcgaccagctgctcgccggcggcgaggggaagttcgacttcgcgtacgcggacgcggacaaggagcagtaccgcgggtaccacgagcggctggtgcggctgctgcgcgtcggcggcgtggtcgcgtacgacaacacgctgtggggcgggtccgtggcaatgccgcgcgacacgccggggagctcggcgtacgaccgcgtggtgcgcgactacatggtcgggttcaacgccatggtcgccgccgacgaccgcgtcgaggcatgcctgctccccgtcgccgacggcgtcacgctgtgccgccgcctcaagtgagatcgaccgatcgatcgggcaatcttagaaatgcgctagagtgtctataccctctcggtctcaaaataaaacaacctcgtagtagtatgatgtttattttaggacattgtaataggtggttgatttattttgcgtaggagagagtacgttgctctactgttgctgttgatcttgtcgtacaataattgaagttcaaattcaacgtcttcattaaaaggatgaaggcgggggagatagacgattcatacttaactgcgcgcacctaagaac

SEQ ID NO: 61697 - DNA, 466 bp, Oryza sativa
  Clone ID: PAT_MRT4530_63104C.1
cgcatgcacccctccttcagcttttttcctccagatcaggccgcccctccttttttttttttgggggatggtgaatggccaagtgtatttctaagattgcaaggttgtattacatgtttggcagcaagaacaaaatgctggtggacaaatgtaatgagagatacaatcagccactgcattaaaacctatgaagaggggaatctactatgtttatacagttctaatctcaaaaaacacagaaagacttaaagaacaaaaatgagactgggaaagccacccatgctctgttgaaagacttagccacctatatcattatatgtcaataatcaacttccgtgctgtttaccatttgctgcacgcttaacaagctgcccttgtttattatagacatccaaattcttccatggtataggaaaacacttacccgtgacacgcccctaatgaaggaacactggaaaatatgttt

SEQ ID NO: 61698 - DNA, 144 bp, Oryza sativa
  Clone ID: PAT_MRT4530_63105C.1
tttttgggggattttaacggttttatttccataatacatatgcaacccagagcaatgaaggcagatctagcatcctaggaaagtagaatgcacccactaccagaagatgtacaccacaacacccaagtgtcaccaacaaatatc

SEQ ID NO: 61699 - DNA, 276 bp, Oryza sativa
  Clone ID: PAT_MRT4530_63106C.1
aatctgtacagatgactaacgctcgcgattctggttgccaacttatgggggggtgtgttaatcttccataactttctccttaacactatcaacagacatattctaccaaatatattccttaattattggcttttacaaaaatgatactgatgactgttctacatcatgaatctaattctttaggagagcctttggagaaactgactctaacacatcgctttctattttctaacatgaccaactcgataattttacccatagatttatcttaacatt

SEQ ID NO: 61700 - DNA, 1338 bp, Oryza sativa
  Clone ID: PAT_MRT4530_63107C.1
actccgacgacgggggaagaaaaataacacgcatgcgcgatgtgaacgggagcccacctccccatactacaaggggggcttatccatacgggaattttagaggtgtgggcccttttacactccatccagaaaaaggtataacaattaatgtggcccacggttttcccccccggttttaccaccgacatggcgggtattatcccctcttaaggtatggtcgccgcgccccccacaagaggataaaagaggagaatgtactcgaggtggataggagaacaaaaaagagccgccagggacacgtcagacaaaagaaatgtaagatagtccacggcaaccttggagtaaagaagatattgggatgatcaacctgatgacattttacaactgttccaactttcaactggacaaagctagggcgcacggttaaatataatttatagagtataatacacatcgttgcttacaagtaatcgctaagcaacataaacttgacacaaaaaaaagtacacctagccgctttcgtgctgcaatatattcttttgatcttggagaagaactacagaagcttctttctctcaaaaaaggtcttcaggtgccacagctgcagccccgcgacggataggcagattccgagtgagaggaacccgagccatgccattcttgagttcgtttgcttgttcaggttctgcatttcctcctccctttcacgtaggtaaaacatttcttcatggatagatttgatggtttcttctagcttcttcaactccatctccatcacatcgacctgccccttcttggcgacgttggaccagtccttggccgcgacgccgctcctccagtcgaactcgaacccgatggagaccggcggcttgtggtcgggcgcccagaagcaggccaggtagtcgccggcctccgtcgccgtgaacgcgaagttccccgacggcacgttctccgcgtagtgcacgctgttcccgtacggtgacgtcaccctgagggagatgcggtgggagtcggggagagggttgtcggggaagttggggtcggggccgacgacgtggtacttcccgacgaccatggagttgaccttgatctcgtcggagatgcacttggtgtggccggactcgaggtcgaaccggagggcgcgcgccgtccgcggcgcggccgagaggaggaggagcacggcggcggcggcgaggaggggccatggcgcccacctgggagcgggcgatccggggcggcgcgcggccatggccggagatcggaggcggggaggggaggtcgtcacggggcggcggtggtggtattagcgacttggcgtgcgctttggctcccggccgg

SEQ ID NO: 61701 - DNA, 207 bp, Oryza sativa
  Clone ID: PAT_MRT4530_63108C.1
atggataagctcgccggggaagtttgtggcggaggagcggcgaacgccggcgacccctcgcacacggcgggtgtcggcgtcggcggcgacgacgacgacacagcaatgcatgcatccacgtggcgcgtgtgggccccactcgaacggcagaatcttcctctgacgtgccgccctgcgtgggttcgaccaatccgtagccaactctct

SEQ ID NO: 61702 - DNA, 178 bp, Oryza sativa
  Clone ID: PAT_MRT4530_63109C.1
ctgcaggaattcggcacgaggggcggtggtggcctggcagcggcgccctccctccgtcggatctggcggcccggtggcaatgttctgtgaatgatttctttgatcaatgtttatgtgaatgatttttgtgatttctcattgaatgatttctgtgatttctctgtgaatgacttctgtg

SEQ ID NO: 61703 - DNA, 1858 bp, Oryza sativa
  Clone ID: PAT_MRT4530_6310C.1
ctgggttgggtgcttttatcctcttttttttttttttaaggcacatgcccgtagatagattaaaatccatctccttatattacacaactgtaccttacacttcacacggtttactgaatttgcactatgcaaaacagcagaaatccaagaaaccaggtagtgacaaccttaaaacaagcatgatcaggcgataaatttattccacacgactccgagtcgaaagtactactctttcttggggaaaagatcaatataatcactagggccataaacgtcgaataaatcagcccaaaatccgttcttcctcctcggattgcaccccatgtcccggcatagctgatcattgtaccagatgtgaaggattccgatgcaggatctgcgaaagtaaccacgagaatagcgcttcatgaacttctcccattccaggacatcattctgcatcacactgatgcttggcaacctgaagccaccatccatgaaatgtgccagccacttggcccgtaattctgatgtgtagagatttgccaagctctctgaatagccgataaccgcgagctgcgggatctttgggtgaatgatctccctgtagagaggtacagttgtagatgcagagcctactgcaatgctctgaaagtattcagaagtgaacatctccttgatcttctgatcccctctgaacccagttccaaagatcactatatcgctctttatcggcgaagattggccttcgacaagcacaccttccttgcaaaagctaaatgtctttgatttcttcagaacaatgctgccttcttctaatctcttgtaatggtctttgggtgtaatggcaaccaagcatgtaatcaaagcctcaaataggctatggtcaggcaccatgtcatacttcttcattggaatggaataatagctttctgcaaacttcgaaaatatccatctcaatggagtcaagagggtggccaagatgctaaggagtaagccttcaccaggcttgtgaataagaagctcagaaaaccgattaagatacagctttgagatgtggacgccccatgcaaaatagtctggtatgatccaatgctttgttcggaccaccattgtacatggaatctcagtaccatttacttctgcacattctgcagcaatgtcaagtgctgatttgaggtagccaacgatcgtgacacgcttgcccttgatcatttccttagaattcttggtgcccatcttggagtaatccatggagtggatcacctggccatcaaatgcttctggacctttgcctggaggaaatgttggtatgttgggcactccactgaacctcccaatacaaagtatgacaaaatccgccttgtgtgtctcaatatggccctcaccgtcgaccacctctagccgccactcgccggagccggagccgaaagcgtcgccgttcccagcccactcatcccacgccgccacagcctcctcgccgacgccgacgtactccatccccgccacccggtggccgaacctgatgcagtcgagcacgccgaagcggcgcgcgtaggcgccgaggtagtccatcacctggcggtggtccgggaacacctccgtcaccgtctccggccacgggaagtcggagtactggtacatgggccgcggcgtctgcagcgcggtgcactccggcgtccgcgcccacacgccgccgaggccggtgtccgcctcgaacaccaccggccggcagccgcgctccagcagttgcttgcacgccgccaggccgctcacgccggcgccgacgatgaccacccgcttcttctccatgccggctagtgggctactgggctaggaaaatacgagcggacgcgtgtgcagcccgggggatccaccg

SEQ ID NO: 61704 - DNA, 549 bp, Oryza sativa
  Clone ID: PAT_MRT4530_63110C.1
atgaagttcccaaagcgctatgtcattgtgctgctgacattcatctgcacaaatgtttgttacatcgagcgtgtcggattctcgattgcttacaccgtggcagctgatgccattggcgtgaatcaagcaaacaaaggcatgatactttccatgttctactatggttatgtcttatcacagatccctggtggatgggcagcacagagaattggaggcttcgccgtgaatcacatggacgttgctccaaaatttgctggtatagtgatgggggtttcaaatacagctgggacattggctgggatagttgaagctggcgtcggcgatctggaggcggaaatcggcggcggcacgatgacgacctcaatggcgatacgaggcggcgcgatgacagaggagtcggcgtcggcggcggggaggagaaggagtaggagtagacccgtcggcgtgatctggagcggagtcgacggcggcggcgttggcggcggttgcgggtgggcagcggcaacgtcgccggctggggcgagtgggcgaggtgaggaggcgacgtag

SEQ ID NO: 61705 - DNA, 497 bp, Oryza sativa
  Clone ID: PAT_MRT4530_63111C.1
aattgaaaataacagccaccatctacatggctcagcagagaaggtaatgcatcgggtttagccgatgagctgggcaacgataactctcagcactctgctctagtttcttggagtgtcctgcacctttcaagggagtctcgggcataaagccctgcctggtattccaggatcggcaacatcgacgcctgcggtgccgtatcctccatggaggtgttgccttgctgactttctttccctttgggtgaaaaccctgtcctttttaggcgggcgttggtagcggcttccgtcgttacttccctccttggaggtttcgccttgaaggtcttgctcctctctctggtcaccattatggttcgtggttgttttgccacaggtttttttgctttgtcttctgtggggtttcgccgggttccctgtagcaaaactgtgcagttgtatggtttttgatctggttttccttataaacagggtcaattaaattcaaaaaaaaaaaaaaa

SEQ ID NO: 61706 - DNA, 207 bp, Oryza sativa
  Clone ID: PAT_MRT4530_63112C.1
atggcgtcaacgccggcgttgggagacaacgatgtggtccagaggcatgcaactgcagaggtggacctccctctgctcagttacgtcgaggtttacctcaactgcagaggtgtgacaggcaggcaggtggaagaagcgaaggtggcattgaggcaggtggagcgtactcaccccaacattcctgccattcgtgtgttgctaggatga

SEQ ID NO: 61707 - DNA, 156 bp, Oryza sativa
  Clone ID: PAT_MRT4530_63113C.1
atggccgacacgtactcctattgcgtcagctatggtggtagcaagaagagccctgctttcggccatagggtgattgtgagcattgtcgctatcccctctgaaaccgtccactcgagcacttgttgcttcggcagccgctacaatatgatcttcacc

SEQ ID NO: 61708 - DNA, 240 bp, Oryza sativa
  Clone ID: PAT_MRT4530_63114C.1
atgacggagcgtggggctcctcaccgggagaccgcgcaggccccctttagccggttcggccgggggctctgggtgaggcaagtcatcaccgaaaacaatttgatgtacttcgacattcgctgcaactgccgctcgatgcccttccacgatgacttggccgccactgccacacactcggcggtgatggcggtgagtgtagaagtagggactgttgatgctggtgtaggggagcagaggtag

SEQ ID NO: 61709 - DNA, 956 bp, Oryza sativa
  Clone ID: PAT_MRT4530_63115C.1
cggacgcgtgggcagctcccttcttcccaccgattccaatctccagaattctgcttcgatatggccgccaagatctacatagtgtactactccatgtatggccatgttgcaaagctagcagaggagatcgagaaaggtgcttcttcagttgaaggagttgaggtcaagctatggcaggtcccagagactctttctgatgatgtgctcaccaagatgggtgctccttcaaagaaagatgttcccataatcacacccgcagagcttgccgaggctgatggtgtcatctttgggttcccaactagatttggaatgatggctgctcaattcaaagcattcatggatgctaccggtgggctgtggaggacacagcagctcgcaggcaagcccgcgggaattttctactctactggttcccagggtggtggccaagaaactactccgttgacagcaattactcagctagtgcatcatggcatgatctttgttccagtagggtacacctttggtgctgggatgtttgagatggagcaagtgaagggcggaagcccgtacgggtctggcacattcgctggtgatggatcaagggttgccactgagcttgagctgcaacaagccttccaccaagggaagtactttgctggaattgcgaagaaactcaagggttccgcatgatcacctagacaatgtttgagtctgatcatccatatggaataaagtttcagctctaaagttgatagtttgttattttacctcagagtgccattggaatgtaatttgggttgttgcccaatactttgccatgatatatgtgatcccataccttttcctgctttactgctttctagcatgaaacatgctggcatcatgtggacatgctctatttcttctatattgttttcttttatgaatattttgccatggatttgcttgatgaaaaaaaaaaaaaaaaaaaaaaa

SEQ ID NO: 61710 - DNA, 2676 bp, Oryza sativa
  Clone ID: PAT_MRT4530_63116C.1
atgagctacctcgtcgagtactccgatctggagaagggggaaggggaggccgtggccaaggcggtggagtacctgcactggcggttcatcaggccgtccgaggagcgctcgccgcgggattgcgatttccggattggccccggcgccgccgtcgaggcctactgcgacggggcatggtcgcccggcgtggtgcggagcgtcgtcggcgagggtgagtatgaggtaagtgtcaatggaaagaccaaggaggttgtggtgaccaaggtgcgggagctgcttcagcctcagtacaagtggaatggcaagaactggaggattgtctctgctaagttggggtacgatgggtctgtgtaccatatggctaagagacacttgaggcagcagtctatgtctggaaaaagcccaagctcaccagttgatgtgttctccagtgatgatgaacatagacatgatactgaatcttctgcccggagaaggtcaataaaaaggtcaaggaaggagttcaatgcaacgcagcaacctgaaggcatgttacctgaagattctgaggatgtttcacattctgagatgaacactcctttatctgaattatgcaagtcatcgggaagcaatcattctccaaagtcttgctctgacccatctggaatgaaaaaaattcaagtgctttcgaagaagatagtgagtaactgtttggtaccagtgaaggggattcttgatgcttcgacaggacatagaatacctcagaatgaatcaagagaagatggtattgggaagacaatggttaatcaagaaattatatctgacatgatgcttacgaatggtcaggctaatacatctgcttgtggaacaagtatgaatgaaggctatgctatgctttcaactaaaaagtttggaaaacagaaaatggcattatctcgcagatacaatcctgtacggaaggcacggggagggctgctctctgtccagcaactacacactaaaaaaatcatgccttccgagctcaaacggggtaaaatgagacttattcatgcacttcaggacatgaacgatccctctgataatattcagttaaagggaaacagtacttctccaagcagagaaattatttgtgctttgagtgtctcttcacaatgcaataccccatctcctctgggtaaacaaataaaggcttttgacttcgtgtcaagagaggctgatagtggttcaaatactaagtttcttatcttgaagaaatttgctagaaagaagggctccaaagaatcagatagcccacataactcattggatgcaaccagtactgtccagccaatacgtagaaagaaagctgcagggcgactgaaaggatcttctgtggagagacagttggagggtgaaactcatattcagcagcagcttaataaggctttggaggataacctgaatgcaaatgaagtaacaaatcaagaactgttgccactaacacctccaggctttgaatcagttgtcaatggaaaacgttctcgtgattggaacactgatggtttctctgaagttaacttaaattctagtctgttcgatgaagagctgactgctacaatcaatagcatttgtcaagataatcataatagagatgcagaatctgacaatgtggctaccgaagtagctgaaatcagccatcttatggagaaatctatgttacctcttgactgttcagttgggcatgaggtgggtgggaaagtgggacagggatcaatccaattacatattgggaacagtgggagtttgccgtgcaccagtgacaatgccatattaaggcgctgctcatttggtgggaattctatggtctcagatatatctaagtgtcaactcactggtcagcaggccccattcaccaagaggtcccatgtttggtctttatttgaagagatggatgtgtttcgaaagatgccacagcagccacatttccttccactcaagcaccatccactagggctgcgtgaaggaacggctttaggtctaatgtggtcatatactgatgcagtggataatataagtaaattatgcataacggacagcatggaaatatttgaagaccacatcaaaacacttaccattttagaagaaaatggattcagtgttcagtctttgcagcagattctgaccgaataaaaaaaaaaaaaatcagattacaccaattctctcagagacggggagaaactgaaagaacagatagcggataaggcctttgctgtgtcccgtgttgatgctctgcttgatgaaaatgatagtgctatagccaagcttgaacaggaacttgggaaactccgatggaaaggccagaagatgtcaaagaaaaaggaggatgaagatgcagagctgtcaagactgaaggcggagaataacaatgctgaggaagcacacggtgatgctaaacgacagtttgacagcatccgggctgagctgcggcaacacttagcaattgatagtcagtaaccatcctgatgagtcccaacttaggcactgtatgctgggtgcttatctaagactaggaaccctgcctgttgaatgtgtcagtcctgacctattatttctagaccatctatctgtgctaatctgatctacctatctctgtacttatttcttcctaaaatttgccagctatctgctgttactaaaaaaaaaaaaaaaaaagcggcc

SEQ ID NO: 61711 - DNA, 207 bp, Oryza sativa
  Clone ID: PAT_MRT4530_63117C.1
tagttgttcgttgcgtggagaaagatcgatcggggtcggtgggcgcgctctggtggcgacgcggacccgccgcgcgctgcgccccctggccgtcaaatcgggttgggcggggccatccatccatccgccatcgcgggggaagggaagccgtacgtaacgcgcttgtgttgtgttgtgcgcgtgcgcctccgggaagattgtcgtggg

SEQ ID NO: 61712 - DNA, 762 bp, Oryza sativa
  unsure (1)..(762): unsure at all n locations
  Clone ID: PAT_MRT4530_63118C.1
tgtcttcctctgaaccctgaaccaatcccgaactctgaactctgaaggctgcagagacaggcagagagatatgagggagataataagcatccacatagggcaggcgggcatccaggtggggaattcttgctgggaactatactgcctcgagcatggcatccagccggacggcctcatgcccagcgacacaactcctggaattgcaagggatgcattcaacacgttcttcagcgagacgagttcaggcaagcacgtcccaagggcgttgttcgtcgacctggagcccacggtgattgatgaggtgaagaccgggccataccgccagctcttccacccagagcagctcatctcctacaaggaagacgctgctaacaactttgctcgtgggcactacacagttggaagagaggtggtagatctttgccttgatcgactaagaaaactggcagataactgcactggtctccaaggttttctggttttcaatgctgttggtggaggaaccggctctggtcttggttcattacttttggagcgcctatcagtagattacggtaggaagtcgaagctcgggtttacaatatatccttcaccacagttctcaacggtcgtggtggtgccttacaacagcgtgctctcgacccactccctgatcgagcacaccgacgtcgtcgtcctcctggacaacgaggccatctacgacatctgcaagaggtcgctggacatcgagcggccgacgtacaccaacctgnacaggctcat

SEQ ID NO: 61713 - DNA, 1881 bp, Oryza sativa
  Clone ID: PAT_MRT4530_63119C.1
tttgtcttcctctgaaccctgaaccaatcccgaactctgaactctgaaggctgcagagacaggcagagagatatgagggagataataagcatccacatagggcaggcgggcatccaggtggggaattcttgctgggaactatactgcctcgagcatggcatccagccggacggcctcatgcccagagatgctatctgtgaatctgtgatccccaagccggttgctttgagagtagaaagcctgtgccttttttgtgaagcgaatttcatttcaagaagaatactagtctgtgacttgctgcggtgcctagtggctcctagtttacgatatcctaatccttggtcatatctgacgcttgcttgcagcgacacaactcctggaattgcaagggatgcattcaacacgttcttcagcgagacgagttcaggcaagcacgtcccaagggcgttgttcgtcgacctggagcccacggtgattgatgaggtgaagaccgggccataccgccagctcttccacccagagcagctcatctcctacaaggaagacgctgctaacaactttgctcgtgggcactacacagttggaagagaggtggtagatctttgccttgatcgactaagaaaactggcagataactgcactggtctccaaggttttctggttttcaatgctgttggtggaggaaccggctctggacttggttcattacttttggagcgcctatcagtagattacggtaggaagtcgaagctcgggttcacaatatatccttcaccacaggatatttcgaagtcatcatcatgcatgcacatcatgtcagatactcagatatctcaatgcaagatctcaacggccgtggtggagccttacaacagcgtgctctcgacccactccctgatcgagcacaccgacgtcgtcgtcctcctggacaacgaggccatctacgacatctgcaagaggtcgctggacatcgagcggccgacgtacaccaacctgaacaggctcatctcccaggtgatctcgtcgctgaccacgtcgctgcggttcgacggcgccatcaacgtcgacatcaccgagttccagaccaacctggtgccgtacccgaggatccacttcatgctgtcctcctacgcccccatcatctccgtcgagaaggcgttccacgagcagcactccgtcccggagatcaccaactccgtcttcgagcccgccagcgtcatggccaagtgcgaccccaggcacggcaagtacatggcctgctgcctgatgtaccgcggcgacgtcgtccccaaggacgtcaacgccgccgtccactccatcaagaccaggaggactgtgcagttcgtcgactggtgtccgacagggttcaagtgcgggataaactaccagccgccgacggcggtgccgggaggggacctggcgaaggtgaggagggcggtgtgcatgatcagcaacaacacggcggtggcggaggtgttctcgcggatcgaccgcaagttcgacctcatgtacgccaagcgcgcgttcgtgcactggtacgtgggcgaagggatggaggaaggggagttctccgaggccagggaggacctcgccgcgctggagaaggactacgaggaggtcggcgccgaagtcgaggacgacgacgaggaacagggcgagtactgatcgggctagcctgctaggtgaatctagcacggtagataaaccgcaagtttgtaaggtcggtggaagggggtctctcggtttacatggactcttgtgactttgtggtgtgagagtgggttttgttgtacttgcatcacaaaaaataaaagaattcgtcagaaatcaaaatgtgaatcacaaagccaaaaaaaaaaagaaaaaaaaaaaaaaaaaaaa

SEQ ID NO: 61714 - DNA, 621 bp, Oryza sativa
  Clone ID: PAT_MRT4530_6311C.1
atggaggacgaagccggcgcggcgcggaagcggaagcggcgcggcgaggggaagccgaggccgaaggcgaccaagggcggcagcaaggccaagcccaaggggaaggccgccgccgccgctgctgctgctgcggcaaccgaagaagcggcggcggcggtggaaaaggtggcggcggagcctggggtggtggtggagaagaagcaggaggaggactacgcggaggggatcacggaggagtccatcgccgaggtgatgagctggctggagctggagatcaagctcgcctcctccgccgccgccgccggcgcggccgccacgcccgcaccgttcgccccgccgcctcctcctcctccggcggcgggcggcggcgggtacatgccggcggcgaagggggtcaacaccagcaacatggagggcagctgcggcgcgtcgttctcggtgtcggcgtcgacggtgatggcctcagtcgacctccgcgccggcgcgccgccgcctccgccccttccgtggccgctgcccggtcacggcggcggggccacggcgtcggcggcggcggaggaggcggtggacgacgacgagtgggtggaccagctactgacagatgggcccgccatggagtag

SEQ ID NO: 61715 - DNA, 1494 bp, Oryza sativa
  Clone ID: PAT_MRT4530_63120C.1
gcgcgcggcggccgggcgtgcgcgccgccagcatggcggcggcagcggcggcggcgcacgtgctcgtcttcccggcgcccgggcagggccacatcaactgcatgatgcacttcgccaccggcctcgtcggcgccggtcttcacgtcaccttcctccacaccgaccacagcctccgccgcctcggtggcgccgcggccgccggcggccgccgactcgccgcggctccggttcatgtccatccccgacggcctccccgacgaccacccgcgcgccgtcggcgacatcgtggagctcctcgagtcgctgcggaccaacggcagcgtcccgtaccgctccttgctcgcttcgctcgtacgcgcaggggacgacggcgcctcctccggcggcttccctccggtgacctgcgtcgtcgccgacggcagcatgccgttcgccgccgacgtcgccgaggagatcggcgtcccgtcgctggtcttccgcacggccagcgcgtgcagcgtactggcctacttgtcagtcgacaggctgttcgagctcggtgaggtcgtcctgttcccggccgacggcgacctcgacgagccggtgcgcggcgttccgggcatggagagcttcctgcgccggcgagatcttcctggcaacttccggaactgcaccgaggaccagaacgaccccatcgtgcagatgctcatcgaggtcaccgcgcacagccgcggggcgcgggcggtcgtgctcaacacggccgcgtccatggaggggccagcgctcgcgcacgtcgcgccgcgcatgcgcgacgtcttcgccatcggccctctccacgccatgttcccggtgccggcggccgcgggcagcctgtggcgcgcggacgacggctgcgtggcgtggctcgacgggcagccggaccgatcagtcgtgtacgtgagcctaggcagcttcgccgtcatctcgctggagcagttcacggagttcctccacgggctcgtcgccgccggctacccattcctctgggtgctccggccggacatggtcggggcgagtcagagcgccggcgccctccgcgaagccgtcgcggcggcggagaagaacaacaaggcgcgcgtcgtggggtgggcgccgcagcgggacgtgctgcgccaccgcgccgtggggtgcttcctgacgcacgccgggtggaactcgacgctggaggccgccggcgagggcgtgccgacggtgtgctggccgttcttcgccgaccagcagatcaacagccggttcgtcggcgccgtgtgggggacggggctggacatgaaggacgtgtgcgacgccgccgtcgtggagaggatggtgagggaggcgatggagtccggcgagatcagggcgtcggcgcaggcgctggcgcgcgaggtgaggcaggacgtcgccgatggcggctcgtcggcggcggagttcgagcggctcgtcgggttcatcaaggagctcagcaatcagcatgatggacagttcatacaagcttaa

SEQ ID NO: 61716 - DNA, 423 bp, Oryza sativa
  Clone ID: PAT_MRT4530_63121C.1
ggagcacaaaagccaaggatctgttcaaacatgagtgagaacatcgtgtagtactaacgtaaaataacgaatcgacatacacacaatgtactctttattatgaaaagaccataatatgcacttatatctttcttcaagaacatagacttagtctcgaatcacatattcttactgaccagtattcagggcattcaagagatatttggaaagacatcacacactgcaactttatgtttagaattatacaatggtaacatgctccgataagaccacaaaacccactgtcaccacagttagtatgctcctacatgcttaacgagaagagatccttcacttccatatacacatcagtcaacatatggcgaccaactagataacatacctacatttctcaggctaccatcattgcatatagtcaggatt

SEQ ID NO: 61717 - DNA, 2238 bp, Oryza sativa
  Clone ID: PAT_MRT4530_63122C.1
atggtggcgcacggtgttcttccggcgaaggaaatcatcgggtggcgtccggcgtgcggcgaagcatttccaacccctaacacacatgaagtcgtggtattttctcacttcttctacggtggattttctcttccaacctcaagattttttcgggggattttggagttttataggatcagtttgcatcacctaaacctcaattccatagtccatattgccaattttgtccatgcttgcgaggcttttttgggtattagaccgcattttgccctattacgtcatatcttcttcctcaagctccaaccgaacaagagcaaaccgtgcgttgtcgggggagccggttttcaattaaggggaaccttgagccaaaaatacttctccatgcccttcaagacctcgaacaagggttggcacgcaaactggttctacgtacaaaatcctgagccagcacttcccgagtactcgtgccttcctccaacgtaccaagacacatggaattcgcttcctatgggagatgaagctgcccaggcgctcatcctgttggagcgcatgctgaaactcaaggagcaaggtctacaaggagaacagatcactcgacacttcatcaagagccgactggcgccaatcaaggaaaggtctcgcactgcttttgaatttgacggcaaaaacgatcccaaccgtgaagatccggagtcccttgagttcaagatcatgaaggagaagatgtacaagatcttttcaaccgacattgtggtcagctactcgcacctgctgccagtgataccatataacgcctttaaccctcctccagcgtcaagcaagtggcagtccaaaaatccagctgactgcccagccgagcaatctgaagccagacgtccagtcaggctctcggaaaagaaaactagtcttagcgatgacgagggtgacaacgtgggaaaagccagcagcaaagaggcgattgaaaagcaaccaaagcaggctaacccgaagaagaaaacatccagtcgccccatgccaaaaatcaggaagtcctccaggaagccatctgacatagatccttctggaaaagaccctgagccgactgacacggagactggtccctctaaggaaaccggaccgaccgccgaagatcgcccgggtgataatcaaccagcaaccgacaatgtagagaccagcaacgagcccccgactggaaaccagttggccgaagctggagtcggtgctgatcaggagcccccaactggtagtcggccgaagctgaggccaacgttgatcaggagcccccaactggcaatcagtcgggtgcaagggtctgctcgtcctcaaccgagaatcataacaggtccaatgattggcgacgaagaagaaatcctccggattcaatcagctgaagattctcgcccacccattctggttaagtggtgggatgatgaaaagcaaccgcaagggattgtaataaataaacagaaacaagacgaggaagtatccctgctcgcaaaaacgcttaatcaggccactcatctcgtaaatagaatccatcttcgaaatgaagccaagactgcggccctcgagaaacttgttccccaccttggaaccctggaaacgaccagagcccaactccacgagaccaaggagctggccaggaagaccgaacatgatctgaggaaccgaatcgccgagctccaagactccaattttgaactgagtggttcatccaaagtgcaagcggtcaagatcactgagctagaaaagcgaatcaaagctctggaaaaggacaagggcaaattgaccaagcagagggactcggctctgaaagacgtcgaagtcaacaaaatcaagaggcttgaaggagctagagatgaagtcgccaatgctgctacaccactcgtccaagccatgtttttcaatagtaatggtccgagctcatttaatgctgccgaaatctttgacaagctgagaatcgctccggatacatattttaagaacatcaaggaggctggaagtatgggtgtgagccttgcattggcgatgaccaagtccttgtacccgaagatcgacattgatgctgttgacagctttgcagacgagataagtgaagaagctgcccttgacctcatcaatgatgcgcaaaaagctgccgataagatagccactgatgttgttgagagattccaggacaacgacctcaggccgactggatctaataattctgacgatgaaaagactgaaactgattaa

SEQ ID NO: 61718 - DNA, 1047 bp, Oryza sativa
  Clone ID: PAT_MRT4530_63123C.1
atggcggcagaagcaggagcactgatgggtgctgatcgccgggaaccggaggccggcggtggcgccgccgcgttgggtgcggtcggcatagccaccgtctccgtagccaccactctggccgcagtgttccagccgccgccgggtggcctcctcgccgacaccttctaccgcctcgcgctctccgggaccttccttggcgggatgaccctggtcggcgcttcggtctgggtggccgacaacccggctgcccgccgtgccgccggcaagaagctgttatacaccgccatcccgccgctcctcgccgccatgggtttatcggtggtggcgctgctctgcaatgcgacgaaaaagttcagcgagctcgccgcctcctgcaagtggaaccttccctggctaagaaggaggaaggaaggaccgaggtcttgtataattttcttccgcgggcggcggctacggccatggagatctcgcgactcgcgggtcgcggccatgtgccgcctgtggggcggtgatgcggcgccgagatcccgctcgtccacggatttccggtcgccatcgccgggattcgtcttctccggccaacccctcgccgcgccgcccgtcctcggccaggatctggtcgggatcgcttgtggtaggaagcgactgcagcagcgagagagagaggaggttgtggtggcggcgtcgaagcggaagcagcaggtggctgctgtggtggtgagggagaggaggctgcgagacgacggcgtggaagcaacaacagcagcaggcggtggcgttgaagtggaaataataggtgattgcagtggcggtgatggagatgaggttgctacgacggcaagggagaggaagtggcggcatcgaagcaacagtagtaggcaacgacgaggaagaggaagtggcgacatcgaatcagcagtagcaggcgatggtagtgacaacatcgacgcagaggaatccgcggatactcttgatggcttcctcatctccctcctctcttcctcgccggccatcgaccgtgctactgccttgcttgacgatcactag

SEQ ID NO: 61719 - DNA, 288 bp, Oryza sativa
  Clone ID: PAT_MRT4530_63124C.1
atggacagcgtgaaaacgaactgctacagcgtcgggatggacataagtcgcaacagtcggggaggaggaccacagacggtggccgcctcctgggagatgaggtggagggcgtctgcagcctcccagatcgaggagggcgagtatcagattggacgccgtttggaacagcgtccacaggcggacgctattgacaactacacggtttttggccgctactcgagcagtggtgaggcgggaggaggaggaggtagcgtagaggcgggggtggaggggtcgcccctgccctag

SEQ ID NO: 61720 - DNA, 541 bp, Oryza sativa
  Clone ID: PAT_MRT4530_63125C.1
aaagacaaattcaaccatgaatattgatccctgcacccagcaaagacagaaaattaatctaccatacaatgatctacttaagttaagtgtgcaccttcatgtcacaaaatttgtgccaccccaacatacagaaatatagtactatgcatttggatgttggcacggtgaagatgcaaaaaaacaggcaataactttagaacaccgcgacaccagcattatcaacagacacctcggtcaaaaaaaactacctgcaggtcgatgcaataataaatgggattgaaatgatttgggttaaacgaaagaatgttgcgaacaaatcttttcatcacatcgaaactagacaagcgggttgtttcttgacattcgacatcagtcacctgcagctcgtcgaaatcttcaaatctcccactcatccttcctgttagatcagaaagtatcatcacaccaagtattgccctttcaatgatttcagtgtcatccacgacattgtctcaaaccaccaccagcgctatctatctatgccgccgcatttcggcctttc

SEQ ID NO: 61721 - DNA, 570 bp, Oryza sativa
  Clone ID: PAT_MRT4530_63126C.1
gggacaagcaaaaaggataaatattcatccatttctcaaaccaccacaagaggggggggggaacccaaaatcgggggggatggggacaatttacagcaacaggagtcgggaaaacggggcaaaaacaaaacaggcagcagcaaagctccccttttcatttccacggaatttttacacattgggaatccagggaaaccgagccttccctcccgggggggggggggccccggagcccgaagaaaaaaaggggcagggggggcccaaaaaccggaacgctccccggcgtcgggaaaggagggggggcaaatgttcgggcggctgttgaggagggggttaaaaaccttgacaaaaaagcccatggggggcccgaagtcccccttgtacgggacccccagggcaattacgggagccattttgggaacagccttgggaggaaaaaccccttaaagccttggaaccacccatgggttcaccttggcttcacttaacccggggggagcccatggcaaaaaactctgggggccacggggcaacgtatgaacgaccggtttgggaccagttaaaagctcc

SEQ ID NO: 61722 - DNA, 345 bp, Oryza sativa
  Clone ID: PAT_MRT4530_63127C.1
atggggcccatttctcagatcacctcgtccacctcgcgcctctccaacgccgccgccgccgccaccgccaaccgccgcacaccatggccctcgcgtgtgcgtctcatttgcgccgcctcggagccggagctccggcgagatccttccacgcgcatccgtaccaagcgtgattcctgcgcggcagccaaggtcggcgtggtggagttcctgaacggggtcgggaagggggtggagacgcacgccgccaaggtggaggaggcggtcggcggcgacctccagagcctcctccacgcccgcactctgcggctcaagaagctcggcatcccctgcaagcagatgccttag

SEQ ID NO: 61723 - DNA, 1751 bp, Oryza sativa
  Clone ID: PAT_MRT4530_63128C.1
atggcctcgcttcagtccggcggcgacgcggccgcgaacggcgtcgacgccgacgtcgacggcgccgcgtccccgccctcggcgaagcggccccgcgcgggcgcgggcgcggcggcgatcacggacgccgaggtccgggccgagttcgcgcaccacgaccgcgccgtggcgcgcctgaacaacggcaccttcggctgctgcccggcgtcggtgctggcggcgcgggcgcggtggcagcgcctgttcctgtcgcagcccgacgcgttctacttccaccacctccagcccgggctcgcccgctcccgcgccgcggtcgccgcggccgtcggcgccggggacgcctccgaggtctccctcgtcgacaacgtcaccacggccgccgccatcatcatgcagcacgtcgcctggagcttcgccgagggggacttcgcgcgcggggacgtcgtgctcatgttcctctacacctactgctccatcaagaactccatccacgcgtacgtggcccgcgcgggcgccaccgtcgtcgaggtgcccctcccgttccccgtctcctccccggacgccatcgtcgccgagttccgcgcggcgctcgcggtggccagggacggcggtcgccgccgcgtccgcctcgccgtcatcgaccacatcaccgccatgcccaccgtcctcatcccggtcaaggagctcgtcgccatctgccgcgaggagggcgtcgacaaggtgttcgtcgacgcggcgcacgccgtggggcaggtccccgtcgacgtgcgcgacatcggcgccgacttctacgccagcaacctccacaagtggttcttctgcccctccgccgtcgccttcatccacacgcgcaaggacgaccccgtctcctccaagctccaccaccccgtcgtctccagcgagtacggcaacggcctccccatggagagcgcctggatcggggtgcgcgactacagcgcgcagctcgtggtcccggacgtcgtcgacttcgtcaatcgcttcgacggcggcgtggaggggatacgccgccggaaccacgacaaggtggtcgagatgggcacgatgctcgccgccgcgtggggcacgttcctcggcacgccgccggagatgtgcgggagcatgctcatggtggggctgcccggctcgctgggcgtcgggagcgaggacgacgccgtcggcctgaggacgatgctgaggaagcagttcaaggtggaggtgccgctctactacaactccaaggcggcggcggcggatgcgccgccggagatggtcaaggacggcaatggcgatccggtgacggggtacgtgaggatctcgcaccaggtgtacaacgtccgggaggaatacgaggcgctcagggacgcggtcgccaagctcgtcgccgacggcttcacctgcagaaagttacggcctcctgagaagatgacatgcaaacaacgaggggatgcccccttgagggatgaaaatccacatcctatagtaattgccaaattgctaccatagaatcttagttgtggcaagtggcagttctccttgcctcctcgggcgattggcaccttcatgttcagttgatatagaatacattctgaaatctgaactgaaagtctgttcccccttcatttttgagctgtaaaaaaaaatgtaagaataatctgaacccggacttccagagagctttgcagctgttgtagatctgactgcacgactgtggtatatattattgaggacacctttgtaaaaaaaaaaaaaaa

SEQ ID NO: 61724 - DNA, 1357 bp, Oryza sativa
  unsure (1)..(1357): unsure at all n locations
  Clone ID: PAT_MRT4530_63129C.1
gggcgcggtgggggttagggtttccgcgggggggcggcgcgggggctcgggatccatccatggcttggcccacgggatgcctcggcttcgaggccgccgccgccgtctgccccgcggccttccaggcgtaccagaagtactacgatattgtatcagcgttttcaaacgtgaacacacgagaaggattggctgagctttcacaagttatagatggcatggaaggattgagggatgcgatatttagtgacatccccaagctcatgtcagctcttgacttagatgatgctcaccgattcagtatcttctatgattttgtcttcttcatttcccgagaaaatggccaaaagaacatctctgttcagagagctgtgggagcatggaggatggttctaaatgggaggttttggttgcttgacaggtggtgtaactttgttgagaagtaccaacgttacaacataacagaggatgtctggcagcagctgctagctttcagcaggtgtgtaaatgaagatttggaaggttatgatccaaaaggtgcttggccagttctagttgatgattttgtggagcatatgcacaggatttataattcctgtgattgctccagtgcgatggaatcacaattgaacatttccaatacatttggaggaataaatccattacctggatcaaagaggaaatgccctactcgtcttaaacctaatgaggatgtggacctttcggataattttacgcgctcagtccatcttgcgcctctgaaacggctgaaggagagccctgtcattactaagtatggagtttgggaatacaatgcaggtactcctttggttcacagtccatcagattattgtgatgatgcaaatttgcacaacccaagaggttgtcttcagaactcaccttctatcgtcgaagattgtttgtcaaaaggatttgaaggttgcatttcaatgaaatgctcgttttaatataatcaggaatacatggcttattcacaatgacagtccataaacttcatgattttccagtgtgagcattctgtatctgtaattagtcaatttttgactggtaatattattagtctgtaccctaatgatgccattatgtacttgagacgaaatatgtgcaactgacgtctctgctgtaactgaagactgtaaccctttcttgtagatcattccttctaccgttttatcttgcctgataggtaatgttagaactttgtattgggcacactgcaataaaatattggcaagtgcgagtggtaagaggaaagtncananntcaatnatctngcnncnatcctnaaacggtnctactgtctgaatattctaatccatcattatatcctttctggang

SEQ ID NO: 61725 - DNA, 317 bp, Oryza sativa
  Clone ID: PAT_MRT4530_6312C.1
acgcgtccgcttaatacaatgatatacaagccttttacgtattaaaaagaaaaaggttcatattacaactctcgcctggctataagagccgcagggtgccttagagttacaaagcggatgtctcgcgataccgtatgaaaaccttttttttaaaaatttctcagccaatataagctggactagctcctattcacgcggaaggatccaattaacagctttctctctgctgctgccaccatacgctctcattaattgtctgatgctctcattgcatgtgcaaaatctattgtgctcacacttgttgccgatcactttta

SEQ ID NO: 61726 - DNA, 174 bp, Oryza sativa
  Clone ID: PAT_MRT4530_63130C.1
gatgttgcttacaaacctgaagaaaaatttgtgaagacacgtaaatgtgagcctgaagctggtgcgaacgttgtcaaatcttgtgaaaggttacgggatgagaaaggtagcataattgagcatacagaagtgagaagcatttccccttgtcacccttattatctcactgtctaa

SEQ ID NO: 61727 - DNA, 999 bp, Oryza sativa
  Clone ID: PAT_MRT4530_63131C.1
ggtgaattcatggacagctatgttaatttgttgggttcaaacattaatgtagaaacttgggatcctagtcaaaattctcccccaactggacagtagccacaacacagtcctatggttagtgaacaaccaagtgctgaagttggtgggatcctctagacccaacaataagagatcaaaaaaatttagcattgcggaagatcaaatgttggtgttagcttggctgaatacaactttagatgaaatcacaggtgatgagcaacatcgtgactcttattaggcaaggattcatcaatacttccatgaaaacaaaaaattcccctcagatcgtaaccaaaattcacttaacaaccattggggtaccattcaagaacaaattaacaagttttgtgggtattatgagcagattcttaatagacctcaaagtggaatgactgttcaaaattatataactcaggcttctactttgtacaaatcataacagaagaagacattttttaaatgcattgtcgggagattttgcatcatcatccaaagtggaatgataggttgtcccagaaaaagccgaaggctcacatcgatcctttggtgagaccatatgcaagcacaaactttagtgaatttctttgcagccccgacattaatatctctcatcctttggtgagaccatccgggaaggtggaaaaggcataatgcacacgaggtaatacttcttcatgctcaagtgagagtagtcttgtagttattgcattaaataacatgtggtcagagaaaaaggatatgagtgcacaatctagggaggaaagaaatgactggttggctgaagttatttcacttgagaaagagaggttgaaagtagagaaacgaaagttagatttataaacctatgaaagagaaaaaagaattatgaatatggatcttagtgctatgtatgggccaagaaaagcatattacttgcgtttgcagcaggagataatatcgcgtcatatggatttagttcat

SEQ ID NO: 61728 - DNA, 242 bp, Oryza sativa
  Clone ID: PAT_MRT4530_63132C.1
tgcattccgaagctaaaccttgtggggtttcttttggccttacttccgttcttttctctgagaagatttgactacggattattaatccatattattacgagagacaatgtggtcgaatttacatggagggaggctggttcagaggagccaagtgttacatttcggcggatgcaggcttaaggttcttgttagggctgcttaacacaaattcgctggtggccttattataccttaggtgatgg

SEQ ID NO: 61729 - DNA, 246 bp, Oryza sativa
  Clone ID: PAT_MRT4530_63133C.1
aaagcctcgtctccactcccctcccctcccgcctctccggatcccccgcgcgccgcgcgcgccgccgcggtcgatacccctccgcggagcatggctgagcagactgagaaggcattcctgaagcagcaaaggttttctcagctcaaagaagtctggcaagggtaagagcaggtaagggtgcaacgtttctggagagcattggccttggacttcaagcttccagggagcatttaagggacatacatt

SEQ ID NO: 61730 - DNA, 180 bp, Oryza sativa
  Clone ID: PAT_MRT4530_63134C.1
aagctttttttttttaaaccagaaatcaaatgggcctagattaatccccaagaactgagccgtgatgcccatcaacacaaggccggttgggctagttcacggacagagtgacgtgataatttggtgtaaggcccttcacagtctcctacgtggaggggtgctatgtctacgtggaagctt

SEQ ID NO: 61731 - DNA, 422 bp, Oryza sativa
  Clone ID: PAT_MRT4530_63135C.1
ttttgctgttgtccggcttcctattctagctaattcttcactaaaccctcagcattagtgctcgaaataaactgctcctgaagttattcagggggaagtcatacccaattaatttaaagcactcgtcttgaaatccacattagaaattcatgtatgtcagtaaaaaatcacaattgcaccttgatacatttgcagtgtttggacccctgggttgttgctggttagctccacttatctatttacatttccttcagtcctagactcatatcctgcttctcattcaacgctgttaaaaactaaggtggcattcaaacaagggtcttgacattttcctagtcttgagcaagcacacatttttttcccgtgatttgagcttaagacccgtgaatgtaatgttgtcttcccttgtttttttgttcctt

SEQ ID NO: 61732 - DNA, 549 bp, Oryza sativa
  Clone ID: PAT_MRT4530_63136C.1
taaatgcttttttcctcaatgtacaaatcatgttgcctcactgtgatgctctgctcatccattacattggttatatgccaattgctttacttctttataactccattgatgcggtagctaatgtcatatgctcgcaatatcttactttttaccttctttgatctaataaataaagtataaccttggtctttttataaaacaatccttttccaatgagcacttatgataactatgtacctccatgcttgaaatagaagatcatgcctttattaacagtatatgcttatgagaactgacattaattttcccttaggaatagctggcttcaaaacccatgccttttttccccataacgacaagtttagatgcatttttcatcctttcttgcacagttctactggatctgaacgtaccactgggtattttgtacataattcaaatgcgacttaatgtttgcataaaatcagtctccattgaagtgaggtttaatatttatgaaatatattatagatgcatgggcatgatgtgctgtaaatttagaggggttag

SEQ ID NO: 61733 - DNA, 1414 bp, Oryza sativa
  unsure (1)..(1414): unsure at all n locations
  Clone ID: PAT_MRT4530_63137C.1
atggggacatcacaaggtgttgggatactatccatgccttacgcattgtcccagggaggatggctgagcctagcaatcttcataaccatagcagcgatctgcttctacacggggatcctcctgcagcgatgcatcgactccagctccctcgtcaagacctacccggacatcggcgagctggcgttcggccggaagggcaggatcgccgtcgccgccttcatgtatctcgagctctacctcgtcgccatcgacttcctcatcctggagggggacaacctggagaagctgttcccgaacgcgagcttcttctcctccttccacaggatcgccggcgggacgaggcaagggttcgtgctgctgttcgcgctgctcgtgctgcccacgacgtggttccggagcctcgacctcctggcgtacgtctccctgggcggcgtcctggcgtccgccatcctcgtcgcgtccgtgctctgggtcggcgccgccgacggcgtcgggttccgcgagggcggcgtggcggtgaggtggggtggcgtcccgaccgccatgagcctgtacgcgttctgcttcagtggccatgcggttttccccatgatttataccggcatgaggaacaggagaatgtttccacatgtgctgctcatctgcttcatcatctgcaccctcgcctacggcgtgatgggcgtcatcggctacctcatgtacggcggctcgctccggtcgcaggtgacgctcaacctgccggcgaggaagctgagctccagcatcgccatctacacgacgctcatcaaccccttcaccaagttcgccctcctcatcaccccgatcgccgaggccatcgagggcgtcctcggcctcggcaccgccaccaccggcggcaagccggcgcagtacagggccgcggccgtgagcgtgtcggtgaggacggcgctggtggtgagcaccacggcggtggcgctcgccgtgcccttcttcgcctacgtggtggcgctcaccggctcgttcctcagcgccaccgcgacgatgctgctgccgtgcgcgtgctacctccggatcagctccagggcctccgggaagctgggggtgctcgagatcgtggcttgcgtggggatcatcgtgcttgggttaggagtgatcgtgataggcacttacagctcgctgaaacagattgtgcagagcttctgatcatttatgggcaaaggtagtaggagatgagcaattgggatcagctactgaaaattgacatatactagtcaattcgataccactgattaggacaggtggtgtcaaccatgatgttatgcataaatcacttgagaaagaaatccatatgccgtgtattcaggtaggaagatgattctactngtggagattgatttttttttcaaaaaaaaaaaaaaaaaaaaaaaaaaaaaaa

SEQ ID NO: 61734 - DNA, 570 bp, Oryza sativa
  Clone ID: PAT_MRT4530_63138C.1
ctagtgcttcaggtagaggtcgatctcgacgatgccaccggtggcgaggctgtagtcgtagttcttggtgaccatgtacccgcgcgcgagccggaaccgccccgtgccgccgatcaccaccgactcgcgctcgccggcgtccatgtcgatgcggcccttcgccgtcaccgagctgccgcggtgctcgccggcctccagcaccatgtgcaggctcaggtccgacaacacgccgccctccgacacccgcaccgcgaacccctgcgccgtgcccacgcgcgcgctgccggcggatggcccctccgtcagcgcgttgttcagcgccacgatgtcgccgaactgccgcggcggcgagccgtcgtcgccgttgccgttgccgttgccgttgtcgccgtcgagcagggagcggccggagacgacgcgcatggcggtgggagccgggccggtgtaggcgtcgtgcatgtaaaagtgaaggtgggtggtggtggtggtggtgaaggcgccgttccggtggaggaagacggcggctgcgaggaggaagcagccgacgaggacggaggagagggacgccat

SEQ ID NO: 61735 - DNA, 219 bp, Oryza sativa
  Clone ID: PAT_MRT4530_63139C.1
atgggggtgggtgattttatttggatttatatgacaaaaagattcaactgtcacgcatgaagatgcatgactttatttttaacattcgaaccattatactatgacaatttagtaccacacaccaccaacggggggaatgctcctcggagcaatgtagtaggtaggatagataccacatatggatggcaagattaaggccaacaaagccccacgcgtggg

SEQ ID NO: 61736 - DNA, 3199 bp, Oryza sativa
  Clone ID: PAT_MRT4530_6313C.1
ttttttttttttttttcaaacaacgagcacaaacttcattcacatttgctactacctcaagagtacaaaaaaagaatgcaccgcgttacgcgttaatgcggggggatcacatcatcacaagctgcacgtggaaactttctcatgtgcaagccatacatacattcacttgccttccgtgaagctttccattttacttgatatggaaaaagttaaaacagaaacgtgcaaagaaaagtgaagtcagctatggacatatggacctacttttccagcacaagattgtattggcttttgcccccagtggagaatcgagcactccacggtattaacttcacactggagcattcgtagggcctggtgttagtcattctttgagtacccagctttcacattcatcaaaaattgtatagagatggttgaattaatcatgacaatctgcagatataagcaaccttgactactatcctccgatcagtttatcactgggcgtttgttcatcatcaatatcaactgaggagacagacacggccagttcatcaaactcatcggtaagatcagtctcaggttctggttcagtagcatctgccagtgcgctcagcatggtgaccacttcaaacgtatcatccaggtaaaatttggccttgcttggtttttgtcccacagtgcatgcaaacaatgatgtgtttgtagcaaccataccctttttaatggtatcagcaatgttttcaaacatgtcctcatccgacctgtcatcaccaatgcataatacaaagtcagcctgctttcctctctccttcattgagacgagtatcttctcagctactactcccttgcttactccctgaggtttgacttcaacaatgaactggccacttttgacagaaacaggttcatttgctaatacactttccagatgatcaagtaactcctttgcctgggaggatccaaatcctgggtcagcatcctggtgatgccacaccaaagcactttccttaggatcaatgtaagatccatcagttgcttctgtatacagattcatcactggcttggccatttccatccacccgaagtcagaggtctgggtacatgtttgccactcttcgtctctagtccaccttaagaagtaaccatgctctgctgcaatgcccagatctggacaagaggaaaaccattctcccaatttgtccctgcgtctcccactgacaagaaaaactttgttcctcctatctgagcacagggtattgatgatcctcaaaacttccgcactaggtgtcctactgatggaagtctgtggcaccagtgttccatcataatcaagaaatatagccctactctctgaccgctcataagccataacaattgaatccatgttaagctttgtgaaatggggatctaaggccaccaccctaaaaccaaaccccaacccgatgccccaacatgtcctcctgaagtggtccttgcaagccctctccaaatcttggatgaaacttttcgaccaataagcaacatcgtgggtgctgacataacggtaatgtttctcatgccttaggtgtttctcctgttccgacattgatatggcctcattcagtgcctctgcggttgcctctatattccatgggttaacccggatagcaccactcagagatggtgagcacccaatgaattctgataccaccagcatgctcttctttggtccattcacttctgatgtggagtcagacccctgcctacagacaatatattcatatggtgtcaagttcatcccatccctcacagcagtcaccaccacacattctgctattgtgtagtaggcaatcttctccacacttgacacatcacggtcaatgaagacaacagggctgtatcctgactggccaaactctccattaatcctcttgcagctctcatgaatctcagcctggatggcttcaagatccttaccctttccacgggccggattagcaatttgcaccaacactgcccgcccctgccacttgggatgtgtcctcaacatattctcgaaggcaagaagcttcaagttgatacccttgaagatatccatgtcatccacaccgagcaacacagtcttcccctcaaattgctgctgcagctcggagaccctccattccctgtcgggcaagctcagaaccgtcttcaattgacccatatgaactcccactggcatgattttgatcccaacggtacgcccaaagtaatccaacccaatgtatccacgctttgactggtattcaattcccagcatcctactacaacaagagaggaaatgtctggcatagtcaaaagtgtggaatccaataaggtcacaattgagcagcgcctttaggatctcctcgcgaacagggagggtccggtagatctccgacgaggggaaggggctgtggaggaagaagccgatgcgcaggcggttgaagcggcggcgaaggaaggtgggcagcgccatgagatggtagtcgtgaacccatacgtagtcgtcttctgggttgatgacctccacgaccttctcgaagaagaacttgttcgcgagcacgtaggcctcccacgcgccgcggtcgaagtggccactgccggatgaggatgagggggaggaggaggaggaggaggaggaggagggactcggggatgcggaggaggagaaagggagcatgtagtggaacagaggccataggtggcgcttgcagaagcggtggtaaaaccgttcgttgagggggtcggggaggaacaccggagcacatcggaagcgatcgagcagcgcctgggagacctcttcctggtcggcgacggggatttcggcgcggagggaaccgacgaagaacacctccatctcatcgggaatgccgtcgcggagctggaggagcagcgagtcgtcgtcccatgagaaggaccacccgcggccgtcgggacggcggcgtgcgacgacgggcagctggttggagaccactatgactcgatcccccgccaccgacgagggcacgtcggaggcgacgctgttcgtcgccgcgtgctccgagtcgtcctccccgtccagctccgacagcgtcccgggcaccgtcatcacccgcgacatccgcttcagcccgaacgaccccgacctccgcctcccgccgccgccgcctcccgggcccaacgccgcgaagttcccctccgcgagatcgagaaggttggtgtacgaccgcgacat

SEQ ID NO: 61737 - DNA, 168 bp, Oryza sativa
  Clone ID: PAT_MRT4530_63140C.1
atacaacggctccctcaattgtcaaaactggtgcaacataagtcccaaggtggtttggaaggccattttggtcaatgtggcgcctacgtgttctgccatgcctacgccgccggcaacatcgccgccatggcaaccaccactaccaccacaaatgttgcagcaactggg

SEQ ID NO: 61738 - DNA, 272 bp, Oryza sativa
  Clone ID: PAT_MRT4530_63141C.1
gtttttgagcggtctcctcatcgcctccgtttgtgctttttttatttcttttttctcgttgatcggtttgctcgatcagatcggttctatggagagatggagcagtccttcatcatgatcaagcctgacggcgtccagagaggcctgattggagacattcatcagtcaggttcgtcaagaaaggtttttacctgagggggatgaagttcatgaaagtggggagggcctttgcccagcacttctattcccacctttacgacaagcccttcttt

SEQ ID NO: 61739 - DNA, 669 bp, Oryza sativa
  Clone ID: PAT_MRT4530_63142C.1
caatgtattcgaattgccatgctcacggttaatgagcgccgagacatgtactacccttgattagactcatagattctaatattgcatagtgtagaaatggtgagacatgagaaccttgcccaatgcgtaggaatgttattatgatagagttggtataaaatgaatgtgagggtaaaccgaaccaagcgaggcttggagaggtggatgaaccctggaaaattacaacttcaacattaacgttgtttttcaattaaaactgctaggtgaattgtgaaaactagctttatgcaaataaaccaagccatccttgaacccctgtgtgcattagattcattttgtagtggcggcttgctgagtacgtatgtactcatccttgctcaattaatttttttagaaaggagttggagtcgattatatttatgccatgctgctgtcaagtacgtgacgatggattagggaccataggttcaccagtcgttgcctgtggaattcgatggaccgccgctgcttcgcttccgctatcctatctattgctttcggtattttgtattgtacatgaccatgcttggtctattttgggacccgtttgggctacccttgtattattattgtagaaacacctgtaaacgatgtcagctttgtgatatacaactgtgctatgtgtgtacc

SEQ ID NO: 61740 - DNA, 509 bp, Oryza sativa
  Clone ID: PAT_MRT4530_63143C.1
cggcggtgcagcgaagacgcgggggcggcgcgcggcgcgcggcgcgacccggaggcgacggcgatggcacggcgctctcctccggccgccatcttctctccgattgcacgtgcacccattagagttggagaagaccaacctcctctttcctgggaccttgtaccctctccttcctgggatagtgttgtgctctaggaagatggcaaagaagaagaatccaattgtctttatggatgtttcgataggtgatgaacctgatgaaagaatgttttttgaggtaccatgtggctctagctatgtgcttcattattactgtgttgtcaaggcagaattgtgcttccacacattctaattttcagagagagaaactagaagaaggttgaggtggtcatccttttctacattcaccatatatctgtctatccactttatatgatttctgcatcctcttaaaattcaggcaactcaagattcacatatgttatacacttgagtctggaactttgcgc

SEQ ID NO: 61741 - DNA, 220 bp, Oryza sativa
  unsure (1)..(220): unsure at all n locations
  Clone ID: PAT_MRT4530_63144C.1
aattccaacatgtncacatcaaacattcaatataagggcaggcaataccctggctggtttttctatcataaccagaccatggaaaatactcatactaccattctaaaaatgttctgcaaatacaggaagtggttgaaagttactaattaactagtaaataagttacgcaagcaatgtattttcacataaactatgttcaatggttactttaactagacac

SEQ ID NO: 61742 - DNA, 474 bp, Oryza sativa
  Clone ID: PAT_MRT4530_63145C.1
atggctacaaatataatttttgtgggacaaagccttggagttagaaatacaatttttttgggacggagtttacagtctcctcggacaaggaaccagccgacatgtgggcccgcgcacagtgtcgtcctcctcctctcgccaacgctcaacgtcggccgccccttcttcctctgcccgttgcctcagagtggcagtctctccatctcccctgtctccgccgtgtccaccggcaagtgtggtaggtcaccgtcgctgccgagcccggtcatcagcgagggcagggatgttgaggacgccgaccccaacctgcctggcttcttcaagaacccctcccgcctctccgacaacgagataggggaagacgggttgcctcttgctgccgagcctgatggatttcttggacatgacgaggggggcgatgcgccgtcagaatttgatattgccgctgaattggacgatctggacatcgcttga

SEQ ID NO: 61743 - DNA, 180 bp, Oryza sativa
  Clone ID: PAT_MRT4530_63146C.1
atggcgcacgtgatgcatatcagggccaacgtctatcttgcgatgtcgttctggagctccttctcctcttcggttggtggctcgggggccgggaaggacctgacagcaagtggctcaggggttcggtggtgggatggcaagcgcatcaaaggcggcgtggcttgccccctagtcacctaa

SEQ ID NO: 61744 - DNA, 111 bp, Oryza sativa
  unsure (1)..(111): unsure at all n locations
  Clone ID: PAT_MRT4530_63147C.1
cctgggaggcgttattcgaagtaccatgccgaaaatgagccctttcctggttcggttcgntgtttttttgccccgctgattgattcgctcgggctcggaccactccaatgc

SEQ ID NO: 61745 - DNA, 367 bp, Oryza sativa
  unsure (1)..(367): unsure at all n locations
  Clone ID: PAT_MRT4530_63148C.1
cctcggcaagtccacgccggcatgcccgtcgcccgccgctccgggcaactccagcttcggcaacgtcagcaatggcggnaggatcaggtgcatgcaagtgtggccgattgagggcatcaagaaattcgagacctctcctacctgccaccgctcaccgtggangaactcctgaagcanatcgantacctgctccgttccaaatgggttgccctgcctcganttcancaaagtcggattcntctaccgtganaaacacanatcccccnggatactacaatggcaagtactgggancatgttgaaactgcccatgtttcgggtgcactgaccccacccaagtgctcaangaactccaagaaagccgagaa

SEQ ID NO: 61746 - DNA, 403 bp, Oryza sativa
  Clone ID: PAT_MRT4530_63149C.1
ggggcaaccccgggtaaattaatacccgctggatgatacaaattgtttaagccttacccttgaaggcaccccggggggttaaaaaagagccaaaaaatttatggggggaacctgttaccccccacattaaaagtttttaacccatcggggccccaggaaacgtccactttccaaaaaaaagctaacactatcttgccttggcctaattcaaacttttttgaaaaaactcaagctgaaccctggataactcaaggtcctcttttatgaaacaaattcgtatctgcatttgggaaaaggtggggtgcttgaaccccaagctcaaccttatgctgttgtttgtttgccagaggaaagggaacttccggggggttaaaaacaacagttttaaaaaaaaggagggtgg

SEQ ID NO: 61747 - DNA, 3354 bp, Oryza sativa
  Clone ID: PAT_MRT4530_6314C.1
atggagggctatacatgttgggtgaagcatggagagcaagaatcaggaagtggagcagcagcagacagaagtggtccaaggcaacccggcaatgatatcgatgtattcctggagcctgttatcgacgatctggagattctttggaaagaaggtgtggaaacttgggatgcatatggtcaggagaacttcaagctaagagttctattgttctgcaccattaatgactaccctgcactcggtaatctttccggacaaactataaaaggaaagaaggcatgctccgattgcaaggaacatacacgaagccggtggctgaagaaatcacgaaagatgcctgctcccaaagatttgtccggagatgaggtccacaatatggtcaaggacataagcaatgagtttgggaagaaaagaaaacgtagcaagacaaaggagaaggaaaagaatgtgtgtgagagtttggttggcctgatgttgaatattcccgggaagacaaaggacgggttgaacgcgcgccttgatctacaggacatgaatattcgtagcgaactccagcccatacgagatgcagagacaggtaaagtgtacctccctccagcctgccacacactgtcgaaggatgagaagatcgcaatgttatcatgcttgaaggatattaaagttccatcgggctattcagcgaggataagtaagtatgttaaattgaacgatctaaaacttgttggaatgaagtctcacgattgccacatgctaatcacacaaatcttgccagttgctatcagaggcactctaccaccgaaagtgcgtcacacgatccaatgtctgtgcgccttcttcaatgcaattggacagaaggttatagatccagaagatctagatgggctgcagaccgatattgtgaataccctctgtcacctggagatgtttttcccactgtctttctttgatataatggttcatctccctgttcatctggtgaagcaaacaaaactatgtggcccggcttttctaagggaaatgtggccgtttgaaaggtacatgggagttctaaagtcgtacgttcgtaacagagctaaacccgaggggagcatcattgaaggttacacgaccaaggaggctattgagttctgtgtcaattacatgttcgatgccgatcctatcggagttccagcgtctcgtcacgagggaaggttgtcagtttcccgcctccttagaaccctagcgccgccgccaactcctccttcaccgccgtcgtcctccctcgccgccaccaccaccgagaccgccgccaccgccaccgagcccgccgccaccgccgccgagcccgccgccaccgccaccgagcccgccgcctccaccgagcccgccaccaccgccaccgagcccgctgcctccaccgagcccgccgccaccgccaccgagcctctacaccgaccgacgtcggccttcctcgtcgtcgccgcttgcctcttcaccgacacgaacagcagcccccaccgaggccggcgacgtccttcctcatcgtcgtcacctactcctcaccgacgcccgacgccgcccgcccgacgccgacctccccgatcggcgtctacaccgaccggcgccgccgccgtgaactcctccttcaccgagcccgccgcctgcaccgagcccgccgccacctccaccgaccggcgacgccctccaccgagcccgccgccgccaccaccgagccccccccccccggccgacctcatgtctatctgcggggtcatagggaggcagaaattcattattctgcaagacgacttcaagctcgtgccggccgtagagaaggacattgcttggctaacgttcaaggagagctttgattatcctgcggagcatgaggaccgtctcaggcgggctgctttcaaggttatgggcactgcttggaagaacttcaagactaagctagtcggcgagttcgtctacaacccggcaaatccagatccaagagagaaatttccttggatcacggaacaggtctgcatccgcaccggcttggtaccgccggatatgccggtaaggaagaggaatggcagcgtgaggatgaagaagcgaaggaatcgtggtacaccgctcgtgtttggcgatatcccacaccctcgggctaggaactgggccagggctaggtaccagaaacatgatgatggcacaatcttcatgccaaataaggagttggttgccgagcaacaagcctcgcaagaggcctgctctcaaagacgcgaggacgacctcctcacgaaagcgttgggcaacaaggaacaccgtggacggacacggggcgttgggtcttctgttccctggaagtatggatttccagactacgcgtggcagtacaagaagcggacttccaacaaggcgaagaaagatgcacgccttgaagccaagatccgggagtcgatacgagctgagctgacatctgaattcgacgaaaagctcgagtcgatgagggccaagattagcgccatcgaccacataacggaaccaacgagctgcaccctcacagttagggtgatgccgatcttcactgttccagcagccgagggacttgcgtacaagccgaccccagagacaagagtgcatggagcgcaactcagggccgactgtgcaaaagttcaagtcgactcggtgaagcctgaatacgagctgttccctctgaagtatccaccgaacgacgaggtcctctcactaggaaatgcccgtggtaccttcatccaatggcctaaggacctcattgagatcagggttacagcgaggccaaccactgcaccaggcggtcgtccaccaaagagacccgcctctgctccttcagcccctcctgctcaagatcgtcatgcacaatcttacgatgtgcagttgcagtacgacacggatttcggggaggaccgaacggaggccgacagcaaggcgattcatgaacccccaccgatgaagaagagcaggaaggcacactcttcccctcagagaattactctcgataaacccgaagcaaaggggagaggaaggggaggaaaggtgcaggcctcgcttctagctccaagaaagctagatctgggcaagggccaggaagagactaagggcaaagaggtcaagaagaaatacgtcactccacaggagttccaactaggcatgccattggttggagatgacgtgcttgccgcaatgggcaccgcttgcaaggaccttcacttatactacatggagaaatctaacgccaggaagccaagtaaagctaccaatatccttggacagcacgatggaaagcctttccttggtccaacaaattatatcgtggtcgacttcaaggatcttttcgacctctacaggctctga

SEQ ID NO: 61748 - DNA, 1493 bp, Oryza sativa
  Clone ID: PAT_MRT4530_63150C.1
cctcgaggccggccgggaataatatctccggtagaggccgggccagcctgtctgacgtcacactagcagcgaagcccaagcagccgacggaatcccgaatccccacccacccgcctcctcctcctctcgtccgcccctcctccgatggcggcgtgggctgacgccgcgctgctccgcgcctcctcctcccccgcctccgccaccgccgccgcgtcctcctcctcctcgtcctgctgcctcgccaggccgcgcgcatccctggagtccaggctacaccgccgcaagagctttctttataccagtagccccaaatctggtttcctaattaatagttgtcgagcaaggagcttgaaggttaaagcaaaaatggattctggtgatggccttacaagacttgctccacttatgtttgaaactccaagcggtcaacttctggtccagatactccaatcacaccctcacctacttcctgcaacagttgaccagcaacttgaaaaccttcaatcagagaaagatgctcaagagaaagaagcctcgaaagttccccaggacctcctttacaagagaatagcagaagtcaaagagaaggaaaggcagaacaccttggaagagatcatctactgttggattatttataagttcatggagaatgacatatcaatgacacctgcattagcaccattaggtggccctgtacgtgacatctcctcattgcctaaccaagaggataggttgcaaagcatacattccccggacgctcttgagatgatacaaaatcatctcaaccttataatgggtgaaaaggtagcagccccactagatacagttgttgaaatcagcaacttaaatctgggaaagctttatgcagcatccatcatgtatggctacttcctaaagagggtagatgagcgattccaactcgagaagaacatgaagactctcccgccaaatcctaagcaacagatagtacttgaaaacctgaagcctaatccattctgggatatggaatcattggtgcaaattacacctgatggggaggagatcgatttggatgatgaagaatcaaatccaaacaagctgaggtcctatgtttcacgcttggatgctgatacgttgcaaaggtatgctactatcagatcaaaagaggccgtctcactgatagagaagcaaacacaggcgttgtttggacggccagatattaaagtcttagatgatggctctgtcaatgcaaaggatggtcaaatgataacaataactttcatagaactcacccatcttgttttggaggcagctgcttttggatcctttttgtgggaagctgagagtcatgtagaatccaaataccattttgttaacagttaattgtgtattcgttaatctggaaatgatttgtgtacactggataggataggatccagctctgatatgctttcagtatgagcgatgagcgaagccgcaacagccatggagcataaatcaaatcatccttgtcc

SEQ ID NO: 61749 - DNA, 652 bp, Oryza sativa
  unsure (1)..(652): unsure at all n locations
  Clone ID: PAT_MRT4530_63151C.1
gtnntncnactcactatagggngaattgggttccgggnccccccncgantttttttttttttttttttaanaaatgaaaaaatgancnaatcccngaanaaatcngcatcngtaaacatttctgtngccatctcntnaattattacttttatcnagggcacaaagtcngatagggtgttgcnttacaaagctattattttttctgtnctcccnactanctcctgnaatgcccncnangaacaacnggttgccngcttnntctgactccgaacaacntcntccaggggaaaaccgtnatgccnatgatggccaaggtngccattattgatccccgattcnaatgcttccctaaaaccccccnccctggtgaanntnctgaanaagngaaantttcccccctatgncctagnaanngtnnnnggccccccttnnatttccccncanaatcccctacctgggtnggggaccccctcccccaaccnccttttttnantttcggancttcnccccnctcggaatnggannaaancnaccccnccnnnncctnaaaanctcccnngaactagcncccctnatccctatattncccnctgntttccggctnctttnnatttaaagaangnngcttccctngnnccgtncccaatggttt

SEQ ID NO: 61750 - DNA, 1082 bp, Oryza sativa
  unsure (1)..(1082): unsure at all n locations
  Clone ID: PAT_MRT4530_63152C.1
cactatagaagtactcaagcttgcatgcctgcaggtcgactctagaggatcccccattatcgcatttttaattagtattgtttcaaagcgttttcgtattttgagccgtaatattcaaaattctatgggagaattgacagtcacaacggagcaaatgttaaaagggcataaagttgttctttcatttggtgggcaaaaagttgaaaaagcacgttttgatcgagtcagtaatgatatgcgtcggaaaggcatgaagatagtctctgccgatggtatatctgatggtttagtgcaattaattgcttctttagcgctatcagcagtgctttatgttgctactttccctgaggttatgagtgaaaatttaactgccggctcttttacggttgtcttttcatcaatgatggctatgttacgtcctttaaaatcgttaaccagtgtcaactctcaatttcaacgtggcatggcagcatgtcaaacattatttgagtttttagatttaaaaaccgaaaagaataatggcactaagcaggttgaacgagcacaaggttgtattacatttgataatgttatttttagttatgaaggtaaagaagagcaggcattgaaccaagtttcatttactattccacannnnnnnnnnnnnnnnnnnnnnnnnnnnnnnnnnnnnnnnnnnnnnnnnnnnnnnnnnnnnnnnnnnnnnnnnnnnnnnnnnnnnnnnnnnnnnnnnnnncttgacggtgttaatattgaagaatataccttagaaaacttgcgtgagcaatgttctgttgtttcacaacaagttcacttatttaatgataccattgcaaataatattgcttatgcagcaaaagataaatatagccgagcgcaaattattgcagcagcacaagcggctcacgcaatggagtttatcgaaaaattagaacagggtttagatactgtaattggtgaaaatggcgcaagtttatccggtggtcagcgtcaacgtttagccattgctcgtgcattattacgtaatgcaccggttctagtgttagatgaagcaacatctgcacttgatactgaatcagaactcg

SEQ ID NO: 61751 - DNA, 308 bp, Oryza sativa
  Clone ID: PAT_MRT4530_63153C.1
gcacgaggggcgaaactgctcgacaaacgaacaaaggccgcagacgaagcatttgccgcgaacaatgttcctgcgtcgcaatcgaagagtaccagtcctgctatcgaagtcgactcgaaccacaccctccacgtaaagaagctgagattgggcgtttgcaagagctttgtgaagctaagcaaagggcaggatgcgttgcgggagtgcggggcgttcttggaaatggaggagggaagtttagagggtttggtgcagcgggcggaggccaggcttctggtggaagattttgagggtgcggtcgcggatta

SEQ ID NO: 61752 - DNA, 470 bp, Oryza sativa
  unsure (1)..(470): unsure at all n locations
  Clone ID: PAT_MRT4530_63154C.1
tggccgatgatggaggagcaagatctcttgataaaacaggatatgctgaagaagatgatggtgatgttaatgcagccatatttgttaaatatgatagaatgctccatgggcaggacagaaggagaggcaagaaatccaaacaggacagactgactgtcaaattcctgaagaaatatattcattatgcaaagaaccttattcagccaagactaactgatgaggcatctgatcatattgcaacttcatatgctgagctcagggatggtggtgcaaatgcaaagtctggtggaggtacacttccgatcacagcgaggacactggaanccataattcgtctatctactgctcatgccaagntgaaattgagacatgaggttctaaanacctgacgttggagcttgcactgcagttcctggaatttttgcaatttttnccnccaagggttaacctgaggntggangtgcgttanc

SEQ ID NO: 61753 - DNA, 564 bp, Oryza sativa
  Clone ID: PAT_MRT4530_63155C.1
atggccaagaacggcaccatggaaggaagattagtggtcactagtaaggaccagtcacctttgacgggtggaggaccgtcactggtgacaatcacctctgacgggcaagaactctactggccgacagagaagctggtggcgccgtcggtggagggtttgctcatcgttttcgtcacagccgccgtcagcatcatcgtcatcgtcgtagccaccatctccgtcatcattgtcgtagctgccaccgccatggccgctcgctcccgcccgcctaagcccaccgccgccgcctcccttccggccggatctggtggaggggagggcgccatcgctgccgccgtcgggccgccattgccttccctcccgccgtcgggcctccagatctggcggagggagggcgctcccaccatccgccgcctcctcctaccctcccaccatctgccgccgttgcacctccacgccatccgccgccaccacgcctaccctcccgcgcctcccctcccgcccctgccggatctagcggatgggctggcgttgccgcccctgccaggccggcgccgccgatag

SEQ ID NO: 61754 - DNA, 378 bp, Oryza sativa
  Clone ID: PAT_MRT4530_63156C.1
atggcgtggaggtgcaacggcggcagatggtgggagggtaggaggaggcggcggatggtgggagcgccctccctccgccagatctggaggcccgacggcgggagggaaggcaatggcggcccgacggcggcagcgatggcgccctcccctccaccagatccggccggaagggaggcggcggcggtgggcttaggcgggcgggagcgagcggccatggcggtggcagctacgacaatgatgacggagatggtggctacgacgatgacgatgatgctgacggcggctgtgacgaaaacgatgagcaaaccctccaccgacggcgccaccagcttctacgcctcagacacaaacttcggatccgcccgcgtcgtcttctag

SEQ ID NO: 61755 - DNA, 1581 bp, Oryza sativa
  Clone ID: PAT_MRT4530_63157C.1
atggatggctcgcatggatcggcggcggcgctccgggcgacggggcggtgcctcgcgccgctgatcatcccggcgtcctgcgtcgtgtgggtgctcttcttcttcccctcgccgtcgccggacgtcgccgtccgccgcgacggcttcctcccggccgtcacattgccggtgcaacgcgccggcgacacgccgccaccgccgccgatcattgacgcgtcacctccaccaccgtcgacgtcgccgccgccgccgccgccgcgtcgagggcgtccggcgaggagggacaggtgcgccgggaggtacgtgtacatgcacgagctgccgagccggttcaactccgacctcctccgcgactgccggacgctgtcggagtggacggacatgtgccgccacgtcgccaacggcgggatcgggccgcggctgccgccggcggcgcgcggcggcgtgctcccggcgaccgggtggtacgacaccaaccagttcaccctcgaggtgatcttccacgcgcggatgaggcggtacggctgcctcaccgccgacgcgtcgcgcgccgccgcggtgtacgtgccctactacccgggcctcgacgtcggccgctacctgtgggggttcagcaacggcgtccgcgacctgctcgccgaggacctcgccgagtggctccgcgggacgccggcgtgggcggcgcacggcgggcgcgaccacttcctcgtcggcggccgcatcgcgtgggacttccgccgcgaggacggcggcggcgaggggagccagtgggggagccgcctcctcctcctcccggaggcgatgaacatgacggcgctcgtcatcgaggcgagcccgtggcaccgccgcaccgacgtcgccgtgccgtacccgacctacttccacccgtggcgcccctccgacgtgtcgtcctggcagcgcgacgcgcgccgcgcgcgccgcccgtggctgttcgcgttcgccggcgccgggcgtggcaacggcgacgaccacgaccgacaccacggcggcggcgtcgtgcgcgaccgcgtcatcgcccagtgcgcgcggtcgcggcggtgcgggctgctccggtgcggggcgcgcgggaggcgcgacgactgctacgacccggggaacgtgatgcggctgttcaagagcgctgccttctgcctccagccgcggggggactcgtacacgcggcggtcggtgttcgacgccatcctcgccggctgcgtgccggtgttcttccacccgggctccgcctacacccagtaccggtggcacctgccgcgggaccacgccgcctactcggtgttcgtcccggaggacggcgtgcgcaacggcacggtgaggctggaggacgtgctccggcgggtgagcgcggcgagggtggcggcgatgagggagcaggtgatcaggatgatacccaccgtcgtgtacagggacccccgggcgccgtcggcccgcgggttcacggacgcaatcgacgtcgccgtcgacggcgtcatcgagagggtcaggaggatcaagcaagggctccctcccggaggcgacgacgacgacgaccaccggtgggatgcctacttcgacacgcagtga

SEQ ID NO: 61756 - DNA, 169 bp, Oryza sativa
  Clone ID: PAT_MRT4530_63158C.1
ggtgggtcttctcggactcagacagccattaaaccggtaagcctgcatgcccgaaaaacacaacaacacccagacggaactccccttggcaccaactctactaggacggcaaaatgaagcggaagccataggcggccgggacaacccaccgactgtcacacccaaagaa

SEQ ID NO: 61757 - DNA, 513 bp, Oryza sativa
  Clone ID: PAT_MRT4530_63159C.1
ccctaacctccgcctcctcctcctccccctcctcccatgcccgcatcgagatcttagccgcgccggagatcgagagggaggagcggcgacgcgggcgcccccgatccctcctcctcgccgccgccgccgccggcggcgccggagcagcagcagccgacgacgacgacgaccgccgcagcagccgatcgggggaggaggggaggggaggacgcgatggaggcggactccgggaagctcttcgtcggcggcatctcgtgggagacggacgaggaccgcctccgcgagtacttcagccggttcggggaggtcaccgaggccgtcatcatgcgggaccgcaacaccggccgcgcccgtgggttcggcttcgtggtcttcaccgacgcaggcgtcgccgagcgggtcaccatggataagcacatgatcgacgggcgcatggtggaagcgaagaaagctgttcccagggacgaccagagcatcaccagcaagaacaatggcagcagcatagggtcacct

SEQ ID NO: 61758 - DNA, 6024 bp, Oryza sativa
  Clone ID: PAT_MRT4530_6315C.1
atgactcatcactctaccataactagggtttctcagatcggatcgaaactttttctaagtcccgctacagtttcctgcctccttagaaccctagcgcagtcgtcgttctccatcgccgagcctgccgccgtcgccaccgagcccgcggctgccgccaccgagcctcctccgccctccattcggaccgccgctgcctcctcaccgacaacccccaccgagcccacggccgcctccaccgagcacgccaccgccagcccggcgcagccaccactaaccccggtgacgccctccaccgagcccggcgccgccgccatcgaggccgccgccgccgccaactcctccttcgctgactcctccctcgccgagcccgaggccgccgccaccgagcctaccgcctccaccgagcctcggacgcccgacgccgcctccaccgagcacgcagccgcctccaccgagcctccgacgcccaacgccgcctccaccgagcctggcgcagccaccaccgaccccggcggcgccgccactgagcctgccgcctccaccgagccctgtgtcgacccacagacaatatctcagcaaggcgaatcaatgtcgacgacaactagtgggtcctcaagggcacgtactcctaggacagggaacataatccctaaggaacggttccacataacagcggtggaccaagtagggttgccgacatctccaagaaaaatattgagccgatttaggtctatctacggggtcatagggaggcagaaattcagtattctgcaagatgacatcaagcacgtgccggccacagagaaggacattgcttggctaatgttcaagttgagcttcgattatcctgcggagcatgaggaccatatcaggcgggctgctttcaaggttttgggcaatgcttggatgaacttcaagactaagctagtcggcgagttcatctacaacccggcgaatccagatccaaaagagaaatttccttggatcatggaacagaccaagaaccagcatccgcaccgccttgacaccgccggatatgccggtaaggaagaggaatggcagcaggaggatgaacaagaggaggaatcgagcacgccgctcgtgtttggcgatatcccatacccttgggctaggaactgggctagggcaaggtaccagaagaatgctgatggcacaatcttcatgccaaattcagaagatcaacgagtgtacgatgctatatacaagaagcgaacttccaacaaggcggagaaagatgcacgccttgaagccaagatccgggcgtcgataagagcgaagctgacatttgaattcgacgaaaagctcgagtcgatgagggccaagattaggcaagagatccaagaagagcaacagaaaccccaggccgccgctgctgctacgcacgaagagttaggaagtcccacccaaaaacacagcagttgcgcatcaactgagttggcggaaaatccaacatcggtcaacagcgccgtcgaccacataacggaaccaacgagctacaccctcacagttagggtgatgccgaccttcaccgttccagcagccgagggacttgcgtacaagccgaccccagagacaagagtgcatggagcgcaactcaggggcgactgtgcgaaagttcaagtcgactctgtgaagcccgaatacgagctgttcccactgaagtatccaccgaacgacgaggtcctctcactaggaaatgcccgtggtaccttcatccaatggcccaaggacctcagaggcattctaccaccgaaagtgcgtcgcacgatccaacggctgtgcaccttcttcaattcaattagacagaagattatagatccagaagatctagatgcgttgcaggccgatattgtgaataccctctgtcacctggagatgtttttcccactatctttctttgatataatggttcatctccctgttcatctggtgaagtacatgggagttctgaagtcctacgttcgtaacagagctaaacccgaggggagcatcattgaaggttacacgaccgaggaggctattgagttctgtgtcaattacatgtccgatgccgatcctatcggagttcctgcatctcgtcacgagggaaggttgtcaggtgttggcacaatcggaaggaaaagaattaggcccgatcaagcgttgtacgcgcaggctcattacgctgtgctccaacatatggcaaaagttggcccatactttgaggagcacttagcgaaaatccgagatgagaacttgggatactacggccgcattgaggagatctgggagctaaactacgtcaagttcaaggttcctatgttccgctgccgttgggtgaatctacgcactggtgtcaaagccgacaaggaaggtttcactttagtagatctatcaaagatgggatacgccgatgaaccatttgtacttgcgaaacaggtcgagcagatattctacataaaagacccttcaaacaagaagatgcacatcgtgagggatggaaagcgccgaattgtaggagttgacaacgtcgtcgatgaagaagaatacaactctaatcttcataagtcgacccccgagtccagagctagtagcgaggcatatcgcttgctccaaaccaagaacctgcatccgcaccggcttggcaccgccggatatgccggtaaggaagaggaatggcagcatgaggatgaagaagtggaggaattgaatacgccgctcgtgtttggcgatatcccacaccctcgggctaggaactgggccagggctaggtaccagaagaatgttgatggcacaatcttcatgccaaatccagatgatcaacgagtgtacgaagctatagagttggttgccaagcaacaagcctcgcaagaggcctgctctcaaagacgcgaggatgacgtcatcacgaaagcgttgggcaacaaggaacaccgtggacggacacggggtgttggatcttccgttccttggaagtatggatttccagactacgcatggcagtacaagaagcggacttccaacaaggcagataaagatgcacgccttgaagccaagatccgggcgtcgataagagctgagttgacatctgaattcgacaaaaagctcgagtcgatgagggccaagattaggcaagagatccgagaagagcaacagaaccccttggccgccgctgctgctgcgcacgaagagttagaaagtcccacccaaaaacgcagcagttgcgcatcaactgagttggcagaaaatccaacatcggtcgacagcgccgtcgaccacataacggaaccaacgagctgcaccctcacagttagggtgatgccgaccttcacggttccagcaaccgagggacttgcgtacaagccgaccccagagacaagagtgcatggagcgcaactcaggggcaactgtgcaaaagttcaagttgactcggtgaagcccgaatacgagctgttcccactgaagtatccaccgaacgacgagttgcagtacgacacggattttggggaggaccgaacggaggccgacagcaaggcgattcatgaacccccaccgatgaagaagagcaggaaggcacactcttcccctcagagaattactctcgataaactcgaagcaaaggggagaggaaggggaggaaaggagttccaactaggcatgccattggttggagatgacgtgcttgccgcaatgggcaccgcttgcaaggaccttcacgcatactacatggagaaatctaatgccaggaagccaaataaagctacggatatccttggagagcacgatggaaagccattccttggtccaacaaattatatcgtggtcgacttcaaggatctattcgacctctacaggctccgagcggtggacacaagcctccttaagtgctactccttgttaagttggcaatggtgtcagaagaatgcaccggaagttgccttccttgatccacaagtggtcattgtcacaaatctccagaatgaccgtacgacaccttgtggtcccgccgagacaaggagtacattatgtgcgcctataatcaatagtaatgcccattggatccttctggtcataacacctaagtggagttcatgtcactacctgaactccagaattgataagaacgcatatgattcgaccccaattcaactagcgatagatgaagcgtgggcccaatacgtgcaaagaggaggcctcaggaagacaggacatgacaccctcatccacaaaaaagtcttcccggtgaagcaacaaataggtgaccagtgcggattccatgtgtgccacaacatgcgccttctgtacagagaaaaggtgaagactttggctgagtttgagggcataataaccaagtctctgcctaccagctttgaggagcaggcatggctagcaaagatgcagggtttggttggtgtgttcttcctgggagaagccaatgatacagaagctggtgtttttgtgtccggcggcggccggcgacgcggcggcgggagcatgagggtgtccggagctcgtgaatccggagccggcgccggcgagtgtggtggcgggggaggagtctgggatggaggagaagaggacggcgcggctgaagacgggcagggggtggcggccgccggccgcggcggctacaaccggccgtaccaggccgtcgaccggacggcgaagatcctcgccgtcgctgcgttcttcctcaccctatgcatcgtgtggaaggtgcggcgcttgagggtgcgcctgctgctggcccgctcaccgggcgaggcggcgcacgtgccgagcaacgacaaggtgttcgtctactgctccagcgcgcacctggccctgttcgtggtcgtcctcacgctgaacagcagctgcgacgccaccgtcgagcaacacatcgggctgatgcaggacatgttactcctcccgcaggtgatcggcaacgccgcgtggcgcgtcaactgcaagcccctgcggggagcttctacgtcggcatcaccgtcgcgcgcctgctcccgcgcgtgtatgacctcgtgcgaccacgtgcggtggcgcgtcccaatcgtcctcgctctcccccccaacactctcgctgctgacgccctcctcttctcccacggcagcgacttggtgcgccaccgctcccgtcctcctaggctgccgccaccgtcgagccgtcttgcgaggcatggagtggatgtcgtattggggagcggatgtgggggtgcagggctggcagacggacggcgccccgcctcgacctcgctggccacaccgtccttggctgaagccatggcagcgacgccgggcagcaaggacgtcgaggccagcaccggcaccgccgcatccacggttgtcgtcatcgccatggcaagcgacgctggcaagctgtcgctgtgggcgctagtgaaagtgtgtgagaagaaaaaaatgtggggcccacctgtcagccccatcatcttagaggtggggggcagcggggccaatcggcatcgtattccccctttcccgtgggacgatctagactggcagcgtcgagtggaggagcttgttggcgatggcctcgtcgtgccagccctcagtgtcgcccatgataccagggctgagccgcaccatcagcacgtagaactccaccttgctcaacgcgttgtcgctgtcctggtcgccttcttgcaccatggctgtcgtctcctccaccgtaatctcgccaccgacagcgccgccccccaaccccagcacactcgccgcgcttcgccgcaggctcttcgtggtgatggcgccactcgtcaggtggagggcgtcggcggccgtggtggggtgggtgccagcgcaaaggagggactaagccccggcggtggaagggatccggcaaggacgatgatggggggggtgccgtgccggcccctaaaagggaaagggggcaaaagggggagcccatacaggcacggtggctcaaggcggcccgcagagcacacggttggtgcgcgcaagggcgggcaccacgagacgcagctgtaccggtgtaacatttgtaaataa

SEQ ID NO: 61759 - DNA, 2137 bp, Oryza sativa
  Clone ID: PAT_MRT4530_63160C.1
gaacatccccccaacctccgcctcctcctcctccccctcctcccatgcccgcatcgagatcttagccgcgccggagatcgagagggaggagcggcgacgcgggcgcccccgatccctcctcctcgccgccgccgccgccggcggcgccggagcagcagcagccgacgacgacgacgaccgccgcagcagccgatcggtaagtgagaggacggcctgggtgccgacgccgggaagctcttcgtcggcggcacgcggcgggagctggtacggaaccccgcgcgcggcggctggatctgggggagggaggaggggaggacgcgatggaggcggactccgggaagctcttcgtcggcggcatctcgtgggagacggacgaggaccgcctccgcgagtacttcagccggttcggggaggtcaccgaggccgtcatcatgcgggaccgcaacaccggccgcgcccgtgggttcggcttcgtggtcttcaccgacgcaggcgtcgccgagcgggtcaccatggataagcacatgatcgacgggcgcatggtggaagcgaagaaagctgttcccagggacgaccagagcatcaccagcaagaacaatggcagcagcatagggtcacctggaccaggccgtactagaaagatctttgttggaggcttggcctctaatgttactgaggttgaatttagaaggtattttgagcaatttggtgtgattacggatgtggttgtcatgtacgaccacaacacgcagaggcctaggggctttggattcatcacctatgactcagaagatgcggtggacaaggcactgcacaagaacttccatgagctgaatggtaagatggttgaggtcaagagagctgttccaaaggagcaatcacctggacctgctgcacgttcacctgcgggagggcagaactatgctatgagcagggtccatagcttcttgaatggtttcaaccagggttataacccaaaccctattggaggttatggcatgagggttgatggaaggtatggtctgcttacaggcgcacggaatggattctcttcatttggccctggttatggaatgggcatgaattctgaatctgggatgaatgcgaattttggcgccaattctagttttgtcaataactccaatgggcggcagataggttcattctacaatggtagttcaaacagattaggtagtcctattggttatgttggtcttaatgatgattcaggatcactattgagttcaatgtcaaggaatgtttggggtaatgaaaatctgaactacccaaacaaccccacaaacatgagttcttttgcaccatctggaactggaggtcaaatgggtattaccagtgacggtattaattggggagggcctactcctggccatggaatgggcaacatttcaagccttgggctggctaaccttggccgtggagctggagacagttttggcttgccttctggcagctatggaaggagcaatgcaactggtaccattggtgaacccttctctgcaccacccaatgcatatgaagtgaacaatgcagatacatatggcagcagctccatttatggagactcaacttggaggttcacgtcatctgagattgatatgcctccttttggtaatgaccttggaaatgttgatccagatatcaaatcaaacataccagcaagttacatgggcaactatactgttaataataatcagacaagcagaggtatcaattcctagcgagagtactattatattcatatatgacttgggatagatgaaagaagcattatatcaggtattcaggtgcatgactatgaattggtgatatcaggttaatatacgggttagttaattgtttctagctaaccagaggtgtggtttatggacacccccatgctagaggagcgaatacaaacgttttgtgaaggtttcagattttagtttaattcctacatgtattaggtcttggtttttgaatgagatgtgcagtggtgattgcggcacatacttagagtgttccaacataagctggaatcctgtcatatggacaaacttgtataccaaaggaatgctttattatcttgcccatttatggctacattagctcgcttgttttcattacctttttaaacaaa

SEQ ID NO: 61760 - DNA, 531 bp, Oryza sativa
  Clone ID: PAT_MRT4530_63161C.1
ctagctgtctccgccggcactgctgtctggccctcttctgtttgctgttgtgttcttcagcacctgcctaagcatctggttctcgttttgcagggtagagagcctctcctccagctctgagttgctcctctccaggtccttcaccctcgcctccagctcactcatgtacgccttcttcctctcccgagcctgctgcgctgacacccggttcctcagcaatcttttgaggcgccggtgctccttgtcggcggggctgcgtccgcggcggcgcccgctgctgctgctgccggcgacgccggcctgcgccgcgggcgacgacgacgacgtcccggccgccgtcgccgccgcgtcacctgcaacccgaacactacctctgcccgacgtcgacgtccccggcagcgccagcccgaactccggcaccctccctactatctcctcgtcgtcgctatccaccctttctagaagtcccccgccaaccgctttgactgattgcttcacgacctgcccgtcgtccttccttttaatcgtcat

SEQ ID NO: 61761 - DNA, 171 bp, Oryza sativa
  Clone ID: PAT_MRT4530_63162C.1
atgggctgtgtgtgggccgcaccaaacgtggcgggcttctcggacgcagatggcgctttcgcgcggcaggataagggcgccttctccaccgtccgttttacatccgacggtggtgatgatcacataaaaaagttgaggccaggagttgcaacagttattggcaatggatag

SEQ ID NO: 61762 - DNA, 483 bp, Oryza sativa
  Clone ID: PAT_MRT4530_63163C.1
atgggaagcggccactcccacccgtctcaccccaaccaccgcctcaggcgcgagaagtgctcgacccagggggcgatgtgcgggctctgccatcgccgcatcaagctcggcgagatggcctaccgctgcgccgccgccgagcacttctcctgccaccgcctggacctcaccgcccgcgccgacggcggcggtgtcgtccccgcgggcagcagctgcgacgtgtgcgcgaggagcctcgacggctactcccacgtgggcggcggcgaaacggcgtggtcgtaccggtgcagcgcgtgcccggacgtcgagctctgcctccagtgcgccatgggccgcgacggcgacggcaacggcgacgacacgacgtgcttgtgcggcggcgccgacgccggtcaaggcgcagtctgcgccgggatcgtcgcggggaagttcatcaagggactcatgtggggaatgggatgcggatgcggtactccaatctga

SEQ ID NO: 61763 - DNA, 489 bp, Oryza sativa
  Clone ID: PAT_MRT4530_63164C.1
tgataaaaaaaaaaaaaaaaaaaaaaaaaggggaaatttataaaaaaaaaaaaagattaaaaaacaaaaaaaaaaaaaaaaaaaaaaaaaaaactacttactatggggcggccttttttgaggtcccaggcttgcgtgcccgtcctgccgtcttctgactccttcctttcggtccccctcccgttcagttccctgctccgttttttttcacctccattgcctggtaaacccctggcgttccccaccttaggggcttggcgggccttcccctttttcccttttggcgttttggctcctgggccccccccgttcttttttcctaacagtttcacagcttgccggtttggtggccccccccttgtccgggcccttttggggcggccgcttgtggtgttcccccccctttttgcccgttccggtggctaggtcctttccgcccggtcctttccttttttccccttcctttctccccacgggttcggtttttcc

SEQ ID NO: 61764 - DNA, 204 bp, Oryza sativa
  Clone ID: PAT_MRT4530_63165C.1
atgggtgaccgacatcgggcgctggggataggtggcatcgggttttggggacatgcggcgtcggggagcagcgttggcggcgtgggcgtgagaggcgtgaggcgtgaggagaggattgaggggcgcaccgtcgctgctcgccgcaagccaaacatgcccgcgaccgcatgcctgtgccagccggccgcctcgcagccgatctag

SEQ ID NO: 61765 - DNA, 282 bp, Oryza sativa
  Clone ID: PAT_MRT4530_63166C.1
atggcgggtgcggagacgaggctggcggtgggcgcggaggcaaggccagctacaggacacccggttcggctcctccgccaccggtcgcccggtagcgcgggcaagctccgcctcaacagtcggacgctcggatctcccctgtcgtttttcctcccggctgctcctgcacctgcacctgcacggacggaaccacgtttccgcatgcgcaccgacgacttttcgccgcatgaaaaccccttctcaggctcccaggcaatgggagaaatcgcctcccaacaatag

SEQ ID NO: 61766 - DNA, 687 bp, Oryza sativa
  Clone ID: PAT_MRT4530_63167C.1
atgctgcttctgcttccttccgcccgggcttttgtcatctctgcggcccatgcagttgcagactgccacccgcgttatgccattgccttttggtttcacactacgcgagcgccgcgcactagctgcgtacaccgaaaaggcagctgcgtacaccaaatggctgccgagtttgtcgatcaatctagcccgtacaacttccaacgaacggccgcgggtcgattgttttactccatcaccatgcatgatgtttgcaaccatgacaacacagagatggctgatggcacgcatcggcgtacgaagatgtttaacccagatcgattggacgacaaactgcgtaccgtcaaatactactgcctccagcttactacttcaaatgagtacccgacgagtgaggtcatcaattacaggccccgcattgttccctctccaacgtcgttagccaccaaccgaagaggagaaggagctccagaacgacatcgcaagatagacgttggccctgatatgctgtaccgcaacgacgaagatagagcgggtcgatcaaatcaacgccaaggaggcggctacgcactgctcaacgccaagacccatggtgctaagctcaactttttcgtgcctatatgtgggctgagtggcaccaagcttttaacccgagtaggattttgcgatggacacgatacgaaagaggcc

SEQ ID NO: 61767 - DNA, 1605 bp, Oryza sativa
  Clone ID: PAT_MRT4530_63168C.1
atgtcggtgatggacgccaatcaggcgtacgctcggcaccactttgacggcggacacctgcgtggtgaccgcgccgacgtgctggcgcagcaggctgggatggatatcggcagcatggcggactcggaggatggagatcacgttgcgacgacgacgacggagcagcgctacgacgacgacgggcacctcgtccccagcagcggcggccaggaggaggagggatccggcggccgcgacgtcgtcgtccccggcggccacgtcgctgaggattaccgctctggcgttggcgtccccgtcggccgagacgcaggcggcgccacctcctccccgccgcagccagtccacgtcaccccgagcatcctcgtcggcagcatccacgcgccggtcttccagggcgagctcgtcggcatgaagttcggggtcgggtcaggctccatgggtgccggcaccagcgcgaccaggcgcctccccgcgaccggttttggtgctctgccgaccagcagcatggcggaggatagtgccgaccacgccgacgacgaccacctcgccgaggaggaggaggaggaggaggaggagcactacatcgacgacgggcccctcgtccccagcagcggcggccaggaggaggagggatccggcggccgccacgtcttcgtccccggcggccacgatggtgaggaggaccaccccgacgacctcgtcgccgacctcgacctcgacctactcgtcgacggcgtagtcggccctgtccccggtggccacctcaacgcagatgcccccgccttcgtccccaccacccgtgggcgccaggacctctattccgccctctcctcatccgcccccgccgccggttaccggtaccgccactacatcacctcgtccgcgctcgcagaagccggccacgtgtccccattcctcggtctcccgtacgccacggccttcgattctccgctcgaccgcgagttggtcggcccgtcgtcagcgccgccgccgtgctccgccgctagccgtgcctggttagtgcgctgttcctcaccgctctccgactccgagtggactcggcgttcgatcctggcgcgagaggctgcacacacaccggcctccaccgtcactgggcgtgggcggttcgagttcgtgcccattcccggcgcaccctatgctccgccgccgtcattcgcccccatcgccgccggagctggaccagcagcgcgaccgctacagcagctggcattcggactggaggaacacaagacgaagctgtgcgcggaatattattcccgtgggcttggttgtcctcgtggcaacacatgcaagtacgcccatggagaagatgacctgcgtttggtggtggcggtgagctctctagccgacgccggtgagggctcctcgtcctcggattcgtccttcgccgctttgggaggggaagacaagtacaagacgaagctatgcaagacgttcacgagtggtggattatgcctgtttgcagccaactgcaggttcgcgcatggggaggtggagcttgggaagaaggagccgtgctggtatttcttctccggtcagacctgcccccgcggtgacacctgtggtttccggcattcctactag

SEQ ID NO: 61768 - DNA, 374 bp, Oryza sativa
  Clone ID: PAT_MRT4530_63169C.1
tcgttcgcagccaaagccgagccggccaccgacgtgcatgcggcggccgaagccgactcccaccctcgagactgacactgcgacgccggcatagtgcaagccgacagtcgaaggcgactgccatcacagacacttgtactacgacgccgccatcctacaagccgcagaccaagccgaacccgccacccacgtacaagctcgcagtccaagccaaacccgtcacccacgtacagggcggcgccggcaacctacaagccgcaggctaagccgaacccgccacccacgtacaagccgaaggctaagacgactgccactgcctacactacacccacgtacaagccacaaccgaagccgcttccagtcccacttgcata

SEQ ID NO: 61769 - DNA, 1740 bp, Oryza sativa
  Clone ID: PAT_MRT4530_6316C.1
atggatcaatcaacaattgatcgaagttggatgtatgcgaaaaatttgaaacgtcattctacggagtacagaaaggacgtaataaattttatgaacgccgcggaggaggatcggataagaagaaacagtgattacatgtgttgtccatgtgcagattgcaagaataagaatatgtttgatagcggagaggacgtacacggtcatatgatacaacgaggattcatggagggctatacatattgggtgaagcatggagagcaagaatcaggaagtggagcagcagcagacagaagtggtgcgcataatcaggaagatgaagatgagcatgacatgtttataccttctctattgggcggtgaaatggttgatgtggatcacaatctgctgcaagacatattacgtgacgttgaggacccagcccagaatgagagagatggaatgaagttcatcaggttgcaatatgcggacttggatgcttgtcctgtctgcaaggcttctcgatacaagcgaaagaaaagtgctgacgaaggaaataagtcaaagaggggtggtccggcaaaggttgtgtggtatctacctatcattgattgtttcaagagaatctttgccaacccgaacaaagcgaagttagtccaaggcaacccggcaatgatatcgatgtattcctggagcctgttatcgacgatctggagattctttggaaagaagttgcagtacgacacagattttggggaggaccgaacggaggccgacagcaaggcgattcatgaacccccaccgatgaagaagagcaggaaggcacactcttcccctcagagaattactctcgataaacccgaagcaaaggggagaggaaggggagaaaaggtgcagacctcgcttctagctccaaggaagctagatctgggcaagggccaggaagagactaagggcaaagaggtcaagaagaaatacgtcgctccacaggagttccaactaggcatgccattggttggagatgacgtgcttgccgcaatgggcaccgcttgcaaggaccttcacttatactacatggagaaatctaacgctaggaagccaactaaagctaccgatatccttgaagagcacgacggaaagccatttcttggtccaacaaattatatcgtggtcgacttcaaggatcttttcgacctctacaggctccgagcggtgacacaagcctcgttaagttggcaatggtgtcagaagcatgcaccggaagttgccttccttgatccacaagtggtcactgtcacaaatctccagaatgaccgtcaaggaatggtcaactacatctacgacaccttgtggtcccgccgagaaaagcagtacattatgtgcgcctataatcaatatgcccattggatccttctggtcataacacctaagtggagtacatgtcactacctgaactccagaattgataagaacgcatatgattggaccccaattcaactagcgatagatgaagcgtgggcccaatacgtgcaaagaggaggccttaggaagacaggacatgacactctcatccacaaaaaagacttcccagtgaagcaacaaataggtgaccagtgcggattccatgtgtgccacaacatgcgccttctgtatagagaaaaggtgaatactttggctgagtttgagggcacaataaccaagtctctgcctgccagttttgaggaggcaatgattaacacttattatgcaactgtgatgatgtaa

SEQ ID NO: 61770 - DNA, 4044 bp, Oryza sativa
  Clone ID: PAT_MRT4530_63170C.1
atggacgcggcggtgcaggaggcgaagctgctgcgccaggtgaacgccctcatcgtggcgcacctccgcgaccacaacctcacgcaggctgccgccgccgtcgccgccgccaccatgacgcccctcgccccgcccgagcccgacggcgacgactccgtccccgccaaccagctcctccgcctcgtcgccaagggcctcgcggtggagcgggaggagacggggaggggaggaggggcgttcgactctgccgccgccgccgctggatacggtggattgttgccgccgctcggcaccaatgccgtggatttcagcacgcaggatgttaagggctcatccaagagcttccccaagcacgaggccaggcacgtatctgatcacaagaatgttgtccgatgtgcaaaatttagtcctgatgggaaatattttgcatccgggagtggtgacacatcaattaagttcttcgaggttgctaaaataaagcagatgatgctaggggattccaaagatggccctgtccgtcctgtgatccgtactttttacgatcacacgcagcccatcaatgatcttgattttcatcctgagagccccatactgatatctgcagcaaaagacaatacaataaggttcttcgacttctcaaaaactgttgcaaggaaagcattcagagttattcaggtgtggagatttaactcgtatcccttcaaaaacatagttgtttctggtcatccacaaagaccaacaaaccccttcaagcaagacaattctatttatctgtttagcactacatctgtttatgttaaggatatcctctatgggactgatcacccagtggctcatctatatgatattaacactttcacatgctacttatcggcaaattcacatgattccaatgctgccattaatcaggtccgatactcttctactgggagcctgtatgtgactgcttccaaggatggttctctgcgcatctgggatgggatatccgctgaatgtgtccggcccataattggagcacatgcatctgcagaggttactagtgcaattttcacaaaagatgagaggtatgtcctatcatgtgggaaggattcttgtataaaattatgggaagttggctctggacgacttgtcaagcaatatgtaggcgctgttcacagacaatttcgatgtcaggctgtcttcaaccaaacggaggaatttgtagtatcaaccgatgaacaaaacagtgaggttgtcgtctgggatgcacttaccgctgaaaatgtagcaaggttgccctctggccacaccggtgccccgaggtggcttggccactcccctgcagaaccagcctttgttacatgcgttgtacacttgtacatgctactgaagttgtacactgatgatactgtacccaacttggtaggaaaattttggctcttgttggcattcatgaagcccgacgtgtactccaccgtcgtcgtccacggggacgacgacgacgacgacgcccgcggcggcggcggcggcggccgccatgccctcgcggaggatgacgaggaggaggacccgtcgtcgctgcccccgctcctccagcgcctccccaaggacttcggcggcggagcctccttcgacgagtacgacgacccctactcgtcggacctcgacgacgcctcgctctccgccaccgtcgtcgtcaagcgcggcgcccccgcctccacctcggcctcctcccgatccccgttcctggatctgcgccgctccagcccccgtgccgccgaggtcgacccgtactccaccttcgtggtacacggcaccgcccgctccggcggcgcctccagcccgcgggaatccgcctccggcacattcgtccgccgctccggtggttcctccagcccccgcgagtccgtgtccggcacattcatccgccgcacgggcagcccctccagcccccacgagtcgatctccggcaccttcatccaccacaccagcggcgcctctagcccccgcgacactgcccagggtggcggagggtttggttcctcgttctggagccctgcggtggggcagtccgaggagctccggcaaccggcgcttcttgtgcagcagcagcaccagcaacagcagaattcgaggcggaaaccatcggtgagctctgtgccggagagtgttaccagggaggatccttccactaagtatgagctgctccatgagcttggtaaaggttcctatggtgcagtgtacaaagcaagggatctcagaacacaggagcttgtggctatcaagatcatctccttgacagaaggggaagaaggatatgaagacatacggggagaaattgagatgctgcagcaatgcagccatccgaatgtcgtccgctacttcgggagctaccaaggagaagaatacctttggatagttatggaatactgtggtggtggaagcgttgctgatttgataggcataacagaggagcctcttgatgaatcccaaatagcttatatatgtagagaagcactaaagggtcttgcttacttgcattcaatttttaaagttcatagagatattaagggtggcaatattctgctaactgagcaaggagaggtgaagttgggcgattttggggtagctgcccagctgacgagaaccatgtcaaagcgcaacacgatggaacaggggatgtacttatggcttgtcccccaaatatcacctcataagtaccctcaccgacccttttcacacgtttccaaccattcagctattgccctgcgctttagtgctatgaggatctatttctttgcctccaggcatgaggtgagagagttcattggcactccacattggatggcacctgaggttattcaagaaagtcgctatgatggaaaggtggatgtgtgggcattaggtgtatctgcaattgaaatggcagaggtgatctttatgatatctagtgaacccgcaccaatgctcgaggataaggagaagtggtcccttcttttccatgattttattgccaagtgcttaacaaaagatccaagacttcgcccagctgcaagtgagatgctgaagcacaagtttattgaaaaatgcaaccctggagcttcgaaaatgttggcaaaaatcaaggaagcaaagaagatcagagcaaaagtagctgcggagaccgagctatctggccctgacagtacaatgcaggatgcaactgttcgaattaatgatgactttggagaaactgttcctacaaaccctcagcaacaaacaaatcacgaaacatatgatggtggggcaggtgattttggtacaatgatagttcatcctgaagacggcgacgaagttgatgaatcacccatcttcccaagttcagaattcataccaggccttgggagcataaactctttcacacatgatccaaagagggccgagcttatttcaaatttttgggcggagaacacagctgatattgaagccaataaagagcaatatctagatgaacatcctgatatgcaggaagcaaaaacaatgccaccttcaactggaacggttaaaaagcttaaagttgcagaagggactatgccacgccatggtaatcaagttagctctgcctcaccaggtgttgctagcacaatgaccaaattaaacagcagccccagccgtaaagcattctcagttcaggataagctctggtcaatttatgctgcgggcaacaccgttcctataccattcctcaaggcaattgacatttcaccactagctctagtatcagatagtgtagtaggaaatggcctagctgggtcaaatagaactgatgcattggaggcagttagggagcttttcagtggtgatgggcagacaaagaaagggcgcaaagggcaaaatgaggttcctcttcctcctggggtgcaccacagattgaccacaagtcccacattgatgaacctggcccaagcccttgcttaccacaaaacgtgttacgaggacatgcctctgcaagattcgcaagcaacgcaagagcagcagacaatacagaacctttgtgatacacttcgaaccatcctgagactctag

SEQ ID NO: 61771 - DNA, 456 bp, Oryza sativa
  Clone ID: PAT_MRT4530_63171C.1
caatttttaaagttcatagagatattaagggtggcaatattctgctaactgagcaaggagaggtgaagctgggcgattttggggtagctgcccagctgacgagaaccatgtcaaagcgcaacacgttcattggcactccacattggatggcacctgaggttattcaagaaagtcgctatgatggaaaggtggatgtgtgggcattaggtgtatctgcaattgaaatggcagagggtatgccaccgagatccaccgtgcatccaatgagagtgatctttatgatatctagtgaacccgcaccaatgctcgaggataaggagaagtggtgagtgccatctaatacaccatgaactgttgtgcttctctgagtacctcagtaccaggaacagctgataagagcatggttataaaactttcagaccagagatcatttaaggctccctgttcttttgatct

SEQ ID NO: 61772 - DNA, 3000 bp, Oryza sativa
  Clone ID: PAT_MRT4530_63172C.1
atgggggagggaagcggcgccgtggtggcgcggggagcgtcgagcgccgctggtgagggaggccggagccacgcagccgcacaggggaaggaggcggcgcagggagggaagcggcgagccggcggcacagaggagcgactggggacgggggaggaaggcggcaagccgatgggtggcggcgcatgggatggagccgaagggctggatcgctgggagatgttgagcagcggcgcgcggtggcagccgcggcgaagcggatgggcggagtggggcggcgacgctcgcccggctcgctctcctcctcctcgtcgtcgtcgtcccgacgtcgctgcgggttggcgaggcgaggggaccagtagagtgcgggggcgcggggagaagggaacgactcatggtggagcggaaggcgagggcgcggtggtggcgccggtgagaacagcggacgcggtgccggcgagaaatgcggtggccgtcgccggtggtttggccacgcgcggcgtcgagcgggatgctggccaggtggtggcgagagaggagaagagacatggcggcgagttggggaccaagagaggattggaggagcgggccgcgcgttcgccgccgccgccgccgccgcccaagcggagggcggtgtccgctattcgccagtttcccccaggttgcggaagggacgctgctgctccagtcgcccgcggccgcggttgtgatggtggtgttcgtctgttggatgaggcaaccgctgctcctctcgctggcagcaaagatgattctgctgttccgggtgtggtggagaaggtggcgtctgtagatggtggcgattcaatggcgaatgcgcatcatcatcatcatgctatgatggacacggtcttgatgaaatcttcacatgtttcggatgagaatcaggtcgctcgcaaagttggttcactggaaaatggcgcagaagggtcagcgaggggaaagggaggacacggcggtgaattgctgggaaggaaggaagtgttggctcaagccgcgaatttgcttcccaagaggaggattgtatctgcgacgcgccgcttccctcctgggtgtgggagggacgctgtggctccacttgctcacagagaagagagtaaggtaggttcaagtttggaagccatgcctgttgatgctggttggggtgtgtcaaaggaggtggtgactacggatggccgtaataattcggttaaccagtgtgcctcgaacattgtcggaacagtaaagtgccaggaattggaggagggtgaggtagctgctgaggcatgctgtgatgtggagtcacaaaaagttgctggtcatggagaaaaacttgaaagtgctgttcctgtaacttctgctgttactgaagttttgacaaggtgtggttctgatgagatggaagggtgtagttatgctgcggaggcaactgaaaaacacttgtcaatgggtggtaaatgttcaattggtggtcctttcaatgaaattgtccacggcaagagagtgttggggagtgatggcattaaaagggaagttcctagtcttgcaatggaagatcatggcagcattgctcatgaccaagaactggtggaggttgagttaactacaggggaccatattcaggaggctcaagttgctaccactgttaacccacatgagtctacaattagtagacatgaggcagctgtttcagcaaatactgctccagaagtttctattaggcatttttctagtgtgaagaacggaaacacatcacagcatgaggagacgatatatgcatctgcagctgctgacgttgttaaggtgatgaataaatgcaaagggaccaaatccaaagctgcggctgaaccttgggctgaaggtccttccaaagaacacttcaaggctaagagggagtgtgaaaaagatgggatgaaaaaatcatccatgaatgttccaacagaagtatttcgtgatggtatcatgagaactaagttactattgacagctagaaaagcagtcaagccaccactgaatactctgcatatacccttctccatgggaaaagaggagtctgttgtaacaaatagtgcatcatttggtcctaagaagaaggtgaaggtgaaaagcccgcatgaaagtaaaggtattcctatgaagattgtctctacatctggattggcgggcaaggacaaccttatcaatgaaaaggctttgagcttggaagatgatgatattttgaaggcactagctgttcataatggaaagctagagttgtatctcaatgttccctcatgcgttgagcgtcacaggcaacatggaagtgagaatggcaatgataggagcaaaatcaggatgctatgcaggaggtttcaatttatatgcaacgctcttctacatgctgttgaacaaggctcattgatggttcgacgaattgaccttgaagctgataaaatcatcaggaaattgccgggctttactaaacatggacctactgtgggaaatgttcgtggagtcgaagtcggtgacgaatttctgtacagagttgagctagctcttgttggtcttcatcgcccataccagggaggaattgataccaccgatcataatggagtgcttgttgcaataagcatcgttgcttctggaggttatcccgatgaattgtcaagctcaggtgaactgatatatactggttctggaggaaagcctgctggtaaggagaaacacgaggatcaaaagctagggagggggaaccttgccttgaaaaattgcatcaagacaaagacacctgtccgagtgattcatggattcaaaggtcaaaatagagaggacgtcagtcattcaagagctaaacaaatcttaacatttacttatgatgggttgtatcttgtgttggattgctggagagaaggtctaaaaggttcaagggtcttgaaatacaaattacaaaagattcctggacaaccaaaacttcctctgcacatagctaaatatcagaacactaggctgggatcccaaggatggtga

SEQ ID NO: 61773 - DNA, 250 bp, Oryza sativa
  Clone ID: PAT_MRT4530_63173C.1
caaactacgtccatatcgaacacgattcttatctctaacaaactctaagataccataagtctttgcggcagacttttgtccaaacatatctccagtctgactcggacccaaccgatcctgatcgtagccgatccggactctagtcgattcttgctctattctcgaatcgatctccgccccacttcgatctaatcctcttttccgatactgatattaccaaatttggtcgttaacacatacaagttactcc

SEQ ID NO: 61774 - DNA, 120 bp, Oryza sativa
  Clone ID: PAT_MRT4530_63174C.1
atggcccgcccaaggcccggcgactttggcccggcacaatgggccgcccgtgccttcgggacggcatggcacggcccgacttctgatgggtcgagcctagacttgaggtgcaacccgtga

SEQ ID NO: 61775 - DNA, 495 bp, Oryza sativa
  unsure (1)..(495): unsure at all n locations
  Clone ID: PAT_MRT4530_63175C.1
agggggggggagngtgaatcctggtctgtgtcctcgccggttttgttggcgtctttgtgataacccctccccattttactccgggagcgcccactcttgcacaccactgtgccgcgcaccctctgggtgtgnctgtggggnttatggattgggatgnttgtgccggcgacatctnccactgttgagattgagcgccctgtanaggaaagtgacaatctgcgtgcaaaaagttcccggagtacttcgtgccaaacttatgtgagctggatgnngctggtgtcccctgtggtgagattattgaatggtgacagcccaccgtgtgtgtgctggtgcagctgttgtgatgttatggtactngttggaattttgaccgaggagttctaagttgtaacccaatttttgtaggatgtacactgtactcgtatccctatcgtgtaaagaatntttttttccacagttctaacctagttgtggtacttagtttaaaaaaaaaaa

SEQ ID NO: 61776 - DNA, 354 bp, Oryza sativa
  unsure (1)..(354): unsure at all n locations
  Clone ID: PAT_MRT4530_63176C.1
gactagttctagatcgcaaccgtccggnnggnctgngttctgctccttcgctgtttagacgcgtaatccgcatgaacaatcctgtctcgatttcatactgatgatatttgatctgctgcgcggctgctcgttacgttgggtgttatttgatagtatttccttgtgttcttgagcttggtaagtaaagtggtgccgtgtcgggtgtgaggttttggcatacccccgggggcgaggtcatggctcgcggaccttcgcgcnngnttcggtggcggcgcaagggaggaggcgggctcgggatcctggcgtcgaggcggcggcggcatgtcggggcttcgtgtcgttccaccgcttggc

SEQ ID NO: 61777 - DNA, 302 bp, Oryza sativa
  unsure (1)..(302): unsure at all n locations
  Clone ID: PAT_MRT4530_63177C.1
ggtgcgcccacacatacagttacncatacatgccgttggcggcacaccgactagcaggcggtgcttgtggcgccagcggggcctttctaatcgtgggctcgtgctcatcatccttggatgtcatgcaccgcacccgactcagggcggtagtacaatgcaccactgacggctgccgtcacctggcctgtcctaatgaccggctcaaccattcacggcaggaccgcagaagcatnancattacagcaacaacaatccactcattacatgatcagcacaaactttacaacacaaactttaacatt

SEQ ID NO: 61778 - DNA, 340 bp, Oryza sativa
  Clone ID: PAT_MRT4530_63178C.1
tcggtttatttgcaagtgttacggcttcgttggccctaccagtcagtgacccagttcaatctccggcgatgggggccggaatgagcagcggccggcggccgagcttttactgtggaggcggtggcggcggtgtcggtcggccgagagggatgctgaccctgctggcgctgcaggtgctgctcgagtacggacgcgcgggcgccagccggccccccgtgacggcggcgttgctcgccgccaacgcgctgctgtaccttccgccaggcttccttgacgcgcttcttcctttggttaaccgggttggctttaacccttaccttattatttacttctgggacct

SEQ ID NO: 61779 - DNA, 375 bp, Oryza sativa
  Clone ID: PAT_MRT4530_63179C.1
attcctgcagcccccgggactaaagatcccagggatctttactcccggttgagaatatcaaccgggaataaagcgtacggaccagcccacgcacaagcggcagccgacggcggcgggatgggggacgggcgcgggctggcggcggccggccggcggtggcgggatggaggcggccgggcgcgggctggcggcggccaggcgcgggctggggcgggccagcgggatggaggacgggcggcggcggcccggcgtgggccggcgggatggaggccggtcgccggcggcctcgccctcccctcccccagatccggccggaggggaagcggcgagatgggtggctggccggcggcgggatgggaggccggcaggtgagtc

SEQ ID NO: 61780 - DNA, 1455 bp, Oryza sativa
  Clone ID: PAT_MRT4530_6317C.1
atggttgatgtggatcacgaggtgctgcaagacatgttacgtgacgttgaggacctagcccagaatgagagagattccatgaagttcagcaggttggtcagtgattccaagacgcctctgtactccggatgcaaagcaaaacacactaagttgtcagttaccttggacctaatgaagctgaagccaagtagtggatggacagacaggagtttcacagatctattaggaattttgaaggctatgcttcctgctgagaacatattgcctgagacgacatatgaagtaaagcaggttatgtgtccactggggttagaggtccgtagaattcacgcttgtccaaatgacggcattttgtaccacaagcaatatgcggacttagatgcttgtcctgtctgcaaggcttctcgatacaagcgaaagaaaagtgctgacgaaggaaagaaatcaaagaggggtggtccggtaaagtttgtgtggtatctacctatcattgatcgtttcaagagaatctttgccaaccccaacgaagcaaaatggctcccgctacgtcacgcatttagaagaaagaagaaaatttttaatggtaagagagaacttcagcctgctcccaaggatttgtccggcgatgaggtccacagtatggtcaaggacataagtaatgagtttgggaagaaaagaaaacgtagcaagataaaggagaagggtatgtggaagaaaaaatccatattttggcggctaccttactggaaagatcttgatgtccgtcattgcattgatctcatgcatgtagaagagaatgtgtgtgggagtttggttggcctgatgttgaatattcctgggaagacaaaggacgggttgaacgtgcgccttgatctacaggacatgaatattcgcagtgaactccagcccatacgagatgcagagacagggagagtgtacctccctccagcctgccacacattgtcgaaggatgagaaaatcgcaatgttatcatgcttgaaagatattaaaattccatcgggctattcagcgaggataagtaaatatgctaaattggacgatctaaaactggttgggatgaagtctcacgattgccaccaaacaaaactatgtggcccggcttttctaagggaaatatggccattcgaaagatacatgggagttctgaagtcctacgttcgtaacagagctaaacccgaggggagcatcattgaaggttacacaaccgaggaggctatcgagttctgcgtcaattacatgtcctatgccgatcctattggagttctagcgtttcgtcacgtaggaaggttgtcaggtgttggcacaatcggaaggaaaagaattaggcccgatcaagcttcctacgtgcaggctcattacgctgtgctccaatatatggcagaagttggcccatactttgaggagcacttggcgaaaatccgagatgagaactag

SEQ ID NO: 61781 - DNA, 2097 bp, Oryza sativa
  Clone ID: PAT_MRT4530_63180C.1
ctacgcctctctgcaccaagccggtctccgacccctcctccaaacgatgctgcaccggtccgatgcagccgtctgccacgccctcagcaagccgtccgaggccaccatgcctcctcccaccaccatcacggtcaccaccacctcaccgtcgccgacacctttcccgcctccagtgtcgcatccgccgacatcgccgccgcctcctcgtagcttgaagccagtttgattgatacaacaagtactatctggtccaatcatttggctgtcttttgtcccttcatctttgtagaaggctattagcatgtgtacaagacattcttggtagttggtaccttccatttgctgaggatttcccatgttcccacttcccagtgagatgatggtgtgttcggtgttcatcacatgatgcctagtcccacaaacaaaagaaacctggaatgcagttatagtatcatattcatttaatcgaatactctgagacaactgctcttttgcagctctgctgcaccaccactgagagtctgagaccaacactgtcttcgggtcatcgagcaccttgcgcttatcgagtgcagattccactgatgcaagttcagggcaggctgcagcctgcaggtgcactcgtgagttttgagtcttcttctcaaagtgccccctgatgaaaagacagtttaccactttagtgtcaatcagctctaacttgtatacttgtaatcgactgacatataatttacctgatgaactaagatactccattgctgaaagacggacaaagctagtaacagcacttggaccttttatgtcgaaaacagatatgccccaggctttccaggatgaaacttcactagctttttgtgggtaaagcaacataaaacccttcatatacaagttgcctaggtaagatgcactttcaggcctcagataataaatatgaaagatcataaaaagtccataaacttgaagccttgggttgcagctcatcttccggctaagaaaatcagcagcaataagatccactaatgccatatagatcagtataccagccgacatcgagtccagaattccctccaccaccaacgctctggggctgttggggttgtaaaatgatgcaaccgccgcccccacagtgatcccagcaggtgttgtgatagcaaagaagaaagccatcaggaaagcagagaagttctttaactgagcctcagaaatgcagccgcccaacgcaaaaccctcgaagaactggtggaatgagagggcagcaaccagaggtttgattgtacacgggctctgagagacgcccaacgataggccaatgatgaccgagtgagatacaattcccagctccagaatctgcgagacaaccacatggcgagcggaggggccctcctcgtgcccgtggccatggccgtgcgcgtgggcgtcattcacagctcccccatggcacgcgccgtggacgtgcgcatggctgtgccggtgagcggccgcgtgggcgtgtatcccgacgatgtgcatggcgtcccgcttcccgcctcgtccatcccgtccttcgccgtccccgaccggcagcgcgccgccgtcctcgagcagcgcggcggccgcctcttcggcggccgcggcggcctcctcctggcggtgctttccgcccgggaaggggaagcgccgccagggggagtgcgggaggcaagggttggagagcgcgtgctccgcgtcgtgcagcatgtggacgaaccccgtggccaggatcacccccgccgcgaacgccttggcgagcacgaagagccccgcccgaagaacgcgccccccgccaccgccaccgccaccgccacgccgcctccggccgacgagcgggatggcgaccccggccgcgccggcgatgaggatggccgcgacggccaccatcttgagccgcagagccgccgcctcgtcgcggcactcctcgtccttgtcaccgccgccgcccaccaccgcgtcgcagctcgccgccgacaccgacgctgccattccatcacccccaagcgtcaattgcgagctgaaagggaagggagcagggagcaggggctcaggactcaggagcagaagcctcacctcgaagaacgccat

SEQ ID NO: 61782 - DNA, 465 bp, Oryza sativa
  Clone ID: PAT_MRT4530_63181C.1
cccacgcgtccgccctaattgtcaccatatgaagcactgatggataaattattccttatgctcggccacgatacccaacaggaggcggaagtgatggctcatctgaatctgggtctgacgcggaagatggcgcgtcacctatcgcattaacgaacctgataacaactcctgttcagaccccggttcatgaggcgtcacatttgtcagcacatggattcacatctgctttcgctgacagtattgatgaaagcatcactgttgttgacaaggtagtggatgatggatgaggcagtcctagagctagttcatgaccctcgagaagattgcgctatcacatgtgctcgcctcttgacacaagtgattacatggctgactgacttgatcgcgagcctttgtgctatggctcgctctgtggcaagcaggatggctagccgattctcaagccaatgcactgaccatgatcac

SEQ ID NO: 61783 - DNA, 189 bp, Oryza sativa
  Clone ID: PAT_MRT4530_63182C.1
atggcgacgcagcggaggcacgcggctgtggcatggacacctactaccgccgccacctctccgggcagcagccgggagtacatgaaggccaaatgcagcattgattcccatgtagcagataactgcaataacccttcaatcaaatctgggatgaaacgtgtagttgggaattattgccatgttgattag

SEQ ID NO: 61784 - DNA, 515 bp, Oryza sativa
  Clone ID: PAT_MRT4530_63183C.1
tcccacgcgtccgctagcattaattccgttggaaccctcaacatcatcgttttcaattgctggaggtcctgcattttcaaatggtttttcatctggatttggttccagtttttcccaagataatagctttagtcctttattaagggacgcagaagatggttatagtttctccaatggcacaaaggatgatatccatggactgagtggtttacataacttgggaaatacatgtttcatgaacagtgctatacaatccttggtgcatacacctccattggtggagtactttttacaggattacagtcgggagataaatacagaaaatccacttgggctacagggtgaacttgcaacagcatttggagaattactgagaaaactttggtcagctggtcgaacttctatagctccacgtccattcaagacaaaactttctcgttttgctccacagttcagtggatacaatcaacatgattctcaggagttacttgcatttctattggatggtctgcatg

SEQ ID NO: 61785 - DNA, 518 bp, Oryza sativa
  Clone ID: PAT_MRT4530_63184C.1
ggaaaggggggggaaattaaaaaaaaaagccgggcccccagggggggagggggcgggggcccaggaggaaacccccagggggaaagaggacccccccaagctggggggggacccccccaaaatggggggaaacccccccacccgggcaaggacaacaagggttttatttagggggaaaaaaaaaagggagggcccgccaaaaaaaaaggggggaccaaaggcaagaaaaaaaggggcccaaaaaaagttttgaccgaaaggagcaccatccaaacaaaaaatccttaggcacccgggcaaaaacaaaaaaaaattaagttggaggaacaaaaggaacaccccctgaaaggggggccaccctggcaggggtggaagccaaaaccgccgtttttgccgttttccaccggcaattcaattcctccaaaagtcgccttggtggagggagcaacgaggacaaaggccttggggggggcggggccctccaaaaaaggaaacatttggaatcccccgaaaccccc

SEQ ID NO: 61786 - DNA, 159 bp, Oryza sativa
  Clone ID: PAT_MRT4530_63185C.1
ttacattttaaacgttgccgctgcagcgctgctggacggggttgcttgtgaaaacttcatttctcatttctgccctccttaatcttgggattaatcaccgcagccaatgacgctgccgtgtcggcggccacgtctacggcgctctcggccgttagcttc

SEQ ID NO: 61787 - DNA, 328 bp, Oryza sativa
  Clone ID: PAT_MRT4530_63186C.1
gcagagggtgcaggctagaggagactccaggtacagcagacgcgtcggccgggaaggagcgtcgggggaggtgccggcggaccaagaccacgtcgggcagctcccgagcttttccaaccgtggatgggggctgtgcagtagagcccctgagactgggggcttggaaagattatttggccgtgcgccgccgccgttccagtcgccgtcgtcactcgggaaggccatcgtcgggatcgccaagttgccgccgtcctcgtccgccccttcgccattcgccggcgagcgtgcgccgtccgagccgtctgagccgccgccgccggagggttga

SEQ ID NO: 61788 - DNA, 476 bp, Oryza sativa
  Clone ID: PAT_MRT4530_63187C.1
tttttgagatcaaaattttcccgacaatgacaacgagcgattcgtcgaaatccttcgcagcggtggcggccaacgccagtgccaaaggtggagccggttcaggtcaaatgggcgatgccggtttcaagactcgtcaacgacctgatgccattcgcaattcgaacatcgttgctgcgaaagccgttgccgatgccgttcgaacaagtttgggaccgcgtggaatggacaagatgattcaaacgggaaacggcgatgtgacgatcaccaacgacggcgccactattctcaaacaaatgtcggtcattcatccggcatcgaagatgttggtcgaattatccaaagctcaagatatcgaagccggtgacggaacaacgaccgtcgtcgtgctggccggtagtttgctcgatgctgcgagtcgcctcgttgccaaaggtctccatccgacaaccattgtcgacgcctttgaaaaagccgcc

SEQ ID NO: 61789 - DNA, 651 bp, Oryza sativa
  Clone ID: PAT_MRT4530_63188C.1
gccccacccgtcaacaagggtggcgggcgggcccgcccgtcagcggggcgcgcgcgggaagggccgaataacaatgatttggctgatagaattgcaaagataatagaagagcagtttggaatcaaacataaggaacatacttctgcgtatcggctgccatatcctgagtggtttgatagggtgccattgctacaccgatacaaagttcaatatttcgccaagttttcaggcaggatgatacatctacaatggaacacatcagccgattcttagcacaatgtgggcaggcatcggctgaagaagctctgaaagttagattttttcctttgtctttgactggatcggctttcacatggttttcatcgctaccatcagattctatccaaggatgggctgatcttgagaagcaatttcatgacacttctttgctagaatcaaagagttgaagctttcagatttaataacgtttgagcagcaagaaggagaatcgactatggattgagtctaagtgatgaacaactcgcagatcttgcattccaaggattgtcagcacctatcagagagagattcttttgccacgagtttgatagtctagctcatttaatgcagacagtaccggataatgaaagccgattgcgagaatcaagggaa

SEQ ID NO: 61790 - DNA, 831 bp, Oryza sativa
  Clone ID: PAT_MRT4530_63189C.1
atggaccttctactttttagagtcaattatctcgtcgggttcttgttaacaacgaaatttgaagggccagttcagaagactcgattccccaagccgatagttgaaatacttcaagatacagttgatgaagcggttcatcgcgcattgtttgatcagtctggagttttgatgaatactatacaagatgtgatcaagaagaatgatttggccgatagaattgcaaagataatagacgagcagtttggaatcagacctaaggaacatacttctgtgtatcggctgccatatcctgagtggtttaatagggtgtcattgccacaccgatacaaggttccaaatttcttcccgttttcagggcaagatgatacatctacaatggaatacatcagtcgattcttagcacaatgtggggaggcatcggctgaagaagttctaaaagttagattttttccattgtctttgactggatcggctttcacatggttttcatcgctaccatcagattctatccaaggatgggccgatcttgagaagcaatttcatgactatttctttgctagaatcaaagagttgaagctttcagatttaatatcggttgagcagcaagaaggagaatcgactatgaaatatattcagagatttcgtaatgtccgcggccaatgttatagtttgagtctaagtgatgagcaactcgcagatcttgcattccaaggattgtcagcacctatcaaagagagattcttctgccacgaatttgacagtctagctcatttaatgcagacagtatcggcttataaaagccgattgcaagaagcaagggaagatcgataa

SEQ ID NO: 61791 - DNA, 291 bp, Oryza sativa
  Clone ID: PAT_MRT4530_6318C.1
ccacgcgggccggcgggaggtagacgacgacccggccgcgaatggacggcgggcgacagcggcgagcggcggagcgaaccacggcgatacggccaaaagcgagcacaccgggcggttgctcgagacgaggggagacgagccaacggctcggatttgccgggggttgctcgatggcggcggattgcggcggcggcaaccggcggcgggagaaaggggaaacggcgacgaggccacgaggggctaattcccggcggtgagagcatctacgcggcttcgggaactcaacgctag

SEQ ID NO: 61792 - DNA, 1053 bp, Oryza sativa
  Clone ID: PAT_MRT4530_63190C.1
atgtctgaagaagaagtcaatgccaagatcatggtcacggtggagaatttagcggacgaacagaggcaacagatggagcagtttttaactgattttcaaatgcgttgtcttcaatgtttcatcatgacaccagaagggccaattcagaagactcgattccccaagccgatagttgaaatacttcaagatacagttgatgaagcagttcatcgcacattgtttgatcagtctggagttttgatgagtacactacaagatgtgatcaagaagatagttcctaaaatagttactcaaaagaatcagctcggggggcaagcatatcaatatcggccagaagaactttgtcaatatgggcatgatgaagaatatcaatataacaatgattcggccgatagaattgcaaagataatagaggagcagtttggaatcaaacctaaggaacatacttctgtgtatcggctgccatatcttgagtggtttgatagggtgccattgccgcaccgatacaaagttccagatttctccaagttttcagggcaggatgatacatctacaatggaacacatcagccgattcttagcacaatgtggggaggcatcagctaaagaagctttgaaagttagattttttccattgtctttgactggatcggctttcacatggttttcatcgctaccatcagattctatccaaggatgggccgatcttgagaagcaatttcatgattacttctttgctggaatcagtgagttgaagcttgcagatttaatatccgttgagcagcaagagggagaatcggctatggaatatattaagagatttcataatgtccgcagccaatgttatagtttgaacctaagtgatgagcaactagcagatcttgcattccaaggattgtcagcaccaatcagagatagattcttttgccacgggtttgacagtctagctcatctaatgcaaacagtatcagctcacgaaagccgattgcaagacgcaaatgaagatcagttttggagttatcaagaccagacagaagataattttgaagcatga

SEQ ID NO: 61793 - DNA, 523 bp, Oryza sativa
  Clone ID: PAT_MRT4530_63191C.1
ccggccgggatgtgcgctaattcactctcgtcgtcgccgccgccgtaggaagccacccactctgtcgccgccgacgtcagctctcatcatacgagaggaggagacatgggtcatgtgagccaccagaacacctaatatcacctcgaggtacgtgatgcacaaacactactcgcgggtagacactcgacttatatatccaacacacagggttggtcgtaggaggcgatcatcctgccggccaacgatctcgcgcaactgggcgcccgccgtcgccacccacctgatgcaccgtatccagcgtggagccgagcgaggtatctcgctgaatctgttggacgagcagggccatggccaaatggacttcgttcctgaaaactcacctctccaagtgcaggagatccgcgacgagatggagactatgcagatgctcgccgcgctcgacatgcacgacctcaccggtatcgagcgccgatgatacgtctccacagctacctactaccgtctacctaagtgcggcccccgc

SEQ ID NO: 61794 - DNA, 1113 bp, Oryza sativa
  Clone ID: PAT_MRT4530_63192C.1
atgagggaggaggaggaaccgagctggttcgcgcggtgggaggagcagctgccggcgccggacgagctgatgccgctgtcgcagtcgctcatcacgcccgatctcgcggtggccttcgacatcccgacgcatgggggtggtggtggtggtggggtgggcgggggtgttgtcgggggtgatggggtgggaggtggaggtggtggtggtggtggtggtggcggtggcgtgggggcaggggagatgaacggcggggcgtcgtcggcggccgggtcgagcggcggcggcggcggcgggggaggtggcgacgagccggcgcggacgctcaagaggccccggctcgtgtggacgccgcagctgcacaagcggttcgtcgacgcggtggcgcacctcggcatcaagaacgccgtccccaagacgataatgcagctgatgagcgtcgatggcctcacgcgcgagaacgttgcgtcgcacctccagaagtaccgcctctacctcaagcgcatgcagggggtcggcaacggcggcggcggcggaggagggggcggcgccggcgccggcgggagccactcctccggctccggcacggacgccgccacggagcacctcttcgccaccgggccggtccccttcctcccgcccggccgcgcccccgccggcggggacccgtacccgccgttcgcccccatgggcgggcaccaccaccacccgccgcagatcggccacttccaccaccaccccgccgcgcgcccgctcggccactacggctccggcccgggcgccggcttcgaccacgggttcctcagccgggccgtcgccggaggcggcccgcccgtcggcccaccggggatgcaccaccgcatggtcggccccgccgccggcatggcgatgatggcgccgtcccccttcgccgaagagctggagctcggatcccgaggaggcggcggcggcggcgggcgccgcgagcttactctgttcccgacgaccggcgaccactgaggcaagcagacagacagaccgacggcggcgagccggcgacgggcaccgggcttccgtcctcgggtacatacaattcgttcgcttcatctccccctctgctagttccccaccagatcg

SEQ ID NO: 61795 - DNA, 651 bp, Oryza sativa
  Clone ID: PAT_MRT4530_63193C.1
atggcgagttgggatgacgatgaattttccgatgaggaagaacagtctatgggaaaaaggctttgggaggacgaagacgccggcgacgacttcgccgcggtgaaggacacgtgggacgacgacgacgacgttaaacctgggaaggagacggccgccacggcggcgagcacgaaacctcctgcaaccaaagggaagaagagccaggccaacgcgaaggcgaaggcagaagcagcagacgcaacaccgagtgaaacctctacctcgaatgccgctgctgagatagctcagaagcagcctgacgacgacgaacccatcgagaagttcgtcccaaaatcggagaaggaattcgccgagtacgccgagcgcatcgcgaaagatcttcttagaccttacgagaaaagctaccattacattggtcttatgaaggcgatgaacaagctcgccgtggcgtcgctgacgtcgacgagcgtgaaggagatcgtgtcgtccatgacgacggtggccaacgagaagctcaaggccgagaaggcggccgacgccggcaagaagaagccagggcagaagaagaagaggcttcacgtcaacaaggccgaagggcaaaagtttcgtgatgctgacgacgacgacgacgacgattgtctatcatcttaa

SEQ ID NO: 61796 - DNA, 1625 bp, Oryza sativa
  Clone ID: PAT_MRT4530_63194C.1
aaaagtatggattctccgacgctcaaagcacagcaatgtcaagttgttgatcggttaccgacctagccattggaattcgcaaatgcgtcgattgacatgtagctgtaggctctaattgaatttgacatggttgagcgggacagtgtgaagaggtaattgaatacctactgctgattgatggtgcattattgctaggctctggaaccagtgagatgcgtcaggaaatcagtttctttgctggtgtcatcagtgagttacgtaaattaatatcgcgggtggttgcttcaatgagggattctttcatagatttgaagttcgaagtgggtgcgtttccatccagtttcgtccagcattatgtttccttcaaggagaaaatccatggctatgatactcaagaaataaagactgattttgcgttaatctcagtaaatgtgacttggtcgactttgcctgccggactaaagtgattactcttctgttttatcgagtcggccaagagtgactaaaaacctgtggcttactaaacctaggtacggcaaacttggatagtaaagtattgtaataaatctgtcattgtaattaagccctttgtccctaaaaaaagtacttttagttactagtagcagggccgtgctaacgctacggcgatatttagtaagcatgcataaaaatatttatatatgtcaacatccatgttcattttattattattataactgtcacaaacttgggtagcttttagttgtgtagttcaattctcgatcaagagggagtaatttctgtaccttgttgatgtgaatactttgtaagatggttcttagttttctatatgcaaaaaaaaaaataaataccaaacaaattataaaacttgcgacctagaaacccccgacaccccgatgccatcggccagaaacaatttgcattcctggcgattacggtgcagttgacataactttatcacgtttttatggttcagctgaggccaccgtacagattcttatatcagaagtgcactgcggctccagcttgttgctcggcgggctagccagtaacttggataaggaaatccgtctctttgatggtgtcatcagtgagtcacgtggtttaaagaggtcggtggttgctgtaaggagggattctttcatagatttgaagttcgaagtgggcgcgtttccatccagtttcgaccagcattatgtttccttcaaggagaaaatccatggctatgatactcaagaaataaagactgattttgcgttaatctcagtaaaggtgacttggtcggctttgctttctggactagagtgatacctctgtttctgtaacagaatgggccaagagtggctaaaaacctgaggcttactaaacctaggtgcgccaaacttggatagtaaagtattgtaataaatctgtcattgtaattaagccctccgtccctgaaaaaaagtacttttagtaatgcatctgaataagtgtctgttgagatgcatagtcggtcgatctcgccgtccctgaaaaactgaccaagaacttttagacatgcataattagtttcgtctctgtattatcccttcagcactaggggttgtattaattatatggccgaatcttcaaggcaacaaaaa

SEQ ID NO: 61797 - DNA, 1044 bp, Oryza sativa
  Clone ID: PAT_MRT4530_63195C.1
atggccacgtcactatccttggcgcccaaacccgccgccgtcgccgtcgccgccgccgccatcccgaggcttgttccgccgccgtctatcgacatgtcggcgctgtcgccgccgccgccgctcgtcagcgtcagcaggagcatggtagcgaagcacaaggccgtggttgtgatgggcgcgacggggacggggaagacgcggctcgccgtcgacctcgcgctccagttcggcggcgaggtgatcaacgccgacaagctgcagctgcaccgggggctcgacgtggccaccaacaaggccaccgccgacgagcgcgccggcgtgccgcaccacctgatcggggtggcgcacccggacgaggagttcacggccgcggacttccgccgcgccgcgtcgcgcgccgccgccgcggtcgccgcgcgcggcgcgctgcccatcatcgccggcggctccaactcctacatcgaggagctcgtcgacggcgaccgccgcgcgttccgcgaccggtacgactgctgcttcctgtgggtggacgtgcagctccccgtgctccacggcttcgtcggccgccgcgtcgacgacatgtgcggccgcgggatggtcgccgagatcgaggcggcgttcgacccggaccgcaccgactactcccgcggcgtctggcgcgccatcggcgtgccggagctcgacgcgtacctccgctcgtgcgccgccgccggcggcgaggaggaacgcgcgcggctgctggccaatgccatcgaggacatcaaggcgaacacccgctggctgtcgtgccggcagcgcgccaagatcgtgaggctagaccgcctatggcgaatccgccgcgtggacgccacggaggcgttccggcggcgcggcggcgccgccaacgaggcgtgggagcggcacgtcgccgcgccgagcattgacaccgtgcgatccttcctccacggcgaattcaccaccgccgccgaaactacggcggcgccggtgccgccaccgccgttcctccccatgtttgctctcgccgcggcgggcgccggcgtctaa

SEQ ID NO: 61798 - DNA, 831 bp, Oryza sativa
  Clone ID: PAT_MRT4530_63196C.1
atggagtcgttgtcgtcggcgtcggcgtccctcccggagtacgtgcagttcgacggccatcttctccccgtggcatggctggagggcgaggtgctcgccgagttcttggcgtttcttgatgacgccgccgcggcggcggaggatgaagcggagccgtacgaggtggagttcgaggaggaggaggaggaggaggaggaggagccgtacgaggtggagttcgaggtggaggaggaggagccgtacgaggtggagttcgaggtggatgaggaggaggaggaggaggatccgcaggaggtggagttcgaggtggaggaggaggaggaggaggagccgcaggaggtcgagttcgccgccgatgacggcagcgacgacggcgtcgtcgtcgtcgtcggcgacctcgttgatgatggcggcgtcatggagggtgaggtggactacgtcgtcgagcacttcgaggacgacgataacggcggcggcagcttcgacgaccttgtgtcagacgccgacgtggcggacgacggcggcggcggcggcttcgacgaccttgtggccgaagccgatgacgaggccgccaccaccccggcggcggcggcggcggacgacgcgagggcgccgcgcaccaccgccaggatgagcgtgaggcggcccgtgagtctcttgggcgtcgactacgacaccatcaacgatatcgtccgcaaacacctggcggagaagaatcggcggcggcgcgcccgcacgatgctgctgctccggcggcagcggcgccgggggacggcggcggtggcgcaccggcgatgcccgcgtaggcacgcgcggagacgcatcgtgtaa

SEQ ID NO: 61799 - DNA, 1641 bp, Oryza sativa
  Clone ID: PAT_MRT4530_63197C.1
tttttttttttttttttttttttttcctcgttctttttaaaggctacttaattattaaagccagattgacaattaagaaaggttacaccacaaattaaggttcaaaagaaacaataaaagaaaaaggggaaaaaaagaacaataacgaaaacacataatcagagatcgagcaaacactacgaaataattgtacatagagatagaaatagagcagtagatatagatcgatcggtggtaaccctgaatacgtggttcatgcgtgcgttcgctaaccttttgcaagctgcggccatgaacccttgcgatgtcctttcctttgcttcttgtgatctctcctctcatctcctctcctttcgccggagctacacccatgtatgcgcatgtcagaacggtggccgtgcgccggcccagccatggccgtcggcgccgggagggagctgtgagccgccgccaccgggcatgttgttgagcggcaggttgaagaacgggaggccggcggcagacgggtccggcgggaacgcgccacccatgccaccagcatcggcgccgccgccgggctgctgcatctgcaggccggcctgcggcggcggcgcctcctcctcctccagtgggaggcgctcgtaggcgacgttggcgaaggacgccgcgatgacgatgaccgggcccgcggcgtagagcgcgccgacgacgttgccgccgacgacctgtccctggcccccggcgaggaagatggtgaggctggtggcgccggggggagccggcggcgggaggaaggagcccgagagcgacaggatctcgaacctcccgtgcagcgacacgacggcgcccgcgggcgccgacggctgacgcagcgtcacgttggtgaccacgccgctgccgctcagcacgcacacgccgcgctgccgccggcgcgcgtacgtggagacgcactcgaacacgtcgcagccgctcccgacctccaggatgtgggcgcgcagcgtgttggcgctctcccgcgtgatgatcaccggcggcttcggcttgttcttggagccaggcgggcgcccccgcggccggcgcgccaccacgtcgccgggcccgccgaccgcgccgtcggtggcaggacctgacgacgaggacccgccgtcatggtccccgtacggcccgccgttgctgttgccgccgccgccgctgccgttggggtcgtcgtcggacggctcgtgctgcttggcgtagctgtgctgcagctggaggtcggggtggaggtggtggagctggtggacgtagcgcgtcgcggcggtgccgaggtcgagacctgccatgcttctccactagctcatgtactgatgtagcagcagcagagcgcctctctagctctagcaaaaaaaatttaaaatctaaaaaaaaagtggagaaaaaagagaggaaaaaaaccgaattggaacaggggtggtgttttgtttttagggttaaaaggcggtgttggaaaaggaagcaatgatttttaaagtgggggagttgtttatactcctccttgtttttaaaatttttggatgcacagagaagcaaacagagagagaaattaaaaaaagaagcacaagagagcttgcatggaggagagaacaccaagagagagctattgctgttaaatctgaataaaag

SEQ ID NO: 61800 - DNA, 342 bp, Oryza sativa
  Clone ID: PAT_MRT4530_63198C.1
tgggtttttaatgtgctggggcactgcacacggtgcaaagtcagctgctgtattcacaacataccgagtttatttctaagaggaaaaactctactactgtaacacaatatgacaacggatcccgttattactagattccattagagttctttaaggaacctactaaaggcttacagagcccattttaggggagccaaatccgctacactatatgcatcttagccgaatcgggaaacatagtacattcatttttgggtccaaaaatttaccggaatcctttccaactacattaactcgcgaaccaatgacacgattgctacctgacatcctttttttactgca

SEQ ID NO: 61801 - DNA, 491 bp, Oryza sativa
  Clone ID: PAT_MRT4530_63199C.1
gccaggcaccagcatagttggacagagatccctgggcccggaaactggcccatccacacagtagttgaaaaaaaaaagccggggtgctaaacttttaaccttgagccggggggagaccatccccacgggggctagccctagctaggaaaaagcaggcaccttgcttggggggacgcatatgttgaatacattacggggggggtattcagggctttgttcagtttgccccaagggcccaaaagcaaaagcactatctgaaggctgaaaaccatggggggcgtttcacataagggcccagttgacaagcttgaaccggagcctgggcggggcgacgccgtagttaaaaaccttccacgccaccgcttgctaatacgatgcctggcgcccaatgctcgatttgcaaacgcctccagggaaataggggaaaccctgctgcatgatcttgggaaactccgagcagagggccttccggcccttgtgatccaggatca

SEQ ID NO: 61802 - DNA, 1161 bp, Oryza sativa
  Clone ID: PAT_MRT4530_6319C.1
atgcttggaagaactttaagacttggcaccgccggatatgccggtaaggaagaggaatggcagcaggaggatgaagaagaggaggaatcgaacacgccgcgggtgtttgccgatatcccacaccctcgggctaggaactgggccagggctagataccagaagaatgctaatggcacaattttcatgccaaatccagaagatcaacgagtgtacgaagctatagaaccaacgagctgcacactcacagttagggtgatgccgaccttcacggttccagcagccgagggacttgcgtacaagccgaccccagagacaagagtgcatggagcgcaacttaggggcgactgtgcaaaagttcaagtcaactcggtgaagcccgaatacgagctgttcccactaaagtatccaccgaacgacgaggtcctatcactaggaaatgcccgtggtaccttcatccaatggcccaaggacctcattgagataagggttacagcgaggccaaccattgaaccaggcggtcgtccgccaaagagaccctcctcttctccttcagcccctcctgctcaagatcgtcatgcacaatcttatgatgtgcaattgaagtacgacacggatttttgggaggaccgaacggaggccgacagcaaggcgattcatgaacccccaccgatgaagaagagcaggaaggcacactcttcccctcagagaattactctcgataaacccatgcaaaggggagaggaggaggaggaaagtgaccattggatccttctggtcataacacctaagtggagtacatgtcactacctgaactccagaattgataagaacgcatatgattggaccccaattcaactagcgatagatgaagtgtgggcccaatacgtgcaaagaggaggcctcaggaagacaagacatcacatcctcatccacaaaaaagacttcccggtgaagcaacaaataggtgaccagtgcggattccatgtgtgccacaacatgcgccttctgtacaaagaaaaggtgaagactttgacagggtttgagggcaaaattaccaagtctctgcctaccagctttgaggagattcgcgaggagatagccggcttcatcctccgcgaaataattaatcccaaaggaatgtttcggcttaaactaaaatga

SEQ ID NO: 61803 - DNA, 1559 bp, Oryza sativa
  Clone ID: PAT_MRT4530_631C.1
tcttactacacaagttgataatgatactgttgaaccatgttctaattctaaagccatctcatgtgaaaattcttctaagtggttgactgctataagtgaagaaattgagagtcttcataaaaatcatacatgggatttggaaaagctttccaaattcttcgaagtgcaaatggattgataagaaggattgtatttctagagttaaatctgcaagacttcaatgaggtattaacttcattgatgttttgaccaaagggaaggtattaacttcaatgaagtttttttatctgttgtacgccacttctccattcgggtgatgattgcttttgttgctttatttgacttggaattagagcaacttggtgttaaaactttcttacatgttgatttagaagagaagatttttatgatacaacctgaaggttttgctattctaggaaaaaaacatttaatttgtcatttgaagaaatctctttatggtcttaaacaagctcctagggagtggtataaaataatggattcttttatgattgcacaacaatattcatgaagcaattatgataattgtgtttacttaatgaaatttccccatggatctttcatttatttgttgttttatgctgatgatatgctcattgcttcttatgagaagtcaccgattaatcagtgtaaggctcaatttagatatgaattggagatgaaagatcttggtctcacaaagaaaattattggcacgaaaattcagcatgactgcaaggctggtaattatttccatatcagaaaagatacaggtataagatagttgactaatttaatctgcgtaattgcaagcttgtttctacaccttttgtttcacattataaattatcttcaagccagtgttctattaatgaagatgacaaagattacaaatcgcatgttccatatgccagtgctgttggcaatcttatgcatggtatgatttccatttgcgcagatttagctcatgaagttagtgtggttagcacattcatgcataatcctggcaaagaacattgaaatgttgttaagtggattcttcgttatttaaaaggtacttctaattttggcttaatgtttgatatgaataaggtgaagatagatgatgttgtttggtttgttcttaataaaaggtctatttccggatattctctttgtgtggttctgctgtaagttggaaagcttcaattcagtctgttactgctctttccaccatagaagcagaatatatttctactactgaaggtgtctaggaagctatttggttgtgaggtcttattcctgaagttggtattcagtaggatgttaatattgtttattatgatagacagggtgctatttgtttgaccaagaatcatatgtttcatgccaagaccaagcacattgatattaagcaccattttattcgtgatattgttgctcaagggcaagtttttatgaggaagatacatactgatgacaatcccgtagatatgcttacaaagttactctcagtaactaagttcaattattgcctatacttagtaggtatttgtggtact

SEQ ID NO: 61804 - DNA, 306 bp, Oryza sativa
  Clone ID: PAT_MRT4530_63200C.1
atggcgaccaccgcctccttcttccctcccctcacctccccctcctccgcctcctccagggacctccccgtgcgctccgcttcccccgtggcgtgggtggcgctccccgtgcctcccgggatggaatgggaggtgctggacgcctgcatcaacgccgatgacatgcgatggccgcgaagaagatggagaaggaaggaagaagacggaaaggaagaggatggatggaaaaggccttatctacatcttgcagctttgtctcttgcaggcaaaccagagttgcattctgctgttgaaggagatttctga

SEQ ID NO: 61805 - DNA, 223 bp, Oryza sativa
  unsure (1)..(223): unsure at all n locations
  Clone ID: PAT_MRT4530_63201C.1
ctgttgcaaaccttgctgcgtgccatgcccaatnaatgtttcctttggtgcacaggaaaaggagcatgcaaaatgaccccgtgccaacacaaggtgtgcgacngaatgctgcactggcttatgccatagtgtgttcccaggggtggaacctagcattgctatggttgccttaggtntctcaaccttgacctatttgtttgccttgtgccatcttatgttggca

SEQ ID NO: 61806 - DNA, 428 bp, Oryza sativa
  Clone ID: PAT_MRT4530_63202C.1
gtcacatctagagtgaataagacagatggctttcgtccgtgccctagttcctgctggcgattgcgtgctcggcggggcacgcgaaggactaccccacggcggaggacacgaatgcggaagggccggtcgctccccacgaaaaggcttactttgttctcattgattatttccattacgatgacgaatagcaagtgcaacctgtacgtgttatcgcccaggacaacttttagacctacatggcatgcatctccttctttgagcctgactacattcacgacgaggaaaacaaatgtgctgtgccattatcatctgaagaaagtcgaagctgtgagaactatacttactctgagcgaccacagcatgttttttgtcattcacgacaattgtcgtgatgagccttttcctgaagaaccaatttcttcctttac

SEQ ID NO: 61807 - DNA, 1203 bp, Oryza sativa
  Clone ID: PAT_MRT4530_63203C.1
ctcgatcaggtacgacagctaagctagccatctatcgttcatggctggtggtggtgtgggagcatcggcggcggcggcggcgacgataccagaggcggcgctgaggtccggcaagccgatgccgctcgtcggcatgggcaccgcgtcgttcccgttggacgcgccccagctgccggccaccgtcagggacgccgtcctgcgagcgatcgacgccggctaccgccacttcgacacggcggcggcgtacggcaccgaggcacccctgggggaggccgtgttggaggccgtgcgcgccggcatggtcgcgtcccgggacgacctctacatcacctctaagctctggatctccgacacccaccccggccgtgtcttgccggcgctcaggaggacgctccggaacctgcagatggtttacatcgacctatacctgattcactggccccggccgctgagagtggaacaagaaacgccttcgccggtgtacgacaatgactttgtgatgatggacatggagggagtttggaaggacatggaggagtgccagaggctaggtctcaccaaagccattggtgtcagcaatttcacctgcaagaagcttaacaccctgctctcatttgcaaccatccctcctgcagcaaatcaggttgagataaacccctattgccggcagaacaaactaagggagttttgtaaggagaaagaaatccagctctgtgcctactctcctttaggagcaagtggcactatatggggcagcaatgccgtcttggactgccctgttctcaaacatatcgccgtacagaagggcaaaacggttgcccaggtatgcctgaggtggctgcatgagcaaggcgattgcataatcgtcaagagcttcaatgagagaagaatgagagagaacctcgaaatttttgattgggagctcaccgatgctgatcgccaggagataagcgccctcccggaattcaggggaaaccgtgatttctatgtccacgaatctggcccatacaaaaccactgatgagttttgggatggcgagattactgggccacaactaaaaacctgttaatgggctgctcaagagcaatgaattgtgttattggtccaatataccactgagttgtcttgcttacatatattgtgaaacagctgaaagactagaatgtactctcatttttttcaaaaaaaaaaaaaaacctgcag

SEQ ID NO: 61808 - DNA, 234 bp, Oryza sativa
  Clone ID: PAT_MRT4530_63204C.1
atgagggaggccagcctccccacagatggatcagaccgcccagatgaaagagatgaggagaaggtaggagcggtgcagctgttggggagaaggaaggaggagggtcgcggcttggccattactgtgatgacgacggttgttgctcggtcaggcaattaccgcgaaaataatgtcatcctgcctggatcacctggtgatgcttgtattggagtcacatcaaggagcccagagtaa

SEQ ID NO: 61809 - DNA, 649 bp, Oryza sativa
  Clone ID: PAT_MRT4530_63205C.1
gtcgagttgtcgacactgccatactattagcatcacaactcacaaatcacctatatttacacacacatacacacacaacgcaaaatccattacaaacccaacccacgccattgccctcaccagaaatccgttcttttacttacaccacaacgagacagcactgcacatccaaaccgcaatttgaaatttgaatttcaaacaaaaaagaaaagaaaacaaagaaaagaagaagaagaagaataaaacgaacccaaatccttttttgctgcatgcctactcggccaggtccctatgtacaacgtatctgaaggaggacttgtagggcagccactcgacgcacttgtcgatcctcctcctgaggcagagctggatctcccgctgctgcgcctccgagatgctctcgcacaccagctccaccacatgccgcagctccagcgccgcgtccttggcgtagtagtgcagcaccttgggcagcatgaacgcctgcctgctcgccaccacgttcgcctggatgaactacgtgctcggcacctgcagctggtggtgtatcttgttcgcactgaacaggctaacaggtggatctgaaaatgctccagtggagagggcaaaaagagcaactggctctgggatgctgaagggcatatgggtg

SEQ ID NO: 61810 - DNA, 437 bp, Oryza sativa
  Clone ID: PAT_MRT4530_63206C.1
gcaggcaggcagcaggaagagccaaacatagccgatcgagtttgacacgaacttatgtacacaacatggtcacgtactcacatcacatacatacatacagacatactactatcagcatgtacacaatacacaacccgacgcgtggtggacaggttacacgtagcgtggtagcaggcggaacgtgtccggggttcgaagagcgccggtgagggagggtatttccggtccgttgcgcgaccgtgcgacgttgttagcctggctgcccggtggccctttgtccaccagccagccgcgcccggcgttagcccgggttaccgcgcccttgccgtacacggcccgtgcaccgcccgtcgcggccctccagcgccgtggccgagctttccctggttgaacccgtcgtcgaacggttttggttcaccgtgccggccaccatgctg

SEQ ID NO: 61811 - DNA, 1713 bp, Oryza sativa
  Clone ID: PAT_MRT4530_63207C.1
atgcgcatcgtggtgccgctgcagggggtggtgcagggacgcggggggctcgtgctcggctccctcatcccctgcgccctcttctacttcttccagctctacatcaagcgcaaccgcgcctcgccgccgccgccgcccggatcccccacggccgcctccgccgcggcggtgtcgccgatccaccgctcgctctcgcgcggcctcctcgccccgcgcgccgcgctcccggccatctccgcgcgcggcgcctccgtccgcgacgacgactcgctctactacgccggcctccgccgctgcgccgccgacccctaccacccggtcaccaacccctccggcatcatccagctcggcctcgccgagaactacctgtcgctggatttggttgggagatggatggaggagcacgcggcggaggcggcgtccatggcgggcggagaagacgaggacgagagggagctctccatcagaggcctcgccgcctaccagccgtacgacgggatacttgccttgaagatggctcttgctggatttatgaggcaaatcatgcaaggatcagtgtcctttgaaccatctcaggtggttataacatctggtgcaactcctgcaatggaaatactgagtttctgccttgctgatccaggaaatgcatttcttgttccatcaccatactaccctgggtgggacagggacataaaatggcgcactggaattgagttgatacctgttccttgccgtagcactgacaacttcaacattagtatcactgctctagaaataggcaacactccacaccccccgcctatgcacgcccgccgcgcgtggcgccgggcggcggggtgacgtgacgtcatctcctcgtcggtcggcgtcccatgaggcggagcggcaacggcggcgcggcgaagaagaagaagaagaggagcgcgaaggcaaagaagcgaggaataaaggttcgtggggttctcatatccaacccaaataaccctacaggaagctttgtgcccaagcaaacactgcatgatcttctagagtttgctgcagagaagaacatccacttgatatctgatgaagtgtttgctggctcaacatatggatctggaaaatttgtaagtgtggcagaggttgttgatgatctagaagactttgacaaaggcagggtgcacataatatatggactctcgaaagacctatctcttgccgggtttcgggttgggtccgtccgcgacgacgactcgctctactacgccggcctccgccgctgcgccgccgaaccctaccacccggtcaccaactggggtattgagtgctacaagagcagtggagggttctactgctgggcagacatgagcaagttcatcaggtcttacagcgagaaaggggagcgcaagctttgggataggttattggaggaggcaaaggattatcctctcgagcttgtcatggaatggaataactgctttgccaggtctcagctgcttccattgtaggggtttcagatagaaaattgcccatctgttgataggttaaatcaagcataagttcattctctctgtaggtccattgtgacataagctagtgttgggtttttgttttgtgagtttgtaaatcagttcctgcttgtgccagggttttggacgcgactcatatgttgtcatcaaaattatttatttatttggggttcatttttgtcactaaaaaaaaaaaaaaaaaaaa

SEQ ID NO: 61812 - DNA, 112 bp, Oryza sativa
  Clone ID: PAT_MRT4530_63208C.1
tcttcgaaccccgcgcccccattacacgcccgggtaactatccaccgttttcctttctcggagtccgtggtgacaggagcccaccgtcgccatgggtgaggagaagaaggat

SEQ ID NO: 61813 - DNA, 1292 bp, Oryza sativa
  Clone ID: PAT_MRT4530_63209C.1
tggaatagactatccgccactagactaatttctttggctcccgattttttttcaaaaaaaaaaaaaaaaaaaaaaaaaaaaaggttcgtggggttctcatatccaacccaaataaccctacaggaagctttgtgcccaagcaaacactgcatgatcttctagagtttgctgcagagaagaacatccacttgatatctgatgaagtgtttgctggctcaacatatggatctggaaaatttgtaagtgtggcagaggttgttgatgatctagaagactttgacaaaggcagggtgcacataatatatggactctcgaaagacctatctcttgccgggtttcgggttggggtaatatattcctataatgaaagcatcgtgacagcagctgctaagattgctaggttctcgtctgtgtcaactccaacacaacgcttgcttgttgccatgctctcggaccaaaagttcatttcagattacctaaaagttaatagagagagattgcgcaagatgtaccatttgtttgttgatgctttggatcaagtggggattgagtgctacaagagcagtggagggttctactgctgggcagacatgagcaagttcatcaggtcttacagcgagaaaggggagcgcaagctttgggataggttattggaggaggcaaaggtcaatgtcactccaggttcatcttgccattgcatcgagcctggatggttcaggtgttgcttcacgacattgagcgaacatgatatccctgtcttagtgcaaaggctcaggacgattacagatagccataaaccgaatcattgaaacaccaggattatcctctcgagcttgtcatggaatggaataactgctttgccaggtactccacagagaatccagggggcatagaggaaaaagatggtataatccttctttaccatgggaactactcctaacaaccagtaggagcaatcgtacgcctttgctggaacaaagacaaatcaggaccatgtttgtattgatctgttgaagaacaacagttcttttgaaagttgttgctgagttgcttttattgatctgtaggtctcagctgcttccattgtaggggtttcagatagaaaattgcccatctgttgataggttaaatcaagcataagttcattctctctgtaggtccattgtgacataagctagtgttgggtttttgttttgtgagtttgtaaatcagttcctgcttgtgccagggttttggacgcgactcatatgttgtcatcaaaattatttatttattggggttcatttttgtcc

SEQ ID NO: 61814 - DNA, 300 bp, Oryza sativa
  Clone ID: PAT_MRT4530_6320C.1
atggaggactcacctgaggacggtcggtggggctcagtggcggcagccccgggctcggtggagggcgtcgccggttggtggaggctcggcaaaggaggagtttgcggcggcggcgccgggctcggtggagggcggcgccggtcggtggagatgccggtcggaggcttgagggaggacgatggcggtggcggcgggatcggtggcggcggcgcctggctcggtggagggcgtcgccggtcggtggaggcggcgccgggctcggttgagacggcgggctcggtggcggcggcagcgggctag

SEQ ID NO: 61815 - DNA, 534 bp, Oryza sativa
  Clone ID: PAT_MRT4530_63210C.1
atgtcgccggagcagagcctgactgtggttgccgcccgtcgtcatcgtcgtgcgctcgaggtcatcgtcattgtcgcagccctcgccgtcgacaccatcgcacgcatgggaagagcaatgccggcgctggatccgatgctctcgagcacattcagcgccagatccggtgctttggatctggttttgggagggagagggaggggacccgcgctgccgccctcccctccggccgcgccgcctccgacgcccctcccctacaccggatctaggagggagatggagaggaaggggagccgcaccgccgccgccgacgtcctaggccggatttgggagggagagggagagcgaggggagggcggctgcacctccgctgccctccactccggtcgcgccaccgccgacgcccctcccctccgctggatctacgaggcagagggaggcatggggagcggagctgcaccgccagtggcatcctcccctctctggccacgccaccaccaccgcccctctcatatgccagatctaggagggtag

SEQ ID NO: 61816 - DNA, 4575 bp, Oryza sativa
  Clone ID: PAT_MRT4530_63211C.1
atggagttcaccgtcagcgcagcacggtgggtggtgggcagggcgctgggccccgtcaccggcgagctgatggaggcatgggcggcgagcaagaagcttggccccaacatccgcgagctcaagctcctgctcctccatgcgcaggcgatgctcgaaaatgccgagggccgggacatccgtaacggtgcactggatcagctgctgtctcagctccgggacctggcgtacgacgccgacgacgtgctggacgagctcgactacttccgcatccaggatgagctcgatggcacgtacgaggcggtcgacgacgccgaggaggagaggggccttgtccgtggcctcgccctgcacgctcgccacaccgcgagagccatcgccagaaagctgaagtgcacgtgcagtgccagcgccaggagccacgctgatgcagaagaagggcgatgcctccctgccactgctgtcggtaaactcctcccttgctgctctcccccaactgtgcacaacgatgatgccgctggtgctaagacaaatgaacagcatctccaagcccctaaattgaagtttgttagggttgaaatgtccaaaaaaatgtcagagatagtagagcagcttaagcctgtttgtgacgctgttgacagaattcttgggccactacagccttcaggccactccaaaaatgctaaaacccaatgcattgatttagaaaaacgacctaaaaccaccccaacgattattgagcatgaattatttggaaggaaagaccttaaaaggatcgtggcagatgaaattatgattggcaaataccgtgataatgacattaccgtgcttcccattgttggtccaggtggtatcgggaagacaactttcacacaacacatatatgaagaagtgaagaaccactttcagatctccgtctggatatgtgtttctcaaaatttcaatgcaaatgtattagcaaaggagattgtagaaaaaatgcctaagggaaacaacgaaaaggaaaatgaaagtgaccaagagaaaatcgagaaaagaatacaatcacagcaattcttgcttgtcttggatgatgtgtgggaatatcatgaggatgagtggaaaaccttactagctccatttagaaaaagtggaacaaaaggaaatatggtaatagttacaactcgaaagcaaaagatagcaaaaatggtcgaatcaaccgattgctcaataaaattggaccgcttggatcatgaagattctatgcggttattccaggcatgtgtgtttgataacaacaagacatgggaagattatccatcgggtttacagaaagttggggtagacatagtggacagattgaagggtttccctcttgctataaaaaccgtaggtcggttattaaggaataaacttactttggaccgatggactagagtatatgaaagtaaagaatgggaacttcagcccaatgatgatgatattatgccggtattaaagttaagctataactatcttccttttcatctacaacagtgtttctcctattgtgctttgtttcctgaagattatagattttgtggacaagaattgattaacttgtggattggactggggttacttggcaccgatgatcaaaacaagacaatggagtatttaggactagagtatttagaccaattggttgacaatgggtttttcgaacaggttggaaaagagcatgacagtccttatgtaatgcatgacctgttgcatgagttggcaacaaatatttcgtcacacgaaattcgttgtctaaatagttcaactttgagttctatcaacgaaattcccaaatctatacgtcacatgtctatcatagtagataacagacatgttgagaatagaatcgcctttgaaaatcataagaaagacctgagtacactgggaaacaaattgaaagctgggaacctacgcacaattatgctttttggagaatatcatggatgcttttacaagatttttggtgacgttttgatagatgcaaaatcccttcgggttatttttttgtcaggggcatcctatgatgttggagatgtgttgtgtaacttttcagaacttgtacatcttcggtacttaaggattaaagattctaggatgtgtggagcaagtctacccaatagtatcacaagattttaccacttattggtccttgatttacaagagcactatggtgaattgggttttccaagggacatgggaaaccttctaaaactacgccattttcttgtccatgatgataatattcactctagcatttttgaggtgggaaaactaaattttttacatgagttacggaagtttgaggtcaaaagagaaatgaaaggttttgacttggagcaaattgggcgactactagtactccgtgggtcactgggcatttataaccttgaaaaggttgaagggatcaaggaagcaaatgatgcaaaactagcatatctaaaccatttggatagtttagtattggattgggataatgagcgatgtaatagggatcctatcagagaaggaaatgttcttgaaaatcttaaaccacatgacaacattcgagagctgcacattgcagggcatggaggcgtatcttgcccgaattggctaagtggagacctctccattagaaatttggaatcacttctgataaaatatgtaaattgggacacatttccacttccaggaaagttgtacatgactgagggtcaagagcgtcagggttctgtcacaagccacgactttcataatctgaaaaggttggagctagttaacatacaaaagctgaaaagatggcatggggatggtaccattaatttgctccctcatttgcaaagtttaactataagtgattgccctgaattaacagagttgccactatcagattccacatcctgtcagtttcaacagagcacgatttgttttcctaaactacagaaaatcaagatttcagaatgtccgaaattgttgtcattcccccctataccttggactaattctctgttgtatgtatctattcaaggtgtggattcaggtttggagatgttgaattacagtaaagacgaatcaagtctgtatatcacaggaaaagatgctccaggtagcatgttttggaacatgcttgatttcaataatctaacagaactgcaagagatgaatatcacaaaatgtccccctatatcgttggatcaccttaaaatgctgacatgtctcaagacccttcagataactgattcaggtagcatattgttgccagttgattgtgaaaactatgtccagtacaatcttccagttgagaaactgataatccgttcatgtggtactagagggagggaattgacacatgtgctctctcacttgcccaaactatcaactttgctgatatggaaatgtcagaacgtagcaaggctcggtgtggcggagcagcgaacaataacaactcctgaatcatcactatcaccatcagctaacaaagcagccaagacactaaccacaataccgcagcagcagacaggagaagcggaggagatggaaacagcaacagcagacgatggactacttctcctgcatccccaaataaaggtgtttgaaatcagtgagtgcagagagctaagcctcgacagcggtggaatccaaggtctgctctccctccaaacgttggggatatatgattgccccaagctcctctgctcctcttcctcctcgtattcccctttcccaacctccctgcaaacgctccaactctggaacgtggagggcatggagaccctgccttctcctctcccaaacctcacctttttgtacatttcccattgtggcaatctcagagggggcgaggtcttgtgcaatctccttgcccaaggtaacctcacctctctatatgtccacaaaactcccaatttcttccttggtttagagcactcctgctcccaggtggacaaacaagaagacgtgcatcgttcctggaggttgcaggaactctccacagatgactttgcaagggttcttgctacacctgtttgccatctcctctcttcctccctaaccaaattagaccttcgttggaacgatgaggtggagtgcttcacaaaggagcaagagaaggcccttcacattctcacctccattgaggacctagaattttcgaggtgcaaaaaactgcagtccctccctactgggcttagtgaaatccccaacatcaagacattagggatctatggatgtctagccatcagctcgcttggaaacctccccaattcactgcaacaactagagatttcttcctgtccagccatcagctcgcttggaaacctccccaattcactgcaacgactagggatttcttactgtccagccatcagctcgcttggaaacctccccaattcactgcaacaactagagatttcttcctgtccagccatcagctcgcttgatggcacaaccatccgctcactggccaaagaccgcctaccaactacactccgagaaatagacgtccgttactgtggcaacgaggagctaaaaaggcagtgccgcaagcttcaaggaactatcccaattgtaaaggcctag

SEQ ID NO: 61817 - DNA, 258 bp, Oryza sativa
  Clone ID: PAT_MRT4530_63212C.1
atggcgggcggggccataccgcggcgacgcgtcgtcactggcacgagggaggcggggcgaagcgcggagcgcgggcgacggctctatcatgggcacggaaagctacggctgaaggccgccagcggcggcggcagcggcacgagggccgcgtgccggcgaggggaggactgtcgcccgcttggcagcatgctcgtgcctctctccggccggcctggtggtgtgcgcggggaggagctgtggggtggtggactgggctag

SEQ ID NO: 61818 - DNA, 4512 bp, Oryza sativa
  Clone ID: PAT_MRT4530_63213C.1
atggagttcaccgtcagcgcagcacggtgggtggtgggcagggcgctgggccccgtcaccggcgagctgatggaggcatgggcggcgagcaagaagcttggccccaacatccgcgagctcaagctcctgctcctccatgcgcaggcgatgctcgaaaatgccgagggccgggacatccgtaacggtgcactggatcagctgctgtctcagctccgggacctggcgtacgacgccgacgacgtgctggacgagctcgactacttccgcatccaggatgagctcgatggcacgtacgaggcggtcgacgacgccgaggaggagaggggccttgtccgtggcctcgccctgcacgctcgccacaccgcgagagccatcgccagaaagctgaagtgcacgtgcagtgccagcgccaggagccacgctgatgcagaagaagggcgatgcctccctgccactgctgtcggtaaactcctcccttgctgctctcccccaactgtgcacaacgatgatgccgctggtgctaagacaaatgaacagcatctccaagcccctaaattgaagtttgttagggttgaaatgtccaaaaaaatgtcagagatagtagagcagcttaagcctgtttgtgacgctgttgacagaattcttgggccactacagccttcaggccactccaaaaatgctaaaacccaatgcattgatttagaaaaacgacctaaaaccaccccaacgattattgagcatgaattatttggaaggaaagaccttaaaaggatcgtggcagatgaaattatgattggcaaataccgtgataatgacattaccgtgcttcccattgttggtaagggtggtatcgggaagacaactttcacacaacacatatatgaagaagtgaagaaccactttcagatctccgtctggatatgtgtttctcaaaatttcaatgcaaatgtattagcaaaggagattgtagaaaaaatgcctaagggaaacaacaaaaaggaaaatgaaagtgaccaagagaaaattgagaaaagaatacaatcacagcaattcttgcttgtcttggatgatgtgtgggaatatcgtgaggatgagtggaaaaccttactggctccatttagaaaaggaggaacacaaggaaatatagttatagttacaactcgaaggccaggggtagcaaaggagatcgactcaaccaattgctcaataaaattggaccgcttggatcatgaagattctatgcggttattccaggcatgtgtgtttgataacaacaagacatgggaagattatccatcgggtttacagaaagttggggtagacatagtgaagagattgaagggtttccctcttgctataaaaaccgtaggtcggttattaaggaataaacttactttggaccgatggactagagtatatgaaagtaaagaatgggaacttcagtccaatgatgatgatattatgccggcattaaagttaagctataactatcttccttttcatctacaacagtgtttctcctattgtgctttgtttcctgaagattatagattttgtggacaagaattgattaacttgtggattggactggggttacttggcaccgatgatcaaaacaagacaatggagtatttaggactagagtatttagaccaattggttgacaatgggtttttcgaacaggttggaaaagagcatgacagtccttatgtaatgcatgacctgttgcatgagttggcaacaaatatttcgtcacacgaaattcgttgtctaaatagttcaactttgagttctatcaacgaaattcccaaatctatacgtcacatgtctatcatagtagataacagacatgttgagaatagaatcgcctttgaaaatcataagaaagacctgagtacactgggaaacaaattgaaagctgggaacctacgcacaattatgctttttggagaatatcatggatgcttttacaagatttttggtgacgttttgatagatgcaaaatcccttcgggttatttttttgtcaggggcatcctatgatgttggagatgtgttgtgtaacttttcagaacttgtacatcttcggtacttaaggattgaagattctgggatgtgtggagcaagtctacccaatagtatcacaagattttaccacttattggtccttgatttacaagagcactatggtgaattgggttttccaagggacatgggaaaccttctaaaactacgccattttcttgtccatgatgataatattcactctagcatttttgaggtgggaaaactaaattttttacatgagttacggaagtttgaggtcaaaagagaaatgaaaggttttgacttggagcaaattgggcgactactagtactccgtgggtcactgggcatttataaccttgaaaaggttgaagggatcaaggaagcaaatgatgcaaaactagcatatctaaaccatttggatagtttagtattggattgggataatgagcgatgtaatagggatcctatcagagaaggaaatgttcttgaaaatcttaaaccacatgacaacattcgagagctgcacattgcagggcatggaggcgtatcttgcccgaattggctaagtggagacctctccattagaaatttggaatcacttctgataaaatatgtaaattgggacacatttccacttccaggaaagttgtacatgactgagggtcaagagcgtcagggttctgtcacaagccacgactttcataatctgaaaaggttggagctagttaacatacaaaagctgaaaagatggcatggggatggtaccattaatttgctccctcatttgcaaagtttaactataagtgattgccctgaattaacagagttgccactatcagattccacatcctgtcagtttcaacagagcacgatttgttttcctaaactacaggaaatcaagatttcagaatgtccgaaattgttgtcattcccccctataccttggactaattctctgttgtatgtatctattgaaggtgtggattcaggtttggagatgttgaattacagtaaagacgaatcaagtctgtatatcacaggaaaagatgctccggatagcatgttttggaacgtgctggatttcaataatctaacagaactgcaattgttggggatacaaaagtgtcctcctatatcgttggatcaccttaaaatgctgacatgtctcaagacccttcagataactgattcaggtagcatattgttgccagttgattgtgaaaacgaagttaagtataatcttttagttgagaatctcgagatcaattcatatggtgctagtgggagggaattgacacaggtgctctctcattttcccaaactatcaaatttgctgatacggaaatgtcagaacgtagcaaggctcggtgtggcggagcagcgaacaataacaactcctgaatcatcactatcaccatcagctaacaaagcagccaagacactaaccacaatactgcagcagcagacaggagaagcggaggagatggaaacagcaacagcagacgatggactacttctcctgcctccccaaataaaggtgtttgaaatcagtgagtgcagagagctaagcctcgacagcggtggaatccaaggtctgctctccctccaaacgttggggatatatgattgccccaagctcctctgctcctcttcctcctcgtattcccctttcccgacctccctgcaaacactcgatctctcgaaagtggagggcatggagaccctgccttctcctctcccaaacctcacctcgttgtcgattaccagttgcggcaatctcagagggggcgaggtgctgtgggatctccttgcccaaggtaacctcacctctctatatgtccacaaaactcccaatttcttccttggtttagagcagtcctgctcccaggtggacaaacaagaagacgtgcatcgttcctggaggttgcaggaactctggacggatgactttgcaagggttcttgctacacctgtttgccatctcctctcttcctccctaaccaaattagtccttagttgcaacgatgaggtggagtgcttcacaaaggagcaagagaaggcccttcacattctcacctccattgaggacctagaattttattgctgcgaaaaactgcagtccctccctgctgagcttagtcaaatccccaccatcaagacattatggatttcttgctgtccagccatcagctcgcttggaaacctccccaattcactgcaacgactagggatttcttgctgtccagccatcagctcgcttggaaacctccccaattcactgcaacaactaaagattgatgactgtccatccatcagctcgcttgatggcacaaccatccgctcactgcccaaagaccgcctaccaactacactccgagaaatagacgtccgttactgtcgcaacgaggagctaaaaaggcagtgccggaagcttcaaggaactatcccaattgtaaaggcctag

SEQ ID NO: 61819 - DNA, 954 bp, Oryza sativa
  Clone ID: PAT_MRT4530_63214C.1
atggcggcccttctccaagccgttcccaaggaaatgttgtgccccctatcaaagaaggacaatgccaaggaagtatgggacgcgatcaagacgatgagcgtcgatggggtgatgatgatcagggacagggcgagtgctctggtggcgagggtgtcgaggaacaaagggcgctcgtacctgctggatttgaaggtggtgcggcccatgtgtttggtggcgagctgcgccgaggtgccgtggttgtcgcatgcgcgctgcgggcatttgaattttggctccctatgtcggctggctcagggcgccatggtgtgcggtctgcctgacatcgaacaggtggatcacatctgcgattgttgtcaaagagcgaagcagctgcatgcaccattcctgtcggaggcgaaataccgagcaatggagttgctagagcttgtccatggtgatctctgtggaccgattagcccagccacgtcgggaggacgtggcgtgaggcggcacctcaccatgccctgcacaccgcagcataatggcatcattgaacgcctgttgaaggcaatggaaatgcccgggaggtttcagggtgaggccgttgtcactgcgatgcatatcctgaactgggcaatgacgagggcgctcgacggccagacgccctatgaagcttggtacggccagcgcctgaatgtgcattactttcgcacctttggctgtgtggcgtatgtgaagaatgtgataccacacttgtcgaagctggacagaagcgaggcgatggtgttccttggttatgaggacggaagcaaggcgtatagggtgttcgacccggaggcgaaccatgttcatgtgagcagagacgtggtgttcaacgaagaggcgaagtgggactgggcggcagccgtgactggagacgatgaagctaatcctgggacgaagaggcgaagtgggactgggcggcaaccgtga

SEQ ID NO: 61820 - DNA, 2349 bp, Oryza sativa
  Clone ID: PAT_MRT4530_63215C.1
atgccttccctctccttcctccgcttcctctccgggaggtcgctcgcggatgtgtgtgatggggtgaagaggaggcttggattgggggatgatgaaggccgggacgaggaggctggtctggccggagggtcgagccgtccggcggcggcggcggcggtggcggggcctcccggcgagtgctacgcgtgcacgcagcccggggtgccgtcgttccactccacgacgtgcgaccaggtgcactcgccggactgggacgcggacgcgggctcgtcgctagtgccggtccaggcgcagccgtcggcggcgcaccacgcggcggcggcggcggcgcggtgggtgttcggcccggtgctcgacccgcggagcaagcgcgtgcagcggtggaaccggtggatcctgctggcccgcgccgccgcgctggcggtggacccgctcttcttctacgcgctctccatcggccgcgccgggcagccgtgcgtgtacatggacgccggcctcgccgccgccgtcacggcgctccgcaccgccgccgacctggcgcacctcgcccacgtcctcctccagttccgcgtcgcctacgtctcccgcgagtccctcgtcgtcggctgcggcaagctcgtctgggacccccgcgccatcgccgctcactacgcccgctccctcaagggcctctggttcgatctcttcgtcatcctgcccatcccacagcacaacagatattctcctttcacctcgccgctgatacctctttgtgtggctgtcttttatttgagaccttttacggtacttgggaggtatgaccggtacctcccaacattcttcacatccaccgtttattttttgaggggtaatttaggaaaaaataatgtaaacaaggtcatcttctggctagtcataccgaagttaatcagagaagagcaaatcaaacttatcatgacaatgctgctgctcttattcttgctgcaatttctccccaaggtgtaccacagtatttatatcatgaggaaaatgcagaaggtgactggttacatctttggaacgatatggtggggattcgggcttaatcttttcgcctatttcattgcttctcacatcgcaggtggatgttggtatgtccttgcgattcagcgtgtcgcctcctgcctccaggaggaatgcaagataaagaacacttgcaacctaacatcacttgcttgctccaaggagatgtgttttcaccttccttggtcagataagaatggactggcatgcaacttgacttcttttggccaacaaaacattccagactgtctaagcggcaatgggccctttgcttatggaatctacaaaggggctctgcctgttatttccagcaattcacttgctgttaaaatactctaccctatattttggggactcatgactctcagtacttttggtaatgatcttgagcctacaagcaattggcttgaggtgattttcagcataatcaatgtacttagcgggttgatgctcttcacattgctgattggaaacatacaggtcttcttgcatgctgtcttagcaagaaagcgaaagatgcagctgcggttccgggacatggaatggtggatgcggcggaggcagttgccgtcccgcctgaggcagagggtccggaagtacgagcgtgaacgctgggcggccatcacgggagatgaggagatggagatgatcaaggacctgcctgaagggctcaggcgagacatcaaacgctacctctgcctcgagctagttaaacaggttcctctgttccatggcatggacgatctcatcctggacaacatctgcgacaggctgaggccgctggtgttctccagcggcgagaaggtgatccgggagggcgacccggtgcagcggatggtgttcgtcctccaggggaagctccggagcacgcagccgctggccaagggcgtggtggcgacgtgtatgctcggcgccggcaacttcctcggcgacgagctgctgtcgtggtgcctccggcggccgtccctggaccggctgccggcgtcgtcggcgacgttcgagtgcgtcgagacggcgcaggcgttctgcctcgacgcccccgaccttcgcttcatcacggagcagttccggtacaagttcgccaacgagaagctcaagcggacggcgcgctactactcctccaactggcggacgtgggcggccgtcaacatccagctcgcgtggcgccggtacaaggcaaggacgacgaccgacctggcgtcggcggcgcagccgccgtccgccggcgggcccgacgacggggaccgccggctccgccattacgcggccatgttcatgtcgctcaggccacacgatcacctcgagtga

SEQ ID NO: 61821 - DNA, 483 bp, Oryza sativa
  Clone ID: PAT_MRT4530_63216C.1
ccccgggctgcaggaattcggcacgaggcatccgcgtgaccgcgcgcctctcacgagtagagcacctcccgatccgatccagagttccagacggatcacctcccctcccctcggcaaatcacagcgccctccaccccggatccctcgcctccgcgtcgccggtctgccttcgcgccgcccccggtcagcgcctgcgaggaggaacgcctcgccggtcgcctcggcagtctcccaccctcctcccagtcgcgcagctcgcgctcgacctccgacgattgcctgtcgccgccgcctcagctggcatcgccgctgtctcctcagcctccgcctcaaccggcatcgcctcgcatcgccgtcgccttgccctcaccgtcgcgccgcattgccgatttcttcccgcctgtttgcatcacctccacggtgagtccgtcgccgaccccacggccgcgttcgccggggtcaccggttccacgcctcaaagcc

SEQ ID NO: 61822 - DNA, 177 bp, Oryza sativa
  Clone ID: PAT_MRT4530_63217C.1
atgtcgccgatgtcgagtggtgacctcttttgcaatcaacgaccatggatgcggctcagaaacgccacgccgggagccactccaaagaggaaccgatatggatcagcaagcacacaactcgccagcttacctgtcaagtcgggctgccttcgtggaaccatcaagcatcgcatctaa

SEQ ID NO: 61823 - DNA, 541 bp, Oryza sativa
  unsure (1)..(541): unsure at all n locations
  Clone ID: PAT_MRT4530_63218C.1
tttcttttttttttnnnnnngganctccgtgaggccccctttttctttaggcttagcgaggttacttgtcgcgtggggagggccgggtgtagttctgagttggcgacgagcacacggggaagaaggccgtcgcctaacttcttctcatcgggggtgcgggggggggtgcgctgcttttgtttggacccncgagcagggcgcggttgcggctccgggccggttttccgatgttggccggcggtctttctggtcggggcttggcggggtgccgggggggcggctcctgcgggggtggggcttgccgcgggccttcgggggtgccctggccggggctggggcttgggtggtgttcttgggcccgggccggggcggtttggggggccctggggggcgtgggtgttctgctgtgggcgttggggggcgtggggtgctgtttggggtggggttgggcgggcgtggggcgggggtgggcgggggggcgtggggggcgccgggggggggggcgccccgggggtgcggggtgggggtggcgggcgggggg

SEQ ID NO: 61824 - DNA, 657 bp, Oryza sativa
  Clone ID: PAT_MRT4530_63219C.1
atggctgcggaagcccttggtgctattggcctggagaagagcattcccctgcttgaggagagtttagctgctgatcctgccgtggaggttcaggaaacatgtgagctggctcttaggcggatagaacaacaaaagaatgctggtgtttctgaaagcacaaccatttcaccatttctctcagttgatccagcattacctgcaaagcaaggactttcggtacaccaactaagggagattcttctcaacgaacaagaaagcatgtatgaacgttatgcggctctttttgcactaaggaatgatagcagagatgctgctgtttctgctatagttgcagctctaggtgccaaaagtgcccttctaaagcatgaggttgcttatgtgttaggtcagctgcaaaataaagctgcttcggatgcgctttccaccgtcctgaagaatgttgatgagcatccaatggtcaggcatgaagctgctgaggcccttggttcaattgcagatcaagaaagcattgcacttctggaggaattcgcgaaggatcctgagcctatagtctcccaaagctgtgaagtcgcgctcagcatgctcgaatacgagagatccggaaaatccttcgagtttttgtttctgcagactcctggggtgcagcaggagtcctga

SEQ ID NO: 61825 - DNA, 1779 bp, Oryza sativa
  Clone ID: PAT_MRT4530_6321C.1
atgaagcatttggactttctgcagatggtcgaaccaatgtccaagaagaatgctcctctgttcactggccctcctcctgagcgcccggagaaccccgtgatccgcgatcccctcttcggcaaggctctcccgactccgaccgactgcttcacgctcgccgacgcatgggcaagaccacgggcgaacggccaccaccctggcgagccctgcgccgcgccgtctcttgtttgggttgaaactttctgctgtctcgaccatggtccgaggcaacccggcaatgatatcgatgtattcctggaacctgttatcgatgatcttgagattctttggaaaaaaggtgtggaaacttgggatgcatatggtcaggagaacttcaagctaagagttctattgttctgcaccattaatgactaccctgcactcgcgaggataaccaagtatgttaaattggacgagctaaaactggttggaatgaagtctcacgattgccacgtgctaatcacacaaatcttgccagttgctatcagaggcattctaccaccgaaagtgcgtcacacgatccaacgcatgtgcgccatcttcaatgcaatcggacagaaggttatagatccagaagatcttgatgggttgcagaccgatattgtgaataccctctgtcacctggagatgtttttcccactgtctttctttgatatcatggttcatctccctgttcatctggtgaagcaaacaaaactatgtggcccagcttttctaagggaaatgtggccacttgaaaggtacatgggagttctgaagtcctacgttcgtagcagagctaaacccgaggggagcatcattgaaggttacacgaccgagaaggctattgagttctgcgtcaatttcatgtccgatgccgatcctatcggagttccagcatctcgtcacgaaggaaggttgtcagacacatggcaaggatacgatataaatggatacacattttacaccgtcaaacaagatgacaaaagcacagtgcaaaacaacggcgtccgtatagatgcattccaggatcaagttgggtcaaacacatactacagccgcattgaggagatctgggagctaaactacatcaagttcaaggttcctttgttccgctgtcattgggtgaatctacgcactggtgtcaaagccgacaaggaaggtttcactttagtagatctatcaagggtgggatacgccgatgaaccatttgtacatgcgaaacagttcgagcagatattctacataaaagacccttcaaacaagaagatacacatcgtgagaaccctagcgctgctgtcgtcctccatcgtcgagcccgccgccgtcgccaccgagcccgccgccaccgagcctcctccgccctccattcggaccgccgccgcctcctcaccgacgacccccaccaagcctggcgacatccttcgtcatcgtcgtcgcctcctcctctccgacgcccgacgccgcctccaccgagcacgccgccgcctccaccaaccccagcgacgccctccaccgagcccggcgccgccgccatcgagactatccgccgccgccaactcctccttcgccgactcctccctcgccgagctcgaggccgccgccaccgagcctgccgcctccaccgagcctccgacgcccgacgccgcctccaccgagcccagcgcagccaccatctaccccggcgacgccgccaccgagcctgccgcctccaccgagctcggcgcagccaccaccgaccccggcgacgccctctactga

SEQ ID NO: 61826 - DNA, 399 bp, Oryza sativa
  Clone ID: PAT_MRT4530_63220C.1
atggatggctctgcttcttctttggcagtacgtcgccgcaccggtgagttgttcttgggcaaatgtccattgtgcgggacccagctggtggctcggacctcgaggaccccgaagaatccaaacaagaattttgtgaagtgccctaatcttgagaatacaccatacgcttgcagattttttatgtgggaaggtcaatatgagcaatttttggccgatggccatgtaggtctgggatatcagacaggatatgagcagttcaatgttgaagcactgtcgtcgatggggattgagggcttaccattgaagggatgtgcagcactgggacgaatgttagtgtacctggcagttgtgcaagctttgttgttgctgttgatattggtagttgtcattagcaagtag

SEQ ID NO: 61827 - DNA, 1831 bp, Oryza sativa
  unsure (1)..(1831): unsure at all n locations
  Clone ID: PAT_MRT4530_63221C.1
ttatgtatttttattttctctttcccaacagcatccactgagttatattacttagctgaaataacagtatcttcggtcgtcaaagacatgtttagcgcaccaggaacacaggtggtacatccatcatctctatttttggttaaccatatacaaaaagccagctgcataggcatcctcagttttctctgggttgcaaaggttagacggcctgtgcttcaggtaaagagttaaaacctctctgccgggacaaccaccggctgtggctccacacgcttcctctcagaaagataaggaccccttttaaccgcttcattcaactttccaatgagttcagaaaggcttggttcatgaagaagatgtgatgatgataatgccttgctgatcgccagacaacaatcatgccgtgcttccatgccaagttttgtcatctccattttgggatctgtaacaaggttgattatgtccaactttgaacaaatttccattaggcaccattctctggcaacaaggccagatattactctgtaaccagttatccttatgtctggatcttgttgtaacaccgacagaaggaagagccgaaggtgtcagttttggactggtttcttgctaccaatcaggcctaaggcctccaatgcactctcagtttcatctgtattttgactttcttccatcttcaataatttgtctatagctagaagcagatttgcaacacagtttcgatctattgtcgtgaaagcatcagctgaagaaagaagcctcccactaatcaatgttgcccttgaccgtacaatagaatcagccgaggaatcgttgatcacatcaaccatgagttgaagtaaattagtcttcagcaagaagatattgctgtgagggtgttccacgagctcattgaggacctctagtgcactcagggttttaagcatgtctcttctatcttttatctcatcctcaaataagctgagaagatttgagtcgtaaatggcagtagcagtataggttgacacagcaaagagcttagctatcagtgatagaatgcgaattcgtgccatggacgatgactgagctgccactttgtggagttgcacagacccttgaccatttggtggaaatatgatctcaatgcctttaggaatttgtgctaaacgttttatgccatccagagaaattgctgaaatctcctcatctccctcagttaaacaattcatcagaagaggatatagattgtgctgaacaaatgtgtccacaacaacagcactatctccagccttatcaagaagatgtatcacagctttgcaggctagttgtctggtattcttcgagtttgcaagcaatccagcttgaataaatgctttgtccaagcatgcggcaatagtttcatccatcccaggtacatcagcctcactctgcaatgcacctaacagcttgggcagagggtattgctccaggaactgcctcacggtgtcatcaccatgcgctcctcgcactacttcgatgcttggcacaattcggcagagcccaatttcatgtttgttcgtgctcatgacttcaaatatatgcttctgttcccatgtttcctgtctgaatccgactgtgctcaagacagcaacattgcaatcctgtatcttcatacaactcaatgcattattagctgcatcaacgaaacatatagctacccttagatataacagaatctccaagtcattgatcttgatcaccanaatggaagggggaaataaaggcatccaaagccatattctcctcactgcttctattctgaggattttgctgcagcttaactaggtactccctctgttgatttttataaggc

SEQ ID NO: 61828 - DNA, 489 bp, Oryza sativa
  Clone ID: PAT_MRT4530_63222C.1
atggcgtccggcaaggctgacgtcggcgttggcggaggagaagcgatgaggagcacgctcgtcggaatcgggtccagcccacaggttcaacaattctggacgccgcctacccgtcttcttcctcgggttcaaccccaccgagctgcccgtgcccggtacaatgagcggcggaagctggcgagcaccgagctccggcgagcgggatcccgctgtccaagtgtccatccctcctcagctcatgctccgcaacatctttccgtgattctttcgcttggtgtcctggtgctcctcttcaccaggaggcatggtcgcatctcgcatgggccgatgggcatgctcttaagcttcctcatccctggcatatccaagccgcagcagatattactttggcaggttgctattctctccttcctcgttggggctgggttcattgggctgtacctaaagttcttctactggtcgtcggaacggaagatcaagaaagcctaa

SEQ ID NO: 61829 - DNA, 705 bp, Oryza sativa
  unsure (1)..(705): unsure at all n locations
  Clone ID: PAT_MRT4530_63223C.1
agtagcagtataggttgacccagccaaagagcttagctatcagtgatagaatgcgaattcgtgccatggacgatgactgagctgccactttgtggagttgcacagaccccttgaccatttggtggaaatatgatctccaatgcctttaggaatttgtgctaaacgttntaatccatccagagaaattgctgaaatctcctcatctccctcagttaaacaattcatcagaagaggatatagattgtgctgaacaaatgtgtccacaacaacagcactatctccagccttatcaagaagatgtatcacagctttgcaggctagttgtctggtattcttcgagtttgcaagcaatccagcttgaataaatgcaccatagcttggcagaaatgatgctccatatctcgaagaaaatactttgtccaagcatgcggcaatagtttcatccatcccaggtacatcagcctcactctgcaatgcacctaacagcttgggcagagggtattgctccaggaactgcctcacggtgtcatcaccatgcgctcctgggtaggacgcgaactccgctgccgcccggagcatcgcttccatctcgccgggctccatcgccggcgcctccatctgcgacttgcttggggggaaaccctagttgcggatgcggagagcgagacgaactcgagcactgactggccccacgcgtccgcggac

SEQ ID NO: 61830 - DNA, 245 bp, Oryza sativa
  Clone ID: PAT_MRT4530_63224C.1
gagcaaagagaataatgaaatatttgcaaaataagtcacactagataaattggaacaggggaattcggactccaaaccagaaggaaaaaagacatggttgatgatccatcattctcctataacctttccaagccaagcaagcataccaccctagcatcctgtacacatctaaaattcaacgtcaccttagcagttaccaacaatccaaaccctctgtccccaccccctggatggctggatcctcc

SEQ ID NO: 61831 - DNA, 1419 bp, Oryza sativa
  unsure (1)..(1419): unsure at all n locations
  Clone ID: PAT_MRT4530_63225C.1
atggagtcttctccgccactgcacaaaagattacggcggtcgtcggagtcgaacggcgagcggcggccgccgcgcggcgagctgctcgtcgacgagatcctcacgcgcctccccatcgccgccgccgtccgcttccgtgccgtctgccggcagtggaacgccgcgctcacctccgaccacttcatcctcgcgcaccgcgccagagccgcggcggcgcgccaccgccaccccgagctgctcttcttcgcgccgggcgccgccttcgcaggagggcgcgccacctccttctacgcctgctcgctccgcgacggagactgcgaggcgccgccgccgccggccgccgcccgcgagctcctcaccgtcgccggcatcaccgccgcccacgccgtgctgtcgccgacgccgtgcagaggcctcacgctcatcttcgacacgtacaggtcggagtactatttttttaacctctccaccggcgaccacgtcgcgctgccgccatgccagccggccgcggcggcgaacttagactcgacgctgacgttgcccaccatgaaccccacgtcttatcccccggcgtggccggcgccatggatcgagctctccaccaccgggctcggctacgacacggcgaccggggagcacaaggtggtgaggctcttcaagagacgcgacggtggggagtacagctgcgaggtgtacacccagggcgccggcgggtggcgccgcggcgtcgggcgagtgccgccgtgcgcggccaacctcctcccggcgctgccgccggtgttcgtcgacggctacctctactggctgctccggccggccggccccggcgaggagccgatccaccgcgtcctgtccttctccataggcggcgagcagttcgggtgggtgtacgtgccgccgcggctgtcctcccgcatctgccacctcgccgacctcgacggctcgctgtgcgccgtctacgacaaccgcctcttcggccgcgtctacgggctcttcacgtggagcggccggtcgtcgtcgccgtcgccgtcgtggtcggtgcggtgctccatcaacctgcagatcctgccggagcaggtgagcgaggagctcgccggtgagcgcgtgatcgtgccgctgtgcagcgcgggaggcgccggcagcagcaagatcatgctcgccacgggggggcacaaggtgttcgtctacgacgtcnagcgcaacgccgtggagcgcgtgttccggatgcaagacatggtcgccgtcccgcgcggctacctccaggctcccctgctactcagcgtcggcctccacgacgagcgcatcgccgacgtcgtccaccgccgtgccggcgccgtcgacggcgagagaaggctgaaggtgaagcttggacgcccccccgatagcacgctcgtcaaagcgagcggaggcgttctttga

SEQ ID NO: 61832 - DNA, 168 bp, Oryza sativa
  Clone ID: PAT_MRT4530_63226C.1
attagggggaatggatcagctgcctatattatacacataattatttgtcccaatttatacaaatttacatgatatgttaataggatagggtgcacagaacctgagaaaggcgtttaacaattcaatcacttggtccctgaaggttttccaagacatgccccaacaaaa

SEQ ID NO: 61833 - DNA, 179 bp, Oryza sativa
  Clone ID: PAT_MRT4530_63227C.1
cggacgcgtgggcggacgcgtgggcaagacatcgtgggccgacgtctaccgactcaaggatgaggttcgcctagttgaagcccggatactatcacaagaatccccatctcttctagccgttcaatgcctgccaggcacacaagtacatggagatgctctgcgccaactctcgcgtgtgc

SEQ ID NO: 61834 - DNA, 399 bp, Oryza sativa
  Clone ID: PAT_MRT4530_63228C.1
atggctcatcctcattgtgccgtcaagccgtgctgctgcttctgctgctgctgcctcctcgtcgccgccgtgctcgccgtcgccgtctttctggccatgtcgccgcccgccgccgccgccgccgccgcatcgtcgtcacaaccagcggcggcggcggcattgcaacgggccgagacgacggcgaccatgtacaccgcgaaggagttgcgggagaagcaggacgtgaccaagggtttcttgatttggggggttgcagggcgcggaggaggacgtgaccacgacgacgacgacgacggggttcggcgcggagtcggagagggaggtgcccaccgggccggacccgatccaccaccacggccgggggcccaggcggcagtcaccattcatttcttgctgtag

SEQ ID NO: 61835 - DNA, 268 bp, Oryza sativa
  unsure (1)..(268): unsure at all n locations
  Clone ID: PAT_MRT4530_63229C.1
cccactccgatcgcaaatactctctctcgccgatagcagcagcagcagcaatggccgncctcgcgccgcatccaccgccttcgcgcaagccgcgnctggcggcgcgncgtcgtccccggccgcgcggttctccgtgtcgtgctccgcgtcgggcaacaacggcggcgcggcgagatggcgcagtcgctggcggcgtcggcaagacgttctccgcggcgtggcgctgtcctcggtgtgtctcctcggcgcgcgtcgcgcccncgcgcgc

SEQ ID NO: 61836 - DNA, 165 bp, Oryza sativa
  Clone ID: PAT_MRT4530_6322C.1
atggccacaaccatcattgggatgagtagtacaaccgtcatactgaatatgggctggactgggccagctaggggttttgacggctttattttggcacttaactgccgtcaacaaaaccccccacactttgctctttactcgtcccgagtgaaggttaaggattaa

SEQ ID NO: 61837 - DNA, 389 bp, Oryza sativa
  Clone ID: PAT_MRT4530_63230C.1
ctccaagattccacgacagcaatcaattggggcctaattgaacggcacaatatttatggatcgcctttccctttctttcgggatcacaagcacacatgcccccattgatggaatcatcacggccatggtgaaaattgataattaggtaatcaggtcttaggtcctaactatgttaaatttcatatccattacaggtagtgtaagccatggacaacctgggtgatctgtcattctgtccatggcaaggctgggctcgctgccccatggcggaggatcacttggcgaggacgttaaaaaaaacggtgtaaaactcgccctgaaggctctgcaatggctccagaaggaagttactgggggtgcccgtctccgaaaagctcagcgggtggtaa

SEQ ID NO: 61838 - DNA, 404 bp, Oryza sativa
  Clone ID: PAT_MRT4530_63231C.1
tttgttttttttttttttttgggttttttttttttttttttttggcaacataatcagaatgccataatacactaatactttcatttttaaaaagacagattacataatattccgcctatgttgattggagcaatgatttagttattataccggacatttatccatccaggggcccgcctcatctaatatattttttattttttctttgggaagagaaatctcatataaaaatttcaggccatgctagcatttaccaattctgaaaataggcacacactgggacacatgagactttatttacagggacatttaactcgctgtctatgacatgggggccctcatgtgtctatgacatatgggtctagtagcaaataatttagccccccttcgaagagggggaaaaa

SEQ ID NO: 61839 - DNA, 273 bp, Oryza sativa
  unsure (1)..(273): unsure at all n locations
  Clone ID: PAT_MRT4530_63232C.1
gagaaagagcttgcgtcgcaatnaccgccgtcgacttgatncctgcagctgacnacgacaacaacaagcagtcatccaccggcctcctccacnaccaccagctcccnnccgccgccgacaacgccatactacacaataccangcggctggaggggaaggtngccatcgtcaccngcngctcgcgtngcatcggcgaanatcngtaagggccttcgttcacnacggcgctntcgtcgtcgtcgccgacatcgacgacgccgggggccacgcgct

SEQ ID NO: 61840 - DNA, 240 bp, Oryza sativa
  Clone ID: PAT_MRT4530_63233C.1
atggtgggttgtgagcacatggttttgaaggtcgtgctcatggcaattaaagacagactgataagcggtgagaagtccgtgggggtcgctggggagtccatgcctctggttatatttatagagggggtgattatgatccaggaatggtgcactatgtggtacacctctggccagagtaaaactattcgaatagccgtgcccacggttatgggcgggttgagtaatgtttttcgtgattag

SEQ ID NO: 61841 - DNA, 1311 bp, Oryza sativa
  Clone ID: PAT_MRT4530_63234C.1
atggaaacggccatccaacgaaggctcgagcaaaacgacggcgagagcagctccttcaccatcttccgtgttcccgcgcaggtccgccacgaaaacaggcagcactacgagccccggctggtgtccatcggcccatactaccgcggccgggacgagctccgcgccatggagcagcacaagtggcgcctcctccgccatttcctccagcgagcggcgaccgtcccgctctccgacttcatgcgggcggttcgggccgtcgagcagcgcgctcgctgctgctacagcgagaggacagccatcttcgacgacgacgacgacgacgacggcttcgcggagatgctactcctcgacggctgcttcatcctcgagttcttcttcaagttaaactgtagggagcccgacgcgctgtgcgacgtcggctggggcctcccgctgctgcactcggacctcctcctcctcgagaaccagatccccttcttcgtcgtcgagaccctcttccacgccttcttcagaggcgccgtggcccaagacatgctcgtcgcgctcctcctcctgcaactcaggcccaacggcatcgtgttcccgaagctgccgtcatcatgtccggctccggcgccgaccgggaagatcaaccacctcctccacctctatcacgagggcttcgtgcccaagcctcacgccccgctggcgacggcgccaagccgccaggagggcgcctctcgtcggctgccactggtgataccttgcgtgaccatgctgcgcgaggcgggcgtcaggttcgtgaacaaacggtcgccgcgagacatgttcgacataacgttcgacagcaacaagggcgtgctggagttgccgcccgtggcgatcgaccaagccagcctcccgctgctggtgaacctcgtcgccttcgagcagagcagggggcacaccggcggcgccgccgccgcgccgctgacgagctacacggtgcttctgtcgtcgctcgtcaggacaggggacgacgtggacgagctgcacagggccggcatagtcgacaacatgctctccaacaacgacgacgcagcgtccggcttcttccagcgtctcggcgactgcagcacgatgaactacgatgaccacctgttcggcgcgctcttcgccggcgtgaagcggtaccacgacgcgagctggcacaggcacaaagccaggtttctgcgcgaccactgcagcaatccatggtctgtcatcgccttggggctcgccgtgctggcatttgtcttttccctattcaaccaattagttgttatccacagtctaatccaccataatggatag

SEQ ID NO: 61842 - DNA, 947 bp, Oryza sativa
  Clone ID: PAT_MRT4530_63235C.1
tctcggttttcatgctacaggtggattttataaatttcccccctgaagaggatctcccccatgccggtccgcagccaggacctgatgatgcagctgacgaagaccccgatgatggtaatgtctggcagtttggcaaccctgggaaccagggggctcgagaatgggatgaggcagtgcagcaacagcaggctgcaaatgaacaacaagaagatgcctggggccaagaccatccaatggggcagattgaggaaaacccaggacaactaattctacctcagcagatggccacacctctcccttcagctaggatgacatcagtccaggatcctgttctagacccccaagtccaggaatttctagctcggctgaatagaattgccagaaatgaagctccaaggcacccctacttttatcctatgaagggaatattggacaagattgacttcctctgtaaagcaaagggcatcatgcagactttgatccagggcaagcctattcctgctgctttaagaatgtccaactatttctccacattgctcctgccaaggaagtccatctttgattcctctccttcagtgggccagcatgaacctgaatgggttttgcaaccttttgagtctatttcaccccctcagccgaaaagggtggttgaggatgttctaccaatcaatgtgaggcccccatctagcccaatcagtgtggctagcccaatcagtgtggcccctgttgccctacttccccccaaggcacctgcaaagaggaaagatgggaaggccattctctatagtccctacagaagacaaagctcaagacttctgcagggtaatgcaaccaaagaattgcagatggacccaagaatgggcattgggaagccaaggggaaagtctgttaaaaagattaaggaatttgcaggtattgcaaaactctttattgatagcagtatgtag

SEQ ID NO: 61843 - DNA, 468 bp, Oryza sativa
  unsure (1)..(468): unsure at all n locations
  Clone ID: PAT_MRT4530_63236C.1
tcgacacacgcgcacggattctcatcccgagcgtgcgcgtcgcgatctacagtcgcgcgatcagctaagactctctatcacactccacacccacacaaccaggcctcccctcccccgggagaagctgcacctctaaagagggttgacgcgagaggggttccngcacttccctcccagatctggccaaaggggccgggggagaccggtggctgtcggctcccggcccctccctcccagatctgcccggaggggggtgggaggagcacggcggcgggcggtggcgtcgaggagggacgaggcggcgcggccacggcggcgaggggggttgaggcggcggtggcgcggcggacgacggcgtggcgcggacatgcagcggcggcgacggacgacggctgggcggtggcggacgacggctaggtggcggccgtgatttttttgaatgtctttatttgctttctttgctacaat

SEQ ID NO: 61844 - DNA, 387 bp, Oryza sativa
  unsure (1)..(387): unsure at all n locations
  Clone ID: PAT_MRT4530_63237C.1
atggcggagttcatctgcaatacagtttccaacaatagtaaattaagagagaacaaatacaaagccaaccccaaaactctgcaagtcaacgtgggtaaggggccgggggtggaagttgtcggggtggtcaagagggagccaagnacaggcgaccgagcagatgcggnggtggaggagctggngagcattngacagcggcgangatgggngcaggtgggggcggaggtagctccgagggtggttggnacgacggcgagtggggtccgaagcaagctcagggtggcatggacggcggtagctggtgcnggagcaagctcaggggggcttgaggatagtttccggcagggatgggtggcaggaggtagctcaagggcggcggngagatag

SEQ ID NO: 61845 - DNA, 315 bp, Oryza sativa
  unsure (1)..(315): unsure at all n locations
  Clone ID: PAT_MRT4530_63238C.1
aaagaaccgcagctcctccaaagctcctgacaatccaattaaggacgttntgccgtatgnagacctntccattgacngaatgaagaacaacagcgtatccaggaggtgattatattttttactccagcctactttctttagcacgtgcttatcnctgttgatgccagggactcaaggcattcaaaaatgattgggcnttggtttggaggttcgttgtgccacatagagatccttcactgctcccacgccaatggaggtctgccnctggcgtccagaaatcctacaataaaagtgaagccgaaaaaaaaaaaaaaa

SEQ ID NO: 61846 - DNA, 1881 bp, Oryza sativa
  Clone ID: PAT_MRT4530_63239C.1
atgctcccggcctcgcacccgctgctctacgcctgcgcctaccgggacagcgccctcgtcgccgacctcgcccacgcccccccgccccacgacggcggcgccgccgaggacgacgccccggcggtcgcggccgcgctcgtcgccggggcgcccgcgcaccaccggcacgtcacccacacggcgtcggggcgggcgcacgcggtgctcctcgcgccgccgctcgtgctcgcggcggtctcgcgggccccgcagctgccctcgtcgcacctgctgctcttcctccggcggctccgatgcctacccgggaaccggatgcgggacgagatgccgcggctggcgctgcgcctgccgttccccgacgaggaggcgctcgcgcgggaggccggggaggtggccgcagcggaggccgaggccgaggaggcggagcggagggaaggtgagctcgcgcggaggacgcccaagagggagcgccgcgcccgcagcggcggcgccgggtggacgtggaggcggaagctgtggctcatcgtcctcgcggatctcgtgctcctcttcgtcctcttcgctgcctggctcgcagtgtgcaagggattcagctgcattggccgacaaattgattttacattcaatccttcatataatatgcccaggcttctggttctggtccacgtgctctgtgcttttgatctgggtacagacctgaccaagatctgtgcttttgatggcattctcatggctggatacgatgacactggctatggtggccgagcctttgttcctcgtggcgttgacgtggcacatgtggggtccacatgtcagcccttcttcctcctccctctctcccttctctctctttctcttcccttcttccccttcagtgggcggcgggcgacgagaacgagcggcggcggcgcgcaagtgagggccggagcgacgacgacaggacgggcgagggcaggagcggcgaaccgtgcagcagccgccgccgccgtactcctccttcctccctctctcccttctctctttctctccccttcttccccttcggccggtggcacgcggggacagcgagagcgggcggccggggggcggtgaaggcggagctgcctctagcgccgccgctgctctagccgggtggccgccgccgtttggcctccccgtcgcccggcaccatcgcccatcgccgcaaaactggtgcaatttgactccctcggtggttttggagggtggtttcactgacgtggtgcacacgtggcagtgttgacctagtctttgtaccacgtggcattgacgtggcggccgaggagggaggagtgccgcatcccggtggccacaatgacgatggacagcgacccctcctcctcctcctcctcctccggcgagtagaccagcacaccgacgagggagtagcttcaggcgtcgagggagtccctgagcgcgcggacgacgtcttcgaacggtggtggtggcggcggcggcggggacgggaagaggaagacgtggtggacgggcagcagcgcgacccagtacgcgtcgaatggggagagcggcacgaggcggcagccgccgccatctccatgcgtcgggagcgcgacggaggtgacgctcctcgtgcgcaccgacggcggcggctgcggcatctcggcgacggcgaactcctccgccgtgttccgaatctcgccaaagtttgtggggtggtttgatccccactatacgccgtcgccgctcggtccgccgtcgccgctccgtccatcgcccgccgtcgccgctgccgatccggacgccgctctcgcatgaagcgaaagagggagagatagagaagggaggagagggaggaggaagaagggataagggaggatgacatgtgggacaagtgggtcccat

SEQ ID NO: 61847 - DNA, 1944 bp, Oryza sativa
  Clone ID: PAT_MRT4530_6323C.1
atggagggctatacatgttgggtgaagcatggagagcaagaatcaggaagtggagcagcagcagacagaagtgatgcgcataatcaggaagatgaaaatgagcatgacatgtttataccttctccattgggcggtccaaggcaacccggcaatgatatcgatgtattcctggagcctgttatcgacgatctggagattctttggaaagaaggtgtggaaacttgggatgcatatggtcaggagaacttcaagctaagagttctattgttttgcaccattaatgactaccctgcacttggtaatttttccggacaaactataaaaggaaagaaggcatgctccgattgcaaggaacatacacgaagccggtggctgaagaaatcacgaaagatgcctactcccaaagatttgtccggagatgaggtccacaatatggtcaaggacataagcaatgagtttgggaagaaaagaaaacgtaacaagacaaaggagaaggcctgccacacactgtcgaaggatgagaagatcgcaatgttatcatgcttgaaggatattaaagttccatcgggctattcagcgaggataagtaagtatgttaaattggacgatctaaaacttgttggaatgaagtctcacgattgccacgtgctaatcacacaaatcttgccagttgctatcagaggcattctaccaccgaaagtgcgtcacacgatccaacgtctgtgcgccttcttcaatgcaattggacagaaggttatagatccagaagatctagataggctgcagaccgatattgtgaataccctctgtcacctggagatgtttttcccactgtctttctttgatataatggttcatctccctgttcatctggtgaagcaaacaaaactatgtggcccggcttttctaagggaaatgtggccgtttgaaaggtacatgggagttctgaagtcgtacgttcgtaacagagctaaacccgaggggagcatcattgaaggttacacgaccgaggaggctattgagttctatgtcaataacatgtccgatgccgatcctatcggagttccagcgtctcgtcatgagggaaggttgtcaggtgttggcacaatcggaaggaaaagaattaggctcgatcaagcgtcgtacgcgcaggctcattacgctgtgctccaacatatggcagaagttggcccatactttgaggagcacttagcgaaaatccgagatgagaacttggggcgatctgatgcatggattaacagagaacataattctcggttcaacgaatggttcaagaatcgtgatcaagttgggtcaaacacatactacggccgcattgaggagatctgggagctaaactacgtcaagttcaaggttcctttgttccgctgccgttgggtgaatctacgcactggtgtcaaagccgacaaggaagtttcccgcctccttagaaccctagcgccgccgccaactcctccttcgccgccgtcgtcctccctcgccgccaccgccaccgagaccgccaccaccgtcaccaagcccgccgccaccgccgccgagcccgccgcctccaccgagcccgccgccgccgccaccgagcctctacaccgaccggcgtcggccttccttatcgtcgccgcttgcctcttcaccgacacgaacagcagcccctaccgaggccggcgacgtccttcctcatcgtcatcgcctactcctaaccgacgcccgacgccgcccgcccgacgccgacctccccgaccggcgtctacaccgaccggcgccgccgccgtgaactcctccttcgccgagcccgccgcctgcaccgagcccgccgccgcctccaccgaccggcgacgccctccaccgagcccgccgccgccaccaccgagcccccccggccgacctcatgcgctcaactggggtataagccaggactccacctaa

SEQ ID NO: 61848 - DNA, 2083 bp, Oryza sativa
  Clone ID: PAT_MRT4530_63240C.1
tcaactatagcgtctgaggtaaccaacaagctcgtcgatgtagcgctcctcccgttcctggtctccaacgacatccttgatgcggttggcgttgctcgcgaacgcctccctctcgccgcccaccgcgacgcgccgcaccgccgccgcgacggcgtctcggtcgaacgagccgtcgctctcgtccctggcgatctccacgccgacgccccgctccgccatggcccgcgcgatgatgccctggtccaccaccaacggcagcatcaccagcggctgcccgagcgcgacgccctcgatggtggagccccacccgcagtgcgtcaggaacgcgcccaccgcgccgtgcgccagcacccgcacttgcgccacccaccgcccccacaccacgccgcgcccccgcgtccgctgctcgaacccgtcgggcaacacgccgccggcggtcgggctccggatcgcccacaggaaccgcacgccggcgagctccagcccgagcgcgagctcgtggaggtcgttggcgctcagtggcgcctcgctccccagcgcgacgtagatgacggacttgggaggctggccgtcgagccattgcaagacctcggagcggtcgtcgtcgtcgtcgtcgtcggtgacgaggttggtcgtcggcggcaggatccccgcggggacggtgggcttccggaagaggccggtgaggaagtcgaacagctgggggggctcgagctcgtggcagctgctgttgatgatgaggcggcaccgctcctcggttcgccagaagcgttcgacgtcgggcaggccggacgcgttgggcttgaaggcgccggcgatccacccgaactcgcggcggcggaaggcgatggtggaagggaaggggatccacttgggcggcacggtgaagtcctccggcgccgtgcggggataccgggcgttcgcccagcgcggcccgaacatggcgttcatggcggccgggatgatatggaacatggcgcatggcacgcagtgctcgtcggcgatgggcgggagccagtggtggcagaagtcgacgacgatccagtccggccgcttcgcacggccggcgaggaacgccgcgaacggggcggcgaggccgtcgcaggccttcttgacgagcccgtccttgtccggcgtcacgtcggccgtcgactcggcgccctcaggcagcccctccaccgtgtcggcatcggcagcggctggaggcggagacgatcggaaaggctcgccggcaccggcgggagcctggcgaggtttcgcggcgtggagaggaaggagacggcgtggcccctcgccgcgaggcgcttggacagctggaggaaggggatcatgtggccgaacgccagccaggggaacatcaccacgtccaggccgccgccgccgccttctcccatcgccgacgatctctcgctcgccggagtcgtcggagcgagtgcttgtgtgatcgatgaatccaagaggtcggttgatggcgatgttggcggcgcgtcgggcaccggcagctagcaaggagaggacggcacggaggaaggcccgcccgccgctgtcgtcgccgcctccgctcgggcctccctggtgcccatcgctatcgcctccgctcgatcctcctctggcgccaccgccgctcgagccgggcggccgccgccgtttgggctgccccgtcgcccggcgccgtcgcctccgctcgagccgagcggcctccgcccatgaggcgcgcggcgaggcttggtgtgcgcggcgtgttggcctcggagggtggcgcggacggcctggggcgcgcgagggcgccagaggccggctcgatctggacgccgatctggacgtcgccgcggagcaggttggcgtcgaggtcgaggctgttgcgcggcgcctggaggcctccgtcgtttgcgccgccccgtcgcccgacgccgtcgcctccgctcgacctgcctctagcgccgccgccgctctagccgggtggccgccgccgtttggcctccccgtcgcccggcgccatcgcccatcgccgcctgtgggagacgtaggggaagaaggggggagagagagaagggagagagggaggaggaagaaggaaggagga

SEQ ID NO: 61849 - DNA, 425 bp, Oryza sativa
  Clone ID: PAT_MRT4530_63241C.1
cccacgcgtccgaaagaaaataaaggtttgcactgcttgttagtactccctccatttgtttggtgtttgaagttggttagtttgaaattgaactaaccaacatcatacgtttacagaggtagtatatgttactcccttcgtcccagaatagaaacatttttagcatagtgtcaagtcaaccattcttaattttgactattaatagcaaaaaaataaaaaaaagatcaataatgtaaaattgatgttgctagatttatcattgatcaaactatcataatatgtaactctttttatatttaaaacattttattttgatagatattattgggtaaagtagcatctcgaagactgtgtcgagatccaaaaatgcttatattttgggatggagtacaagtttctgctgtattttgttgtggtacaatgta

SEQ ID NO: 61850 - DNA, 370 bp, Oryza sativa
  Clone ID: PAT_MRT4530_63242C.1
tctctccactcctcctagggtggcggtggcgggagctggcagcggcagcggcacggctcggccgccttgggctccggcctggagctggcagtggcgggggcggcccggcctggagctagcggcggcgggggcggcccggcctggagctagcggcggcgggggcggcgacctcggtcgaagagtgggcggcgacctcgtgtggcggcaccaccgccatctcctcctcaccgccgctgccgacgacgacgaggaggcgacgggccagatccggcggcgacggttctcgtcccgcccggatccggcggcggcgggtctcgtcccgctcgaatccaacggcggcctcgggcgaagagtagcggcgacctcgggc

SEQ ID NO: 61851 - DNA, 409 bp, Oryza sativa
  Clone ID: PAT_MRT4530_63243C.1
gggcacaaaacattactgggtaatggctttagcagtttttacagatacatttttccctgacatatccaggaccaaccattcaccggactgaacaaaatttggtgcccaaaattattaaaaccaatggcccccaaaacaattaattttcctccacaaaactaagggtaaaagggatggaaggactcctggcctgggaagagattatattttgcagtttattttccaagcaaacggggtgccccaggggttgctcccttgaacccgaagttcaattcggcggaatccttttttgaaactcccaaagcctttggttggctggcaaattcagggcccatggaaaccgccatgcctttaaactggggcaaaatgttacttaaaacaaaaaggccaacaacctggtttggctttt

SEQ ID NO: 61852 - DNA, 162 bp, Oryza sativa
  unsure (1)..(162): unsure at all n locations
  Clone ID: PAT_MRT4530_63244C.1
cccgagcaccaagcgcaacgcgctcgtgccctgtggcatcaagctcatgaggagggccgaaaattagagtcaaatttgcctgccgacctgccgcgagaaaaatctttggtttggaatanagctgggttatcgattagatcgaatccatctccatgaaccgca

SEQ ID NO: 61853 - DNA, 418 bp, Oryza sativa
  Clone ID: PAT_MRT4530_63245C.1
tgttttttttttttttttgatggggaaacgacaaatttaaacagcaatttgcaagggatcaatggtgttgctacaaagacagacgatcagttagtcgactacggaatgcaatacattagccttcaaatgctgcagacgcaaaactacgtaatttactcataccttgaactatccacctttgctacttgctacaggtcacatctgttctactagcttacactacactgcccccaaatgggcaaatttctacctcctcccaccccgttttgccgccgtcggcgtcgccgccgttttctccgaccggttcaccttggccctcttcgacggcggcggcgtcgttgcggcggctgcacctcgcttcgacggtggccgtcccacgcttttttttggcggggcgtttttttggacatttttggag

SEQ ID NO: 61854 - DNA, 330 bp, Oryza sativa
  Clone ID: PAT_MRT4530_63246C.1
atggcagtgatcgtctcttcagagatagccgtggcagccacgataattaaccccggcagcgtcgcggccggtcctgcacggcggctccggcgaggttgcgtcggcgaggctgactatgcatgctgccagagcaaggcgccgatggccatcgaggcgaggtcgcatctcctggccgtttgccgcgcgccgatagtgttgtgtgccatcgacctcgactttcttcccgtgatggctgatggtcagatgcacgtcctcctgccagaggccgctgctgagcgcgggcggcgttctcggcttctgctccggagatgtcacgtctgttggagttaa

SEQ ID NO: 61855 - DNA, 405 bp, Oryza sativa
  Clone ID: PAT_MRT4530_63247C.1
gctagcaaaaggggaccgtatataaaaaaatgaatgacaacaggggtcaactgcgccgcgtgatgacgcatgactccagaccgaacactggagccataccactattacatatcaggagcagacaccaaccacggcgggaatgcggctataggcgatgtctgtgtgaagatggaatccacatacggatgcgcagaacaaacgacccagagccagaacttgaacaggctgctgagcatagtgaacgacatcacccagatgaagtgggaggtgctgactgatcgcttgaccgctactaaagctctggtgccgagagtgttgatgtaccagcctgagctcgtggagagactgttggtgcatgactcgccagggtatcaattgaaacgaccatggagaccagaaggaggt

SEQ ID NO: 61856 - DNA, 515 bp, Oryza sativa
  Clone ID: PAT_MRT4530_63248C.1
cttataaatcttaatgttgattggatatgctgttgattgcaccatcacaaactcacctaaccagagctgcatgaattgctctaggatctcgtatcactcgcattttctgtcacacatggctaaataattacatgaataatgatcaagccgactataagctgagttgcaccatcatctgcaatttctcctgtgcagatttcaaccatatatactccccccgtttcacaatgtaagtcattctagcatttcctatattcatattgacgttaataaatctagacatatatatctatatagattcattaacatcattataaatatgggaaatgctatgatgacttacattgtgaaacggaggaagtacaactgaaggcggccaaaaggaaaaaaaaaactagctgtatgtactactgtaaattacaaacgagcctagtcaatgccatttgccaatatgcgcttataatcagcatcacaagccagtgacttcatcccttggaagactgtgctacgtgtaa

SEQ ID NO: 61857 - DNA, 195 bp, Oryza sativa
  Clone ID: PAT_MRT4530_63249C.1
cccacgcgtccgcccacgcatccgcagttgcttcctcagggggtacgtgtccacgggggccttcctcgaggaggtcaaccacccctcccgtgacagctcccaaaacgagctcaagggcatcctcgaggtctgccactggccgctcgcgtacatcgaccttcaggcgctccgacccgttgagcactcatcaacgcg

SEQ ID NO: 61858 - DNA, 2159 bp, Oryza sativa
  Clone ID: PAT_MRT4530_6324C.1
attgcaagaacgagaatatgtttgatagcggagaggacgtacacggtcatctgatacaacgaggattcatggagggctatacatgttgggtgaagcatggagagcaagaatcaggaagtggagcagcagcagacagaagtggtgcgcataatcaggaagatgaaaatgagcatgacatgtttataccttctccattgggcggtgaaatggttgatgtggatcacaatctgctgcaagacatgttacgtgacgttgaggacccagcccagaatgagagagatggaatgaaattcagcaggttgcctgctcccaaagatttgtccggagatgaggtccacaatatggtcaaggacataagcaatgagtttgggaagaaaagaaaatgtagcaagagaaaggagaaggaaaagaatgtgtgtgagagtttggttggcctgatgttgaatattcccgggaagacaaaggacgggttgaacgcgcgccttgatctacaggacatgaatattcgcagcgaactccagcccatacgagatacagagacaggtaaagtgtacctccctctagcctgccacacactgtcgaaggatgagaacatcgcaatgttatcatgcttgaaggatattaaagttccatcaggctattcagcgaggataagtaagtatgttaaattggacgatctaaaacttgttggaatgaagtctcacgattgccacgtgctaatcacacaaatcttgccaattgctatcagaggcattctaccaccgaaagtgcgtcacacgatccaacgtctgtgcgccttcttcaatgcaattggacagaagtcgtcctccctcgccgagcctgccgccgtcaccaccgacgccgaggccgaggccgccacctccctcgttgagcccgcagccgccgccaccgagcctcctcggccctccattcggacctccgccgcctcctcaccgacgagcccccccccccgagcccgccatcgccgccaccgagcctttacaccgaccggaccggtgttggccttcctcgtcgtcgccgcccgcgtcctcaccgacgcacgtcgccgacccccaccgagccccatcggccatcctcagacaatgtctcagcaaggcgaaccaatgtcgacgacaactagtgggtcctcaagggcacatactcctaggacagggaacaaaatccctaaggaatggttccgcataacagcggtggacgccgtagggttgccgacatctccaaggaaaatattgagccgatttaggtctatctgcagggtcatagggaggcagaaatttagtattctgcaagacgacttcaagctcgtgccggccgcagagaaggacattgcttggctaacgttcaaggagagctttgattatcctgtggagcatgaggaccgtctcaggcgggctgctttcaaggttatgggcactgcttggaagaacttcaagactaagctagtcggcgagttcgtctacaacccggcaaatctagatccaacagagaaatttccttggatgacggaacaggtctgggaggaattccatgcgaagaagtcgacccccgagtccagagctagaagcgaggcatatcgcttgctccagaccaggaaccagcatccgcaccggcttggtaccaccggatatgccggtaaggaagaggaatggcagcgtgaggatgaggaagcggaggaatcgtgcacaccgctcgtgtttggcgatatcccacaccctcgggctaggaactgggccagggctaggtaccagaagaatgatgatggcacaatcttcatgccaaatgcagaagatcaacgagtatacgaagctataaaggagttggttgcctcgcaacaagcctcgcaagaggcctgctctcaaagacgcgaggatgacctcctcacgaaagcgttgggcaacaaggaacaccgtggacggacacggggcgttgggtcttctgttccctggaagtatggatttccggactatgcgtggcagtacaagaagcagacttccaacaaggcggagaaagatgcacgccttgaagccaagatccaggcgtcgatacgagctgagctgacatctgaattcgatgaaaagctcgagtcgatgagggccaagattaggcaagagatccgagaagagcaacagatcccctag

SEQ ID NO: 61859 - DNA, 447 bp, Oryza sativa
  Clone ID: PAT_MRT4530_63250C.1
ccggccgggcacctaaactatcctcctcagcgaatccatcaaacgacatcgccgcaacaaagcaaccaccaggaagatcaacagcttgtttgctctccttgatctaggtgtatgtagcgcatctgcgcatagggatgctgactctcaagtggacaagctctatcagctgcagccccatatgatgcagaatcaacagatgcttagcccatgcgccaagttcgagagggaggactgaagctcacacaccaccccccttttacaattacacggggttgaactgaggtaccgccaaatcatgcagccgccgagctatcgacagcacaggacgattactacccaattacactgacgggacattactagtgtatatgatacaaggcagagcgttaccatgccccagtttgctagcgtgtactgagaccaaccacaagcacaagcccaaactat

SEQ ID NO: 61860 - DNA, 719 bp, Oryza sativa
  unsure (1)..(719): unsure at all n locations
  Clone ID: PAT_MRT4530_63251C.1
gtttgttcctttcttcctcctcgtatacgaatcaatacgcatttctccaactccatagccaaaagctcgacgagatccaacagcacctcctgatctgcatcgttttcaacttagcttctcctgtcaatcgaaatccctaattatacattgatcggattcaatcgagcgattcgagagagaatcgcgatgtcaatccaaattccgtcagcttcttgggattttcgcggtttcctactctgtttcatcttcttcagctcgttaccaggaacaatactaacacaagaagttacattagattcggttcagattttcacgactcacgattggttctcgactaagcctacagtctttttccaatgcaaaggagagaacaagacggtgttgcctgatgtgaagagaaccaatgtttcttactctttcaatggcgaagaatcttggcagccactaaccgaacttcaaggaacaaaatgcaagagatgtggaatctatgaggacgaccctcttaaatatgatacatttgacgaatgggagctttgcccttctgatttcacagcagagggtagttacaagcgcttcaaagagaaagaatttaatgctacttttctctgccatggatgctcacaagttggagctggttcgaataaagaatcaggcaccgagaagggagaacanaagggcggaatgcatcctggaatgtggtactgattgtagtactcttg

SEQ ID NO: 61861 - DNA, 374 bp, Oryza sativa
  Clone ID: PAT_MRT4530_63252C.1
aagaacactaaacaaacagtttttgctattggtagaaaacaaaggcacacgtaatggaaggaaaagagggttttgagcctttgaaagggaagttctgcaaaatttttcaatacgaaaacagaaagcgtttttgcagaagaacacggaataccgacagcgacgcccatgggggatatttgaatgcgaaagggggagaaaatcacatggcggggcatctcctatcacatgggggtggaaattaatacccctggggctccaaaggggcagaatattggacagcaatggtgatgaaaccctgaagaagaaaacatagttcctggaacataaaacaagccaggggttcatttcagtcccgcttaggcacgtgctgaacc

SEQ ID NO: 61862 - DNA, 375 bp, Oryza sativa
  Clone ID: PAT_MRT4530_63253C.1
ccttttttttttttttttttgtagaggtaagcagtgttcttgtgcttgaataagttcacattaggtcactctattggtcacccagtctaattttcatcctcagtccagaaaaccggatacaatacatccctcaactttacaaaaccgtgcagacgagatccctcggcagtattatatctggttttggatgacgtggcgcctacgtggctggtttgactagatcctcgtcccacgtggtattgacgtggcgcttccgtggcaattggatccctgaaaaataataaaaaaaacatgggacccatatgtcagctaaaaaaattaaatggtgggcccacatgggccccacatgtcagctactcctcccttcttccccat

SEQ ID NO: 61863 - DNA, 436 bp, Oryza sativa
  Clone ID: PAT_MRT4530_63254C.1
ttcttttcctgctcctccatccattcccctactcctccttctcctaccatgcatgggaggccgtcgaggccattagcttcctcctcgtcgtcgtcgtcgtcccgcgtcttctccttcttcttggcgccgcgggttttcttgttcttggtggtggtggtggtcgtcgccttcttgccgggtcggtcgtctcgctggtggctggagggccacggaggagttggaggaggagatggggtttgccggggactgctcgccggtcagcggcggcggcctcaggagcgttccttcgctcgaacttgggccttcttgacttgacccttttttgggctgccgcggccttcgtgttagggggaagatccaagaggaggaggaggaggaggagacggacgacaagtttttcatggcgcggtcaggggctttgcgcatgatttgattg

SEQ ID NO: 61864 - DNA, 1540 bp, Oryza sativa
  Clone ID: PAT_MRT4530_63255C.1
ggctcgcatcgctctcctcctcctcctccatccattcccctcctcctcctcctcctcccatgcatgggaggccgtcgaggccattagcttcctcctcgtcgtcgtcgtcgtcccgcgtcttctccttcttcttggcgccgcgggttttcttgttcttggtggtggtggtggtcgtcgtcttcttgccgggtcggtcgtcttgctggtggctggagggcacggaggagttggaggaggagatggggtttgccggggactgctcgccggtcagcggtggcgggctcagtgaaaacggcaagttcagttatgggtatgcaagtgctcctgggaaaagggcttcaatggaggatttctacgagacgagaatcgatggtgttgatggagagaccattggattatttggcgtattcgacggccatggcggagctcgagcggctgaatatgtcaagcagcaccttttcagcaatttaattaagcatccaaagttcatcagtgatatcaagtccgctatcgctgaaacgtacaaccatacagattcagaatttctgaaagccgaaagtagtcacactagggatgctggctcaactgcctcaacagctattcttgtaggcgatcgcttgctggttgctaatgttggagattctagagcagttgtttgtagaggcggggatgcaattgcagtttcaagggatcacaaacccgaccagtcagatgagagacaaagaattgaggacgctgggggcttcgtgatgtgggctgggacgtggcgtgttggtggtgttcttgctgtttctcgagcatttggtgataagctattgaagcagtatgtagttgctgatccagagatcaaggaggagattgtcgatagctcccttgagttcctcatccttgctagcgatggactttgggatgttgtaagtaacaaggaagctgttgacatggtgaggcctattcaggatcccgaacaggcagcgaagaggcttctccaggaggcgtaccaaaggggtagcgccgataacatcaccgttgttattgtccgctttttggagggaacaacgactggtggtggaccaagtagggaggccgccagcgaccaaaactcatagtttctcccaggcagcagcatggcttgttcctgtctgtcatatctgatgctcaaggtagacgattacagtggcggcaccacccaccatgctgccaagaactgacccggcccgaatttcgtcctcgctttcatgctcctggctgaccttaggtggtgatggtggtggtaatgtaggagcagaatggcgatggggccagtgttgttacatatgatatgatcgaaggtgtatcgtgtcttatatataactttgcaatgtagattctatgcttgtgttccatgctaggtctttttttttcttttttagcatcaaatgcatgtaatagaagtaaatttaaacgatttgaacgaagttatacactgcagtatgtaacgaaatctttgcgtttgtatttcaaaaaccataagcattatgatttctcataagctccgagggtc

SEQ ID NO: 61865 - DNA, 102 bp, Oryza sativa
  Clone ID: PAT_MRT4530_63256C.1
actgtgcgaccttgggcctgggcctggccctggcgccccacggccttttctgcaatatgtaccgcagtccgcagtactggtgcatggcctcttcacgcagcg

SEQ ID NO: 61866 - DNA, 677 bp, Oryza sativa
  unsure (1)..(677): unsure at all n locations
  Clone ID: PAT_MRT4530_63257C.1
taccgctcctcacacccactcctcggacatctctgcctccctaacacctcacctcactctcgctcacgacactcacgcacactcggcacgcactacaccacgcaaccatctcccgccctgtctgcctcaattgctctttctgcaagtgccactactgcaatcaccactatgcacccatcctcccacccaacattacgccancgcgcgcacccactcccactccccgtcgctacgcgccacgccaccactcgactcgccacacacccgttccgcgggccaatcgggcgttacgcctcccaccacgcccaatcgtntcactcgtccgcacgccaaatcggccctcctgcagcagcaatgttgcatgcagctacaaccgcatgatgccccacgtgccacctgtgggcacccacgttcgccaccactcgactcgcaccacgccatccgcncaccacaccgttcaattccccgtccgcccccgccaaccntccgcgccgccaccgccaccgccaccaactccactccacaccactcgcgcgcatcgcaccatcgccactacattgtgcaacatggcccctgtcaacttccaactctcttcctgtggtcgccgtcgatccaaccgccccgtctacaatcgtaacctcctaacgattaaaataaaaaggcggtcgggttcccgg

SEQ ID NO: 61867 - DNA, 414 bp, Oryza sativa
  Clone ID: PAT_MRT4530_63258C.1
atgactacaacccccaacctggcaacctacatgaagccagagatgtgggggaagtgcctgggctgcatcaatgagctgatggatatcctgtttgcaaatcccaacatttttgttggagagaatattctggaagagagtgagaacctgcacaacgctgaccagccactgcgtgtccgtggctgcatcctaactctggtggaacgaatggatgaagaatttaccaaaataatgcaaaatactgaccctcactcccaagagtacgtggagcacttgaaggatgaggcccaggtgtatgccatcatcgagcgtgtgcagcgctacctggaggagaagggcactaccgaggaggtctgccgcatctacctgctgcgcatcctgcacacctactacaagcttgactacaaggcccattag

SEQ ID NO: 61868 - DNA, 1286 bp, Oryza sativa
  Clone ID: PAT_MRT4530_63259C.1
ccttgagttttgcactagctagctagggtgtaacgcacctattaactaggaagcgccttgtctctgctaaccaccaagctcgagcaaattaagcaagtgacacagttcagaacaccagcattcgccatggcttcctgctgcggcggtttcatggagaaggccaagccctacttcgccatgatctgccttcagttcggctacgccggcatgaacgtgatcaccaaggtctcactcaaccatggcatgagccactacgtactcgtcgtgtaccgccacgccttcgccaccatctccattgctcccttcgcgctgatcctcgagagaccggtgatcgaccagaacttctactacgccggcctgaagttcaccggcccgaccttcgcctgcgccatgagcaacatcctgccggccatgaccttcgtcatggctgtcatcttcaggatggagaagctggagctgaagaaggtgaggtgccaggccaagatcgccgggacgctggtgacggtggccggcgcgatgctgatgacgctgtacaagggcccgctcatggagatggcgtggagccggcacgccggcgccggcgtggcggaggcccccgccgccgccgccgccgccatctccggcagggactggttcctcggctcgatgttcgtcatcgtcgcgacgctcgcgtgggcgtccctcttcatcctccagacgcacaccatcaagcagtactcggcgcagctgtcgctcaccaccctcatctgcctcgtcggcacgctccaggccgtcgtcgtcaccttcgccatggagcggcgccgcccctccgtctgggccatcggcttcgacatgaacctcctcgccgccgcctacgccggcatcgtgacgtcgagcatcgcgtactacgtgcagggcttggtgatccagaggacggggccggtgttcgcgtcggcgttcagcccgctgatgatgatcatcgtcgccgtcatgggctccttcatcctctccgagcagatctacctcggcggcgtcgtcggcgccgcgctcatcgtcgtcggcctctactccgtgctctggggcaagcacaaggagacccaggagaagcaggctgacaccaagctatcactgcccacttccaaaggcgccgccgccgctgcggaggcggaggagatcaccggcgccggagaagacgacggcgacggcgacgatgacgcggagcgcagcaagaaccaccgctcgagtggtggcgtgaggtcatcatcggactccaatggacatggagctagtgcggtttgaggacacct

SEQ ID NO: 61869 - DNA, 278 bp, Oryza sativa
  unsure (1)..(278): unsure at all n locations
  Clone ID: PAT_MRT4530_6325C.1
tcgaccacgcgtccgccacgcgtccgcggacgcgtgggtggatctaggantttttagcaaggggtaaggaggcgggaggagatggggagagagaggnaggttcccggtgtnnnangcngcgctcggcgccgtnntctccgccttcttctccaccgttctcgactgattctacctcttcttgcctgacttctactacagctttctcaagttgtctcgcaaccttttatagctcctaatcctcactttacatcttgataactataccattgattacacct

SEQ ID NO: 61870 - DNA, 567 bp, Oryza sativa
  Clone ID: PAT_MRT4530_63260C.1
gctgtaagttctgctggaatcctcattttgcttggattgctacaatgctcaaattattgcttccaaagagcttcatacaaaattggaagtaaggcaatgctgctctcctttaatcttcttgatgagaatgttcatgagtgcaccactagttcactgctgatattcagtaccttaagtaaactgtgctgcccatgctacagttaattgccttttgtaaaagaaattttacctacacctctgcccaaactacaaacgcctgctcccaggaaataaatactcacattagatactgccatgacggcaatggtagagacgctgatgcctttcgaaatattctttgtcctgaagctattatggccaaggggtcataggcttttttcctctgtagaaacgtgtcccaccttgcaccaaaatggaaccgccactcctgttctgtgatatagtccagctagatactgctgcactccaatactctgccttgtcagacaactctattatccgtggagctcattggccaatgtctgatccgatgtcatggtcgaccttgggctgtggatatgaatgcca

SEQ ID NO: 61871 - DNA, 263 bp, Oryza sativa
  unsure (1)..(263): unsure at all n locations
  Clone ID: PAT_MRT4530_63261C.1
attcggctcgagaaaaaccattcactagngggctgctctatgtctccgtgcncannagnatnctttcgataaagccatatgggtaagtcaatgtaattagagagagatcacgaaaaccctcccgtttagcatttacttgtaattatttaatttacgtttttgtatcttctacatactaacaactcctagcttgattctgacagtagctactatgttagattgtaacaaattattaaatatgtagaagcaatagtgctctgttt

SEQ ID NO: 61872 - DNA, 606 bp, Oryza sativa
  Clone ID: PAT_MRT4530_63262C.1
gtcgtaggtgccatagcgcaaggtcggtcctgaacaggagcgctcatgatttttgatgagatgcaccttcttgtggctgaccgtgggcgtactctcgtggtcatggcatgggattgcgatgcttatgactacaaaccgaacgcacaattatgtgcgttggtgtatcatcacggtcttgccatcgatcgtgatttacttgattgcatgggtgtgagagctgatggtctatataattgctagctcaatgtgaggcctgtaccttgtgaatggcatatgcagtgatatcctgctaagtcatacggttccagactgaatagcatgaattcaccaggatgtgcagctctgatgactccttcaccatacaaacgcagttcggttttctgctcatttcgacggctgcactatacttactgctcgtgatcgtcatccagtgtgctgcatcagaggaaaaaccaaggcagtttctaagcatagcccatgactcgtcttgcatgtttctttgagaagtctctgacaccaatgtgagacgtactgtgccttgcgcaatggtctgcatcatgctggtctagaggatagagatagatccttggtcgaggaactcttttc

SEQ ID NO: 61873 - DNA, 280 bp, Oryza sativa
  unsure (1)..(280): unsure at all n locations
  Clone ID: PAT_MRT4530_63263C.1
aannaaannanaaagaccgaccaatctcatagcaaagcaaacagtacaatgtttttttttcagaacacgagtagaacaatgtttacaagcctatttggagcacaaaaaatctcgtaaaattgtgcagaaaccttcaccttccccatgaaacaattcatttttcacacaagttataaagtaggatatccacatactttctccgttgcacagaaaacaaatctagtatcgggtggaacaaattctagtactaccaatctgatagtagaattggagaattagg

SEQ ID NO: 61874 - DNA, 398 bp, Oryza sativa
  unsure (1)..(398): unsure at all n locations
  Clone ID: PAT_MRT4530_63264C.1
aagccgcttgaacaaacttgtgatcggatggagtgatagtgtgctggggggctgaggcatgagtgcatgcatgcttgcttgagcctgcggaacngtgggatgccaaccctgctgtgcattgagctgctggtggcgagtggttggagggcgcaagctggataaactgagtgtgcaatgacaagggctgagtgctgctgacccctggcaacaatgaacagaatagtgccctgggattgcctcggtacccctggattaacgcantgcaacagctgtttggttggattgctggctggtgaaatgtgctgtggcttnatgggatcctgggagactttttatgganccncataatggaatnggttagctatatttccaccaaataaaaaaaaaaaaaaaaaaaa

SEQ ID NO: 61875 - DNA, 2066 bp, Oryza sativa
  Clone ID: PAT_MRT4530_63265C.1
gttttgtttttttttttttttttttttttttttatcaaaattaaaaccgtcatgcatgttgctgtttgatcagacgagcaaaacacgtacagtactacacgacagtgattttaagtagacatgtacgtactgaatgaaataacagatcgatgaagggggctagctagctattaccaaactagtgagcgaattactaattaacttagaatctcttagatgatcgatgattcgatcgcatgcagcaagcatgatcagtgccgaattgtggatgtaatcaaggtaatacggcttcaatgcacagcttcctcagataccagcacgtagtaggtcgcgccctgctgcagcggctcgacggtgacgccggagtcgtcgacgagcaccggctcgccgctgtagcgcaccagcacggccgcctcgccgaacatcttcacgttgaggtgcatcgtcgccgggaagctgtagctcgtggtcttggtgcacatcgtctcgtcgtcgcggctcaccgccaccaccgtcgccgagggcggcggcggcgccgcccctccctctggcaagtttatgactgccaaaaagctagcatatctatgcatgcggaaatccaagccagagagagaggcgatgttgaaagcatctttttgagaagaaggatgccatgcacacgtccaatctcggaacaaacgcccttgcaactgatcagcgagtgcagagcttgtagcgacgacgttgctcggcgtcgcagcagcagtggtggtgaatggaaggatcatggccgccgtactagcatctgcagccgagacagcatcatgcacaggagaggcaagatgatgatgatgatgatgatgatgtggtgccggatttgcagcagcagtgacgccgatgccgtagtgcagtaaccccagcctcgccttctcgtcgtccctgttcacggcgctcaccgcgtcggtgcagctcatgtcgtccatggaatggtggtcgaacaccttggaggggttggagcaggtgatcatcatgtcgtccatggtctcttgctgatgctgccctagtgcctcgttgcataggccgaggagcacgctgggtgagatcgtcgatgggtgggtggtgatcgctgccggggtttgcgtgtgggacgacgagccgaggacgccgccgagctccgtcgccggcatgtactggctcgccggccactgcaggaggagcgacgacgactccggcgaggtgatgagctgatcatcacgtgccagcggcgtgggatggctatggtagtagagctggcacgcgggcagctgggtcgtcggcgccggcgccggcgagaaaaggtcgatggcggctgacgtcagcagcgcggcagcagctggtttcaccgacttgctggacccggaggagcggtcggaggaggaggacgaggaggaggtcgcggcgaggagatggcgccgcggcggcgtcaagggcgccgccgccgctgcagaggggagtacgatgttcgtcgacggcggcgccgacgcgcgcggcagggcggcggcgcggccgtggtggtggtggtggccggcggcgcgcagcttgttcttggtgcgggacttgcggttctggaaccagtagaagacgttggcgtcgccgacctggccgtactcctgcagctgcaggcggatgcggcggatctcgtcgcgcggcgggttcaccatcccggagttgaagatcccctccagtatccttatctgctccggcctcgggttccaccgcggcttcggctccggattcctcgtcccctcctcacaccctgaggagagcaaggagggcttgccgttgccggtggtcgcagcagtaggtggcgagaggaggaaggaagaggacgagctgccgttgccgttcatgtcaggctgctgctgctgctggatgttgcaggcaagattggacctgaacatgctcggccagtgcctgttcggtgaggccatgctgctgctgctggcgatcgagatatgctttgcaacgaacgaacgatcaaatcagatggatggatgatggcgagatgatgagagagggagcagggggccggccggccggtgtgtgcg

SEQ ID NO: 61876 - DNA, 369 bp, Oryza sativa
  Clone ID: PAT_MRT4530_63266C.1
atgtcgtccaagggtttggttgtgttcgctctcctcctgctcgctgctgctttcctcgccacctcagaggcggccaactcgcagccgacctaccctccggccaacggtggcagcgacggccaagcgggcggatcatcagcggctggtggcaacggcaaatcggccggctatgttgcgccctactacccaggcccgtggtggtggccaaacggcggcggcttctacccgccgcctccgtttaatggcggccctggctggtacgacccgcagttcggcggctgcccatttgggtgctgtggctacggggctttcaacgagtgcttgcagtgctgtgcgcgtccgtggttccccttctggtggtggccataa

SEQ ID NO: 61877 - DNA, 478 bp, Oryza sativa
  Clone ID: PAT_MRT4530_63267C.1
tcggtttgccaaagcattccaccgagcaggagccttccgccctcttcgctcctgcatcgccctgcccttcgccgcaaccgccgccgcgaccactttctacaatccctactgctcccccgccctcgtctcgaccgcctcccaggtcctccaccagactcgcaacatgcactccaaggtcgtcatcatcggctccgggcccgccggccacaccgtcgccatctacgcctgccgcgccgacctcaagcccgtcatgtacgagggcttcctcgccctgggaatcgccgccggcggccaggtcaccaccaccgacgaggtcgagaacttccccggtttcaagatgatccagggcgccgacgctcatggaccagatgcgcgcgcagagcgaggcctgtggcaccgagatcgtcttcagaccgtggcaaggtcgacctctctcagagacctttaagtactggctcaaccccatggcgacgaccag

SEQ ID NO: 61878 - DNA, 150 bp, Oryza sativa
  Clone ID: PAT_MRT4530_63268C.1
atggagggcgacagtgtggaactgatgaagggcaatgatggcaaactaacggcaagcccctggtacgcggtggtgaaactcatggacacacggatgcagggtgggctgtgctactacacgcgtcaggccaggatgagcagtgaagcttga

SEQ ID NO: 61879 - DNA, 233 bp, Oryza sativa
  Clone ID: PAT_MRT4530_63269C.1
catgtggtcacgggagcaacactctagggggccatgtgcgcgatttagcccaggaaatcactttggggcctctcttaattaccggggttgctgacctggccggacaactattatgagggctttttaaatgccagccaatgacgacatacatgcacacggatgataagcctttgttatgtctaagtgcgagccaaaacataggccaggtggggggggcctcggcgggcacctag

SEQ ID NO: 61880 - DNA, 465 bp, Oryza sativa
  Clone ID: PAT_MRT4530_6326C.1
atggggaattggagcggtggatgcagggagaaatttcgtgaagtttttgagtggaaggacgcggatgtggcgttcgaggtcggcggcggcggcggggtgagattcgccgcgcaccggtgcgtgctcgcggcgcggtccaaggttttcaaggcggagctcttcggcgcgatgaaagagggcgacgccgcatgcgtcgtccgcatcgacgacatggagccgcaggtgttcaggacgctgctcttcttcgtgtacaccgactcgttgccggagatgagaaaggaggaggaagaagccatatgccagcgtctgcttgtcgcagccgaagtgtacggcatggagaggctcaagctgatatgcgagagcaagttgtgcaagtacattgacgtgggcacagtggcgtccatcatggcgttggttgaccagagctgcccgttcatcacggaggagttgattggcatgctctga

SEQ ID NO: 61881 - DNA, 175 bp, Oryza sativa
  Clone ID: PAT_MRT4530_63270C.1
ggttaaccatgggagtaactaacttgtggtaacttaaccgtgcggtggtaacgtttgtgggatttatacataatatatactctttttctatacaaaatacattttacaccgattactccatcttcctgccactacacatatatacaaacttgggtaaaaaaaaaaaaaaaaaaaa

SEQ ID NO: 61882 - DNA, 2550 bp, Oryza sativa
  Clone ID: PAT_MRT4530_63271C.1
cgctcctcgagaacaccactccctcctactagtagcttctctctctctctcttcttcttcctcgctttgcttgggttgggttggagcggtgagacgagagattgaggggaggagaggagaggacagcagctgcccctcgattcgattcttgagtgatcatcttgggcttgggcgttggcgccaatgctcgcgcggtggctgctcgtgctgctcctcttgctgcctgtttcttggtgtcatcaagatcggcatggccgccgccattacccgcggcggtggaggagcagcggcagtaggagggagctgcacgagccgctgttccctctcgagaacgcgcccgcgctgccaccgccgccgccgccgccaccggcgccgttctttccgttcttgcctgactccgccccgccgcagctgccaccgccggtgaccacgcccgctcccgccggtggcgccggagatggtggtacggacgcaggcgccgccgccaccggggacgcgtcttcgtcttcgtcctcgtcggcgtcgccgcaccccacggcgccggcgaacatctcgtacatggccatgcccatctaccactccgcgccgctccgctccttcctgtcgtcgcaccgcctcctcaccgtcctcctcccggtcgccgccgtcctcgccgccgtgctagccgcggcgctcgtctacctcctcacgcgacgccgccgctgctccaagggggagccgcacgcggcgcatacgaaggccgtgctgctttccccggggaactccacggcgctctacgacggcgaccacgaccagcatggccgggggtccaccgccaccgcagcctccagcgccagctcgccggaactccggccgatgccgcctctaccccggcagttccagcagacgaggacgagcatgccgtcaacttcgcaaaccatccatgaagccggagcagaggacaagcgagcgccgccaccgcagagtgttcgaccgccgccgccaccaccaccacctcctcctccgccgccaatgccgccgagaacggacaacgcgagcacgcaagcagcgcccgcgcctcccccgccattgccgcgagccggcaacggcagcggctggctgccacggcggtacacggagcgcgccgcgccgacggtgatcagggcctcggcgggggcagtccacccggaggagtcgccggcgcgcgcctcgccggaggagaaggccgccgacgcggccgctcggccgaagctgaagccgctgcactgggacaaggtgcggccggcgagctccggccggccgacggtgtgggaccagctgaaggcgagctcattccgagtgaacgaagagatgatcgagacgctcttcgtctccaactcgacgaggagagcatccaagaatggagtcaaggaggcaaatgcagcttgctgcaaccaggagaacaaggtgctggacccgaagaaatcgcagaacatcgcgatcatgctgagggcgctcgacgcgacgaaggaggaagtctgcaaggctctcctggatggccaggcagagagccttggaactgagctgctggagacacttctaaagatggctcctagcagagaagaggaaatcaagctgaaggaattcagggaggatgccgtatctaagctcggccctgccgaaagcttcctcaaggcggtgcttgcgataccatttgcgttcaagagggtcgaagcaatgctctacatcgccaacttcgattcggaggttgactacctcaagacctccttcaaaactcttgaggcatcatgtgaagagctgaggggcagcaggttgttccacaagatcttagatgcagtgctgaagaccggtaaccgcatgaacactggcaccaaccgcggaaatgcaagcgccttcaagcttgatgccctcctcaagttagtcgacgtaaagggtgcagatggcaagacaacccttctgcattttgttattgaagagattgtcaagtccgaaggtgccagcatcttggccactggccaaacatccaaccaggggagtgccattgcagatgatttccagtgcaagaaggttggcctcagaattgttgctagccttggtggtgagctcggcaatgtcaagaaggcagctggaatggactcagacacactggccagctgcgttgccaagctttctgctggtgttagcaagatcagtgaggccctgcagctgaaccagcagctcggttccgatgatcattgcaagagattccgcgcctcaatcggtgagttcctgcagaaggccgaagctgagatcaccgcagtgcaggctcaggagagcctcgccctctccctcgtcagggagacgaccgagttcttccacggtgactcggtgaaggaggaagggcaccctctgagaatcttcatggtggtgcgcgacttcctcaccgttcttgatcatgtctgcaaggatgtcggcaggatgaacgaaagaacagcgattggatcttcgctccggctggagaatgcacctgttcttgcgaggttcaacgcagtccaacccagtagctccgaggaggagagctcatcgtcctag

SEQ ID NO: 61883 - DNA, 1778 bp, Oryza sativa
  Clone ID: PAT_MRT4530_63272C.1
ggggcgccgtctgggatagggctctgggccgcgctcctcgtcgcggcggccgtgctggcggccggtggcggggcggcggcggcggcggccaaggacgaggcgtacgtgacgctgctgtacggggacgagttcgtcctcggcgtgcgggtcctcggcaagtccatccgcgacacggacaccagccgcgacctcgtggtgctcgtctccgacggggtgtccgagtactcgcggaagctgctcgaggctgacgggtttatagtgaagcatataacattgctggctaatcctaatcaggtaaggccaacaaggttttggggagtttacacgaagttaaaaatattcaacatgacaagctacaaaaaagttgcttacctcgatgcagacaccattgttgtgaaaagtattgaggatattttcaactgtgggaagttctgtgcaaacctgaaacattctgaaaggatgaattctggagtaatggttgtagagccatctgaaactcttttcaatgacatgatggacaaagtaaacagtttaccttcttacacaggaggagatcaaggttttctcaattcatactatgctgatttcgctaattctcgtgtttatgaacccaataaacctacaacgcctgaacctgagactcagcgcctttccaccttgtataatgctgatgttggtctttacatgctggccaataaggcctgctgattatttgtaaacgtcgccttcctaactttgctgcagtggatggttgatgagaaagaacttagggtcattcactacacacttgggcctcttaagccctgggactggtggactgcttggcttgttaaacctgtggcagtatggcaggatatcaggaaaaatcttgaggaatctctccctggaactggtggagggagaaatcctcatgatcaatcagtggtcaaaattcttttctctctccctttattcatgctgatctgtggttattatggttcatgctttcaggttaaattctcctcttgctggaaatatttttctttacacatatcatatatcatgtacctttttcagaaattgagtttgctttcatgataataacttgatgtttgctaactcccttgcagtcacataatggagcacatctgaagctgccttcttattttggtgccatcaccgtactagtctgcttcatttctgctttaatatctcttgcctttgcctttattattattccacggcaagtgatgccatggacgggtttgctgctgatgtatgagtggacctctgtgacgttcttcttgttgttcgggagctacctccgtgttgtatacaattggggaagttctagtgcaaatcatgtcgggcataacaatttagattcatcagaaaatcgacttcagcggaatacgtcggactgtgacacagatgcagctttctattggtcagggatggctatactatctagtatagcattattatcaccaacagtcctgggaataactgctctttttgcaaagcttgggttgatggtagcaggtggcgtggtgttggcatcgtttatgacatacgcttcggagcatctagctatctcggcctttgtcaaaggccaaagagataggatctctcttgatcccccgggaacccatcgtcgatttgcccggcagatgccgccatatttaccgtctagtttgcactcgccgctgcatatgcgtcccccaccgcccgacgaagacgaccttgtgcccctcgagaattgggtttcacaaaaaggaattcaatatggatctgcaccc

SEQ ID NO: 61884 - DNA, 278 bp, Oryza sativa
  Clone ID: PAT_MRT4530_63273C.1
tccccttcccctcattctcgatagatccagattcggcatcggcaacagccgcccgtgcgccgctgagccgtctgcgccgcctccgcacatcccacgccgctccctccatcctgagccgcctgcgcactccctccatcctgcttcgccgtcgcccgtccagcgtccagtggccgacgctcgctgcttgccggttcatgcccaggaaccagatggccggtccccaactgcggagctacccacgccgtgatgctcactggtcgctgtcggcctctcgatga

SEQ ID NO: 61885 - DNA, 502 bp, Oryza sativa
  Clone ID: PAT_MRT4530_63274C.1
tgcgcctcggcgtcggcgtcggcaacctcggcgccgcatccgcctcgtcttcgtctccctccttctccttcctcggccgcgccacctcggttccgtgccgccccgccgtcgcgaccccgtccatgccgccttggcgctgcgttcgccgccgtgcgtcgccgcttggccgagcgccgccaccggctggttccccgcgactccatccgcgccaccgatgccgttttctctcgtcagtgagctccccacccacaacctctcgtctacatcctctaacgactcctagagggcaccgggacatcacagtttgtgtgctcgatccccgagcagtgcccacgccgttcctctgctcccgctgtcatcacgcgtagtcgtgcgccgacgacggccatcgccttgtcatatcctcttgccaccaaacccccggagatccccttgacctccccgagccgctgtttcggcccccgacctccccttttgctctcgcgacgtgccgcactcgccg

SEQ ID NO: 61886 - DNA, 441 bp, Oryza sativa
  Clone ID: PAT_MRT4530_63275C.1
cggacgcgtgggtggagatagagatttatgtagaagctgttctttccatggaagacaaggttgtaggatgcacaaaagatgaggaacaccgataatccgatctcagcaatggagtctcattattctcgtcgaaggcattgttccccactttcttcgtcacaatccattggttgaattcttgcagttgcagcagaccagctacagcagctctcaaccgatgcatggacatgacgctctcgaataaaatccacagtggcactgtgtgcagatttctggagtgaaaagacagttatggcaaatcaaattcatccaaaaggtgacaatcaggagtgctgtaggaatgtaggcaacgccccagattggcaggaagagctctgggatcatgaccgacacagggatgataacattgtagagaataaaggcaacagcaggggcaacaac

SEQ ID NO: 61887 - DNA, 1857 bp, Oryza sativa
  Clone ID: PAT_MRT4530_63276C.1
atggaggccggcgaggcagccggcgccgtcctcttcctcctcgccgccgccgtctccctcctcgccgccgtctccaccggcgccctcgacttcacctacctcgtcacagtcgtcggcgagggatcgtcgacgtcgccggggagcggcggcggcgcgtggtggcgcgaggcgtgggtgggggcgcggtcgcgcgcggtggcgccggcgctgcaggtcggggtgtgggcgtgcatggtgatgtcggtgatgctggtggtggaggccacctacaactccgccgtcagcgtcgccgccaggctcgtcggctggaggccggagcggtggttcaagtgggagcccctcggcggcggcgccggcgccggcgacgaggagaagggggaggctgctgctgctgcttatcccatggtcatggtccagatacccatgtataatgagctcgaggtgtacaagttgtcaatcggagcagtttgtgggctcaagtggccaaaggagaggttgataatccaagttttggatgattccacggacgcatttatcaagaatttggttgagctggaatgtgaggattgggcaagcaaaggtctaaacattaagtatgccaccagaagtggccgcaaagggttcaaagcaggagccttgaagaagggaatggagtgggactatgccaagcaatgcgaatatgttgccatatttgatgctgatttccagccagaaccggatttccttctcagaactgtcccgttcctcatgcacaatcagaatgttgcgcttgtacaagctcgatcacaaaaggaacatggtgatagtctcctaaacactggtaccttgttagggaccgctggtgtatggcgcacagaagctatcaatgacgcaggaggttggaaggatcgaactacagttgaagacatggacttggctgtccgagcaaccttaaagggatggaaattcatctatttaggggacctcagagtaaagagtgagcttccatccacttataaagcatactgccgacaacagttccggtggtcttgtggcggtgcaaacttgttccgaaagatgatatgggatgtcttggttgccaagaaagtgtcatccttgaagaagatctacatactgtatagcttcttcctggtgaggagagttgttgcccctgctgttgcctttattctctacaatgttatcatccctgtgtcggtcatgatcccagagctcttcctgccaatctggggcgttgcctacattcctacagcactcctgattgtcactgccataagaaatccagaaaatctgcacacagtgccactgtggattttattcgagagcgtcatgtccatgcatcggttgagagctgctgtagctggtctgctgcaactgcaagaattcaaccaatggattgtgacgaagaaagtggggaacaatgccttcgacgagaataatgagactccattgcttcaaaaatccaggaaaaggttaataaacagagtgaatctacctgagatcggattatcggtgttcctcatcttttgtgcatcctacaaccttgtcttccatggaaagaacagcttctacataaatctctatctccaaggattagccttctttcttctggggctgaattgcgttggcactctacctgatcattgctgcttctgacaaatcaagtcaaatctgctgccgtttcatcaatctgatatgtgattcttttctgtgtttaaatttctccagaaagcatttttaaattgtagagtacgtcacagtttatgttgacctgtagtattttgcatagttacaaaaggtcaaaaatgtcaataacaatccagtatatatcaacaaattcacaggtctgcctttttgctg

SEQ ID NO: 61888 - DNA, 540 bp, Oryza sativa
  Clone ID: PAT_MRT4530_63277C.1
atggaggtgggcgccgtgagctgctaccggagagggagttggcggcgatgcgccgctgctctcgccctcgccgtagtcgtcgtcttcgccgcggacactcagcgccttcgccgagaacaccgagcgccttctcgccctgccgccccgctgccgccgagctcatgcccgcccactcgcgccgagctcgccgacgcctccccccacccgcgcggcagcggtcggcgacccctccccccgggtgcctgctctaggcccgtcgacctcgccgtcgtcgtcagcggccccgccggcctcgccgttgcgctgcgcatcgccgaggcgggcctctccgtctgccgccccgctgccgccatcaagctcgcgcctgcgccgacctcgtcccatcgcgcgggttcccgctgcattcgctactacggatttggaaccctcacttcagcacgcgaacatgacccttggaaccaaataatcgcctataaaaatataaatcggggtgaagttcgctatccacctgcgaaaatagattttcgcagacggaccact

SEQ ID NO: 61889 - DNA, 2139 bp, Oryza sativa
  Clone ID: PAT_MRT4530_63278C.1
ttcctgcctcgtcccacccctccgccggacttctttcccgtcgggaagcctcctcctcctcatgcgtgcatcttttgactctctttgggggtccccacagctgcttccgtccgcttccgattccaagtttccaactccctccattgctcgcctcgcctcgccgcgcgctacctaaaccccgcggcgaggctttagggtacatgctagaggaggccgcgtggacggcggcgcgcatcatcatcgcgttatggggaacacgtgcggcgtcacgcttagatccaagtacttcgccagcttccgcggcgcgtcgcagcggcatgatgaggcggggtacgcgcccgtcgccaccagcgccgccgccgccgccgccgccgatgagccggccgggaagaaggccccgcgcggttctgcggcggcggcggacgcgccgcacgccgcgtccatgaagcgcggggcgcccgcgcccgcggagctgacggccaacgtgctcgggcacccgaccccgagcctgagcgagcactacgcgctcgggcgcaagctcgggcaggggcagttcggcaccacctacctctgcaccgacctcgccaccggggtggactacgcctgcaagtccatagccaagcggaagctcatcaccaaggaggacgtcgaggacgtccgccgcgagatccagatcatgcaccacctcgcgggccaccggaacgtcgtcgccatcaagggcgcctacgaggacccgcagtacgttcacattgtgatggagctctgcgccgggggcgagctgttcgaccgcatcatcgagcgcgggcaattcagcgagcgcaaagcggccgagctcacgcgaatcatcgttggtgtcatcgaggcgtgccactcgctcggggttatccatagggatctcaagcccgagaacttcttgctggcgaataaagacgacgatttgtcgctcaaggccatcgatttcggcttgtctgtgttcttcaagcctggtcaagtttttactgatgttgttggaagcccatactacgtggccccagaagtgttgcgtaaatgctacggaccagaagctgatgtttggacagctggtgtgattctttacatactattaagtggtgtaccgccattttgggcagagacgcagcaagggatatttgatgcagtgttaaaaggtgtaattgattttgattccgatccctggcctgtgatttctgatagtgcaaaggatcttataagaagaatgttgaatcctcgccccaaggagcgcctaacagctcatgaagttttatgtcatccgtggatttgtgaccatggagtcgctcctgatcgacctcttgatcctgctgtactttctcgcattaagcagttttcagcaatgaataagttaaagaagatggctttgcgagtaattgctgaaagcctttcagaggaggagattgcaggattgaaggaaatgttcaaggcaatggacacagataatagtggtgcaattacatatgatgaactcaaagaaggcatgagaaaatatggctcaacactaaaggatactgagattcgtgatcttatggaggcggcggatgtggacaacagtggaaccattgattatatagaattcattgctgctactctgcatctcaataaactagagcgagaggaacatctagtggcagccttttcttatttcgacaaagatggcagtggttatattacggtggatgagcttcagcaagcttgcaaagagcataacatgccagatgcttttctcgatgacgtcattaaagaagctgatcaggataatgatggtcgcattgactacggggaattcgttgccatgatgacaaagggcaatatgggtgttgggaggagaacaatgagaaacagcttgaatataagcatgagatgagacgcacctggtgcactatgaagtctgaacgtccacagtgcagctttgaaacttcttcaatctccatgctctatacggacactgcctgcaatttttgtacgctgtcagttgtagccttgtaggtgtgggtatgtgtttcaggttcaggggattctaattgttcatctaattcaacagtcggtatgtgtttcaggttcagggaattctaattgttcatctaattcaactgctcctgttatttc

SEQ ID NO: 61890 - DNA, 520 bp, Oryza sativa
  Clone ID: PAT_MRT4530_63279C.1
attcggcacgagctccatttccaacgctagctagtattgcaaccgccatggcttcctccctcgctaccgcgggtgttgcttccatcagcagcattgctgctatcagctctgccaaggagctgtcccaggtcaccaatggctctgccctggtgatgcgcaagactggtggctccaggaatgttgcgggtctgaagactcagcccggcgccggcgggctggccaagtggtacggacctgacagggccaagtacctcggccccttcagcgagttggagggtggcacacctgcctacttggatggaacataccctggtgactatggctgggacagcagcggtctgtcagcagaccctgagagcttcccgcaggaacagagagcttgaggtcatccactccagatgggccatgctcggtgccctgggcatgatcctgcctgaggttctggctgacagcggtgtcccaatcaaggagcccgtctggttcaaggctggtgctcagatcttcgacagcgatggtctga

SEQ ID NO: 61891 - DNA, 370 bp, Oryza sativa
  Clone ID: PAT_MRT4530_6327C.1
tgggtttttttttttcacaggagaagttacgacactttattcacaaatgatcagggtatatctgcatacatgcatgcatgcatacatccatattatgctttgcaaatgttctgtaacatactcaactcatagctattatatacaaatcaatagaggaattgtgaaaatgaaaataaaactagagcaattaccaatcagccctcgagctctagtaaaatcttaaatattatgaaaccttaaggactagaatgtaagaattccataggtatacgtataaaaccaatttcctgcagtaattataatttactgactttagtttccatgtaatcaccaaaatgacatcaaagaggaaattaccttttttcacccc

SEQ ID NO: 61892 - DNA, 449 bp, Oryza sativa
  unsure (1)..(449): unsure at all n locations
  Clone ID: PAT_MRT4530_63280C.1
gcccccggaaatggagaaaccggttcgcaacaagcgagtcaggcgtctatcgaaaaagtattccncgacggatatgctgaataagttccccgaagaggatctgaatgccatcaacaactctgatcttgtggctgagtcatcaggactgcagaactctgatccggaagccgagcttcagtccccaattaaagaacacaacggcggagacgattcacaaaagaccgagactacgccagtagagggaggtgacgtgaagaaacctaagcaagcaaccacaccaccgatgccgccgtcgccgccgaaagccgcacagccggaagagatagatcaaccggcgcaacctgtagcagacaatcagtccaatgatcgtgcagatttatagtcgaaacgtttctgtagcaaacagccattccaaataaacttgtttacgcaaaaaaaaaaaaaaaaaa

SEQ ID NO: 61893 - DNA, 132 bp, Oryza sativa
  Clone ID: PAT_MRT4530_63281C.1
atggcggctggtggtgggccctccccgcctgctgctgggtttggaggcgacggtcgtggatgtgccccatcaccaaccggccaacagatatcaggccctaaactcctgattaagaattatgtagctagatga

SEQ ID NO: 61894 - DNA, 330 bp, Oryza sativa
  Clone ID: PAT_MRT4530_63282C.1
atggcgctacagcttgcaacacgctcaagcaagtctctcactctcctcgtcgtcgtcgccgccgtcatcgccgtgccgctagtgctgatgtgcctcctcgtcgccgtggcagctgcatcggcgtcggcggcggcgagctccggcgagtatcggccgagctatggtgatacgtacgcgacgtgcatcccggttgcggcctgcgatgacaccgggtgcgcgatcaggtgccgcgacttgggttacaaccctggctctgcttgctggaccagtaaggacatcaagctctactgctgctgcggccatggccgtcgtcttccatcggttgcttga

SEQ ID NO: 61895 - DNA, 576 bp, Oryza sativa
  Clone ID: PAT_MRT4530_63283C.1
ggaaaaaaaaagacgttaaaagtaggaaaaaaaagcgggcaaaaacttcggctagaagcatggcaacccaaacagtaggacagggccccccccatgggtgaagagctaaaacaaagacaaaacgggggcctccaacgccccaaaaagaaagcgaacagcagcagccaaatagctttgaaaagaaaactaggagggggataactagaggggacagaagggcatccaggggcccaggacgttaagacgaccccccccattttgctctcgccgggggcgccccccagggggggaatggcggggtaagcctcgggggacccgccctcgtcgatgctcaggccgagcttgagcatgcgggggaccctggggccaaaggggtgggggccccccaagctgaaaccgggggtcagcagggcagtctcaaaaagcagaatcaccaggcccttcacggactgtgaatttttgcccgcatcggcacgctgggggagctcgcccatgagggcattctccgggtggaaccccagggtctttttgctaaaatggacccggccatgctggagtccctcagagccggggcct

SEQ ID NO: 61896 - DNA, 246 bp, Oryza sativa
  Clone ID: PAT_MRT4530_63284C.1
atgggctggacgctggtcctacggctccatgggctggaccgaagagaggaggctgatcagacacgtggtggatcaagtgaaacatcttcgccggtcaagactatggatgatcaaatgggctgcctggcccggcatggcccaggcatgatcgggcctgggctgaggtcaatcgggccggcacggcccgaccaacaagctaggccgggctggacttgcccacaggctacacgcacagctcaagcatga

SEQ ID NO: 61897 - DNA, 363 bp, Oryza sativa
  Clone ID: PAT_MRT4530_63285C.1
atggtcaccgtatcactatctcacgttcggatggctgatggacaatctccttccctatcaaccctagctatcgccgcccgtctcactgaaacaaaggccaggaatgatcaagggcctgttgttgatcacgttgtgcatcgtaccacatggagaaccatccgaaaaacctcagaacacaaagcatctatgattttctccatcaagtttgctgccccaatcgcattttggtcctttagttcaaagttgttcatccgctcggaaaggagacctcaacaagcatctgttaacatatccattcagtatgagatatcaaggaagcccactaagatgatagttggcaacaacctagccaaaagaacctaa

SEQ ID NO: 61898 - DNA, 320 bp, Oryza sativa
  unsure (1)..(320): unsure at all n locations
  Clone ID: PAT_MRT4530_63286C.1
gctccatctccctccccctcgcgccccccaaccgcatctcaatctctctcctctctctctctctccagctcgcctccccctcgccggcgacgagctctcccccggctagggttagaccaggtgcccctcttgtctgcggcggaggaggtgggaggaaggatggaggagtcctgtnccccccacgaccacggcaaccattatacgcaagcagggaacgagcaggtcatagcgggcaccccgatcgaccggccccctatgaagtactgctcgcaagaccgccacttgcgtgcttaatgtgcaacagctacggtgtgcacacc

SEQ ID NO: 61899 - DNA, 875 bp, Oryza sativa
  unsure (1)..(875): unsure at all n locations
  Clone ID: PAT_MRT4530_63287C.1
ggtttgcccacgtngtnncccaacggtgtggaagtaatncccctggttgtttgttatagggtgtttttgttttgnattctccctgggggaaggccaatttcggaagaacatcctatgtccaaaagtccccacaatgttggaagtcgggttcccaattaagccgttcttggtgtggccgtgntgttccccannccaaggccaaattcaaggatgcaattgtgntcaatctgtgggatagccttggttggattgatatgccgggcctgtcatcttatanatggtcaacattaaatgggaatganacccaaccaagggcctgccttggccttgtataaaatagcgccactataaggacgtggattgggcaattggcctttgcaaatgcttggtgacaatgtgccaccccaataaggaaggggccaagggggaagacccccccaatggggatggctatgaaatgcctgtgggctacgaatactantatctggaagtgttattgcttgcaatggaagctttgcaaaaccagaaacgtggtgaccgtgtgtaaagtagttggtacgttggttgtgctgcaaacccgtggtcgtccgcgtgtttgaagtccgagtcatgcaggtgtagcagacgtgtggtaggtgcgtgctacgtacgtacgtcgtaggtcgagtgtaggtcagggtacaggcaaacgttggtaaacaccaagtgngtaacaaggtgtagagtgtggcgtgtgttgccattagcgtttgtagtcttaattattgagaagggtcggtctgtccggnggccagttcgtggtctggttcgtcacgtcacagtgtttgcgtaagtcgtcaaacagtagagttgtgtgttttaaaaaaaaaaaaaaa

SEQ ID NO: 61900 - DNA, 558 bp, Oryza sativa
  Clone ID: PAT_MRT4530_63288C.1
atggccaaggagttgttcatgagtggcaatttagtcgttagattgatggtttgcactcgaattactgcccattcgatcatgctaggattcgtgctgtcttttgttatcgagcctgtggccggagcatactcggacccattttctgtgcggcccgaggccgagtcgtcgaggcagctacgccggcttctgcggctatcggcgagacggctacatcgttggagcatcgacggcggctcctgcggccgctacgtggtgagggcaaaggggtcggccgatggtcgatggagtagcgaaggggccgccggcagcaacggcaccgggaggggacttcttcttctcatcgagatcacgaggaccttgatggacatggggatggaggggacggaagccggcggtagcagtggatgggcaaggagatcgattggcgtgggaggccccctcccgatccagtggcacgacgacgagcaggccgccgcttgctgctgcaatcccctcgcccgcctgccaccgtcgttgctccagtgcccgccgccaccactccactgtcgccacggctaa

SEQ ID NO: 61901 - DNA, 533 bp, Oryza sativa
  Clone ID: PAT_MRT4530_63289C.1
gggccggggcggaggtttctgggtggagacacgacgccgtttttccttgtgaagaggggcagcactaaggagggtcctcttaaacggctgtggcccagggtgactagagaacaaggaggtcaaacctgtgactaattgcagggacacccacgaggtgaagctggaacatggcctgcagatgtcaactatctttaagaaccatgagtcggggaggaacatgcttgaagaccttgacttctatgagcagcgggagaaagtcttgctggagaatagacgtcagctactgcctgcccgcccagagctgcaaaaactagtttagaaaaaggccctaggagaacttatgggccaaatctcagacacatttggttagactgaccagataaaagaaactgagattggccatagcaagcctgcaggtgagggtgttccttcagctgatgaagcgttcaccgatcccaccaaggctgtagatggaacgggttagacgaacgcataaccttggggagtttagcagcgattttttcccccacact

SEQ ID NO: 61902 - DNA, 1826 bp, Oryza sativa
  Clone ID: PAT_MRT4530_6328C.1
ttttccttgttcttttgtttggtggtcgctcgatcgctctgctggattttttttttgaaacaagttgcagcacgaccacaagacgacaatgctgccccaagacaaaaacttgctgcttataaataggcacatgcccactacactaccactaccactactaccccccctcaaacaacagaacccccaccaccaaagcacatacggcaaagtagccagacaaacggaaactcaaagagaggagagagtgagttcctttgatcatacagttgtttttggccaatcatcgtccgaggagagatggggatgcagagcaacgacggcgccgtcatgttctcctccatcgcgctgctgcagcagaggttcagggagctggagaggatcaaggaggagcgggaggagaggctcatccagatgctccctccccgctccgaccgctcccacagtggcgctgcggccgtcgtcgtagccacggctgctccgagggaagtgccggtgaaatggttcttccatccggagctgttgtatccatgcaggcctctgcgtgacatggctgctgctaccttacttccggtcatgccggccaccatcgactgtgaattcaaaaccttccagctccgtggtgactcgctcgccgtggacctgtggcctagtaaggcctacaagcatgtatccagtgaagttgatgtcgacacctcactgcacctctagattactactactgctactaaaattgctatcctaagctgttaaccttccaagtatccaccagtgttgctgctctagttgtttttggtagcctagtatgtttctcttcttctttggttttgtaacaaggggcaggagggtggtgagttgtaattattgccagtcagtaagattgtgctggttgtttccctgttaccttgtcgccgctgaattgccagcatcttccaattgggcactgttatcgtctgagtagtagagtagctctgcagggcaaccattttctgatgtatcagtacactcctcatcatcgctatcggaagaatcaccagggttctgtttcttccgtttgatgatctttttcgaaatcatccggttaacacccttgctgtcaacatctacacattcgctgctaattggcttgaaacggactttgccaacctttcttgcattagcctctagtatctcaagttcataagcctgagttctttctttatcatcttggttatcagatccttcttctttatattcatcattttcttctctgttatccttttcgagtataactagcattttcccaccttcttctggtatataaccaaaggattcacagacaaaaccagacaccgtctcatactgatgaccctctggtattttaacaccaagttcttcagataggtggtctattgatgtatttgcatcaacgtcaaatgttccgtcatccagcatcactatataacctgttttcttctggatttcctcctttgaatcattctcatcgaagatttctccaactatttcttccacaacatcttctaatgttacaataccaatagtcccaccatattcgttgaggaccactgccatatgaacctgcctgatgcgaaactctcttagcaagttccaaacagacattgaatctggaacaaagtatgtgggcatatgtgcaatttccttcacagtaatctccttcaacttctcaacctcttcaacatactcaagcatatccatggcgtaagcaattccaacaatattatctatgcgttcctcaaacactggaactctggaagtaagagctccctgacgtgtgtatcttttatctctagtacattctcgatcatatc

SEQ ID NO: 61903 - DNA, 3001 bp, Oryza sativa
  Clone ID: PAT_MRT4530_63290C.1
atggggttcctcaaccttgtgggcaactcctttgggtgctcggcttccggcgagcggctcgtctcggcggccagggacggcgacctgcaggaggcgcgcgcgctgctcgagtacaacccgcggctcgcctggtactccactttcggcggccgcaactcgccgctgcactacaccgccgcgcagggtcaccatgagatgggtaaaagaactgcaatactgcattcacattttctgttgcttgcatgttcaaattgtttctctgttgctcgaatccgacgtcaagatcaacctcaggaattacaggggccagggacctcggatgaacttattccttcggcctatgattctatggaagcccgtcatgaccaagcccacaaaaccagagccttcccattcccacaaaacctacgcacagttcggatccgaccactccacgtctccacccggccgagctcaacctccgcgccgcaccggacggtcgcacccgcgtctcccacctccccggcggcggctcccctcatctccgccggtcgcctcctccaagcctccgcgacgcgcacggcagagatgtaccgcatcgccgggagccacttgcgctctctcaagagatacagttatagtaggtttgctagtacaagtgttgtgaagcagtcttcaggtggtttgtttagctggcttcttggggagaagtcaagccaattgcctcctcttgatgtccctctcccgggtattacccttcctccaccactgccagactttgttgaaccgtctaagacaaaagtcaccactctcccgaatggcatcaagattgcttcagaaacgtcagtgagtccagcagcatctgtgggactgtatattgactgtggttcaatatatgaaacacctgcttcatctggagcatcacatctgttggagagaatggcggccgagctcaacctccgcgccgcaccggacggtcgcacccgcgtctcccacctccccggcggcggctcccctcatctccgccggtcgcctcctccaagcctccgcgacgcgcacggcagagatgtaccgcatcgccgggagccacttgcgctctctcaagagatacagttatagtaggtttgctagtacaagtgttgtgaagcagtcttcaggtggtttgtttagctggcttcttggggagaagtcaagccaattgcctcctcttgatgtccctctcccgggtattacccttcctccaccactgcaagactttcttagaaccctctaagacaaaagtcaccactctccctgaggacttcattactgaaaattacacagcacctaggatggtccttgcggcatctggagttgaacatggtgaactagtttcaattgctgagccacttctgtcggatcttcccagtgtgaagcgtccagaagagccaaaatcagtttatgtgggaggagactatcgttgtcaagcggactctgacaagacacatattgctcttgcttttgaagtaccaggtggatggtttgaagagaaaactgccatcattgttactgttcttcagatgctcatgggaggaggtggttctttctctgctggtggtcctgggaagggcatgcattctcgattgtatctccggatattaaacaactaccatcagatcgagtcattctctgcattcaacagtatctacaaccattctggtctttttggaattcatgcaacaactagcccaaattttgcttccaaggctgtggatttggcagcaggagagcttcttgaggttgcaactcctggaaaagttacacaagaacagcttgatcgagctaaacaggcaaccaagtctgcagttttgatgaacttggaatccagagtggtacttctgtcggatcttcccagtgtgaagcgtccagaagagccaaaatcagtttatggtgggaggagactatcgttgtcaagcggactctgacaagacacatattgctcttgcttttgaagtaccacggtggatggtttgaagagaaaactgccatcattgttactgttcttcagatgctcatgggaggaggtggttctttctctgctggtggtcctgggaagggcatgcattctcgattgtatctccggatattaaacaactaccatcagatcgagtcattctctgcattcaacagtatctacaaccattctggtctttttggaattcatgcaacaactagcccaaattttgcttccaaggctgtggatttggcagcaggagagcttcttgaggttgcaactcctggaaaagttacacaagaacagcttgatcgagctaaacaggcaaccaagtctgcagttttgatgaacttggaatccagagtcgtagcatctgaagacatagggaggcagattttgacgtatggggaaaggaaacccattgagcatttcttgaaagatcttgaagcaatcaccttgaatgacatttcttctactgccaagaagatcatttcatcaccccttacactggcatcatggggtgacgttattcatgtcccgagctatgaatctgttagccagaagtttttctcaaagtaagcaagcctatcgcatggcttgcccccgacttctaaagttgcagacgtgtaactctactggtccttggccctaaccgctggaattcacaataataaattgtctagacttatttttcttagatattttaattttaagcaaataatagttactcaaacggcgatgatgctgactgtcctttttattcttttcctttattatattgatccataattttgcgtcaggctggaactatttttagttccgcggtggtgttgttgttttttgttttgtttttttttttgtcgtgctgagcttagcacagctgagctgttgcgtatgtgtcgtgacttcaagtctatgcatgctgaaatcgtcttgatgatttttccaaaaaaaaacaaaaaaaaaacacatacaaaaccaccgtcggccagagccaccaagccgtgcccgcagctgctcgcccattga

SEQ ID NO: 61904 - DNA, 489 bp, Oryza sativa
  Clone ID: PAT_MRT4530_63291C.1
aaacactgaaaccccaagtactaacattaacatgacacgtaattgaacgcattatttgtaacggcaaagccttaactgtccatcaaaatactaaattagaagggcaggtcgcacgcttgtttttcaacgcacacgagacttgcaaattgccgacaatgcttattgcacaagacaacgccaaaaattgacagtacagctattttagtatctgaatgcaggggggttggcctcactagtaacatatcgcatggatggcgctgtctacaattggattctcaggtcaaaaatcattctatttaaattggtgcacactattctattttatatcagtactacataacagcctcctggatctcatcagattcgtcaaccaccattttatttttgaacaagagctttaggtgaggaagaacctttggcagtactggcaagtcccccagattcacacttatcaggtcgaacgcaatgcaagttttttgcatatcaacc

SEQ ID NO: 61905 - DNA, 552 bp, Oryza sativa
  Clone ID: PAT_MRT4530_63292C.1
tttttgttttttttttttttttcttttttttttttttttttttttttttttttttttttttttttttttttaaacaaacaaaaaacacccttggggactttcattccggtataaccggaaggaaacccccccgaatcccaaccaaattgccaagggggaaaaccctggaagacccaaaagcattggccccccccaaaggttaccaacccccccgggttggccccaaaaaggggtcataagggcaaacccctttaaaaagactttattaaacccaacttttgaaaaaaaaaacggggccccccctatataactaaataggaccggggttatcaccccccggaatcccaacaaaattgccacccaggggggaaaccccaagaaacctattagcccgttccccccaagggagcacccccccctggtccccccccaaaaggggttataaggttaaaaaaaatttaaaggggcgtgatttaaacaaaattttaaaaaaaaaaaaagggccccccccaataactattattgggccgcccccccccccccccccccccc

SEQ ID NO: 61906 - DNA, 358 bp, Oryza sativa
  Clone ID: PAT_MRT4530_63293C.1
aactccctcactacgaggccatagctaccgtgtaggcgatagtgtagcagctatagtttgagcacttatgtgcggcgtacttctatcagactcaagccgatgctcacgctacggtggcatcaaacgtggaatccatatgtggtatctatcctaactactacattgctgcgaggagcattcccaccactggtggtgacgaggactgaattgtaatagtataacggctcaaatgttaaaaataaaggcatgcatcatcatgcgagacaggtgaaacttgatgtcatataaatctaaataaaatcacctatttaaatggcagaagagagaaagggcacggaggtgaaggaggaaaaggaag

SEQ ID NO: 61907 - DNA, 651 bp, Oryza sativa
  Clone ID: PAT_MRT4530_63294C.1
cgcttttgtcctgatttttctcgttctttccaacacacgcgtagagagagagagagagagagagagatagggggtgcgggaggtagagtgggagagagatttagaggcgatttcgccgcggtgaggagtgcggctcgccgtggcggagatttcgtcgtgccggtgctgatctgtgtcgtgtttgagtttgtttttcgccggtgaggagctcctgctcaacggatttttccactgtgtcgagttattcgtcgttgaagattcatttggccagtttttttttgttttttttcatgttcatcactgcctcctcctctattttttcgccatgccggtgccgatctgttcgttgacatcgtttttgtcggtgaggagggtatgatgtaccacgttttccactgtgtcgagctggtcatagacgtaggttttttttttggcgatttgttcatgtcgttctccattttttccttccaatagatctagcttggacatgcaccatttatgtttgatttttttgattttttgtgaataggttgtgttctagattcatttgtttatgtttttttcatgttcctccccacgtccttcttcatttatttcttcgaatagatctagctaggacttgcacaaattatgtaaccccatctcatttgc

SEQ ID NO: 61908 - DNA, 265 bp, Oryza sativa
  unsure (1)..(265): unsure at all n locations
  Clone ID: PAT_MRT4530_63295C.1
tgcagtctatacttgaggatctcctattgcttcttgtcccactgctacagtgttacccagacctccatgggtgnaagccaatatgattagatctaatttgacccttgtcatctataaacatcagtagaaccagctttgattcatagctggaaattagcaatgtagtttcagggttagtggtcataacttgtatcctatcagtattctcgaaaaaacttgtatcctaccaaacaagttaaattttgatctaaaaaaaaaaaaaaaa

SEQ ID NO: 61909 - DNA, 411 bp, Oryza sativa
  Clone ID: PAT_MRT4530_63296C.1
atgaggacaagatgtgcaatcaatgcggcccgacccctccgcattgatggcaaggcctcccggtgtgtgacggactgcgacggtggaccagccctccctatactaccgattgggggtaccagaagtaccgtgcttaaaggggaggtgccgccctcggcatccacgtggcgttcgccccgaggggtcgcgtccatggacgagtggaggccgcccatacctgacccagagggtcgggccgcctcgacccctcggggtggtcaccacgtggccgccatgcaaaggcgattagtaggcacccttccgcgcccacctaaccgcattcaatgtgggcggagcgagcgtgccttgcaaggacgagatgggacagcggcaagccacgcgcggttggtatgccctgtcccatcaaggtga

SEQ ID NO: 61910 - DNA, 327 bp, Oryza sativa
  unsure (1)..(327): unsure at all n locations
  Clone ID: PAT_MRT4530_63297C.1
ggacttcacgtcatgcattagccagtgtagttaggtagcttggggcttcccagtgaggtgggattagcggatacatatagacatccataattacttaattagctaaaaaaatacgggccactggcaaacaacgcattcggccganagactacaccagccttcaccaggtccctcaatgacacggagtaaccttgtttcttaaaggtattatgtgcgagccttttggtcactacaactccctgatgggtctgcattcttcacaatccatggatgtttcattatgtcatcaagagaaagtctcttggttgagtgcttcgccgggtgctt

SEQ ID NO: 61911 - DNA, 258 bp, Oryza sativa
  Clone ID: PAT_MRT4530_63298C.1
atgaggtgttggctaagtccaagaggcgaagccacgcggcgaagcagttgggcgatgctagatgatgaagaccgaagggttcgccagttcgccaccaagtccactatccatgacgagccatcactacgggcgaaggccgtaaagcgaaacaagagggtttcgcccaagttagaagtggcttcggtagagggcttgggagacaccgtggcccctggaggccttttaccattaatgggccggcccaaggagttcacttaa

SEQ ID NO: 61912 - DNA, 361 bp, Oryza sativa
  Clone ID: PAT_MRT4530_63299C.1
ggggcgtgagacattcccccctttttttgggggcccccgggggcccccttttggggtttgttaagcctgaaaccgggaattttctttggacaaaaactttggggccgatttaacttgggggggaaaatttgggggccctgggcaaaattaattttttttttgggaactttggggggtttgggtctttccaaagaagggttgttccttggggacaggtggggtgaaaatacatttaagggctttttttttttctacctccttttttgggggggctgtccgggggaaccggggtaacattccggaccctggggcggccccggggtttcccccggggtttccggccggggcccggcgggggttc

SEQ ID NO: 61913 - DNA, 465 bp, Oryza sativa
  Clone ID: PAT_MRT4530_6329C.1
cccgcacaaaccgcatagccaatgccaggaagaaaaaaggtcagatggatgatgactgtagctaattggaatgggaggtatccgagagatcggtttcagttccagtgatattctgggtatacctgcttttgcaaggatgcgcacgtatgaacattctgtgtcaagaactgaaagaaccagtttgtttatctgcagccggtccttcagccaaaggagattcatagagggcgcttgattctttgagtatccgaaggataatgagcttgttcagctcagcccgcacgccaaacttttctgggattctggccaagtggttagctagagtaggtggcccatcagctccagccggtggtttttttttttatgtaacccgcctaggatttttactcctacttattaaaaatataattggtagttctcctgtcggttcatttaaaaaaaaagcagggatagcaccccttttct

SEQ ID NO: 61914 - DNA, 1495 bp, Oryza sativa
  unsure (1)..(1495): unsure at all n locations
  Clone ID: PAT_MRT4530_632C.1
ccggccgggaaaaaattggtacatcatcctcgcatagtacgtaggagtactacatagcgaccagattacatacggccagtctcgatttatccatcgcgcgtgccactgcgggtcggtttgctgtgtgcttcgtggacgaggagagggaacgagagatcgagcgatcgatggcggctggcacggcgtgccggcggtaaaaaaaaaaaaaaaaaaaaaaaaaacatcgggccactcctgtgcgtcaacctcgtcatgcacgccgccgtcctgggcctcgccgggtggtctctcagcaagttcatcgacggcgagacgcaccacctcggccattttcgatttttttttttttttttttttttttttttttttttttttttttttttttttttattattaattagtcgagacgcaattcgtaattattattaattcgatctacacgtgaagacactgttattgcccatcaaggaaaggaacaaaacaaagcttcgcggtaccaaacactagtactctaaacaacgggttttggtctctgcaatgtgcgatccaaagaatcgttccaaaaaattggtgcagacgacggcattttttactctgtcccagcaatcctcttcttcaaagaatcgacgtcgtcggccaattccttcctgctttccttgaagaggaggtagcggtacacaaaccagcctgtgtacccgagcccgacgagctccatgaacttgggaagcagaggcacggaattgacggcgccgacgatgacggacgacagccagagggcgacgatggcgccgccggcgtacgtgaggacggtggacttgttctcaacggcgtcccacttagctttcaggtcttcgatgagctcgtcgccggtcgcggcggaggacgaggtgtcgtcggacgacgccctcgcccggagcagagatagcctcggtgcgtcatggaggcggagaggagaggggaagttgcgctgggggaggaggaggacggagggcggcggcaaggcggcgccgacggcggggaggcgagctccaccgagaagaggcgccgtggagcacgccgtggcggccatgtcagtcgtggaccctcttcggctctacctggctcttccctggcctctgctttcttttcccggacgccggggtggtcggcgcgtgctcgtgctccccaggctgctccatgtcagggcgtggcgcggcgagaccctggctgcggcggcgtccaccggactcgtctcctgggcgctcaccgcccactccttcgggttaaccgctctctgcgcgctcactccggcagcttacagccttacacactactacaatccaaccacacttggctggagatttgatccgtaatctcatatggtgcttctctgttcttaccattcgcagcctcgcgtgcaagcacatcactctagggaacccgagaaggcggctgaggacgttggaggcgttcatcgcgatcttgacgctgacgcagctgctgnatctgattctgc

SEQ ID NO: 61915 - DNA, 741 bp, Oryza sativa
  Clone ID: PAT_MRT4530_63300C.1
aatactactaacgtaaagtcgaatctcgaaaagccccaaatccaaatccaagtgcccaactagagtcctccagtccccctagtcctcctaacaccacatttcgacttctcgagctctccggagcaagccagttcctggctgggcttccgaggcagatgcattcggttaccgtgggacgggacgtcgaggcaggcggcgacggcgaggaaggggagcgccagcgcgcacagccgcggcagcgccgccgccatctccggcggccgccccgccgtcgaggaggatggccaagccacggcctcgtttcgttccgggcgacaactagctgttaacgaccaaatttggtaatcgtcatcggagatgaagattagactgaagcagaatccaaaacagagatcgtcctggaaacagagcgggaatcagctagatcagaatcggctgcggctttaattggcagagttcgagtcggacaaggttagcgattgagccgaatccgacaatgtgatatgtttgggcaaaagtctgccgcaaagacttgtggtatcttagagtttgttagagataagagtcgtgtccgacatggacgtattttgatcaaatcaactagcatgctcacacacctaaaggcaagcttttggacctgcattggagttaagcagatctcctaggcctcgtgtttttacatcaacaggtaggcaccgcgcgacggctttgcactgccttgtgtgtcggttgctgcacgtc

SEQ ID NO: 61916 - DNA, 462 bp, Oryza sativa
  Clone ID: PAT_MRT4530_63301C.1
atttccctcttcttcttcttcttgttcttgttcttgtgtcctgactgttcttgataaagctcgattttgggaattggaccacatcataacattctttggcagagtttgtgaaggtacatttggagtttggattaatttcaggtggttagctgttcttgatcgttcttcttgtttcgggttgctggaagattcgaagattttttttgtgtgtgtgtgtaaattgtggtgttcttgtttggcattgttgctcagttagttgatcatggccggccgggaggagagcgcggttgcatttggcggtggccgcaacggcgccgccgattaccggagctcggacagacggcgcgcggcccggcggagcacgcggttcaaggaggacaacgagtacgtggagatcacgctcgacgtcaagggcgacgacacggtcgccattcagagcatccgcaacggcgccgacatgcc

SEQ ID NO: 61917 - DNA, 408 bp, Oryza sativa
  Clone ID: PAT_MRT4530_63302C.1
tgacaaccatgtgttaacgaccaaatttggtaatcgtcatcggagatgaagattagactgaagaggaatccaaaatagagatcgtcctggaaacagagcgggaatcagctaagtccgaatcggctgcggctttaattggcagagttcgagtcggacaaggttagccgattgagccgaatccgacaatgcgatatgtttgagcaaaagtctgccgcaaagacttatggtatcttagagtttgttagagataagagtcgtgtccgacacagacttgttttgatcaaatcaactggcacgctcacacacctaaaggcaagcttttggacctgcactggagttaagcagatctcccaggcctcgtgtttttacatcaacaccgtgccatcacagttgtcctctcttcctctt

SEQ ID NO: 61918 - DNA, 261 bp, Oryza sativa
  Clone ID: PAT_MRT4530_63303C.1
atgcggatctacgtgaagacgctcaaagggagaataatctccctcgaggttgcgaggagcgacaccatcgccagtgtcaagcacaagatctacgccgagcgaggcatacgaacagttcaaccgccttccccggtcagagagctcggattcgagttcgacgagcaaaggagacaggtcggattcgagttcgacgagcaaaagagacatcgccccggcaaatgtcaaaacagtgcactgcccagattgccaggtccaagctaa

SEQ ID NO: 61919 - DNA, 534 bp, Oryza sativa
  Clone ID: PAT_MRT4530_63304C.1
atgccggggggcatgggcccccctccggcatgtttcacaaatataagatttccattggtctactcaactcagggttataacttcgtacatcttggcacaaatcagatttctaacgagaagattcagttcaactatgtcaatattcagcaacaagtgttcgacaaaactgttagttcaatgatcactgcggtgttaagcaaggtgaccaatctgtctacaagatttgcaaaagggaaggagttgcttatagcatataactataagtacattatctatggccttgcacaatgctcatcagagttgacatgtttacagtgtcaacttagtctatacacaaaattggaggtgagtaacagtgtaaccgacaccggtaaacgagaaaatactggcaaggttatgtgcccttcagctttagcatcttttgaagaaatcacgaccagtgcgcatggaaagagggttgcactatttttagactacgatggtaccctttcgccaatcgtagatgatcatgagagaacgttcgtgctcccttaa

SEQ ID NO: 61920 - DNA, 241 bp, Oryza sativa
  unsure (1)..(241): unsure at all n locations
  Clone ID: PAT_MRT4530_63305C.1
taggtctttattactcttttagttactctgtntttgatntggtagatntacatntntntntntcncagatngtggggggaatggtnntnggagatggtgctcccggtnttnatattcgtgcttgcctntaataaagntgngaatgctgctcctgatggccttnaaaaaaaaaaaaaaaaaaaaaaaaaaaaaaaaaaaaaaaaaaaaaaaaaaaaaaaaaaaaaaaaaaaaaaaaaaaaaa

SEQ ID NO: 61921 - DNA, 379 bp, Oryza sativa
  Clone ID: PAT_MRT4530_63306C.1
tttgtttttttttttttttttgtttttttttttttttttttttttttctttatgggaatttcatgggaatatatcgaatcccccaagatttcaccagggccatagaaaaagataatcatgtccaccaaaacacatggtaacttaaagcattatcatcacggctaagttcaaaatcttgaaagcccccattgatctaaagacaaaacatagaactcagttgtacccaaagcttggcgagccctggccaccaccgcggcgaaaaggcgacaaccatctaaacccggtcgcggggggggccaccctactgcgggcgggagtaggtcggcgcggacacctcttgctggcgctcgaccccggggaggtcggccatgccgagcgc

SEQ ID NO: 61922 - DNA, 448 bp, Oryza sativa
  Clone ID: PAT_MRT4530_63307C.1
gggtggaaacgagccgagccgagccaggctcggctcggctcgtggaagctcgcgaaatgccaggctcggcttggctcggctcggctctccaaccgagctgtacattaggctcggctcggctcgtggtctggctcgagccggctcgagctggctcgattcgagccgaaccgagccaggcgagcccgagccgagcttgagccgagttcacgagcccgagctatttgtccagccctacttgcctcgggagagtgttgccggtgatagatcagagtcgacttgggagaagtggatgtctagggatcaagagatcatgcgttacaccgacagcaaggtacggtctaatcgacgggagggcggcggtctaaccacaggtagcgtggtggtcacaccggcggtaggagggcagttcgaccggcggcttcaggacttcgtcgcctacttcgtttga

SEQ ID NO: 61923 - DNA, 238 bp, Oryza sativa
  Clone ID: PAT_MRT4530_63308C.1
accagagctagggaaggatggcaacctcaaggagttagaagtggtggttgtgaggtttgaagcggggttcgaccagggcacagcgggactggatgacatgcccggcagtgccgaacccgtgcgatgatgatgggggcacccggggacgagaaagttgtagaggagagccttgagaagctgaagaaggtgttggaggaatacaaggcacgcctgacgtagtgcaagcacctggatggag

SEQ ID NO: 61924 - DNA, 317 bp, Oryza sativa
  unsure (1)..(317): unsure at all n locations
  Clone ID: PAT_MRT4530_63309C.1
gtcaacaattcggagcatacttattcaaactgtgagtgcatcaaaatgcacccaaggatcactcatgtactggctatctgttggaccaggagacttccagctatcttcagctggttgtgcatactcagccctgtatgctattgtcattgaaagtnncatcgtaccagtaccagcaggatgcaaggtgatcacatcatcgataccgataaaatctcaacagtttgcggtcatgaaaagtgtaaactacctgccaaatgcactcactaaagtggaaggcgaagaaaatggtggattcaccggcatatggttggatgatg

SEQ ID NO: 61925 - DNA, 1047 bp, Oryza sativa
  Clone ID: PAT_MRT4530_6330C.1
tttttgtttttttcttgttttgataagaagtccatttaagttagaaagcatcaagtttaatttgttcaagcacaaggagtaaacctgcatcgcatcacatatgcagatatgctgattaggggttacataccacgcataaaggacacagacacaggccctctagtaggctagttcacgatcattgatcatactgcagctgtaattcagtaactacatggggtcaaacatttaggccaaggaagtgaagaaaccgcctcaagcacaaggagtaaaccggttgccggacacgcgatgcccagatccgtacgcgtccccggcggcgccgctgctgaatccaccgcccccgttcccccagaagcgcgcgtagcacttgccgaggtacacctcgccggccgtggcgtagccgcagccggccttgagctggccggcggcggccgagacgcagtcggagcaggccttggcgccgaggtcccccacgcactgcgacatggcctgcacgcccccggacccgccggcgcggtagcctcccccggcgggcgccgcggcggccacgagcgcgccgagcgccgagtcccgcatggcggcgccgccggcgtcccccggcgagccgccgcacttcttgaacagcacggccgtgtcctgcttcccgaggaacgtgtcgttgccgtagcgcacgaagcaggcccgcagctgcacggcgccgccggtggcccaggcgcagagcgaggagagcctggagatggcggagcggacgcagccggtgcaaacggaggccgggaggtcggagcggcactggtagacgccgaccaccgagttcgacgtcggcgaggtgaagttggcgtagggggagtagggcgcgctgttggcgacggaggtgagcacggagtcgacgtccgacgcgtactgcgtgccggaggcgtagcgcccctgcgagcacccggcgtacacgaaccccgagtagtcgtcgtcgccccgcgcgcgcgccaggaggagcgagaggaggagcgccgccgccacgctcgtcgccgtcgacgtggccgtagccat

SEQ ID NO: 61926 - DNA, 300 bp, Oryza sativa
  Clone ID: PAT_MRT4530_63310C.1
atggctactatggatacaattgttgctcacatcatggatcaacaagaagacttcaagatcaagtcctccaagtgctgggatccaattcggccacctgctacactgctgacttcaaatgaccaccgaatctacatacgacatccttttcggcccattcagccacaattccgaattccatatcgttttgccgcaatcaaagaaacaaggtgcagcgtcaccaatagtgggcctaggggcatgaataaggttgatttgcatcggcaagatcaacaacccatggagaggtgtatcgatcgctaa

SEQ ID NO: 61927 - DNA, 245 bp, Oryza sativa
  unsure (1)..(245): unsure at all n locations
  Clone ID: PAT_MRT4530_63311C.1
gggggggggggtatttattgaggtgttttttnncccccatcaattcaatccaaaaacttaaaaaggccttttagtttagggcacaattaactggggttggttcacaaccaaatttttatgggggcttaggggggggcccggtgaaaatttttaaaccaaactttaattttttacggggacctgccccccaaggggggttcttttttgggcccaagcttttaaacttaaaaatcccaggggggggg

SEQ ID NO: 61928 - DNA, 191 bp, Oryza sativa
  Clone ID: PAT_MRT4530_63312C.1
aactactaactgccttcccacgtttccacctttgtttttacctaaagggccgcgttctaggtaatactgcaaccaactggataaatggcctctgctagcatcggcaacacaacatatcagagacaaaacacgaaaaatggctaaaaagctacaagcttatacacactctcgtgtggcgtgcccgcaaaagc

SEQ ID NO: 61929 - DNA, 195 bp, Oryza sativa
  Clone ID: PAT_MRT4530_63313C.1
gggaccatcacaactggagttgtttctacatttaaaaatacatgggtttaacataaaaaacatacgggtacattttacatacaaactacaaacataatccgggtaccaattttaaatcattcttgattatcttcactgatatttcattctaaaaacttataactacctacaattccaggctaaacaacaaacggt

SEQ ID NO: 61930 - DNA, 616 bp, Oryza sativa
  Clone ID: PAT_MRT4530_63314C.1
gtgcgctcccatccaagccaccgccgaatgtgattttgcttctacccggggtgaatcgcgccaattcttgccgcacggttggattgaagatagacggtggtatcccctctcacaattcaaaccattcaccccctagccggccgttttcaccctcgccgccgccgcgcgtcgcgcccagattggcgccaacacgtcgccagccgattccaaccgcggtcaagtcaatccttcgccgcgtattaggccctaaccgaagctctgcgtcgagttttacctcgccgcaccaagccaagcaccgccgcccctgcgctactctgttcttctccgccgcgaagtttttccggccgcaatccgtcgtttcaatcgatctcgccgctaggccgtccacacaccaaattagttccatcgccgccgctcgccgtcgccggagatccctagctccctcccctcctcggccgcaaccactttctccctctacggcccgatttggggaacggccggaggtagaagaagaaaagagagagagagactgacaggtcttgaggattcctctgacactctagataatatcaatcaatctcaggacatcgagcaaggcaagttaccatatacatgt

SEQ ID NO: 61931 - DNA, 320 bp, Oryza sativa
  unsure (1)..(320): unsure at all n locations
  Clone ID: PAT_MRT4530_63315C.1
gcggtggggccctacacgctcgcgtcagcggtgggcgctaccatgaagcgcgcgagcgttcgctccctctacttcgccttcacgggctagctccatcaccaccaccaacaccagcaccatcaccagcagcagctgttcggctctcactattactccattgatgtaaaggacgcttcgtctgctatgcgaactntactgctcacatcatcactgcagctcccgcagaggatgagactatgcaggacatatcactttctcatcaaggaccacaagctatgcgtattctatctgctaatggtgcgatattaaacgatacactg

SEQ ID NO: 61932 - DNA, 771 bp, Oryza sativa
  unsure (1)..(771): unsure at all n locations
  Clone ID: PAT_MRT4530_63316C.1
ccggccgggactacaattaccacttcaacccgactcggccgcagtctttatttgcatcgcatcccgtcgataatcggctgtgcttgcgtattaattagtcgactcgtccttatctgctccgattcgattcttggttatgctagaggcttgacgatagcatctattacgacatttcttgatctctccgatccacaaagctaacaattctatccccgcgaaatcgaaaaccggcgcatacctcaacaccaaacatgtcttcccgtccgcacaacgaggagcctctcccgctcctctccgctgaggagagagaccgcgatatgaagggcgagcttgatgtcgagggcgatgctggtcgcgctgagcctcccaagaacaacaacctcgagcacgagtactctatccccagtaccgtcaagttcgcatggcttggaacctacttcttcttctccctgctcttgactctctacaacaagctggtcctcggaatgttccacttcccatggctcctgactttcctccacgcctctttcgccagtatgggaacctatgccatgatgcagatgggctacttcaaactctctcgactgggacgtcgtgagaacctcgcgctcgtcgctttcagcgctctcttcactgccaacatcgctgtttccaacctgtctctggccatggtctccgttcccttctaccanaccatgcgcatgctgtgcccgatcttcaccattctcatctaccgtgtctactacggccgtacctacagctacatgacct

SEQ ID NO: 61933 - DNA, 336 bp, Oryza sativa
  Clone ID: PAT_MRT4530_63317C.1
atgtccgatgtggtgccgggggctactgtcggagatatgggcccggggggtcggggcctcggggtgccacgtcatgcccctcgggcccttgcactgctttgccccgaggccctcacccagccgccgtttggcggggggagcaagcgaggaaggggcctagactgaacttcctttaatgcgcgcagcgccgacggtggccaccacaagtcttcatctattaatgagggaatgacagggctgtcccccgtgtcaggcgagggacggcgctgggccccgctcaaggacaagctgtggtttagcttccaggcgaaggcacgggtcgagttccagtcaaga

SEQ ID NO: 61934 - DNA, 846 bp, Oryza sativa
  Clone ID: PAT_MRT4530_63318C.1
ctctactgcaatactcctactatactccacggccgccctgagctttgattttttttttcttcttgtcgacactgagctttgatttgactagtccacaccccatccatgggtcccaccaatgtcaaaagctgctgtccctcccttgtgcttttgtttccttcatcgatactactgtaaatttgccactccgatccattcatccatcgcgccgtcgacgatcttatccttgccaccgctggcaagctcctcgacgatcgctgcaggggctcgccggcggacgaatggaatcgccgacgcaggcacggactgacgactgtccaagcagaaacggaggtctcgctcgctggaaaagcatcctcccaacataatttgaaaaaacaactcctaaatccttgatgaaaacctctgcatgcttctttccagatcacgatttcctctttacttgtgccaaagagctaggtaagccgccgatcgcacctgatttaatttggagcatccaacacacaaaaaaaaagcgtgtcaaagaccctcctgtagctgatacgaaaatcaagtctcctgtagctgatatgtccctacctgattcggcgggcacttcactcacccactagtattatgagtcatgtactagtattatgagtcatgtgtgatagatagatagatagatagatcctgtgatgggtctgtttgttattcaaaaaaccttcaaacaggttcaactgcatgggccttcgccttttttttgctttgctggtcaaacctgcctcccaaaaagaacatgccttttttagtaattgcagtgaaaaagcccccctcccatcaactgaagagaggtttttttctgcc

SEQ ID NO: 61935 - DNA, 365 bp, Oryza sativa
  Clone ID: PAT_MRT4530_63319C.1
tttttttttttttttctttaacccttccggtccaacttaaatcccccccgggaattaacccctacattttacccccaaacatccctcccctttctcgcctttattttgaaattttccgaacccggggaggtgaaattgtgcaccggggccttaaatcacccacccccccccccaaacaaatattgggctttctcttcctcccccaaaaaaaaaatgcctaggggagggctgattaaacaaatatttattcccaaccaactttgaccaattaaattttctggccccctgaacgggggttcatcaaccaacccgggcgggccccgggccgttcccgccgggccaaaaatgttctcttttcctttttt

SEQ ID NO: 61936 - DNA, 1953 bp, Oryza sativa
  Clone ID: PAT_MRT4530_6331C.1
ttagatcatcctaagcttcatctgcgcgccgtgcatgggatgcaacgtcatgacggtgtgcggtgcgtgggtgtaggacgcagcgagctcgaactcgaagcgctggaggatcatgcacaaggccatcttagcctcgagcagcgcgaagttctggccgatgcagacccgcggcccccagccaaacgggaggaacgcgccgcggtcgttggacgccctggagatcccctcggcgaacctctccggcctgaactcgtgcacgtctctgccccagatttcgcggtcgtggtggataaacagcacaggcagttcgaggatcacgcctctggggtacacgacgcccccgatctccatctccttgtacgtcttccggctgaagacgatcgccggcgggtacaaccgaagaacctcgtataaaaccatggtgaccgtcttgagtcggctgaggccttcgtactcaggtttgtccctcccaaacagaccaagaacctcctcccttgcacggtcttgccattccgggtgcatgctcagaacaaccatggtccatgtgagcagcactgacgttgtctccattcctgcgaagtagaacagcttgcactcctcgataacatcttcagttgtcatccctgggctggatcgtccattctcgtctgcgtgcctcatattggactcgagcagcaggcccagcagatcatcgttggtgctttcgccttccgcgatggcctgcatcctttttccaattattcctcgcagaatggattcaacctcactgttgatcctccgcatccttctgttctttttggtaggcaagtacatgtaacccggaatgacgaacttctgaatggctcctatgaagagctcagcttgctcagtctgcagctggaagatcctccttccttcactgtagctgctgccgaatgccgtgcgagagatgacatctccggtgagactctgcatctccggccaaacatccagctcgcacgaaccgtcgggaccaagggaatccatccatttcccgacaagctcttcacagcacgtagaaaacgccggcagcatgagcttgagcttctcgagatggaacgcagggttcatgatcctcctgtgcttgacccacttctcaccgtcgtggctggtgaggccgtcggcgagaagcttggtaagtgccgggagcttgggcttctcgaagtggccgagcttgttggacagcacgtccctgacctgggcggggtcggtgatggtgacgctggggatggggccgaaccaggagaagcagcacggcctgccgttatcccgcacgttgcggtgcacgaacggggtgacccggggcacgatgtcgtggcagcccagcggcagcggcgccgacgaccacgcctcctcgttgagccggccgaactccctgaggtcgccgaggaggaaccggtacgcggtgccgcggagcccctgcgcgcgcagcgcgcgctccagccgccgcggccgccaccacagccggtcgagcaggcggccggcctgccacagaagcaccggcccgacgaggccgtacgccaggaggctccatggtggtggcagtgaggctcggctgaacaactctccaaaaaccattgctgtggactctcctcgccggcgccccaccctcccgacgcccctccccgccgccgccgccgccgccgccagcggcgcctcccgctcggccccggccggcgagtcgcgtaggagggaagcgccaccggcggcggccggggcgagatgagcggcaggggaggtggcggcggcggggagcaggggacaacgccatcctctgctccacgactgagcaggggacgccgatgcccaatgccctcgcacgtcgctgacgaacgcccaaacttttaatctcctgctttcaacaggtaaaccagaagatgtcatgctaatgacattagagacaatttcaattccaggaactttgtaatccggcat

SEQ ID NO: 61937 - DNA, 524 bp, Oryza sativa
  Clone ID: PAT_MRT4530_63320C.1
gactcccaataacaccacaagcatgcaaactaaaagatagtaaaacgcagtgatatgggtagagttgagtggagtattttttggcatgaccttaaggaaacattagattacaaatatacgtaaattgataaagttgtaaacttgtagtagaactaggtattcacaatcggagggggcacaataaaaggctatttctctttatatagcttgatcgacttgtattaattatctggatattccttgtcaagctggtgagtaccctcgaaggggtccaagtgagatggggtcaatgccatttcctccaggggtgggtgaacgttctagcggtgaaattggcaatactgaaaattatgaggttatcactgctgatagagcaatagatgagagcaatgtgggcaatcgtattctgcgcaatatgggttggcaagaaggactggtacgttctataactaattttggttattactctttgatggctttccttgctgctgcctggatttgaataattctttctggggtcccgt

SEQ ID NO: 61938 - DNA, 246 bp, Oryza sativa
  Clone ID: PAT_MRT4530_63321C.1
atgcgtgacgacgacagctccacctgtgggaagccagcggatggaggaggagaggcggcgacgcgcgacgacggcgccgacacgatgatgacgacgcctgcggggaagccggcggacggagcagaggcggcgatgcgcgatgatgataccagcggctgtggcagtggccagcggatgaaggccggcggtccttacacccgcctggaaaaactatttttgactgtgcaaaaacattttttctattag

SEQ ID NO: 61939 - DNA, 390 bp, Oryza sativa
  Clone ID: PAT_MRT4530_63322C.1
cttatccacgccaccgggtgctagccagagcgaaacgaaaatgaagaagaagcttttgaggttgctgatcatggtgacagaggcggccatggcggccgagccacagcaagcggttggttctgagcatggactactacaggatgagctgtccgttcgcagagatagtggagaggagcgtggtgagccacgcgctgatgggagacccgtcgattgacgccagactccttcgactacactttcatgactggtttaaacagggctgagacaactccgtacttcttgacgtaaccccggacaacaccgtacggaaggacacgcttgccaacaagaggctccgcggaattaaagggcattgaccgcattaaagacgccctctagtcgaagtgcccc

SEQ ID NO: 61940 - DNA, 514 bp, Oryza sativa
  Clone ID: PAT_MRT4530_63323C.1
ctcgtcggcggcttcgccggccacgccggcgacgaggaggaggaggagtccgcgctccgtgccctggtgcacgtctcccagatatgccagcggagcgccgccagcaaggacctcgtccgccgccgcggcgtcctccgcgccgtcgccgagatgctcaagagcggcagccgacggctccgcctcaagtccctccaggtcctccgcgtcctcgtcgaagacaacgacgataacaaggaggagttggggaagggcgacacgatacgcaccatcatcaagttcttgtcgaacgagcatgtccaggagcgggagctggcggtgtcgctgctgcacgagctgtccgggcacgagccgacgtgcgagcggatcggcgcggtgtacggcgccatcctgctgctggtcgggatggggagcagcaagtcggagagcgccgtcgccgtcgacaaggcggagagcacgctccgcaacctcgaccgctttgacgccaacggtcagcagatggccgacaacggcaggc

SEQ ID NO: 61941 - DNA, 1404 bp, Oryza sativa
  Clone ID: PAT_MRT4530_63324C.1
atggtgctgaagaaatccaccggccgctctagcggccacgcctcgacgtcgtacgatgcctccgctggcggcggcgctgtggctgtgagcgcgtatgagcagaggatccgtcgtaatgccgccgtgctcgagaaggtcgccgtttcggtgcacgacagcctggcgtcgacgcgggaggcggcgctggcggagctcatcgccgcgctcgagggcttcctctccgccgacgacgcggagggtgggcacaccgacgagatcctgcgcggctgctacgtctccatcaagaagagggccgccagggaggcctgcgtggcgctccgcgccgtcgcgctgctcgccgtcacgctcggccccggcgccacctcgaagaagatcgcggcggtggagacggcggcgaacccgctcggctccggcgcgaataagatcatgaaggcgacgtacccgctcgcctcccggattctcgaggcgccacaagccgacgcgtccctggtggtcgccgcgctcgagtgcctcgccgtcgtcgcgttcgtcgacgtcgccgcggagaacatggacgacacggaggcgtgcatgaacgcgctgtgggcggtgatctgcccgagcgcggggcccaagctcgccagcgcggcgaaggggacggcgagcccccgcgtgctggccgccgccgtgtcggcgtggacgctcgtcctgaccaccaccggcgggtggaacaagaagaagaaggtgtcccccgccgcgccatggcgaggcgcggcggctcacgcgcacctcgtctccctcctcggctccgacagccgcgaggtccggatggccgccggcgaggcgctggccgtcgccatcgagatgaagctcttcaccgagaaaaacaatggcgccctcttctccaagatggaggccagagcttccgacctcgccaacgacgccgccggagcgggcgtcgacaagaccaacttcgtcgagcagaaggagctcttcaaggacatcacgacgttcctcgccggcggcaagcccccggtgatctcggtccgcacgtcgtcgtccaactacggcctcctcacgacgtcgacatggacggacaatgtccggctcaacttcctccggcgattcctcgccggcggcttcctgcaccacctccaggggaagggtctgatgggccaggtgttcgtcatcgacgacgacgaggtcaccgggaagctgtcggcggcgaggtcgaagcggagcctgatgaaggacacccgcattgtgaaggagttgaacggcggccgtggcggcggcggcggcgccatggatgagaagaaggagaagaagcaggagatgatcaagaactcgctggagaagaagaggacagttaagaaggagcggctaatagcccatgagctcaagcatggatcatctgatctatga

SEQ ID NO: 61942 - DNA, 501 bp, Oryza sativa
  Clone ID: PAT_MRT4530_63325C.1
atggctagcggcgccggaggcggcacggcggcgacggagaggctcatccgcagcgcgcagaagtcgaccaaccagctcaaggcgatgctagcgggaggcggcggcggcggagggaggagctccggcgccgtggaggtgatcctggcggacatctccgactcgctgtctcaggcgctcgcgtctctcatgctccgcgcggcgtgcgacgaccagtcgctcccggcggcggcggccgccgccgccgccggaggcgagcttgttgccgtcctatgggcagtgtgtggtggcgaacagcggcggccggtcagtctcgaagaggaaagctcaacggagaagatgtcgagggaggatactgaaaaggtcttttttttttcctctagattttctccggaaaaggaaatggttgtgtatttggatttggagagggttagagcatctctagcagtagcccctactttcgagtccctaaaagttaaatgggggctgccctcaatgttctag

SEQ ID NO: 61943 - DNA, 2856 bp, Oryza sativa
  Clone ID: PAT_MRT4530_63326C.1
atggcgggcgagggcgtggagatgtcggaggaggaaggcgcgttcgaggcgttcgtgtgcccgctgacgaagcaggtgatgcgcgacccggtgacgatcgagaccgggcagacgttcgagcgggaggcgatcctcaagtggttccgcgagtgccgggacaacggccgccgcccgacgtgcccgctcacgcagcgcgagctccgcgacacggaggtgtcgcccagcgtggcgctccgcagcgtcatccacgagtggcgggcgcgcaacgaggagaaggacctcgaccgcgcctgcgcctccctcgtcggcggcttcgccggccacgccggcgacgaggaggaggaggagtccgcgctccgtgccctggtgcacgtctcccagatatgccagcggagcgccgccagcaaggacctcgtccgccgccgcggcgtcctccgcgccgtcgccgagatgctcaagagcggcagccgacggctccgcctcaagtccctccaggtcctccgcgtcctcgtcgaagacaacgacgataacaaggtcgcaaatcccatccatcccccaaatttcaacctccccccaaaccaagcgagaattgatcgattcttggttttgattttgcaggaggagttggggaagggcgacacgatacgcaccatcatcaagttcttgtcgaacgagcatgtccaggagcgggagctggcggtgtcgctgctgcacgagctgtccgggcacgagccgacgtgcgagcggatcggcgcggtgtacggcgccatcctgctgctggtcgggatggggagcagcaagtcggagagcgccgtcgccgtcgacaaggcggagagcacgctccgcaacctcgaccgcttcgacgccaacgtcaagcagatggccgacaacggcaggctgcagccgctcctcaccaggctgctccgcggcgagcccgacacgcgggtcgccatggccgactacctcggcgagctcgccctggcgaacgacgacaaggccgcggtggccgagcaggccggcccgctgctggtggggatgctccggaccggcgccacgccggcgaaggaggccacgctcaaggcgctcagggagatctcatccagcgaggcgagcgccaagctgctgctgcagcgcgccggcgtcctgcccccgctcgtcaacgatgtcctcttctccacgggacacctaccgatgaagctcaaggagctcgccgccaccatcctcgccaacctcgtcgcctcaggcgccgatttccgttccatcccactcgacgacgacgaagacgacgacggcggcggcggcggacgtgggcgccgcaggacgctcctgtcggaggacgtcgtgcatagccagctccacctcatcagcaacaccggccccgccatcggatgcagactcctcagcgtcctcgccgggttgaccagctcccgcgcgacggtggccgacgtcgtcgcggcggtcaagagctccggcgccacaatcagcctcatccagttcatcgaggcagcgcaccgggacatccgcgtcgagtccctcaagctcctgcgcaacctcgccccctacatgggcgccgagctcgccgacgccctgggcggaagcctgagcagcctcctccgggccatctcctccgacggcggcggcgtcacggaggagcaggcggctgccgtggggttgctcggcgacctcccggagggtgactccagcctgaccaggcagctgttcgacctgggcgcgttcagggcgctggccccgaagctggcggagctccggcggggcaccatccgcggcgggaaccggtacgtgacgccgctgacggagggcgtggtgaaggtgatgtaccgggtgacgtgcgcgctggaggaggacgcggagtacgtggagttcgcgcgggaggccggcctggcgccgctgttcgtcgagctgctccacaccaacggcatggacacggtgcagctctactcggcaatggcgctggagaagctgtcgctgcagtcgagccacctgacggccatcccggcgccgccgtcgccaccggcggggttcgggtgcgcgtgcttggggaggagacccgcggcggcggcggtgcccgcgggggtgtgccgcgtgcacggcgggttctgctcgctgcgggagacgttctgcctggcgcaggcggacggcgggaaggcggtggagcggctggtggcgtgcctggaccacctggacgggagggtggtggaggcggcgctggcggcgctgtcgacgctggtgtgcgacggcgtggacgcgagggaaggggtggtggtgctgggggaagccgacgggctgcgcccggtggtggacatcatggtggagagccgcacggaggcgctgcagcggcgggcggtgtgggcggtggagcgcatcctgcgggtggaggagatcgccggggaggtggccgccgaccagacggtggcgtcggcgctcgtcgaggcgtaccgcaacggcgacccgcgcacccggcagacggcggagcgcgcgctccgccacctcgaccggatccccaacttctccgccgccttccaatccaaacgctcatagcctctccacagatctgccattgccaatgtgcaactgcaactctgcaaggctctcccttcgctgattatcccattcccctctttcatttcacttgctctttttcccattcccctctcacttcacttgctcttttgctggatcggattgctgattttttttttcttttttttggtttgtttacagcagcatgatgcttgtatagcataatcgtcttaattctttcaaagcaaaatggatgaaacaaaattggttgcacctcgagtgcatttttctgtgagaaaaaaaaaaaaaaaaaaa

SEQ ID NO: 61944 - DNA, 196 bp, Oryza sativa
  Clone ID: PAT_MRT4530_63327C.1
tttgattttttcttttttttttagaaatcctaattattcttgattttggattgaaaaggatgttatggattgaatgtgtaaaagaacagtatattgataaagagactgtatcccaaagtcaaaagagcattggcctgcaaaataaaggatttgttctcttttgtaattagaacaacataaacaaaaaaaaaaaaaa

SEQ ID NO: 61945 - DNA, 2058 bp, Oryza sativa
  unsure (1)..(2058): unsure at all n locations
  Clone ID: PAT_MRT4530_63328C.1
ttctgcttctgtttctgccttctgctgtcttgtgccgctgtctggtcccccgccgttctgcaggacttggacggcgggtccacccgctatccccgttttcgccccggccaacacttcctcctccctctctttctcatcaccgggtcgccgctgctcatcattctggaagtggccctgttgccctcgtgcttgcacactctcctcccaccggctcgcttggcattttgccccgttagagtatcaatatcttcccgagcatggattccatctgctgaaaatcacaaaaaagggtgttcagtgatctttttaaagactgatacagtgcttcgcaagtgtaaaattttaaatttaacagctgcatgagtgatgtagcactaggtcctgacacagttttgatgctgccacagttttctgcaaagtttgtggaagcttctcccagcagtattgtagcttctgcagcaagtgtagctctgactccatcttgaaatgaaattggcttgataccaagcatttgggttagtttggtgatatccatggatatgtctggtggagaagctacaccccggtcaaccgatgaagcagatacagatttgattatagaatgactatatccacgaacatcagcaacagattcagccatctgcagtcttgagactctatctggtccaccgacattcaggagtacttgaacagctttaccatctgctaaccatgattttgtcaaagacaacactacatccaccatatcttttacataaacaggacaccggaactcatcattaaagaattgaacttgttggccttgtgaaagaacactatccatccactgaattggaagagattttgccacaggagaaattgtttgtggcccataaataatactgcttctcaagatgcatagtttgagcattgttcaataataaacttctctgcagcaactttagattttccgtacatgttcactggcaaggtctcatcatcctctttgtagaaggattttactccctcgtaaacttgatctgttgagagatggataagaagagtgttgtcattcccaaagcttaacaaccaagtgacaagtgatgaaggtacattagtagccatagcagcagcaggatccgtttcgcattgccgaggtaccgagattgcagcacagttcacaatcacatgcggctgtcagatccaaaagagagatatttctccgtatcgatcgatccctccaggcaacgcccccgaccggcatcggcgccatcgaccgcgaccaccccgccgccgatcgccgccgccgccacttgcctcagctctccgccccaccaccgagcgccgcccccagcttgccgcccccgagcggcgccgccccaccaccccgccgcagaacgctgccaccgccagggtgcgcaagctcgccgccccaatcgccgagcgctgccgccgccgcagctgactcgacgccactccgccccaaccgccgagcgccaccaccccgccgagtgccggcggcgccactgtgcgcccccgccgccccaactcgacggccccactgcacgatctgtggcgctgtggctacacaaacatcacatgctgctgctaaagctaaaaagcttagctagctatggaacatggaaaacatggcatgttcttgtgaaggattactacgtttccatgccatgtgctgcctaatagctggggcggctggaggtgctgccgcacagtgccggcgggggtggtggggcggcgctcggtggtggcgcagggcagcgggtcggtggtgacgcgacgccgaagaagcgtgttttccgtacatgttcactggcaaggtctcatcatcctctttgtagaaggattttactccctcgtaaactggtaccacaagagagtgacttggtaagatcaaaagaaggaatttcctacacttgctggttactatatagaccacaaatgcataaattagcaagtaacctataagctgtgggttttcataagatcctcggtctgtctntagctaggcttttaaacgaaaaaaaagatgcctgcagaagagtttcgcccacgcgtccg

SEQ ID NO: 61946 - DNA, 286 bp, Oryza sativa
  Clone ID: PAT_MRT4530_63329C.1
tgatggtccgctaccggagctggatgctaaggggacattgaacaggatgaccacggggagccgagggaagaacactggtgaagtaaacgactgcacctgacaagggtgtattctgtatcacaatgagaaggcagcccggagtgaccatgatactggcgatgaagctgatgctggagtgtccagtgttggagaggaagcacttgaataccagattcaggggccagatcgacaggctactgatgatagcacaggccctgatgatgacatgatctatgcttgagaaggg

SEQ ID NO: 61947 - DNA, 192 bp, Oryza sativa
  Clone ID: PAT_MRT4530_6332C.1
atgggttcaaaagatggattctctgacaacaagctattcgacgacttcgctgtgggaagatccaacccgaccgaaaaaaactattaccagacagttaagactgagtttgtcacattcgtcgattaccagaaatgggtgtttcacttgccaccaggagatatgaccggttcacttggtgaaaagctcatctag

SEQ ID NO: 61948 - DNA, 2706 bp, Oryza sativa
  Clone ID: PAT_MRT4530_63330C.1
ttttttttttttttttttttgaggtaagcaacagatgcaaatgctgaggcagggagcaacttttacatgacgggggttcttttctctgtttttacttgtgaagtaaaaaagggtctatgggggaagttaaaaatggaatgcaactaacaacagcaacgggtgtgtcagaggtgaaagatctagacacataagccaccacaacaaccacaagtaagaggggctcgctccgctacctacacgcgcaagcacaacgacaagcatcagaaaacgcaaatgaaaatcatcaacttggaatatcttggatgcagcaaatatcacggcatgtgccttcttgcttcgttgttcatcggtccggtccagcttgatgcttcctgctcactcataacattggttcaagctgaagtagcgacgccgaatgagggtagaagccatccgctcttcttggcatgctccacataggacaggaacttctccctggcatcaggaatatcgagagccagatcatcaagcccatccctcacccttgagaaccccttggtcatctggttgatggtgatgatcccttcaccaaagcactcctgcagcagaccgaggatcctgtcgttcttcttttccattgccatgacaagcgccttcttgaccacctcatgattgaagaacggcatgtgcagctcgcggatgcagttgcaagcttctcctacatcgcctccgctctcgtactcctccagaagctttgctatcttgtcctttgtgtcctccacaacccatcctgtcccaccgccccagcatctcagaagcctctctcctgcatggcgggcagtggcaagggagcgcgccatgttcaatgtttcagccccgctgcagtttggtggaagcttgccgcttatctcatctaagttcagaggcgcaagcacatcatcaatcactgctctggctaggaacagtcccagctcatctgaggcatccaatatatcaagtgcggtatcttctgcagattcaagaagcattatgaaacccttgacaatgtcttctgttgagaacaattccatgcttaatgaggatagaagaattgaagccatctctttctccctgtttttgcggtccatagcaattgttataagcttcttaataaagacggggttgtactctggagaaccaagctctttgaggctgcgaataatctcaggtacatcatcagagagaaagtactcatgaatcatagaaacagcctctttcttgtacctcctcagcttctcatgttcatcatcttggacatccccattggcacctacatgtacaaacgaagagtcgagccatccttcagaaactgcttttgataccaatgtctggaattgagattttgcagatggtatatcaagagataggtcatcaagactatctacaacacgagaaaatcccttcatcatctgactagagcttatcagcaattcctcagatgcttccttcagaagcttgacaataagagcttctgcagttggactctccattccaagagtgagagctcgcttgacaacctcatggtgaaaaaatggcactgccaattctctgatgcacctacacgcctcagctgtgtcaccattcttaatatattccttaagaagatcagtaatcctcaactttacagcgtctactgtggtgcgagttgaaccaccccatcgccgttcaagcaactctgcatggtggggtgctgaaagatagctcttttctgcaatctgtacaacttgcatcccctttgaagactcggagagactcgctttttccctgctgagaaaagcaggtggcagaatgtcatcaacaacagctcgtgcaatgaaaagagcaagaacatcaaccgcgtcaagtatgtcaacagccaagtcatcaacagcctctagcagcatcacaaagcctagtctgatttgggtagaactgatcacatcaccataaagagatgataaaagcactgacgccatctctttctccttgtcatgcctatccattgccatggaaacaagcttcttgacaaagtaacggtggaaatcatcataacccaactctttcagatcagaagcagccaatttaacatcaccagtgctgaaatattcctcaataattggggcaacagatttcttgtagtcctctactggggttgaaacaggggcttcaactagttcatatggttcctcatcactgtcatagtttgggtcattgcggtcaaggcatgcatctgtgtctgtatctataagttttccccaggtacctttgccaccagcaccatctttcttcaccttaatggtcttcccggaatgcgaccgccgcacgtgcctcaccccacccccacccccaccgccgccgccgcccctggccgcagccgccgcggcggcggcgcgctgctgctcgtactgctgcaggagcgcggaggtggagcccccggtcggcgagcgcggggaggcgagcgacagcgtctcggcgttctgcaccgcgatccgcagcttctcccgctggtcctgcgtcaggaacccctcgttcctcggcgacgccatccccacctcaactcctaatcccaccaccaccacctagggtttcggccgcggatcgagcctgagccgccgccgccgccaacccgtgcgcgagatttgtgcaggcgaggcgagtggtaaatttttttttctacgctccttttttttccctttttttttctctccg

SEQ ID NO: 61949 - DNA, 167 bp, Oryza sativa
  Clone ID: PAT_MRT4530_63331C.1
agatacatacaccaacaactttattatttcgagatttttataaatatgcgagttttccatcaaacaatattatattctacatatatcattctatttttcacacaacatctttcacattccattaaatacatccaacactttacaacttttttatttccccatttctt

SEQ ID NO: 61950 - DNA, 795 bp, Oryza sativa
  Clone ID: PAT_MRT4530_63332C.1
atggacccacaggagaagaactcacagagcacatcatttggtgcaagtatggaggaaattattgtggtttgcaagaatatatttaagatgactgggacactaccacactgggtttccaatggtatcaaaggtggcaattggcctcactttaatgctagatcttttagtaaagtggttacaaatcattgtttcaagcaaaacgataaccggttaattgggctccttttcacagctaggcatatgtttagtgggctggatgatgacatggtgccgaaacaaaatatggtgttcaaagactatgacagtgtatatgatttctatgagaaatatgcttaccatgctgggtttgacataaggaagagtagaactaagaagactataagagaaatatgttgctccagggaggggcaccataaattttataaaggcgatgaatttgaacgtgagcgaaaccataggacaaagaaaactggttgcaaggcatacatgaaggtgaaaaatgtgatggttgatggtgaggtgtcgtctgttgtgtacgatgttgttgtgcttgagcataaccacccgctcacgccctctctagcagcggtaaagcacatgagatcccataagcacacggatgacacgataatggagtttgtgaacaccatgcaagaaaacagggtggcgcagaacagcctaattggagtgcttgctgacatgcatggtggacaagagaacatcccattcacttcacgcaatcttgagaatagatttgtatcctgcatatgtcatttgccgattgaattgcattaa

SEQ ID NO: 61951 - DNA, 186 bp, Oryza sativa
  Clone ID: PAT_MRT4530_63333C.1
atgcacagggagaaacaagaaagaaccccaagaaacgcacctgctcaacgcctgaacccaagaaacacatacttggttcgatctggctcaggaacgcgtcatgcacagggagaaacaagaaagaaccccaagaaacgcacctgcttaacgcctgaacccaagaaacaaatacttggttcgatctga

SEQ ID NO: 61952 - DNA, 201 bp, Oryza sativa
  Clone ID: PAT_MRT4530_63334C.1
gagtatttgagtgcgcccggtctgaaccctaggaggaccggctaaactccaggaattagatcgtttcgcatgcatgccgacgtataaagaggagtgcgcctacaaacgaaggaaaccgatacggaacattatgactttaggtacagagatccgcatcgatctgaaagaggtaacgacggatgagaaaatgctcgagcaccg

SEQ ID NO: 61953 - DNA, 318 bp, Oryza sativa
  Clone ID: PAT_MRT4530_63335C.1
atggcgagggagccgccccgcttcccggtgccccacgcgcggctacgacgtggggtggtgggggccgaagaagcggtgagagggtacgactacgaaacgcgctacttccggcagcggctggaccacttcaaaaacttttgttcttgttatgttcctactttggtcatcatgttattacgccatttctacgagacggacctaaaaagagatagcatgggggaagtcagcaggtgtactttggtcatcatgttattacgccatttctacgagaaggacctaaaaagagatagcatgggggaagtcagcaggtggatttga

SEQ ID NO: 61954 - DNA, 119 bp, Oryza sativa
  Clone ID: PAT_MRT4530_63336C.1
ataagagaaactcagctcatctgcacatatcaggtccttatgtttcaacatcactccaacatgaatattagttcagagcagttaagcttatgattttttcagtctatcccattcagatc

SEQ ID NO: 61955 - DNA, 831 bp, Oryza sativa
  Clone ID: PAT_MRT4530_63337C.1
atggatgggatctgtctagtaaacaaaaaaaggagactgatgctcaggccatgtgttggtgaagtagatcacagcagcaagcgggtaagatcgcaatgtgttaagtttgagtctctcccagagttattactgaaatgctctgcccttgaatggttgactatccgaatgtgctcccagttacataatttgtatgctcctgaaccattgccgcggttggcatttttgtgtgtacaagattgtgcaattgacaagattgatgtccatgcccctaatctcaccacatttaagtatagaggtcgttttaaagttgttatagcccttcgggaatgcttgaagcttaagactgcaagcattgcgtcccccattgaggacaacctttactatattttcactgagcttccaaatgggttacctcatgttgagagactacatgtgaacgtttttgtgaagactcagatacctggatttactcaggcccctcacaaatttatcaatttaaggcatctgaccatgaggataacctatgaaattgctaaacgctttggtagaaatgcagttctgcaactagcatattttttggaagctgctccgtttttggtagaccttcatttggatagtctcaagagagcttgcataaccggattcaatggcaatggaggacaagttgcactagtaaaatttatcctcaggaatgcagtaaaattggaggaaatggttatagatccaaaaggtagaataacaaaccaaatgatgggagagcacaaaggccgtagaatgattaaggaaaaacttgttccaaaagacaagaatggtctacttgtaattctataa

SEQ ID NO: 61956 - DNA, 222 bp, Oryza sativa
  Clone ID: PAT_MRT4530_63338C.1
tcaccaccaggaaacagctagtgaccactgagttacgccaagcctctaagtacgacgtcacgtagtaggggaaagcgtgggtacgccgtgcaggtaccggtccggaattcccgggtcgacccacgcgtccggcggcttttctaagatattgtcgctaaactgtattttggggtgaaagtattgctactcgattccatcccttaaaaaaaaaaaaaaaaaaaa

SEQ ID NO: 61957 - DNA, 1632 bp, Oryza sativa
  Clone ID: PAT_MRT4530_63339C.1
atggcggcaccggaggatggggaggacaagaatttcgggaagaacaagcacgggctcccgatcggcttctacttcgcgcccacggaccaggagctcctcgccatcctcgaggccaagcgcctcggccgcccgctctcccgcgcgcacgacgccttcttccacgacatccgcatcctcgacttccaccccgccgagctctacgagaagtacgccaaggacgaggagaagggctacttctacttcttcagcaagagggagttcccgacgagcagcaagaagcggccgctgcgggtggcggagggcggcgcgtggaacagctccggcgccgtttacaaggtggtgaagagcagcaagtccggcggcggctacgacgtcggccataagaaaaccctcgtgttccaccagcgtttccccggcgacaaggaggccgtcaaaaccaactgggccattcaggagttcaccaggatcatcgggccccagaacgaggttccggatcttgccgtgtaccgcctgtacaagatgaggaaggaaggcagggagacgcctgcagacctcgccgccgacgaggccgcggccgcggcggccatgaacaaccgtggacaacaagcgtcggctgcggccatggcgctgccaccgccggcgacgggcctgcctgggggaaggatgatgtccatggcggacaaggcgaacatggcctcgacatcaaaggcgtacgggccgtcaaagtcaagctcatcgcaactccagcaggatgcggcggcggcggcggcgccaccgaacgcagcaggggctagcaactgggcgccgaggccttgcaactgccgggagtgcgcgccggcggcgggacactatggctacttcgcggccgcggcggccatgaacaaccgtggcggacaagcgtcggctgcggccaaggcgctgccactgccggcgccgggcctgcctggggtaaggaggatgtccatggcggacaaagcgaacatggcctcgacatcaaaggcgtacgcgacgtcgcagtcaagctcatcgcaactccagcagggtgcggctgcggtggcggcgccgccgaacgcagcagggcctagcaactgggcgccgaggccttgcaactgccgggagtgcgcgccggcggcgggacagtatggttacttcgcgtccatggttccacggccgtcgctggaccggaagggcaagggcaaggcgccgatggactgtgccgagcaggccggcggcggcggcggctgtcacgcggagtcaacgagcactccggcgccgccgaagggcgccgagtactacggatgcagcgtcgccgtcgaggatgatgacgaagaattgctgaagtttctgcaggcgatggtgaggggcgaggaggtggagggtgatggcgaccacgccatggccgacgagcgcggcccgcagcagggctcctccccggtggcggcggcggcggcctccggctccgcgcctgcaggtcatgacggtcgccgtggctcgctgcagggtggccaccatggatcctcctcccccacctcattggcggccgccgccgccaccggcgacgacgtcacatctgccgccagtgcaggtgacgacgtcagtggcagtcagcaggaagaccaccctgcgcgttga

SEQ ID NO: 61958 - DNA, 303 bp, Oryza sativa
  Clone ID: PAT_MRT4530_6333C.1
atggcgaaagctagggtgaacctgaccgtcctcggcctgtcgtccctggtggctctcctcgtcctcatcatcgccgtcgaggatgtcgccgtcgtcgcgcaggtcatcgactactcgtccatgaatcgcgaccatattcctggaacaccgcagctcaaccaccccggcgacatcgctaacaaatacacgcgtggatttgcagctttggcaaaatttgccatgatctttgctagaaagcattgtaagaatgtggatctgttgatggatgtataccacaaaattatatatggtgttttgctgtaa

SEQ ID NO: 61959 - DNA, 2369 bp, Oryza sativa
  Clone ID: PAT_MRT4530_63340C.1
agcaaatgctccatcgcataaaatatttacaccacgttgcttcccaaaaaaaaaagggttaaagggcaagtaaatatatcactgccccgacataacttaaattcattgagaaaaacagaatgcataacttgagaagttatagaattacaagtaggccattcttgtattttggaacaagtttttccttaatcattctacggcctttgtgctctcccatcatttggttcgttattctaccttttggatctataaccatttcctccaattttactgcattcttgaggataaattttactagtgcaacttgccctccattgccattgaatccggttatgcaagctctcttgagactgtagtgagggcgattcataatcacgtctcttgcaggacgggactcgtaaaaatctaaacacagcatatccaaatgaaggtccaccaaaaacggagcagcttccgaaaaatatgctagttgcagaactgcatttctaccaaagcgtttagcaatttcataggttatcctcatggtcagatgccttaaattgataaatttgtaaggggcctgagtaaatccaggtatctgagtcttgacaaaaacattcacgtgtagtctctcaacatgaggtaacccatttggaagctcagtgaaaatatagtaaaggttgtcctcaatgggggatacaatgcttgcagtcttaagcttcaagcattcccgaagggcaataataactttaaaacgacctctatacttaaatgtggtgagattaggggcatgaacatcaatcttgtcaattgcacaatcttgtacacacaaaaatgtcaaccgcggcaatggttcaggagcatacaaattatgtaactgggagcacattcggatagtcaaccattcaagggcagggcatttcagtaagaactgcaaatcgcccaatacaagcacattctccaaagtaagcattgtaaggttagcaaagccacaaaagccaggaggacttggacccaaagtaacggtatcaagttgaagaacttgaaggtgagatccacttttgccgttgaaaagatgacatgggaagttgtaactgcgatcatgcgatccatgatatggagaaaagttgagggtgacaacccttgccttggatgtaacagcaaaggaaacccatccatcaatgtcatgtgcatgctccttcctcaactcaaacataacagcaagtttgttcactcctaaaccactgtgcgtcctcaagataaaattgactgtgtcaataaacgtctcagtgctcggcactcgcttctggcgatcagaactgccaaacactattgaagtgtccaagtaaagattaggatggtaaatccaagctcttctcaacttggtcgatgtcgagctcattacaacagcttccttcaatgttagttgtgaaataatccttgacactatgtcctggtagtgagtttgaacaaaagcatcagcatccagtccctctgggagagactcaaacttagcacatcgcgatcttacccgcttgctgctgtgatctacttcaacacatggcctgagcgtcagtctcctttttttgtttactagacagatcccatccatgtgtgctcttctggctgaaatggttgtacctgtgaagccatctccatctccacctcccgcacagagctgctccaactgctagtcaaggtggaggcctccccacctcctacgctgctggacgcgcggctggaggtggttgccagggaggagacgccgccgccgctgcggctgcctcctgctcgccgaccacgtcccgcacagacctgctccaactgctacgccaaggtcgaggccgccgcacctgctacgctgcttgccgacgccactgtccgctgattgcaaaggacatgacgccgccgccgctccggctgcctgttgctcgtggaggacgaggacactgcacctgctgctcgccgacgccgtcgctgctgttgctgctccccaaggccgaggacgccatcgctcgcttgctcaatcgtcgcctttggccgcctgcatgcgcagctatttgcatcgccgcgacaggtcctcctctcctttccccgcctgcctgagtcccgagctgcagtggcagagcagggcgtcctcaccttccgctgctccactgtgggctgacctcgacgccggccgctccatccgacgcccaatcatgggcgatgctcgacgacgccgatccccgatgccctccgacatgtcctcctcggcacatcttcgccgtttgctccctccatcgctgctctaaatcaccgacgaatggattggggatcttttttctgtagacagcaagttggggattggggatttttttccatgtagagagcaagtctgcctcgtgccg

SEQ ID NO: 61960 - DNA, 1434 bp, Oryza sativa
  Clone ID: PAT_MRT4530_63341C.1
atggcgcggtggaccgacaatgttctagcggaggtgatcggtagcggcgcagaggcggttgagggtggaacggcttgccgcccaagccggcggcgggcgcccaggcgcggttctgatgtggctacggttgagggaggtgctaggtatcacaggtaccagataaaagacatcacaggtatcagataccatgtagctggtatcacgacagccaggatgagttcccggcggccgaggcggctgctgctgactctccccgacgaggtgctggaggagatcttcctccgcctcgacgccctccccgacctcgcccgcgcctccgccgcctgcgccacgttccgccgcctcatcaccgcccgcgccttcctccgccgcctccacagcctccacccgcgtcccctcctcggcttcttcaaacgggaaggcccatcgtgcgagttcttccccgccgcgccgccccactcctcctccgccgccgccagtgccgtcgcgcggggggcagccgacctcaccttctccttcctccccgccacgcccggcgggtggcggctccgcaacatccgccgcggcctcgccctcctatcaacccgcgacggcggcggcggatgcttcttccccgacgtcgtggtctgcgaccgcttgcaccggcggtacgctcagattccccaaatccccgacgacctagcggcccccatccgccggagcggcagtttgcccaagggtttcgattacttgctcgctccagcccgcagggaggaagaggaggaggaggaggaggattcatcattcaaagtggtgtgcagacccaggttgacagaagagtgcgatatcaccgtcttcgtcttctcctccggcgccgggatctggcgcgccgccacattgggctcctccctcgcaacagctatctctgtcacctcccgcccccggtgcgtgcaccgctgcgtctactggctgaccagattcttggacagattgctcatcctggacaccgacgagatggaattgtccatgtttgataacttccccccatccacaggatttgtactgaatcacaccactgcggccattgcggaggcaggggaagacaggcttggggtgtttaaccttgatgttcacaatgtcaatctcctctctagggcgatcaggggcagcgccgacgaacagtggcggcatgacaagactatcccattgctccctggctacagtatttggagatttgtaaatcacgctgatgttgacggctacatactcctaggaggagttttgggcagcggtttgcagtctgatcccattactgatggattacagtatttctcactggacctcaagacatttcggcttgagaggctgtgtcccatgacaatctaccaagcaaggaactctccaactgagttatatacaagctttccgccaccattatcgctttcaagcatatga

SEQ ID NO: 61961 - DNA, 408 bp, Oryza sativa
  Clone ID: PAT_MRT4530_63342C.1
cccacgcgtccgcccacgcgtccggcaaagcacatgtcaagattgttgatgctggctactactgctacaatggaggaggagatgctggaggagcaaggtgaaagcaggagagtggtcaggttggagcaagaggtgctgatccacatccaggtcaggaggatcaagcaggaggatgagaaggccagggggcttctccagaggctgcagctgctggagatgaggcccaccgccaccgccgtcatcggtttccgcgagctggcgcgccctccctcgccgtcgccgctacgccgcgccggttgcattgtgttggtttttctctttgatcctttcttggccggaatagcttcagataagaatgcagaggtcacatcagcaagcaaagcggatgaagcaaagagggaggattag

SEQ ID NO: 61962 - DNA, 558 bp, Oryza sativa
  Clone ID: PAT_MRT4530_63343C.1
caggccaaaaaggtctttttggttttttttttaaagattatggtcacaggccagaaagagcacttagatgttcatggtggtgtcattttttcttacattgaggtcacatgtcagaagagaacacacatatgctacacaaagtaggaaaattcagcatagaaataatacaacatgcaacttaaacaatacgatactgaacaagtcagtatggttttataaaatcacaacacacaacttaccttttttattgcagatgtcttcccttgtgaacctgagccggataggggcagatgacgctccaacatatgcaaacagcgataaagtaaatgcggtaattacactgaacttcaaacaaacaaacaaatgatatttgcacctaaccgggatcaatctttgccatgaatcttgatgtttctctagttagctctggaagaaagaaacaatttttttctggtaatcttgatgtttccatacttcttgattaaaatcacagctcaatatcaagaatacatggttcaatttgctgcatgcatttgtaaggacttaataataggattg

SEQ ID NO: 61963 - DNA, 1326 bp, Oryza sativa
  Clone ID: PAT_MRT4530_63344C.1
atgggggagcttgggactggaatgacgcgagcggaggtcgatgtcaagcgacgcgagcaaagaggagctcgtgtgcccaggtacagcggaagtcgaatcggggaggcgacggcggtggagaagagcttgagcccaaggatgtcgcgcctggccaccgcctttgctcacagtcgcgccgcttacggggatggagcaacccagtcaccgctcctctcgccggcacctccaagcaccgctcgccgtgccgtggcgccgccattttccgccgagccgtcgctgcagctcgcgtgcgccgcccccagttctcttggtgcgtcgccgcaggcgtctgctcaacccggcctcatgacgcgatgcagtggcggaaatcctggaatgttgaaagcaaaaggttttccagatcagtggtgtgattggattatgaaggtggtaatgggtggaaaagtggcagtcaaagtaaatgatcaaattggtcatttctttaaaacctataaaggcttaagacaaggagatcccctctctcctttgctgttcaatttggcagcagaagctctaaccttgtttctgcaaagagctgaggagaattcccttattgaaggattagggaccactggagataaccaaattgcaattttgcaatacgcagatgatacaattttcctcatcgatgacaagctggatcatgcaaaaaatctgaagtacagtttatgcttgtttgaacaactttctggtcttaaaataaatttcaataagaatgaggtgttctgctttggagaggccaaagaaaaacaggacttgtatagcagtatcttcacctgtaaaattaccaaaggggttcaggaaaggattgattatttcaggaaaaggttcctctggcaggaggatcagggtatcaggaaataccatttggttaactggcccctgggaatgggaaaaaaaactttgttctgggaggatagttggttgggtggtagaccattggctattcagtttccttctttatatggaatagcgattattaagaggattaccattgcagatcttaacaggaaggggatagattgcatgaaatttaggagggacttacatcgtgataagctcagagattggaggaaaattgtaaatagctgggaagggttaaatttagtagagaactgtaaagaaaaactctggtggactttatctaaagatgggaagttcgctaagcaggaggcaagtcgaagaaatttgcagctgggaaccagacttctaaaacaggtggcaaatgatgtttttaattcaagacatggatggaggggcggcaccagaagaattggagtaggatga

SEQ ID NO: 61964 - DNA, 3081 bp, Oryza sativa
  Clone ID: PAT_MRT4530_63345C.1
atgatgatgctctgtacgggcaaaggacggttgacctacggagcaatctgccactgccagtcagcaatctgcacagttgacaaccgaaaacgacaccagctaacgtccgtatatgtttcgttagttagcacaagggaacatgatgagattaagatcataattcaaggcttcaagcatgattacggtgagcggcacgaaatcttctcaaggaacctaaaggtatatgtcatcctagttggaaagtctcttttacatatatcagttgatcaagaaaaatatattttctatgtgatcctagtacggttcagaggcgtcactaggagttcaaaaaattgcacattggcgtttttggaggtgcttatagctaggagtagccaagtaggctatgttttaaatgtgctcataagtatagaatatgcgtgtccgcaacaagaagatgaatttttaagtccgtcttctggaagagcaagcaagtacaggtgtgccgtacatgggctgtactggatacgaacgagtaacccggtttacatgtggcagaaacgacacatgttagttcaagatggtgtttgcattgagggacaaagggacctaatgatgtatattacaaacttctacaagaatctttttggtcattcacaggaggttagtatatctctcagcttggataatgtgatgaaagttacagaggaggatgctattggactaattacccctgttacaatggaagaacttagaaatgtggtctttgatcttaagaagaataagtccccaggacctgatgggatgccaggtgaattttatatccatttctgggatttgatcaaacatgatttgctggatttgataaatgactttcaaagaaattcagttaatattgacagattgaattttggtgttatcactttgatccccaaaacaaaggatgcttcccaaattcagaaatttagaccaatttgtttgctaaatgtcagtttcaaaataattacaaaagttttgatgaatagactgaatggaaccatggcttacatcatttctaaacaacaaacagcttttttgaaaaatcgttttatcatggagggagtggttatcttacatgaagtgcttaactcaattcatcaaaaaaaacaaagtggcattctttttaaagttgattttgaaaaagcgtatgataaagtgaactgggtctttatttatagaatgttgaaagcaaaaggttttccagatcagtggtgtgattggattatgaaggtggtcatgggtggaaaagtggcagtcaaagtaaatgatcaaattggttctttctttaaaacccataaaggcttgagacagggagatcccctctctcctttgctgttcaatttggcagcagaagctctaaccttgttagtgcagagagctgaggagaactcccttattgaaggtttagggaccaatggagataacaagattgcaattttgcaatacgcagatgacacaattttccttattaatgacaagctggatcatgcaaaaaatctgaagtatattctatgcttatttgaacaactttctggtcttaaaataaatttcaataagagtgaggtcttctgctttggagaggccaaagaaaaacaagacttgtatagcaatatcttcacctgtaaagtgggcagcttgcccttgaaatatttggggatacccattgatcaaaaaagaattcttaacaaagactggaaactggctgaaaacaagatggaacacaaactggggtgctggcaaggcagacttcaatctattggtgggaggctgatcttgcttaattctaccctcagtagtgtacctatgtatatgatatctttctacagactaccaaagggggttcaggaaaggattgattatttcaggaaaaggttcctatggcaggaggatcagggtattaggaaataccatctggttaactggccactggtttgctcacccagggaccaaggggggctgggagttttagatttggaggcaatgaataaggcaatgcttgggaaatggatttggagattggaaaatgaggagggttggtggcaagagattatttatgcaaaatattgtagtgacaaacctctctctgggttgagattaaaggctggtagctctcatttctggcaaggggtgatggaagtgaaagatgattttttttccttttgcacaaaaattgtggggaatggggaaaaaactttgttctgggaagacagttggttgggtggtaaacctctggctattcagttcccttctttatatggaatagtgattactaagaggattactattgcagatcttaacaggaaggggatagactgcatgaaatttaggagggatttacatggtgataagctcagagattggaggaagattgtaaatagctgggaagggctaaatttagtagaaaactgtaaagacaaactctggtggactttatccaaagatgggaagttcactgtgagatccttttatagagccctcaagttacagcagactagtttccctaataagaaaatttggaaattcagagttcctttgaaaattagaatctttatttggttttttactaaaaacaaaattctcacaaaagataatcttctaaagagaggttggagaaagggagacaataaatgtcaattttgtgacaaagtggaaactgttcagcatctcttttttgattgtcctttggctaggcttatctggaatattattgcgtgtgctttgaatgtgaaaccagttttgagtagacaggatctgtttggttcctggattcaaagcatggacaaatttacaaaaaaccttgtgattgttggaatagcagctgttctatggtctatttggaaatgcagaaacaaagcttgttttgaaagaaagcttccaaatgatcctattgagttagtttatttggcatgtaactgggtggactcttgggcaattttgcagaagcaggaggcaagtcgaagaaatttgcagctgggaaccagacttctaaaacaggtggcaaatgatgtttttaattcaagtcatggatggagtggcggcattagaagaatcggagtaggatga

SEQ ID NO: 61965 - DNA, 235 bp, Oryza sativa
  Clone ID: PAT_MRT4530_63346C.1
ccatatgcattcccccccccctacagcaccacctcctcctgcggcttcgttctcgaacccgatgggctcccgcgccgccggcgccccacgagggctgctgctgcgcggaggagttggtatcgacggcgagcaatagttctcctggggctcgccaccatggaccacaacctagccctaaacattgccgagaagggcttcccgatcttcgtgtacaaccggaccgtcgccaaggacg

SEQ ID NO: 61966 - DNA, 1098 bp, Oryza sativa
  Clone ID: PAT_MRT4530_63347C.1
atggcagtgaaaatggaaaggaagctatcatccaaattaccagaaattcattcagagacgccgcaattgacaggtgccgagaagaaggggaagatggggtgcccgtactccatgccgtcctccatcgctaggcactccagctttccagtgtctagatggtacgagaagcgcccaaacccaaaggaggcgatgaacaccttgcccctccagcacccacccgtggtcgctccccttgccgctcccacgcgaccagagctgaagcccctcgtcctccagcgagccgacgcacagccgcccgtccaccggcatctccccgacacggtacttgtggtgggcgcttggttcccacatcacggccggcgcccgcaggaaggagaactgcagcgtggcggcgtccagagcgagcgcgcaggcgttgttgcagatgtgccagtagaggctccccccgccccccccggcgggggactaaggccagtgggggtcgaactcgatggcgacgtcccgagaccgcggcagcgcgcgccagctgcacacgccgtcgcggtgcgtggcgacccaggcgcgcgggcggtcgtcgtcgacggcgacgcggacggcctcgaagcgcagcccgccgtcgccgggatcatccgcctcggcctcgcgggagaggagtgcggcgccgacaatccggccgtagaggagcggcggcgggtggaaccgggcgtggcggcgggagacggggtcgcagacgaggaaggggcggttgtggtggtggaggaggaggaggccgaggtgggagtcgtagagctcgaagtcggtggcgtcggggaggaagtcgagggagaggcgccgcgaggaggcggtgaccggtgagggggtggaaggtggcgacgacggtgggcgcgcctgggcagggagggtcgcctttggttggcaccggactaccggagtggggtggtggaagtggccgaggaggggagtggaagaggaggagagaaggcggcgcgacaggcggcgcagcggctggccagcgtcgccatcgcccagcggtggcgagcgccgagcgaggcgtggggttttccgttctctcgtatgtgcagtacgagtgactgacat

SEQ ID NO: 61967 - DNA, 1014 bp, Oryza sativa
  Clone ID: PAT_MRT4530_63348C.1
atggggatatccaggaccacccggtgggtgtgggctacagccacgccgacgaccggagcgggcgggctcgcgacaacagacgtgcaggcagccgccgacgccactgagcttgtcaaggccctggccaccaggattcttcccgacctcaagagcagcccgctgttcatcgtggggcaagcgtacggcggcaagctcgccgccatgatcggcgcctcgcttgccaagcccatccgcgccggtgacatcgacctcactctcggaggcgttgtgatcgggaatggctggatctcgccggctgatttctcgacttttactggaagggatactgcgataagttactttaagtttagcttagtgatcagagtaccaatcaggctcacctacgcgcggatgttgtccgacgtgtcgtggctggacggcaacgccatcgacgacgtcaacaagatggcagggaaggtgaaggagcaaaccgcggcggggcagttcgccacctcgctgcagacattcacggaccttctgtacctgatcgactccaagagtgatagcgtcgtaaaacatgttcaactacatgactggcaccggcatgggcatgatgctaataacgggcggcaacacaccggaagctgctcgtcgccattgacgaggtatctcggcagggacatctcaacgatcatgaacggcgtcatcaagcggaagctcaagataatccccaaggaccttgtgtggcaacagttttcgcttgatgtctacgaggcgatgaaaaacgatttcatgaggccagccatcaacgtggtggatgaactgttatctctcggtgtcaacgtcacattgtataatggacagaggaaaccactgcatttctgcctcccctactatattcccaatggcttcgtgaaggcacacaaaaacttacagcactattcgatccttcaagctggacaagcggtgccggttgaccaaccctgcactgtattgcacatgataggcgctatcatgcaatccccagacgtttga

SEQ ID NO: 61968 - DNA, 332 bp, Oryza sativa
  unsure (1)..(332): unsure at all n locations
  Clone ID: PAT_MRT4530_63349C.1
gggggcttggtttttttttttttttttttggtttccagaacacaatttcttttaagaagatttcacaggttcacaagcctttggttcatatgcctagaacaacaaaactactggaagaactccatgacaaatttgtgggatacaagccaaatgatttttggggggggagggaaaattctagggcggcctcggtttcctccttttntttttgctttttctccccggccctgggggccttgggaggagcttcaccggggggggggcccggagggggaccttccccaattgggggggccccccccacggggcccatggtcaccttgaaaacgggg

SEQ ID NO: 61969 - DNA, 511 bp, Oryza sativa
  Clone ID: PAT_MRT4530_6334C.1
tattttcttcgccttcttcccacgcaacgccttgggggagaaacaggatacgaggagtataccactagtgcgagccaagggcatggcgcggcagcagcatcagcgggaggaggagagggccccaatgggctcggcccaacggcggctgcgcgccgtctactgccacctacagccgccgactgagtccggctggcgttgacctcgccgccaaccccaccgccggcgagtactctcacgtgcagggctacagtgctgtactccctgagaagttgcaaactggaaagtggaatgtgtacatatcctcatagtcacctcttaagttaataaatagattccctgataacccatacattggaacgcttcatgataactttgtgtgtgcagttgaaacctttagggactgtagatacctgggcacaaagtctgtgttgatggaacagttggggactactaatggatgacatatggagaagctagtacaaggccgactgcgatagttctggtcttatta

SEQ ID NO: 61970 - DNA, 328 bp, Oryza sativa
  Clone ID: PAT_MRT4530_63350C.1
gataactgttcatcccttcgtcaccccttttctaacctgttatcctctatttgccccttcgaaatttgcacagtgcgcagagtgatgggaggggcaaatagagggtaaaagttaagaacaagggtcattgaatggatgagcagtttcagagaggtaattaagggaagtggccaacttacagaggcaaataaagaatttctctacatataaagcatgctggatttgaaatgaaagatgcccactacttttaacttgtgaaggaactcttgtaaccaattaatctcgtttgctcattttgttgagtctcaaactgataagaaatatatct

SEQ ID NO: 61971 - DNA, 1809 bp, Oryza sativa
  Clone ID: PAT_MRT4530_63351C.1
atgagccataatggccaacaagaaaccacacataatagagcgtattgctcggaggcagccacagccatcgccgtcgccgtcgccgtcgtcccctgcatttatcgccgggccaccgagatctcgcataagtacagcggcgccgctcattggctgagcttggtcggaagcgtatggatccaggacatcaacaccccggacgcggacttcccgttgtaagcgcagcagctcaacgaggtgaagagcatctccctggtgaagctcaacggcctgaacgtcgacttccaggtgtgctcgttgcagctcaaggaggtgaaggtcatctccctgttgcagctcaacttcctcgccttcgtctccgacgccgggatgctcttcggctggtatggcggcgtggccgccttgtacctgccgctcgggctcgcgtacgtggtccgcgcgtcgttcaggcttctcggctatggcgtccacttcctgatctacaagaggccctggctcgcctactggcagctgttcctgctcgcctgcctcgccggcatcggcctctcctggagcaacacggtccgcaacctcctctgcttcaagaccttcccgtcgaagagccgcggggcggtgagcctcaggtactccaaggaggaggtgaacgtcctcctcaatgccgtcgtgccgatgctcgtcaccctcgtggcggcgccgtcgctccgggtggtggagctcaccagccaccgccggaccgacccggcgttcctcgccatgttcgcgattaccctcgccaccggagcctgcgccgtcgtcggcagcatcggctccaagtccatcgggctctcgaccagcgagcacatgatcagcctctacatcctgctcgccctcccggtgctcatcccggcggcgctcaaggtgcgggagagcatggacaagctacgggaggcgaagcgggagaacagagtgcacgacgtcgccgccgccaccgacgtgccggagacggccgtgtcggtgctcgaggtggccgaggcggcggagaacaaggaggaggacgacgccgccgccggcgagagcggcggccaagacgaggtcggcggcatccggctgctgcggcggctcgacttctggctctacttcctgagctacatgttcagtggcacgctggggttggtcttcctcaacaacctggggcagatcgccgagtcccgcgggctcagcgacccgtccactctcgtctccctgtcgtcctccttcggattcttcggccgcctccttcccgccttcttggattactacaccgcaaagagtggctactcgctgtcaaggacggcgtccatggcggcgctgatggcgccgatggcgggggcgttcttcctgctgctggacccgagggacatgttcctgtacaccagcacggcggtggtcgggacctgcaccggcgccatcacgtcggtggcggtgtcggcgacgggggagctgttcgggaggaagaacttcggggtgaaccacaacgtgctcgtcgccaacatccccgtcggctcgctctgcttcggctacctcgccgcgttcctctaccagcgggaggcccgcggcgccagccgctgcgccggcgccgcctgctaccggggcaccttcctcgtctggggcgccacgtgcgccgtcgggacggcgctctgcaccgtgctgtacgcgaggtcgcgcggcttcgccgggaggctaccgccgccggcgaggtcgacgacgatgccatgcgccggccagcggccagcgactaacttaggagatgataacaagggaccagaaccagaagtttctagtacagcagtttaa

SEQ ID NO: 61972 - DNA, 2153 bp, Oryza sativa
  Clone ID: PAT_MRT4530_63352C.1
cccacgcgatgctgctccccgtctgctccgccgcgcccacctgctccccgctctgcccggtgacgtcgtcggtggcccatgtcgtcggcgcgccggcgctacgagggagggtggtggaggtgagcgcgctcaggtcctacgccgatccgctcgtggcgcggccggtgcccgaccgcccgctgctcgcggactcatccatcctctccccctactccgcgtcacccgacgacatcgtgcggggcctcgccgccgcggaggtgcccagcgccgacgccaccgcagcaggtgacgcgctctgctgcggcggggtcgagccggcgacgctgacggccgtctccgacctcgccgccaccacggccgacgcggccgtcaccgacgccgcggagcgcgccctgcttgacgcgccggtgcccaccacgttcccggccgacgcgtccgacgccgaggccgccttcgcgaggctcatcgactccctcgggaagaagatcttccaggcggaggacgcgctcaccgaggggtacgacaagctgcggctgtcggcgtaccagtcgctcagcgcctggaggaagtccgtcgacggcgcggttggtggcctcacggcgtcggtggacgccaccaagaagcaggccgccggtggggtgacggacgcctccggcgcgttgcaggacaaggtggccggagctggcaccgtcgccgtcgatgtccttaggaaggctattgttgctgccgaggattcactgggcagcgcagcaacatccattggatattactatggatcaaccaagtcgtcgttgccaccgaatgtgaaagatttgctgaactcctccgaggagaaagctagtctagttctgaaaccgattggaggtgcccttcaacaggtatatgtagtcgtcgaaggtattgaaaagaatgttggtttggacccaagtgatcctattgttcaattggcagttctgcttggaggttcaaccacaatcgggttaacttactggctcttcgcatacggtggctattccggagacttgtcacccgaatccacactagagctgttgagaaatgatgacaaagccgtacttattgatgttcggtctgaggacttgagagtgaaagatggaattccggatctacgccgtgcagctagatctaaatatgcaactgctgcttcacctgagattaaaggttcagtaaagaggctacttaaaagtggaagagatgttgatgatgcgttgctcgcagttatcatccgcaacttgaagttggtcaaaggtgattcaaaggttataattatggatgctaatgggagccgatcaaaggccattgctaggttactgaagaagcttggtgtgcagcgaccttaccttgttaaaggtggtttccaatcttgggcaaagaaacctcgagtgaaagaattgaaacctgagaccgcattaacagtaataaatgaggacgcagaggaaatccttgaagacataaagcccactccaacacttgtccttggatctctcctgggcctctcagcagcagcgtacgctttgctagaatgggaaacgactctgcaatacataggtgttctaagccttggtctgactatctatctgcgattctctacgtacgagggttcagaggatctggagcaagatctaaaactgctgctttccccgttaagagtaggcgcggaggcgttctcgtgggcggccaagaagctggagccaagcaagattggcttggcgacttccccctccacgacggcggtccaagaccgggttctccaggccgccgcgaagcacgagtcgcagccgtctgacgccgaggcagacagtttggtctctgaagcgtgagagtttcaggtttcagtggccaatgtgatcccaatctgtgcagctgagtgaaagtcgttagccagtagctacacgcccagtaaattctgtggaaaaatttgatgttttctcatgtagttgattgatctgagctactgtgagcagccgtggtgatgaaccggcactgtaaatttttataagcagcgttcaacaataatgaacacatgttagcacaagatgatgttaatgttgtttcacttctatgtggagttgatccgtggggcccatggtccagacagtactgtactgtagtctgtagattgatccatagcgttg

SEQ ID NO: 61973 - DNA, 113 bp, Oryza sativa
  Clone ID: PAT_MRT4530_63353C.1
gcacgaggaatggattgggagccgagcaacctctccatctctcctcaaaatgcacttccatttcactgattctgtgattcagctaacgaacaaagtgtctacaaaagacgaac

SEQ ID NO: 61974 - DNA, 490 bp, Oryza sativa
  Clone ID: PAT_MRT4530_63354C.1
atatttttattcattaataggtatatagtcattcagaacttatttatttaggcaaaatttggtacaggacactcaaagattgtggtctttgctcaacacgatgctttttatcgccctcggcacgcccaacagcagcaacacagcgtttggcttctcgttcacaccgatgcgtcgcatcccctcggtgccgacgttctacgtagtgacgctcaccggcatcagctaccgcagcacgcgtcgccggtctctgatgcgtctagccgcttcatgccgaggtcggtgcgcccgccgccgaggtcggcgctgtacacggtcccgaagctccccttgccgatggagtacgcatcgttgaagtgctccgtcgccgacaggatgctgccgcaagatgtgctgatggagatctttgccctcctggaggtccctgacctcgttcgtgctggctcggtgtgctcctcatgggcgcgctcgtatatcagtctatgcaaaccgg

SEQ ID NO: 61975 - DNA, 784 bp, Oryza sativa
  Clone ID: PAT_MRT4530_63355C.1
aatcggagtaatggcagccatggcgtcgtccgctcccacggccgcgaaacccgtcgctctactgccagccccaatctgccgctgcggcggcggaggtctcagatcgacgctcctggccctgatgccgccggcggcggcggcggcttcccggttccgagtctccgcctccgcctcggacgtgcccgatttcctctcctccgactggctcgaaacacggaagaaaaagcctttcggccccaggttgaattttaatgcagaagaagcagtagaataccaacttgaggcattaaaatacaatgatcagccacgccaagattatgggatagaagtcatgtacaggtttgcaggctttgatccttttgagagatcaacttattttgggcgacaatttgatctaggacagaacctatataagcaaagagtgtgggttcgaggatcacgtccggaggaagaagctatatttcagtttacaatggttcagagggttggtggctcatgggatgggtactggttaactgagagcttaatcaatgatgatggagatgcactctcagaagttgaattgttaactgctcaggtacctgatttccgagtatatcttcgatgtttcctgattgacttgattacatggctcatgactgcaggtgacgagggcgtccgtgagccgtgtggtgtaccgccgaaccggtgagcgtcctttccgatcagaatgtgtaaccttcaagtacttgaaaacatgaaagaagaaccggaaggtggattgaataaaaaaaaaaaaaaaaaa

SEQ ID NO: 61976 - DNA, 874 bp, Oryza sativa
  Clone ID: PAT_MRT4530_63356C.1
gtaagtagtagcagtagcagaagagaaggaggaagggaattggatagatggcggggacgcggcgtgcggaggaggagtacgactacctgttcaaggtggttctcatcggcgactccggcgtcggcaagtccaacctcctctcccgtttcacccgcaacgagttctgcctcgagtccaagtccaccatcggcgtcgagttcgccacccgcaccctccatgtggagggcaagataatcaaggcgcagatctgggacaccgcaggtcaagagcgatacagagctatcaccagcgcttactaccgtggagctctaggagcagtcctggtctacgacgtgagcaagcccacaacctttgacaacatcagccggtggctcaaggagctccgcgaccacgctgatgcaaacatcagaatcatgctcgtcggcaacaagactgatctgaagcaccttcgggccgtcgcgacagacgatgcgcacaagtttgctgaggcagaagggctgtcctacattgagacttcagctcttgaggccacaaatgtggaggaggcattccagctgattctcggtgacatttacagggccatcagcaagaagcccgtggcatcagatgaaggcggggcaggtgccgctggaggtgtcaaagaagggaagacgatcaatgtcgctgccggtgatgccaatagtgaaaagaagcaatgctgctcaacttagaacgaatccttcagtttcagatgtcatttcgtgtaccttgtgtggtgcttgtgattgttctttctttttaagtttattaaagcttcgttgattcattttgtcagataaatatttaccttgctatacctgacagtcatatattacctaaagcagttaattactac

SEQ ID NO: 61977 - DNA, 236 bp, Oryza sativa
  unsure (1)..(236): unsure at all n locations
  Clone ID: PAT_MRT4530_63357C.1
cccacgcgtccgnccattcgttcgtacagtttaagcattatactgcttaaatgaaagagcacgtggacgcaacgttggagataattatcgttacagatctccaactttcagctgtttgctttgcctttcacacaagtgacgtttcatgttatagtagtggcacgaccatctgctgtcctctgttctgcttcagaaacaggtgcttnacccatataatgaggttcgggggcggcact

SEQ ID NO: 61978 - DNA, 234 bp, Oryza sativa
  Clone ID: PAT_MRT4530_63358C.1
atgggtttggtgctagagttaaccgacgacggcgaggagcttcatgactccgtgcatgcaacctcagacttccttcgcattgcaaagcacctgcatccaacaggggagaggaattacctggtgcatgtctcgaaggtggataagtcgccgccgatggagtcgcagtcattgctggcagtgaggaagaacatcagcgttgccgtcagtggaccgtcgatccgttttcgagtttag

SEQ ID NO: 61979 - DNA, 503 bp, Oryza sativa
  Clone ID: PAT_MRT4530_63359C.1
gataaatatatgaacattaatctcaatccaaacattaaaattcggcctttcgaggcttacatgaatagtccattcaacttcagtaccaacaaatttattcaaatcatacttactatatacatctacaatgtgtcacacttactcaaggaacttcaatgtgttcagcgaccatactatccatcatatacatgtacaacgcaacttacttacatcatcaatccacgttctttaatgcttcaacctttgccatgaaaccaaaaaggttctaaaaaataggttcagtttgcataattttcttcatcattacaaaataaataacaagcctgcacgataaatttatctgtacaaacatcaaaaatgaaataccacacttgaaatgataagtggacctcacaattattccatctgtactctctcaattcacataatacatgaattctatgatcaaactcattcaatattttattagaggcataccttgattttttatgttttacaacgtt

SEQ ID NO: 61980 - DNA, 441 bp, Oryza sativa
  unsure (1)..(441): unsure at all n locations
  Clone ID: PAT_MRT4530_6335C.1
ntttttgtaaccaatgtaattacccaggcggtatcatcatcaagtcaaatccaattaaccaaaatcttgaaaagaatcaatagtgactaatatttagaagtccatcctctaaaaacgtactcctgctagtgcctaagacgacaaggtagcagggattgatctaagctaatgacatggacatgagctcctacctacctactgaatgaatgaatgggtaaaaagtatcggtgtatgtatcttgtgtatagggcaataaacttaactggtgtggtgtgtgtgtgtgtgtgtgtagtatgtgtgttttctggtggtttggcttacaatggtgttgagatggacagtaggagaggatgatttgctggtgttggccccgcggctgggtcgcttttgggtttccttttttggagatggacagtgcgcatctttgcttttctggcgact

SEQ ID NO: 61981 - DNA, 1293 bp, Oryza sativa
  Clone ID: PAT_MRT4530_63360C.1
atggcgtcgaccgggagaggcgcaggtcgcgtggtccgcgaactacaggtctacagcaacaacaactcgtggcgctgggggactagctgggcgcagaaaacaaatgggacaagatcgctagcatacccggatgaaggcggctacagcctaccattattggaggcatggattattgggtttgaaaggctaaagtctataatgccctcagctatctattcggttgatggtataggtggaagtaatgtttatgaacatgtcaataatcagctctctttgaaggcgtcctccgccgggccggcgccgccgtcgctcgcattcctcctccccggctcggcgggcgacgccgaccgcctcctccgggtcttcttcgccacctaccacccccgcaacctctacctcctcctcctcgacggcgccgcgtccgcgggggaccgggcgcggctcgcccgccaggcgcgggctggccctggccgcgccaatgtccacgtcgtcggcgaccccgggttcgccaacccacgtggcgcgtccacgctcgccgccacgctgcacggcgcctccttgctgctgcgggtaggccaggactgggactggttcgtgcacctcgacgctggtgactacccgctcgtcactcctgatggtgattcctctctccacctatttgggtcaagacagataagaccgattgttgttgatcctggtctatatctctcatccaggactgatatattttatgccactcaaaaacgtgaactgccaaatgcttataaactatttacaggttcttcatctgttatcctttctcggaaatttatcgaatactgtatcatcggtacggataatctaccaagaaccatgctaatgtactatactaacatgcccttgccacacaggaagtatttccagacagttctttgcaactcccctgagtttaacaggactgttgttaaccatgacctacactattcaaaatgggactcatcttcgaaaaaagagccccttctactgaccctggatgatgtagagaatatgactcaaagcggcgtagcatttggaacaagattttccatggacgatcctgttcttaaccacattgatgaggagattttacaccggcaacctgaagaaccagccccagggggatggtgcataggtgttggggatgctagtccatgttctgtttcaggtaacccggatgttcttagacctgggcctgcagctatgaaacttgccaagcttcttgcacaaagattgacttaccgtaacttctattcgcagcaatgtatatgggattaa

SEQ ID NO: 61982 - DNA, 222 bp, Oryza sativa
  unsure (1)..(222): unsure at all n locations
  Clone ID: PAT_MRT4530_63361C.1
acgtgatggactggccaaggtgtggttggccaaggtggtgccaactgaactgtgctaggtgttgatttgctgtgtgcaatggtgtggaccatgtgggaggaaaagctggaatagtgtgtgtctgaattgagatgtgaatgcaacaataggtgtgtnttggtgtcccccctcgcagaaaacatgtttttcagtntcgtgacccaaaaaaaaaaaaaaaaaaaa

SEQ ID NO: 61983 - DNA, 372 bp, Oryza sativa
  Clone ID: PAT_MRT4530_63362C.1
atggcgccgatgcgcgggggtgatggagcccttgggatcgcgagcaggcacggcggtaccgcagaacggcggcacaggaccggagattggatccaattcgggaacctagatgtgggcggcatgtgggagcgccggtcccgcacatccagcatgcgggagcgttgcgctcacccgtcctgcgggaccggcgcagtaccgcatcctcggcctgcgggaccggctcggtcacgcttcctggttccgcatgaccggctcaggttccgctccttcattcccagtctgcggttcgtcctcgttcccgcgcaaccgttccgcagattgggtatatttttgcaaattaatcacagccaggtatggcaaattagcatttga

SEQ ID NO: 61984 - DNA, 1175 bp, Oryza sativa
  Clone ID: PAT_MRT4530_63363C.1
atggccacgctcgcgccacgcccccatgaactcctcgccctgagaaggccccgtcttaggacgccccgagcccgcgcctccggcccccgtgcccgtggcgctcccgtggccccgcaggccgcgcggccgcggcgcgtcttcctgggcctcggcgccgctttcgtcgaccagctcgcccgcatggcctccggcggcgccccgtcacgctcgttcgtggcctcagctcggccgaggcagggggtttccccggtcgaacagattttgaagaatgttgagtggccggatgagttcccattcaaggccgaagacttcagccgcttcgatgaatcatcagatgctctgttctactcggctccccgttatgtgactcacattgatgaccaagcaatcgaggctctcacgaaatactactcagaagttcttcctccaagcaacactcctggggtggccatcctggacatgtgcagcagctgggtgagccattatccacctgggtacaaacaagagaagattgtggggatgggtatgaatgaagatgaattgaaaaggaatccggtgttaacagagtacgttgtgcaagacctcaatgtgaacccgaagcttccttttgaggataacacatttgatgttataaccaacgtggttagtgtagactacttgacaaaaccaattgatgttttcaaggaaatgagacgaatacttaaaccaagtggattggccataatgagtttttcaaatcgctgcttttggacaaaggctatatctatatggacgtcaaccagtgatgctgatcacgcttggatagttggggcttacttccattatgctggagattttgaacctcctgaggctgttgatatatctcctaatcctggacgaacagacccgatgtatgttgtccagtccagaaagagaatagcttgattaacatcataggttctatacagattttgtgtaatgcacaacgtgatggcaatttttctactggtcactttcgaaacgtaaatatgtagacagatctggcagagtctccgcttgtctgcttgtgtgtctgcttgccttgcaataaaccacattaatacatagcagctttgtgatagttttatcaaagtatttgtagttttatgaaatttatttatttgttcagtaccgtcgtagttgaatcaagatcacct

SEQ ID NO: 61985 - DNA, 678 bp, Oryza sativa
  Clone ID: PAT_MRT4530_63364C.1
atggtgaagcctctggaaggcgtgttggcctgctgggccttctcctggcaaggttcgatacttggcgaaacacatgccctccggcatggtccatctttggcgaagcttgtcaacttgatgctacggcttttgctgtttggctttcacctatgttgtcccttcgaccttcgccacttgcctccagcctacgcctttgcctatgtccttggtttcggtaagcccggccaaaggtccttgtggtatacctccaacaagcccctcaagggcaaggccttaacgggaaattaccgttccgtacaccctggcgacacgtggcagtcccttactgggtggcaggcgaaccgtcacgcgggtgggttatatatacacttaccccctagcgtcactttcacttttacctctagtcacttttaccatctcctctgtggctggtatcgctttgtttctccttgcgttcacgagatttcattgcctacttcgaccagtgtgacctcggctcttataccgggctttccagacttttcatccatggacccttgtaaacctgctcctgcttcggccactggtcctgatccggggaagattggtgaaggtcacatcaggtatctcggcgcttcgcttatcgataagacggagttggcgaagctgttctcggccggggtcatggccgaaggatag

SEQ ID NO: 61986 - DNA, 312 bp, Oryza sativa
  Clone ID: PAT_MRT4530_63365C.1
atgagcaacaagattaatggagctagagaggacgaaaagcacaaccagtgctgctacaaacgggccaaggagcaaagggtgttggcagtgggggcgagggcagtagaaggggcggtaaggcggctcgggacaagcgcagcacggtggagggaggagaggggacaggagcacggctcggcgatccggcgtggcttggacgacaatcgagctcaggcgaggcggagaggcggatcctcctacgacgagcccaggagtggcgaacctaccgctagcaagcttcggcttggcgacggcaaggacgaccacggctag

SEQ ID NO: 61987 - DNA, 331 bp, Oryza sativa
  Clone ID: PAT_MRT4530_63366C.1
cggacgcgtgggcagactcgtgaagccacccttctacgatcacattaaggcagctatccaagatgagtctgaggcgaaactaaaggttatactctattacgtaagaggagagaccttgctaacacaggactcacagtgatgacatcaggtcaagcatctgtgatgcaaaggcctggatagctctgaacgacaacgtcaggtgagcttgtgtctagagctgacaacaaatggacatacagctgtagcattgtctacctgatccgtgacatgtacaacaaccaattgatgatagccaacttttacgagagaaaatattaaagtgctacctgaa

SEQ ID NO: 61988 - DNA, 3876 bp, Oryza sativa
  Clone ID: PAT_MRT4530_63367C.1
atggctctccaggcggccaccaccacctccttcctcccctccgcgctctccgcccgcaaggagggagcggtgaaggactcggcgttcttgggcgttcgtctcggcgacgggctcaagctggagaccagtgctctcggccttcgcaccaagagggtgagcacgtcgtcggtggccatccgcgcgcaggcgtcggcggcggtgtcgtccccgacggtgacgccggcgtcgccgtcgggcaagcagacgctgcgcaagggcacggcggtcatcaccggcgcgtcgtccgggcttggcctcgcgacggcgaaggcgctggcggagacgggcaggtggcacgtcgtcatggggtgccgcgacttcctcaaggcgtcgcgcgccgccaaggccgccggcatggagaagggcagctacaccatcgtccacctcgacctggcgtcgctcgacagcgtcaggcagttcgtcgccaacgtccggcggctggagatgcccgtcgacgtggtggtgtgcaacgccgccgtgtaccagcccaccgccaagcagccgagcttcaccgccgacggcttcgagatgagcgtcggcgtcaaccacctcgggcacttcctcctcgcccgcgagctcctcgccgacctcacctcctccgactacccctccaagcgcctcatcatcgtcggctccatcaccgggaacacgaacacgctggcggggaacgtgccgccgaaggcgaacctgggggacctccgggggctcgcctcgggcctcgacggcgtgtcgagctccgccatgatcgacggcggcgagttcgacggcgccaaggcctacaaggacagcaaggtgtgcaacatgctgacgatgcaggagttccaccgccggtaccacggcgagaccggggtgacgttcgcgtcgctctaccccgggtgcatcgccaccacgggcctcttccgggagcacgtcccgctgttccgcctcctcttcccgcccttccagaagtacatcaccaagggctacgtctccgaggaggaggccggcaagcggctggcccaggtcgtcagtgaccccagcctcaccaagtccggggtgtactggagctggaacaacaactcggcctcgttcgagaaccagctctccgaggaggcctccgatccggagaaggccaagaaggtctgggagctcagcgagaagctcgtcggcttggccgatcacgatcaagtgaaagttgtgttgttcactggtggatcatgggatgggaatatgggattgttatcccgctccttctccgacgggggaggaggggagcgcggcggcggcggtgggttctcgtcgtcgcaagacgcgttcgaattcgacggggaggaggaggacgacctcgtcctgctggggtcgtcgtcgcagtcgtcgcacccgcccgcgccgtcgcaggagtcgtcgtcgatgtgggacttcgacgaggacccgccgccgccgccccggcggcggcgggggaggggtgggggtggggactacgcggagcccgccacggcggcggcggcggcggcggcggccacctcgctcatggaggcggaggagtacggcgagatgatggagagcgtggacgaggcgaacttcgcgctcgacgggctgcgcgccaccgcgccgaggcgggtgcgccgggccagcttcctcgcgctgctcgggatctgcgcctccgcgccgcgccgccgcgtcctccgggcccaggggtcggtacaccaaagaaccctccttttttttttcttacttgtctgcgctgttcaagaaaatcatttgttggattcagaatcttgtgtccattttcttcttaaattattaaatcctccagtgaatcttgttgattccaaagcaccatcgataggttccaaacttcttggaatcagtaaagttcaaatgcttaatggatcaaataaggattctgactgcatttcagaggaaatcctttcaaaagttgaagagattctcttaagctgtcaagagatcaagtcgctcgacaaagatgacaagaaaacaacaaggccagaactgtgtccaaagtggcttgctttgttgacaatggaaaaggcatgcttgtctgctgtttcagtggaggagacttctgacactgtgtccagagtcggaggaaattttaaagagacattaagggagttgggcggtcttgatagtatttttgacgttatgatggattgccattcaacattggagaatctcataaaggatacctcaacttcagctttggacctaaatgaaggaacatctttgcaaagtgccgctctcctcttgaaatgtttgaaaatattggaaaatgccacatttctaagcgatgataacaagacccatttgcttaatatgagtagaaaattgtacccgaaacgctcctcgctttcttttgttggtgtcattatcagtattattgagttattatcagctctttcaatactgcagaattcttctgttgtttccagctctacatatccgaaatcgtctaaagtctctcaacagagttgctctgcagatgtcatggggggaacttcatttaatgatggaaagcgcaagaactcgaagaaaaaaaaccttttgtcgaaccagacacgccatagttgcttatcttcaaaatcagaagtttctcatattactatatcttctggtagtgatgctggtctgtcacagaaggcattcaattgttctccatctatatcaagcaatggggcatcaagtggttcattaggcgagagacatagcaatggtggtgctttgaagttgaatataaaaaaggatcgtggcaatgcaaatccaattagaggctcaagtgggtggatttcaataagagcgcacagttctgatgggaactccagagaaatggcaaaaagacgccgtctatctgaaaatgtaatcaccgacagtggtggcggtgatgacccttttgcttttgatgatgttgatcaggagccttcaaattgggaactgcttggtccaaaaaagaaatcgcctcagaaacatcaagacaaatcaggaaatggagtgctagttgcaagtcatgaaccagaccaacctgaagatcttaatcagtcgggtacaacatctctttttagtgctaaagatgaatccagtcttttggaagactgcctcttggcatcagttaaggttcttatgaacttagcaaatgacaacccatctggttgtgaattgattgcgtcatgtggtggacttaacaccatggcctccttgatcatgaagcatttcccctcattttgttttgtcgtggacaacaactataacacgagagatggagcatcttcctgtcgagatgtcaatcttgatcatgagttatcatcttctcaaaacagcaaggcacaccaggtcaaaattaagcaattgcgagatcatgaacttgattttctggttgccatattgggcttgcttgttaaccttgtagagaaggatagccttaatagggtacggctttcatctgcccgtgttcctgttgatctatctcagaatccacagagtgaagagacacagagagatgtcatagcactcctctgttctgtattcttagcaagtcaaggtgctagtgaagcttctggaactatatcaccggatgatgaggagtctttgatgcaaggagcacgggaagctgaaatgatgatcgtagaggcctatgcagcccttcttcttgcgtttctttcaactgaaagcatgaaggttcgtggagccatttccagctgccttccaaataacagcttaaaaatccttgtgcctgcgctagagaaatttgtgatagagtcgttccatctgcagctcaatatgatcacagaggaaacgcactcagctgtcacagaagttatcgagaaatgcaaactttcatag

SEQ ID NO: 61989 - DNA, 620 bp, Oryza sativa
  Clone ID: PAT_MRT4530_63368C.1
cgggctgcaggatcagatttggtttgcaggtgctgattatgtatgttctttttgacttgtttgaattgcttgctttaacagtgtatttcagtagagttcatgtgatttccttgttatcataaggatatagatcaatgctattgtattgtttttttcttggataaaaggtcacaattttgtgtagctcctattgatgtccgattatctgctttcgtgcgtaagcaacgtatgcaacatgtcttctcttttttccaagttaacattcaattaacctactttgcaatagaggtaacatgttctaactttgacaggacgttgtgtggatggtattaacttacttttcaataggggaaacctgttttaactttgacaggatattgtgtggatgttatttaagagaaaaacccacaaggtcacaacgaaagatacatttgggtttcacccttttgaagtcaaggaagctcacgctgtgtctatactatagatacacactgaaagaaacattggctatggaccaggactcagtgatgtgaagcaattgtgggagcacacgagtcaaacagtgatagccatatgacttgaaagatacgttccaatggatcaatttcttggaaatctgt

SEQ ID NO: 61990 - DNA, 1836 bp, Oryza sativa
  Clone ID: PAT_MRT4530_63369C.1
agttcttctattcccaaatcttgtgttcaccattcttagcttttctatcagcacctccagacttgctagctcatcagcgcgtcctaaagccttccactgcataagataagaaacaatttgaaaggagagatgcagaggtgagtaaacaatctttgacctgaaaatcatattattcctagtgttccaaagaacccagcaaatggaggcgagtagagccgtcataactctgagcctcacttttgaaacctggccaacaaacctaaaaaagtcatcaaaacctccaggacaagcatcccaacccagtgcgtccctctacagatgcaccaaacgaaagtggccatagggcagtcaaaaatgatatggtcagtcgtttccttgttgccacagagcaggcaattttcagacccaaccgaccctttaagtttcaattgctcacaagattggattttgtctctcagggctagccaaatgaaatgtttcaacttcatagggcaaggacaacgccagacaaactgtaatctctcatctaaagcacctctgaacaaaatagctctgtacaaggattttgtggtatacttcttattagaatttagacaccatctcaaggtatcaggggaagaggacaagaccaggttctcaatgatcagcttaatttgacgccattgttccaattctatgggacccatagatccaagtgtttcaggtctgcaatcaaaatctcttgttgattgcagatcataaatagctcagtaaaaatgatcttcagagggcagtcgccctgccaaatatccagccaaaagaagatgtgagtgccattccccacctgccattctgagcccaagttaaaccactttcttgtattgagaattcctgaccaaaattgagaaactctctttgaggagcactgaaagacaccaccaaagatcaagtattttctcctcagtaattccacacataaactctcatcagaggattcaatcttaaaaatccatttggctagtagagcagcattcaaagtcctagtctcagtaaggcccagacccccaaactctttaggaaaagcaaggtcagaccacttaaccatgtggtatttccttccttgcttattccctgcccaatagtatctgcctctaatggagtcaaagttctgatgtaaaccctcataaagttggtaaaagtccatcgcataggatgtttcaggtatggggcaagactggaccaaaattatacggtcctaccactggagatgactaccgggacaaccagttgcggttctgccttttatgcctcgtaagtaaatgcatagatgtgtcgcggaaatgctactgagtgagagtgatgtgctattgattttcgtctaggattttgctgtgctcttcttcttcttctcctctctaccaagaaagatcgatggaggagaatttgtaggacgcgtttctcacgaattacttagctgttaatgatcagcttgatgtgtacgatatgatggtgcagagtgaaagttgtgttgttcactggtggatcatgggatgggaatatgggattgttgtaagatgtaactcaagtgttttcttttttgggattacttttggtaataagagcttgggtgatcgaaaactacagatggtttttcttttaagttgtatgatctctgtagagtttttgagtaatttgtagttttgtaccctatcaaagatcatctctagctgcctctgagctctccaactctatatgtccatctctagtatatatgtcccatatcactgcctcacgtctgtcgcgactttaggaagttgctttttttaaaaaataaaaaaaggaaagggccggcggccc

SEQ ID NO: 61991 - DNA, 906 bp, Oryza sativa
  Clone ID: PAT_MRT4530_6336C.1
cacatcgccaggtaaagacgtcgtgggatagaggttgcggccggcgaggcaagattttaaaaggtgtaccttggcaaaattcttattagacatcatcgaggagtacatggtcgggaagacgccatggccggcgaagcagacgaagtagaggctgagggaccctctcaggttaagaggcagttgccctctatgtcgaagcccttatcggacatgccgacccaaaccagcgatgtcgtaacgccaccgacgagatgagcctgaccgccaagacataggcgagcatgctgaggtaattgagccacgtcgtcgggaggatgacggcacccgcagcgagcatgaacaactgcttcccgtacacatgtacccccaggatcttcaccaccgtgccaggaaggagcttctcgatgttgtcaccctcgaggatgaggaagctgatggcgacaaggtagagctcgacttataagacgaggccgatggccatctagccgtagccggcgaaggctaggtagctgatgtccggatagcttctgacgcagtggtcagcgcacatgcagcgatcgatgagtttgccggtgtagaagcagatagcgccgaccatggtgaagagtgcaaggctgagccacttaccgcatatgacacggagagcagatgcctgagatgacgttgttgaggttgaggcagctcctcctgaaggaagtgccaatgatgcagaacgagccgtcgctagtaaagaggagtggctgctgctccatattgccgctggtagggaagatgagctgctgctaacaagctgccgctggtagggaagaggagctgctgctgctccagttcataaaccacctgatcgtgccgagtattttttaaaaccaattcttttcttattactatttataatcttgctcgtgc

SEQ ID NO: 61992 - DNA, 990 bp, Oryza sativa
  Clone ID: PAT_MRT4530_63370C.1
atggtgaggagggagaggatcgaaggagtgaggcagtacaacagatcgaaggtgcctcgcctgagatggacgcctgatctccatcactgctttgttcatgccattcacaagcttggaggccagcacaaggctacacctaagcgagttcttcagctgatgggagtgggaggactcactatatctcatgtcaaaagccatctgcagatgtacagaaacatgaggaatgatgacctaggtatgcaaggcattcagcagatggatgatcaggagcaaacatttgcaggaggcatgcaaatttggacagatatgcagctgcaggatcatcatcatgagtgcaatggaccctattgcagatgccactcctcatcaaaacatgcaaagggctcactgctgctgctacaccaccaccaccagcagcaacagctgcaaaggccaaatgagatggagacgagacgagcagaggcgagcacccaaacaggctttctcagaagccaaggaatatgtgagagggacgtgtcctccggcctccctgtcccagctgcctactactcctactacacgcccatggcgcacggcgcaccacctgccgccgcagacggtgccggacacgacgacccgccaaggctgctgggcctcgtcgtgatggcgacgacgacaaggcgtggctctcgcgaggagcacaaggcgacgccaccaccggagaacggcgcgatcaggcacgggaggaaggccaggcgtacgacggcggcggcagaggaggaggagcgtgacggcgacggcgacgagctctcgctgtcactgacgctggactcggggctcagttgccggagcagcggcggcgccggcgcatactgctgcagcgaaggcagcagcagcaactggctgatctcgtcgccgtcgtcgacgacgagcctcgtcgccggtggctgctcgcggcggagtactccggccatgcttagcagcgtcgtcagcttggacctgtccttgtga

SEQ ID NO: 61993 - DNA, 699 bp, Oryza sativa
  Clone ID: PAT_MRT4530_63371C.1
gacagaaaaaaaaggcaaaataaattgaatatttgcactgccgaaagaagagacatctcagcaatctgattaaaaaaagaattgctctcaattcagatgaaagaactaatttttacatttgtcagagaaaagatagcatccctccaatcagggaaaaaaataaatgattttaattcacctgtatgaactagcaagtaccaagaacatagaagaaccaagaatagagaaaaaaaaggaaatctgtatcagatccccaacggcaccgcatccagcagtcacctccaccttctccataaaaacagcatgccactgccttcgctgccgctgcatccatccgacgccaccgtcggcttcaatggacctgcctccccgcaaacctttgcctcagccgccacatcccagctcccgtatcggacgcagaaaatcgcggctagaggagagtgaggggtggagcaggactgcaggagggagggggcgaggggtggaaggggcaggaggatcggcgaggttccatatctggacgccgccgcgagagaacgagagagagatgcgagaggcttgggaagagataaggtttgggcctgctacccgcgggattcggcacgaggccgggtgcaaaaaaatttgtttatagacctaaaaacctaataattggctaattggctttgtttaggatccaaaccttaatatttttttaat

SEQ ID NO: 61994 - DNA, 762 bp, Oryza sativa
  unsure (1)..(762): unsure at all n locations
  Clone ID: PAT_MRT4530_63372C.1
atccacctccatacccagcatcgccaaatttcacagcgacaaccgccgccatgggtatcgatctcgaccgccaccacgttaagggcactcaccgcactgcccccaagagcgacaatgtctacctcaagctcttggtgaagctctaccgcttcctggctcgccgaaccgatgcctctttcaacaaggttgttcttcgacgtctgtttacgtccaagatcaaccgacctcccgtctccttgtcccgcattgtcgccaacatcaataaggagggtgagacgcgaaccgtcgttgttgtcggtaccatcaccgacgacaaccgtctgctcgagtgccccaaggtgaccgtcgctgctctgcgattcaccgccaccgcccgtgcccgcatcctcgctgctggtggtgaggctatcaccctggaccagcttgctctccgtgcccccactggaagcaacaccctgatcctccgtggccccatgaacgcccgtgaggctgtcaagcacttcggcttcggtccccatagccacaagaagcctcatgtcgagtcaaagggtcgcaagttcgagcgtgcccgtggccgaagacgttctcgtggtttcaaggtctaagcggtttcaaggtgaaaattattggccttgggtggagttgnggccagtttatggggcaaatgatgccgaacatcggcttgcanatgggtcttgcatggaattggcgtgcctaggtatcacaaaattctacaatgaacttctcgcgcattgctgccgc

SEQ ID NO: 61995 - DNA, 324 bp, Oryza sativa
  Clone ID: PAT_MRT4530_63373C.1
atgcctcctcaccgctggatccaccgccgccgcgcctccccactgcccgatccgctaccgccgccgcacatccccaccactgaatccgccgctgccgcgttgggggaggtcgaccgccgtaggatccgcatgggcgacggccgccgcccctccccaccgccgtatgcgccgccgccgcacctcaccatcaccagatccgccgccgccgcacaggggaacgacggccaccgtcagatgcacaccatcgcgtgcgtcctccgccctcccccgttgcccgagccttccaccactgtcggaagggaggagaggggagaggaggactaa

SEQ ID NO: 61996 - DNA, 309 bp, Oryza sativa
  Clone ID: PAT_MRT4530_63374C.1
gtcacagactcgaaagcatgatggctagattggaacccagaaaaccagagctggatgcctgaattgatccctacaagcaatatgcagatgcagtgacagaagatgtgacgacctacctgattaatgaggacaaagaaggagaggtgctacctgttaaatagatcatgtatgaaggtgtagagaactcctacccagtgtacctcgtggacgaaagatcacgcgttaccagcgtgccttgaggaagaaatctgacatgtactcatactggcatcaaaatggactatggcccagacactgacttcgggcatg

SEQ ID NO: 61997 - DNA, 351 bp, Oryza sativa
  Clone ID: PAT_MRT4530_63375C.1
atggggaaagtggcgagagtcttggcggggaagacgaagcggcgtttggtttttgaggacgacgagcgcggtgtagaggcgctcagcgatgccgtcccggcgcgcacgcagggcgtccgggtggtcagcggcgtcgatggcgtcttccagggcgccgccgctctgctcgccttcactcggaccggcggcgctccggtcgggcctgccggcttcgactaccacaaagagagccagcaacgtcaagtcgccgaccttacaccgttccaacacggacacggctgcccagaggaagacgacgagacgatcgagcagaaggaacaagagatccagcgagagcgaaagatcgattag

SEQ ID NO: 61998 - DNA, 305 bp, Oryza sativa
  Clone ID: PAT_MRT4530_63376C.1
gaaggaaacaaacacgcatcaaatttattgttcatcaaatcaaaagacgtacaaattacagattgttgttacatgaaatcagcactggtgcgtgggttgtagaaatcaatatcaatatgctacagtactattcactattcaggaaattaaaaagaaaacacaacacatctttgaactcttcagcaacgtttgcctgtgtccagtcaaaagctgctcgaacagcagcaatcaatcaggccatcagccttgttccagcccagacgattagcagagaggaaaacaccctcgtgaggctgacagtgggc

SEQ ID NO: 61999 - DNA, 789 bp, Oryza sativa
  Clone ID: PAT_MRT4530_63377C.1
aatcaagaaaactttttatgatctgtgcacgcggtaccgccatcgtctcgatgggagcaggtcgtggcagcaatggcgccgtgctcggcatcggcgtggccgtggtgaccgcgctcctggcgtggcggtgcgcggcggcggcggcgcaggcgccgcctgttgcttcgacggacggcggcgggtcggggtgtatgccggagctcgtcagcctgtcgccctgcatggggtacatgtcggggaacgcgacggcgccggcggcggcgtgctgctcggcgctgtccggcgtgctgaggtcgagcccgcggtgcctctgcatggtgctcggcggcacggcggcgtcgctcggcgtcgccgtggacaccgcacgcgcggcgctgctccccggcgcctgcagcgtccaggccccacctgccagccagtgcaacgcagcgggagttccggtgtcatctccggcgaacccgacgacatccggcggtactccggcgacgccagcagggactcctggatcgaagaccactccagcatccactactcaatactctgacggaagcgttaacagatctcgggtgatattggtcatcctcgtcgcagcgattgttgtgtttcttgatcacttttgagttcttcagtacaataagtcatattgttcgttttacctttttcaaacgatgagcagcatatgtgcggaaaattgtgatctctccaaagtcacgcacgcacgatcacgtcaagttgagtggatggattggtcgtgggagtttcgtggggggggggggggggggggggaag

SEQ ID NO: 62000 - DNA, 336 bp, Oryza sativa
  Clone ID: PAT_MRT4530_63378C.1
tccccgggctgaggaatcggcacgaggtccccccgcctcctcactctgccccagagctgactttgcttcttactcctactactactacgtgtctttctctttgcaccctagcctcatgttcttcttcttcctcctctcctccttcttgtagcttccacccccaccccactccctcccacccccgccgcccgcttaaaagtccgattttggggaggttcgtgcgctcagatcggggagggggtccaaccccccatttcgtcttgctagcggcggggcagggtggtgacacgcgacacgtttggactttttttttttttttggggggacacggttctg

SEQ ID NO: 62001 - DNA, 828 bp, Oryza sativa
  Clone ID: PAT_MRT4530_63379C.1
atggacgtccgtgtcgagctgtccgactccaacccggacggcggcgaggaccccgtcgcgatgatctactccttcgccgtgtgctacggcgtgttcctgatcgcgtggctgcaccgcacgctcgcccgcggctgctccacggcgcgccccgtgcacgacgtcatgtccggcctcctcgccgcgctcatgctgcactgcctcacggcggcggcccacgacgggcgatacaccagcgtcgtcgccgggacggcgcgcgggtggaacgtgccgtgcttggcgttgcgtcttgtcaagaatgccatgctcttccccgtggtcgcgctgatcggcgcagggtggtcgctcccggagccgttcgtgcaggcccgtgagctgaacgtgttgacggcgatggttccgctccaggtctacatggcgatcgccaccaccttgtccggcgacggaggcgtggcctggacgtggggccacgccttcgtcctagtccagctcgcctgctgcgtcgcggtgctgatgccgatgggcagggcgatccgggcgctacggaaggaggccgacacggacgacaaggcggcgcggaggctcggcaagctcgcgctgttccgccagctctacctcgcggtggcggtgtacctgtaccacacgtggatggccgtgttcatcctgaagttgctcgtgggcgcaagttccggttaccgttgggcgagcgtggcggtggatgaggcggccgccctcgcattctacctgttcatgttctgcatgttcagtccggccgaggaggatattcagcttgaagagtatactgaagaattgatccaaggaggagtttga

SEQ ID NO: 62002 - DNA, 324 bp, Oryza sativa
  Clone ID: PAT_MRT4530_6337C.1
atgaatagctgcttcccatacacctggtacccccaggatcttcaccaccgtgccaggaaggagcttctcgatgttgtcaccctcgaggatgaggaagctgatggcgacaagtttgtttcagtcatacagcttttacacagccccatctcaatttacaattcgcactgggtggctgatgtccggatagcttctgacgcagtggtcagcgcacatgcagcgatcgatgagtttgccggtgtagaagcagatagcgccgaccatggtgaagagtgcaaggctgagccacttaccgcatatgacacggagagcagatgcctgagatga

SEQ ID NO: 62003 - DNA, 1179 bp, Oryza sativa
  Clone ID: PAT_MRT4530_63380C.1
cgtgttcccaaccagagcagttgcgcacggaaaacggaacagtccattagcgcatgattaattaagtattagcttttttttttcaaaaataggaccaaagcgattccgctacgacgagctctccgtcgccacagacttcttctccgacgactgcaagctcggggaaggcgggttcgggtcagtgtacaaaggattcttgaaggatctgaatcttgaagtagccattaaaaaagtgtcctagagctcgaagcaggggaggaaggagtacgagtcagaggtgcgtatcattagtcgcctccgccaccgcaatctggtgcagctcatcggctggtgccacgacggaagcgagctcctcctcgtctacgagctcatgcccaacgccagcctcgacacccacctctacaacgccaacgccaacagtaaaaaaatagctccaacaaatcccctactctcctacccgagtaggtacgagatcgtgcttgggaccggatctgcgcttctgtacttacatgaggagtgggagcagtgtgtggtgcaccgtgatatcaagccgagcaacattatgctcgacaccgccttcaatgccaagctcggtgacttcgggctagctaggcttgtcgaccacgaccggggctcccacacgaacggtgctagctggcacgatggggtacatggatccagagtgcatgatcactggcagggcgaatgccgagtcagatgtatacagcttcggtgtcgtcctcctcgagatcgcttgtggtcggtgaccgataatggcgccgcaacggcaagctgatgaagaagaggacatgatccacattgctcaatgggtctgggatttgtacggcaatgggaggattattgacgccgccgaccaccggctgggcggcgagttcaacggcgaggagatggaggctgtcatggttgtcgggctctggtgcgcgcaccctgaccgaagcctgaggccaacgattaggcaggctgtcagtgtgctgcgaggcgaggtgccgccgccgagcctcccgacgaggatgccggtggcaacgttcctgtccccagtagatgctttcaactacacatcttcatatgtgacagggaacaccaacaccagcaccagcacaaacacaactcagtcatccaggacgactgggacagttgcttgataagttcgataatccg

SEQ ID NO: 62004 - DNA, 1188 bp, Oryza sativa
  Clone ID: PAT_MRT4530_63381C.1
atggagtccgtcctcgcccggctcccctcctcgctccgcccgcgcgagcccctcctgtgccgcgtcatctccgcgtacggccgcgcccgcctccccgccgccgcccgccgcgccttcgcgcacccggcgttcccggcgccgcgcaccgcccgcgccctcaacacgctcctccacgccctcctcgcctgccgcgcgcccctcccggagctcctctccgagtgccgcggctccggcatccaccccgacgcgtgcacctacaacatcctaatgcgcgccgcggtggccgactctggctccgtcgacaacgcctgcctcctgttcgacgaaatgctgcagcgggggatcgccccgactgtcgtcacgtttggcaccctcgtcactgctttctgcgaggcaggacgtctagaggaggcattcaaggttaaggaggtgatgtctttgcagtacaacattaggccgaacgctcatgtgtatgcgagcctgatgaaggcgctctgcgagaaggggaaggtggatgatgcgcacagactcaaggaggagatggtgagcaattcagaacctttggtggattcaggagcttatgcgacgctggcaagggcattgttccggttagggaagaaaggagaggttgttagtttgctggaagagatgaaggaaaagggaatcaaggttggtagagaagttcataattcgatgattgcagggttttgtgaggatgaaggggatctggatgctgcatttgcagcgctcgatgacatgcagaagggtgggtgcaagccggactcggtgagctataatacactggttggtggtctatgcaagatggggcggtggcgggatgcaagtgagttggttgaggatatgccacgaaggggatgccgtcctgatgtagtcacctacaggaggctgtttgatgggatttgtgatgctggggggttcagcgaggcgaggagggttttcaatgagatggtattcaagggctttgcaccaagcaaggatggtgtgaggaaatttgttgcatggattgagagggaaggagatgcggcgtcactggagtcagtgttgtgccaattggctagcgttaacgccttggaatcaagtgagtgggagaaggcaatgagtggtgtgctccatgatcctgcagagcagaagattgtgaagttgctggataatttgagcttggcttga

SEQ ID NO: 62005 - DNA, 1569 bp, Oryza sativa
  Clone ID: PAT_MRT4530_63382C.1
atggagttagatgtgagtataacgagtcgtggggacgcgcggcgtgggtcgcacgagagccagccggtgggctatatcaacacgactctatttgatgagcgatcactccaagtgattggcaaatgttttatccggagtgcgtccagcggaggtagggatgaaaaccgattgattacggtacacaaagattataaatgctctaaccccgagttatccaagtacctcgcagaagtcaggaagctggagaaaaggttcgatgggatcgtggttcgacacgtataccgcaaggacaacatcgagccagatgacctagcacgacgtgcgtccaggcgagaaccactcgagcccggcacctttctggacatcctgacaaagccatcagtgaaagaggcaatcggcgagatcaacacagccgtccccgacatcaactcggaggccaaagaggcggaatgcgccatcgccgatatcgagaccacagacgactggcgcaccccactgatcaaattcattaacagcgaagagttgcccgaggacgacgtagaggccgagaaaataacccgtaaagcaaaaatctactgcacgatcggcaacaatctatacaagaaagcgccaaacggagtacttctcaaatgcgtcttgtccgacgacagcagacacctcctcctcgatatacatgaaggcatctgtgggtcacatgccgccggtcgcgcattgtggtgtgaagcctgccaattccacaacaagcacacaaaatcacttgcacaagtgctccagaccatccctcttacttggccgttctcgtgctgggggctagatatactcgggccattccagcgaggacagggcggctacaagttcctattcgtggcgatcgacaaattcaataaatggatcgaagcagttcccacgggggaaatcaaagccgccaacgccatcaagttcatcaagggaatattttgcagatacggactaccgcatcgcatcattactgacaactgctcccatatcggactagtcaagagggcaaacggcatagtactacaagggaccaagacccgtgtctacgacaggctcatgacacatgacaacaaatgggtcgaagaactcccatcagtactatgggccatacgcaccacaccaacaacgtccaacaagaaaacacccttcttcctcgtgtacggctccgaggccatgctccctagtgagctacgacatcagagtacacgagcacagaagtattccgacgaggaacaggaggagcagcgaaacgacgatgtgaatctactcgaggaacatcgcgagcgagttgccgttcgagcagccgcctacctacaagcccttcgccgctaccacgagaagcgcatccgagcccgcatactttcgatcgacgactacgtcctccgaagggttcaaagccaagtagggcgaaacaagctctcacccaaatgggaaggaccatacacgatcacacaagtcttgcgatcaggcgcattcaaaattgcagacggcgatggccacgagttggcaaactcatggaacattgaccaactacgtaaattctatgtatga

SEQ ID NO: 62006 - DNA, 270 bp, Oryza sativa
  Clone ID: PAT_MRT4530_63383C.1
atggaggccatcctctcttctttagtgactgtagcaggtagccacgacttcatggccaccagctctagcgtcggcatgcttgttgttgtcagatctctagtgggtggtaaggtcttgctacccaggaagaaggaaggactcgaagaggatgtcaaatccagaagctcaaggggcgccatcatctccaccgctgtcgttggtgttgggatcctcctctccttgccgtcgccagggttcactctatcggttgaagggagcgatggtggatga

SEQ ID NO: 62007 - DNA, 191 bp, Oryza sativa
  Clone ID: PAT_MRT4530_63384C.1
ggactgtatgcttgggggctactccccacacactcctgtttgacgcatacccccttgtgaaggcgcgttgtactaaccaaaaatcaagggcgcctttccatagagggaaaagactttgtcatcctttgaaaaaaaggagggggaacaaggccccgtgtctttaccattggttagcatattttggtttgttc

SEQ ID NO: 62008 - DNA, 451 bp, Oryza sativa
  Clone ID: PAT_MRT4530_63385C.1
atggtgaggtctgggactatgctcagggtggagtagaggtctagtgcggtcgggataccatgtgagaagttgactagagtcaggattcttggaggtcaacttcagtcaacagtggggatcgggactagacttagagaggagttgaggtctagacggttaagaataccgggtgacgaagtttgatacgagatagcatacggtgaatagacatcgtgtgggagagatcttcgcaacgggtttcacgaggtgtgcgtgcaagcgtcggtgttcgcgaagggaattgaaagtatgcatgcatgtacggtgctgtacatgtatgtgtgatcgatacatgcatggtgaagcatgtatgtgtgcatgaccggttggccgactttatggagtatttcaatttcaacttgaacacactcccttcacattgaagtccttagacctttgaaatgaacggact

SEQ ID NO: 62009 - DNA, 236 bp, Oryza sativa
  Clone ID: PAT_MRT4530_63386C.1
tttagcgcgccctctttttttttttttttggatcataaatgcacaagttgttattggcatatattatgtgaccccgaaccgatgttgctctttacatacagcatggaaatacaagctgacagcagaaactcaagttgaatgcaagaagatcgggcttcttgcatgcaataagggtgtggaactgagaacaagaaattcatatatgctaggccccgctacaaccagaaaaagtgaaa

SEQ ID NO: 62010 - DNA, 1767 bp, Oryza sativa
  Clone ID: PAT_MRT4530_63387C.1
atgcatgttgcaacgcttttgctcctcctgctgctcgatctcgcggtcgccaatggcgccgtcgacgagttcgcctacaacgggttcgccggcgccggcgacggcgagctagtgcttgacggtgccgcctccgtcacgcccgacggcctcctgcggctaaccggcggcagcggcgagaagggccacgcgttctacgctcggccgctcggcttccgcaacgggagcggcggcggcggcggcgtccggtccttcacgtcgacgttcgtgttcagcatcatgtcgtcgttcaccgacctcgccgggcacggcatcgcgttcgccgtctcctcgacgcgggacttctccggcgccgccgcggccgagtacctgggcctcttcaaccgcgccaccaacggcgacccggcgagcggccgcgtcctcgccgtggagctcgacacgatgtacacgccggagttccgcgacatcgacgacaaccacgtcggcgtcgacgtgtgggtggagtacgacgccggcgacgcgcgcctcgacgtcacgctgcaccagctcaccaagccgaagccggcgaggccactgctgtccgtgaagccggcgaacctctccgcggcgttctccgaccaaatgtacgtcggattctcgtcgtcgacgggctccgacgacacgtctcactacgttcttggctggagctttagcctgtccggcatagcccaagacctggactacgccaagttgccaagcctccctcctgtcatggccacagctgcgtcaaccaagcacatgcccgtgaaaatttggttacctgttagcctatcagtgacagtggtagccgctattgttatgttcttattgttcaggaggcagaggagggcaatttatgttgagctggtggaagattgggaggtcgagtttggaccgcatcgttttgcttataaggacttacacaaggcgactaaaggatttcatgatgacatggttcttggcgttggaggattcgggaaggtgtacaagggagttatgccggggtcgggtattgatgtcgcgattaagaaaatttgtcatgattctaagcaggggatgagagaattcatcgccgagattgtgagcctaggtcggcttagacaccgtaatattgtgcaattacttggctactgtcggcgtaaaggagagcttctattggtgtacgattacatgataaatggtagtctggacaagtatttgtacggtgaagcgaggttgtacgaccatggcgccgagccgagcaccaccaccatcgtcggcaccatgggttacctcgacccggagctgacgcgcaccggccaggccaccacaagcagcgacgtgttcgcgttcggcgcgttcgtgctggaggtcgtgtgcgggcggcgccccgtgcagccgcgcgcggccgccggcggcgagcggctcgtgcttgtggactgggtgctgcgctcgtggcggtccggggagatcgccggcgcggtggacgcgaggctcggcggcggcttcgccgccggcgaggccgaggcgatgctgaagctcgcgctgctgtgcacgcaccggctgcccgcggcgcgcccaggcatgcggcgcgtggtgcagtggctcgacggcggcggcggcgacgtcctggaccaactgtcgccggggcacatggacgtggccactccggcgttcctgtgccacgacgatgacgacgacgacgacttcgtggcgatgtcgttcccgtcggcttccactgccacgtctccaacgacacgctttacaggctaa

SEQ ID NO: 62011 - DNA, 2106 bp, Oryza sativa
  Clone ID: PAT_MRT4530_63388C.1
atggggtccatgccggagggccgcaagtgcgtcggctgcatcggccgccccgtggcggacgcgcggcggcgggcgaggctggggaaggggtcgcggcttctcgcgcggctgctcgcgccggcggaggtgcgccaggtgatgcgcgccgagcgcgggtgcgccgcgaaccaggtgcggccgggcgagatcctcgtcaacggccgcggcctctcgcagggggagctggatctgctgctcggctgcgccgtgccgccggagcgcctcgctgccggccgctactggtacgacaaggactctgggctctggggcaaggaaggcgagaggccagataggattgttagttcaaagctgagcattggtgggaaactacaaacagatgctagcaatggcactacacaggtgttcataaatgggcgggagatcacaaagaccgaacttaggatgcttaagttggccaatgtacagtgcccacgaaatactcatttctggttgtatgatgatggctcgtacgaggaggagggccagaacataataaaaggaaatatttggcaaaaggcaaaattcttgtatggaactgaattctccccagaagaaatacttaatttgaagctcatgatacaaagcaatgtttacaaatacctcagcacattgcttgaatggcgggagtgctttgaggacgaggctttggaggaagaaaaagagcttggcatgagtaatcacaagggagatgaaaatgttacagaatgtgaacttccaacaggggaaccgaaggcagtgcagagcacgtcatctttgtattcactaaatcaaagattgatgcactttgctaattggttgctggagatagttgccctgggtaaccttgatgccttttttcctgctgcaactcgcgagtatgcacctatcgttgaagaggtttggaaagatccagctattcaagccacatataaaaggaaaaatgagttgcactttcttcctgatgtcgccagttattttcttgatagggtggttgaaatatccagcaatgaatatgaaccaaccgagacagatatcttgtatgcagagggtgtaaaccaatggaatggcctctctacacttgaattctcgcttgatgaccgaggtcccctctctgactcatacgctgacaaagctggcaatccagccatacaaacaaagtatcaactgatccgcatgaactccaaggggctaactggaggcttcaagtgcctcgggatgctggaggacatccgtgccataatcttctgcatctcgcttgcggactacgaccaaacatgggtgcagagctcaggagaaccctgcaacaagatgatcgccagccgggatttgtttgaggatgtgatcaggcacccttcctttgaggacaccccctgtgtactcctcctcaacaagtacgacgccttcgaggagaagatcagtagggtgccactgacagtgtgcgagtggttcgctgacttcagccccgtcaggcctcaccacaccagccagacatcgctggccagccacgcctactactacgtcgccgtgaagtttaaggacctctactcctccgtcgctgatggccggaagctgtttgtgttccagacgaaggcgctggagcggcgaaccgtcgacgacgccttcaggtacatccgggaggtgctgagatgggatgacgtgaagaacagcgatgccggctattgcagcgctgacgagtcctcgtacagtgtggacatgacgacctctccatcctaatcgctgtttatcagttaccatctggtgagatgttttgctgtggttggaagatattggaggtatttatacctctttacttgattacttctagtatctccaatcaccataaaacatctctgcatcaatagtagttgcgtttaggggcctagtcttttcatgtttgccttgtagtagatatgttttcttgaaatatttgcacccttttgttgaacctgctgtagttttctgtttaattagtagccttattcttcctgtaagtaaatagaggagtaatctcctgcgtataacgacaccgtttctatctgttagcgttgttctccctataaatggagaggatgaattttattttgcaaa

SEQ ID NO: 62012 - DNA, 3535 bp, Oryza sativa
  Clone ID: PAT_MRT4530_63389C.1
caccctgaggcaaacagaggaggtgtccttggtaatcaatatgccgagaatgcacatagaagatccaagcatgttgattttcctattttcaatggtgaaagtcctgaatcatggataaggaaagctgaaaagtatttcgctctaaaccaaacaccagaggaagagaaagttttagtggctgaaatttacattacaggtcgtgctgatcagtggatttccagctctgatgttcccactgagaggtcgacctggccagatttcaagactatgatttgtcaaagatttgcagccaaatccaacattgaaatcactgataccttcaggaacttgaaacagtacagctctgttctatatagacaagtttgaggaagtcatggctctggtgaaaagaaatagacccaatctaactgagcagtaccttttggattatttcatttctagcctcaaggatcatatcaaacggccactgaaatccttacacattcattccttggttgatgcttatgaacatgcaaggaattatgatgttcctcctcgcagtactaccacagtggcattgtcacagaacaaagacactctcaggataccggcaaaacctgtcttgaaggacgataaacctcatcctaccactgcacctaagccatttggcagatgcttcaaatgtcaagaaccctgggttcctggacatggtcgagtatgcaaagcacctaaacagatctatctggttacattggaagatgatggggaagaatcacctgataatgctgacaccaagtttaccacaccaccaggcagtcctgaacatgtggccactacacatcaggacttgtccctgcatgctctggagggtacaaatactgctgctaccacttttactgttcatgtgtgcattggcacaatttttgccacagcattgattgatagtggtagtactactacctttatttcccctaaacttgttagcaaagctggcttggagatagttaacaatagtcttattcctgttaaggtggccaatgggggcactatttatactggagctaaatgtgtcaatgtttcttatactattcagcatgacagcaacaactccattaccagctctcactgcagtacttcagcaattcactgatgtctttgctaaacctgataccctaccccccaaaagagattgtgaccacacaataccactcttacctggagctaaactagttactgtcaggccttacagattacctcatcacaaaaagaatgcccttgaagacatagttcagcaactcttaacctcttacacaattcagccaagcatgagtccctactcttccccagctatcttagtgaagaaaaaagatggcacttggcgtttatgtgttgattatcgccaactcaatgccaatacagtcaaaaacaagtatcctattcctgttattgaagatttgttggatgaattatagggagctcaagtcttttccaaaattgatcttcggtctgggtatcaccaaattcgcatgcatgaacccgacatacataaaacagctttcagcactcatgtgggtcattttgaatacttagtgatacccttcgggttaaccaatgctcctgctacctttcaggcccttatgaaccagattttagcaccatatctgtgcaaatttgtgcttgttttctttgatgacatccttatttatagcaaatcagtcacatatcatgtccagcatttgagcctagtgctccaactattgcgacagcatcatttatttgccaaattaagcaagtgtgcctttgggcaatctcaagtggaatatttgggatacatcatcagttaatcaggagttgctactgatccagctaaaattcaagcagtccaatagtggcctattcctacttctatcactcaactgcgaggtttcttgggtttggcaggctgttaccgaagatttataaaaaaactttggtattatttgcaaacccatgtttgatgctttgaaaaagaacaatttccattggccaacagcacagcaacaagcctttgataccatcaagctgcaccttgctcaagcccctgttctggccatgccagatttctctcttccctttgtgttggaagctgatgcaagtggccatgggatcggagctgttttgatgcaaaatggacgaccccttgcttatctcagtaaagccataggaccaaaagctactgctttatccacttatgacaaagaggctttggctatattggaggctcttaagaaatggaaacactactttttgggtacttctctcattatcaaaactgaccaagcaagcttgaaatatattaatgaacaaaggataacagaaggtgttcagcacaaattgttaatcaaactgttgagctatgattataagattgaatataagaaaggcaaggaaaacaaagttgctgatgcactatccagaattcagcagagtaatgctcttactactatagttattgtgcctcaatggatcaccgaggtgattgctagttacagtcatgatcctaaatgccaagaattggagagccacctacacatagcacctcaacctcaatccccatatactctgaaggctggcattctcaggtacaaagatcgccttctggggaaagggcaacatatcaacgactgaaacaactcttctattggcctggaatgaaagccgcagtagctcagtttgtcaaagcttgcccagtttgtccaaagaacaagactgaacaccaaatgccagcaggcctactccaacctcttcctctcccagatttggcttggtctcacattactatggatttcgtggagggtttacctaaatctgaaggcaaggatgttatttgggtcattgttgatagattcagcaagtatgctcattttattgctctcagccaccctttttctgctgaccaaatactcactcaattcttggagaatttttacaaactccatggcttgcccactgtcattgtcagtgatagagatcgcatcttcaccagcaacatgtggaaggaagtctttgaaaaggctggggttaaacttcattttagcactgcccatcacccacaaaccgttggttaatcagagagggttaatcaatgcctcgagaactatcttcgttgcatgacttttaccaaactaaagaaatggaaggctcttttggcccatgctgaatggtggtataacaccaccttccacacgtccttgggcatgtctccctaccaggctctctatggcaccaaaccacctatgttagctgaagctttgttaccgggttctttgctggagggtgccagaaacacacaagaagcaaaacatgctatcctggaaacagtcaagtccaatctagctaaggctcaggctcgcatgaaatattttgctgatcaacatcgccaagaacgcacattggaggttgtgatatggtttaccttaaaatgcaaccttatcggcataattctttgggtcttcattcttctcttaaactccattctaagtattatggaccatttcgagttctggatcgtgttggt

SEQ ID NO: 62013 - DNA, 240 bp, Oryza sativa
  Clone ID: PAT_MRT4530_6338C.1
atgccctcccttgtcttcgtgctcccgtctccccttctctctcccacatctctagcggtggcggaacctcatcgtatcctcctcgccgttgttgccgacgtcaatacgccctccgccgcacaggttcagctggcggagatgagaggagagaagaagaagaagaagaagaagaagaagaagaagaagaagaagaagaagaggacagagagagaggaggggttgagaaggggtgaaaaataa

SEQ ID NO: 62014 - DNA, 276 bp, Oryza sativa
  Clone ID: PAT_MRT4530_63390C.1
atggcgacgacggcagtccgaggcacaggcggaggcggggacgggggaggggccagcagcgctgctgcgtgggtcggcaggggagggggcggcgcacagcagacgcagctagggctgtgggcgatggccccgtcttcaatgccaatatatttggaaccgacccctctacatctcggctacgaggaggacgagggtgtccgcgccggcatcgttagcgccaagacgtttggacctcgatgcaagggtcactgcactgagaaaagtatctattactag

SEQ ID NO: 62015 - DNA, 402 bp, Oryza sativa
  Clone ID: PAT_MRT4530_63391C.1
atgtgtgcttccatcgacgtcaccagggacttcaccaagatcttgattgctcgtgaaggtgggaaccacgcgctggcgcgtcgcggcggcgccggcgcagctgcaggccgagtgggtggctgggatgctgctcacgctggcgccgtcgccacccggcagacggaacaaccaaccggctccggaggatacggttcagggacagggaggaggtcaaaaggggttgacaccgtcggaatgttggttgggctgacccctaccacttccccatcacttgggcacaccgagccaatgattttgctaggaaggtgtccgtgcgttacgtacaacggcattagattagattacaaactgaagatctcgaagcttctacctccagttgaacgagatttgagacatgtttag

SEQ ID NO: 62016 - DNA, 170 bp, Oryza sativa
  Clone ID: PAT_MRT4530_63392C.1
attataacaagctcacccggtactatattgtcgacaggaattgttgcaccctcgatgccctcaaggactccaggaccacttttggagctgctagttctgaaatcaccccaccaacagttggagctgctggttctgaaatcgccccatactcaagacataaaggcgcactt

SEQ ID NO: 62017 - DNA, 987 bp, Oryza sativa
  Clone ID: PAT_MRT4530_63393C.1
atggagcactgcaatggcatcgccgccgttgggcgctggttgtccaccaagcccaaggttatcttcgtgctcggcgccaccgccaccggcaagtccaagctcgccatccgcctcgccgcgcgcttcgacggcgaggtcatcaactccgacaagatccaggcgcacgacggcttcccggtcatcaccaacaaggtcaccgacgaggagcgtgccggcgtcgcgcaccacctcctcggcggcgtcagccccgacgccgacttcaccgcggaggacttccgccgcgaggcggccgccgccgtcgcccgcgtccacgcggccggccgcctccccgtcgtcgccggcgggtcgaacatctacgtcgaggcgctcgtggccggcggcggcggcgcgttcctcgcggcgtacgactgcctcttcctgtggaccgacgtcgcgccggacctgctgcggtggtacacggcggcgcgcgtggacgacatggtgcggcgcgggctggtgggcgaggcccgcgccgggttcgacgccggggcggactacacccgcggcgtgcgccgcgccatcgggctacccgagatgcacggatacctgctggcggagcgcgagggcggcgccggcgccgaggacgacgacgacctcctcgccggcatgctcgaggccgccgtgcgcgagatcaaggacaacacgttccgcctcaccgtgtcgcaggtggccaagatccggcgcctcagcgcgctgcccgggtgggacgtccggcgcgtggacgcgacggcggtggtggcgcgcatggcggagggcgcgccccacggcgagacgtggagggaggtggtgtgggagccgtgcgaggagatggtcagccgcttcctcgagacgcccgccgccgccgccgccgtcgttgccaacggcaaagtcgacgtgaacgtcggcgacgcggccgccggcgtgcctgaggctgccgccgccgccgtcgttgcggcgggtgtggtctaa

SEQ ID NO: 62018 - DNA, 390 bp, Oryza sativa
  Clone ID: PAT_MRT4530_63394C.1
atggctagcggcgagaaggagtggcgcaagattgcgagcaggcggacagacagaggaggagcacggatgggcgagcaggggtgcagttggaggagcacgacgatggccaagcaggcggaggagcgcgacggctgtcgcgcgggcgaaggagcaagctggcggcgagtaggtagaggacgcggatccgcctccaccgccatccccaccactaaatccgccgttgccaagccccccgcggtcgctgagcccctcgcggtcgccgtcatcaagcctcccgcggccgccgtcgccaagcccccgtggccgcagccgcggtcgccgtcgccgagcatgccgcggtcgccgtcgctgagcccgccggtgtctgccgctgctcctgagggcgagtag

SEQ ID NO: 62019 - DNA, 1338 bp, Oryza sativa
  Clone ID: PAT_MRT4530_63395C.1
atggaggtggtggtggagcagccgcagccgcagccgcagcgggaggaggaggaggaggggcaaccgggcgtcggcggcggcggcggcggcggcggcgtggagaggtgcgggcggcacccgtcccaggtcttcaccggcgtctgctccacctgcctcatggagcgcctctcctccgtccgcaaccctgccgaggaggaggaggaggagatcgtcgaggtcgggaccgccgacgccggcgagggatccagcgccgaccacggcaagctgcggaagacgctcatgctgctgttccagctggacgactcctgcagcggcagcgccgttggtgccgcgcatccggccgacgccaaggatccccaggtcgccgatttcgaggtggaccctggaggtgggaatcgaggggctaagtggaagggcggggcgtggctcaggtcgatcttgccgaggaaggggatgcggtggagtaggaggaaggagcccccgcggccgccgcggccgaggccggtggatccggacggcgctggcgacaatgcgcaggtggagaggaagcccagcttccggcgatcctgcgagtggatggtctgccgggagcccgtgagagggtcgggctccctggagccgccgcggcattcgtgggacgggtcgatggtggggagggccttggcttgctcgttcgcctgcttggaggagcctcagccgcctccggatggggagaggagggctcagcggagcaatgcagaggaagaggctggggagagtcgtgccggcgttgcagagagcaggaatggggatcatttggctgatgccggcggcgaggggcgccatctcagtggaagaaggaattgcagtgacaccgggccggagatgacaatgtcaggtgtcggaaggcggaggtcgaacaggtggagcagggtgtgggatcgtagcatcactagcccactcaaggagtttgtgaggaaaggggagcatgttcttgagcggtcgctctcggaatcgaggaaggataccagaaggggtagaaatggggagactggagacatggattgcgaaattcagcctggacgcaacggccatggttcagtcagagcaagccaaggttcattcagaagctcacaagctgtagctaatggggatgtccataatttccgcacagattggcttaggaataaggaatgcaagattggcagaagcaggagtgtgcattatacttctcctgggaacttggataacgggatgttgcggttttacctgacaccaatgagaagtgcaagaacagcgaacagggggaggaggaggaattcacgcttgttctcaagaggactttttggcttcatttga

SEQ ID NO: 62020 - DNA, 497 bp, Oryza sativa
  Clone ID: PAT_MRT4530_63396C.1
cataccctcgctatcttgtttaccctgtcttgcagcagcagcaagtgcagatcaccacaccacatctacacccgttgctctcgtgcttaggccgcaggctgccgcatgcgtttggtgtttcgtctgtcggggttcacgcgttcgggtcttcaagtcgagtctccccggggctggttgcaaacccacagcactgatctgttctgacggttgaaggcaactttcagaacccgctgctcttggatctccgccgtcgttccattcagagttatctcagctgatatgacaccaggcacgcaggacgcggggccacacggctctgaatgcgtgtcagcagccccaaccgccattaagctgacagctactcctcaggcaataccaacatgagtggcgggctgcacctggccaaaggaggagtgtgaaacaaggcgccaccaaggctgctgaatggcaagcatgctgctgcaagacccctgacggcggcgtggtgacctagtaat

SEQ ID NO: 62021 - DNA, 261 bp, Oryza sativa
  Clone ID: PAT_MRT4530_63397C.1
gcttgaaccacctaagccgaaacagggtagagtcttatcattcaccaatactccatatgggaatgacaccgaagaccataagaggattatcactctctgtggcgatactaaaaacatactacttgcactgggactgagtagaagtgtgactactaccgcggtatatcacacaccaacctaagaagaagatttgatcacaagaggatagatatatacacaattggtatgcatcacacatcctgttggtccaggaaacgaaac

SEQ ID NO: 62022 - DNA, 2226 bp, Oryza sativa
  Clone ID: PAT_MRT4530_63398C.1
atgtccacaaaggggctggccggtgtgggtggaggtcgaagagggtggcggcgtggaggcccagtagccaagaaggccccaaaattaagtcaccctagaccacctcctggtcccaacttcgccccgctgaaacaccgcggccgcgccgccaatcgccatcgcggggaggagctctcaggttgcagacttgcagaatctcctggttctctaatggcagctttggctgcgcccgcgctgcgccgtctccgctcgccgcggctctgccttgccgccacggtcaattgcatcagcaacaatgccgccccggccgcatccgctggggtcaaccatgtgcaggactcgaactggcgcgtcgcggagctggccgcggccgggcgagtctcggacgcccgcaggctgttcgacggaatgcccgaccgggacgtggtgtcgtggacggcgatggtcgccgcgtacgcgcgccggggcatgctccaggaggcgcgggtgctgttcgaccgccctgatgcgcgccggaacgtggtcacctggacggcgctgctctccggctacgcgcgcgcacgccgcgttgacgaggccgaggccctcttcgagggcatggcggagaggaacgtcgtctcttggaacacgatgctggaggcgtataccgcagttggccgcgtcgaggatgcgtctgcccttttcaatcgcatgccggtgagggatgctggctcttggaacattcttctgtgtggacttgtgcggtcagggagtttggagagggctcgtaagatgtttgagagaatgccagtgagggatgtcatgtcatggaccacaatgatttctggccttgcacggaatggaagcgttgacgacgcttgggttctgtttgatgccatgccagagaggaatgttgtttcttggaatgccatgatctctgggtatgcacgaaaccacaggattgaggaagcacttgatttgttcacgaagatgcctattagggatgttgcttcttggaacattatgatcactggctttatccagaacaaagacttgaagagtgcacggcaactttttgatgagatgcctaaaaggaatgtgatcacttggaccaccatgatgaatggttacttacaatgcatgcagagtgaaatggcactaaaattatttaactgtatgcttgttcaaggaatccaaccaaatcaagtgacatttctaggttctcttgatgcgtgcagcaaccttgctgcactctgtgaagggcagcaggttcatcagatgatatgcaaaacaccatctcagtttgatacttttgtggaatccactctaatgaacttatatgccaagtgtggtgaaattaggctggcaagaaatgtgtttgatttctcaatggagaaggacttaatctcatggaatgggataatcgcagcatatgcacatcatgggtttggcatagaagcaatgcatttgtacaaaaatatgcaagaaaatggttataagcctaatgatgctacctatgtgggattgctctcagcatgtagccacgccggtttagtggatgaagggcttaagatctttgaatccatggtaaaggataactccattgtagtgcgtgatgaacattacacttgcttggttgatctttgtagccgagctggacggcttgaggatgctaaaagattaattagctggttcaagattaaacctacatcaagtaccgtttggagtgcccttctaggtggatgcaattcacatggaaatgaaagtattggtgatttagcggctaaacatctcttggaagcagaacctgataatgctggaacttatactctcttgtgtaacatttatgcttcagctggtaaatggaaagaagcagcagaaattaggtcagagatgaatgttcgagggctaaagaaacagccagggtgtagttggatcgaggtggcaaataaggttcatgtatttgtttcccgtgataaatcccacagtgaatctgacttgatcaatgatctgctgcaggatattcatcgcattatgagaatggctggtactgttcccagggaccatatgcttattgatgtggagctagtggggatttaaaattaatcggacattcatcattttcggcacgagggtgcacggcaactttttgatgagatgcctaaaaggaatgtgatcacttggaccaccatgatgaatggttacttacaatgcatgcagagtgaaatggcactaaaattatttaac

SEQ ID NO: 62023 - DNA, 117 bp, Oryza sativa
  unsure (1)..(117): unsure at all n locations
  Clone ID: PAT_MRT4530_63399C.1
acttgaccattggggggggataaaaagagacaaaccatccnaaagatcggatcactcacgctctaggacactaagccctgcgcatgactcaatcttcgccagtcacgatcactgatt

SEQ ID NO: 62024 - DNA, 512 bp, Oryza sativa
  Clone ID: PAT_MRT4530_6339C.1
ggggggcagagcagcagaaagctttggataatattaaggcatatatgagttcccctccggttttaattcctccacagaagggagtgtctttcaagttgtatttatcagccgatgagaagtcaattagctcagttttgattcaggagttagaaggcaaggagagggctattttctatttaagccgtaggctcttggatgcagaaacaaggtattctccagtggaaaaattatgcttgtgtttgtatttctcttgcacaaagttgaggcattacttactatccaatgaatgcactgttgtatgcaaagccgatgtgatcaaatacatgctatcggctccggttttaaaagagagagttggaaagtggatatatgctttgacagaatttgatctcaggtaatccaaggcagtcaaggggcaagctatagccgattttattatggagcatcgtgataattcaatcggctcgattgaaattgtgccctggactttattctttgttgggtcagtttgc

SEQ ID NO: 62025 - DNA, 212 bp, Oryza sativa
  Clone ID: PAT_MRT4530_633C.1
gatcccttaaaacgggcagacgttcgtttttttttttggacaccaaaaattttttctttttccccacggaaaggtagtgaacaaacctctctcctcacttggttcttaattctaaggtccaagagggaagaacataaggccccccacagggcggccacggaatttttttaacaaacaaactcaatggatcggatttggatcccctagggatt

SEQ ID NO: 62026 - DNA, 393 bp, Oryza sativa
  Clone ID: PAT_MRT4530_63400C.1
ggaaaaccacgagccaaacccccccttgtatttgggaactggaaaaggccacccttccaaaaccccttatttttgggaaaaaaaggcatttttttttgggaaaggttccggacaaagggcaatttcgggtggggatcccccatgggaaccaaagggggaatcatcaacgaaaccccacccccaacgggggcccctattccaaagggatgggcaactattccaaaggggggggaaaggagcattttttgcggcccccccctttaataaatcccaaaataggggccaggaaaaaaaaccccccggggaaaacggcccaacccgtacggggcccaaaccttggtttgggaaaaaaaagcaaattatggccccagcctttggggaacgggagggaaa

SEQ ID NO: 62027 - DNA, 1996 bp, Oryza sativa
  Clone ID: PAT_MRT4530_63401C.1
tttttgaaataacatctcaaaactaccagcatttggagcttatccatctgcctctatggaaaaattcacataacatggatcaatcactttttggatgagacaaacaaacatccgaccaacattggagtatgacaatggaatataattccgagaaaagcaggcaacctaccttacgctcttgttttgagtacaagtccgatgaacaggaatagaaatggtttctcacagatgacaatcttagtaactatattagttgctttcagtatggccttgaacgcgaaccaccaccttgatgcctgttaggcccatggcctcctccatctctgaagttatccctgcgacctccaccatagccaccacgtccacctccatgaccatatgcaggagctctaggagctgatttctcagccatcgcaacactaattttatagcctctcatttcataattgttatagaatccaccagctgaatgagcagcagaaggatcttcataggcaaggcaggcatctcctttattctttccagagtcatcagtatagatctttatgttccagggccactggtctttgtagccacgtttctgcttgatccttccaacctggccgattcctccaaatagttcttgcagttcctcaacagtcacatcaggaggtaagttggagatgtaaattcttgcattatcacaagtctcatcacagtttgcatcacactgcttaacctttgcagctggctctggagcagcactgccagtgtatccgccgccaccgccgccgccaccaccaccaccaccaccaccatgatagggtggaggtgcaccagggcctccacccccaggcataggccgaccaccatacccaccatcatatgaaggaggtaggctaccttggccacctggagcaccaccgctatatggcgggttcggaggtggtgcaccataacttggtggatatgaacctggaccaccaccatagctactaggaggtggcactgcagaatctgaattgtatgcattattgcctccataggagcttggaggtgctgcatagtcaccaccaggcccaccataggaaggaggaccttgaggaggaacttgtccatagctaccagcgtcataaccactttcgtctcccctttggttgttcccttggtctcttcccccataaccacccctgccaccacggtggtcatcaaatccacgatcatcgccaccacctctattgtaacctcctcctcttcctccccctccagtgccaccaccacggccaccagagttgtaatctcctccacctctgttgtagccaccgccacctccagaactaaaatcgccaccaccacgattgtagcctccaccccctccaccagatttattataccctccacctccacctccacctccacctccagcaggagaaggtgctccacacttgttgcattcagtcctccttgcaaagttcacattgccacaactggaacaagaatgataaacaaatatattaggaatattggaagagaaccaatgaaattgcaaccgaatattaatactacgatgaaacaaaaatttagtaggacacttcacacatgccccatgcaaaatcctcgggtctgggcaaacccagtcaccgtcacgtcctccacccctcccgccgccacctcggccaccgccacccccacccccacctctcccgccgccgccaccgccgccgtagcctcctcctccaccgccacctctaccaccgccgccgtaccctccgccaccgccgccatatcctccgccaccaccaccatatccacctcccacaccaccaccaccatatcctccccctcctcctccgccacctcccctcccacggccgcctccgccgccacctacaaaaaaaaccacaagccagtcaggagcagatccagaagcaagcacgcacacaacccgcaggatcccgacgcgacctcggccgccgtagccgccgcggtagtcgtcggatccgtacgaccccgacat

SEQ ID NO: 62028 - DNA, 728 bp, Oryza sativa
  Clone ID: PAT_MRT4530_63402C.1
atgggtacaagagacggattttctaacaatggcctctataatcagcttggccagggcggtccaacccagctgatgttcactcttctgcatgttggatccgtcacattcccagtcttcgctgttacgtcgttgttagtatttcttacgatcacagacaaaatccgcaagcgcacggatataccgatgcactggcaacccgcagttcccagatgtcgctctactacgtacccggacagggaggacttaagtgatctcgagggctgtcaccacctctacacccacctcaaacatactgacaggtatgacggttgtgagaaggggaaatgtccgaactgccccgcaaccgtctttgggagagcatctggagcgtcgatgccaaaccctaggatcaacggcgatcagaggggttcgcccgaacctaggctgggccctcctggcctggccttcgatgttggcggtatagaatcgacatttaacagccgccaacagtcgttgatctaccatccgacttccaccgagaacaaggagccgactgcgaagtctattgggtttactcccacatcggtaattgaggatgggggagcactttttaaaaggtggagggagtcctcacccatcagactagttttttgggttgtgtaggcctgagacctaaagttgtggctctggttgagcctgtggtggagcaggcccaatatgaccgggtggcccatggttggtggactggg

SEQ ID NO: 62029 - DNA, 243 bp, Oryza sativa
  Clone ID: PAT_MRT4530_63403C.1
atgttagaaccagcccaggtgggacagcgggacaaggatgccgcccgggttggttgcggatcacggaacgaggtgagacagcaggacaaagatgctccccgggtttgttgtggatcacggaacgaggtgggacaacgggacaaagatgccccccgggttggttgtggatcacggaacgagatgggacagcaggacaagcatgccccccggtttggttgctgaaacctgagtagggacggctaa

SEQ ID NO: 62030 - DNA, 4152 bp, Oryza sativa
  Clone ID: PAT_MRT4530_63404C.1
gtatattaaattgtcagtttgtgtacctcggtgcttgttatccaaataaccactcaagcatatagaagaatatgtagaataccatattccaaattcaagagtctattgcaaatacctcatgatgcgtttgacagcttgacgatgtgaagcacgtggagaagcttgaaaacaagcacacaaacatacaacaaattgtatgtccggtcttgaagcagtgagatagagtaatgatccaatcatactcctatactccttttgatccacaacttcaccatcttcatccggatccaacacaggagtagatccaatgggtgtagacataggcttgcaatcctccatcttgaaacgccgtagaagatccttggtgtacttcgtttgatgcacaaatgtgccttgctttgtttgcttgatttgaagccccaaaaagtaagtcaattcgcccatcatgctcttctcaaattccatgcgcatagtctcagcaaactccacaaccaaagggtgagatgaacaaccaaagatgatatcatccacataaatctgaacaaaaagttgatcatcaccatgcttaagaacaaagagtgttttatccacttttcccattataaaacctttggcaagcaaaaagttttccaatctatcatgccatgcccttggagattgttttaaaccatacaaagctttagacaagcgaaaaacatgattgggaaattcagagttttcaaaaccgggtggttgttttacataaacttcctcctgtatataaccattaagaaaagcacttttcacatccattagatacaatttaaaaccttttgaagctgtaaaagtcaacaaaagtctaattgcctcaattctagcaacaggagcaaaagtttcatcataatccaacccctacatttgtgtaaaaccctgagcaacaagcctagccttgtttctcacaattaaaccatcctcattttaaaatccatttagttccaatgatattatgaccaacaggaggttcaactaaagaccaaactttatttctttcaaaattctcaagttcttcatgcatggcgttgatccatgattcatcagttagtgcatgagtaacatctttgggttcaaaattagcaacaaaagcagaattcacatgatgatcacgagttgttaccttggaccttgtagtatgttcaccaatattacctatcatttgttgtggaggatgtcgtcattgaatatgaagcggagtagtagcatatgatgaaatttcgtgttctgcaccctgtcctattgaagtagaagtctctggaggtcctctaccatcatcacccgacgcacccgaggaagatcccccaggccggtctgaccgatcctctgccagcggtctgaccggccgtggccccggtctgaacggccgccatttcgtcctcttcctcgtcattgctttcgtccacaaaaatatcctccccctgaacctatgatagtgtaccggaaacatcgggtctagtaccaggactagcctcatcaaaagtgacttcgcaagtctcaacaattttgttagtttccaaaacaagtacacgataaccacgagaatgtgtagaatatccaagcataagtccattagttgaatgtgactcaaatttgtctaaatttctagattttaagacaaagcatttacatccaaaaacacgcaaatgtgaaataccattatcacttcgaatagtcctcaaagatccagcaaattcaagagacaaacgaagatataaacttttaaagtgttcaaaaggctcatccttagtagccataaagaaaacccaagaatatcgagaaaaatcgtcaacaacaaccaacacataccactttcctccaacaaattgcactctagttggaccaacagtgtccatatgtaagagatgtcccggtgcatccgtcatcacagagataataggagcatgtgaagaagcaaccatcttagcataacgatatggtgaacaaaccaaatcaagatttttcttaagtttaggcaaaccacgaacaagatccgaaccactaattctagtgagatgatcaaaaccaacatgtcctagcctacgatgctaaaacatcacatctttcgagaattttgcaacaagacatgtaacctcagaagaaacactattctcaaaatcagccttaaaaactcttccataacgcgaaacattaagcacaacatctccagaagaattaaagaccttgcttctagttttcttgaacaacacatcaaaatcctcatccacgatttgagagacggagagcaaattatatttcaaattctcaaccaaagtgacatcattcaatgtaaacttgtcacttaccttgacagaaccagtagttgttatcgaactagtagaagcatcaccgaagatgatcgagtccctccttgacgccttcttgaggaaggagaatcactggtcatgtgctgcatacaaccggagtccacaatccacacgttctccatcctcaccactaaatcacgattgtttgtgttaaccttagattgatcaagaatcatgttgaggttcttttttcctttagaaaatctttgcaaagaacttttcaagtaaaaaacctcttgagaaagagtagcacaatttttgcaagcatccaaaacactcttttattttctacacgttgagcaagacatcacttcatcttgtttaacaatttcctccatgtgcttaacacgacccaaagcatattttagtttcatctcattagcaacacatgttgtcgaaaaaagtttggtactagattgcttaatcctcttagagctaatcaagttaaatatcgagctagcaaacaaagcaacttgacatttattcaaagctctcttagttaaaaacaattcatcaaccaatctagtgttcatggcaaagctaagagcaacacaagattcaaatttcttagttttcctagattcaacatcaagctttttgatacaaacatctctattagacttaatttcagcacataaaacctcacaagattgacattcatcattatcaggaacaagagattttatactactattttcagccttaagagattcaatggtagcttcatatggactaatcttttctcaaacttagaaattttaaaaccaagtctagcaataatatcttgataatattcaacactagaaggaggaattacctcattgtcatctcctgaatcctcatcaatgcttctagccatgagacaaactccaacgatgttcttccccttgtcatcatctccatcactatcaaaatcaacatcacttgattcttgaattgccgcatatgcttcatctatcgccttttgatagaacttcttcatcttcatgttcttgaattgcttcttgctttgtttgtcgtccttggtgttcttggcattcttgacttcatcttgatctaccgcctttgttcctcttctgagcttgggacattgagaacgaatatggccaagttgtccacattcaaagcaacgttgtggtcctcctcttctcctggatctagtattactcaaagctttagaagctctattagcaatcaaaaccaagtcctcctcactaactccctctagttgatcctcggacaaggcattaaaagcggaaaaaatagacatgggagtggaatcaatagaagaactagatgaagacaccaaagcagtagatttagaatcagttcttttagaaagaatattcatctcatatgttttcaatttggtgtagagaatatccaaagtcagggtgttcatgccaacagattcctgaatagaagtcactttaacatcccagattttcatgtcaagaccattcataaagtaacaagcaaccttagattgagaatagttgacattgtaagaagcatcaacagatccaagatcactcaagattttattgaaacgccccaaataatcatccaatgattcaccagaattcatctcaaacttgatgtattcctttttgaaaacatctttttgcaactccttaatgtttgaagatccagtgtgaaaatcgttgaaagctttccaaatctcattagcagttgcaagatgtgaaacacgatcaaaatcggagcgagaaatggcattaagaataatgttgcgtgctttgcaattattttcaaaatcagctttttgagcaatagt

SEQ ID NO: 62031 - DNA, 147 bp, Oryza sativa
  Clone ID: PAT_MRT4530_63405C.1
gacacgccacgcagcggtgcattaagcacgaagggcgtggggggtacgcgcaacgtgaccggtgcacttgccagtggcctagcgcccagtgctcgcgctttctgccctttctttttcgctacgtgcgacggctttcccctttaagct

SEQ ID NO: 62032 - DNA, 501 bp, Oryza sativa
  Clone ID: PAT_MRT4530_63406C.1
atgggtgatgagatgtcaagtggacgttgtgaagcaaaatcaagagaagaacagatggcacgacaatttgtcagatcaattatgcatcgtcctaataaaaatattcagaatcaaattggtcacccaaagaggaaacgaaagggatatcagtacttacagtcacggatagaagtttgcgtcgacgagctgcaacgaccaccccgatttcgccaacggcgacttcgcgaggcttcagaacggccatcagatctcatcaggcaaaggctaggtggcaaaatgggccgggccttcccgtgccggcccagtcaagcccgtttggacatgggccatgctgacacgacccaaggaacgaatgaatcgaggaagccactagctcagggcggaggaagcggtggtggtggtggccgcggcgctcgccgacttaggcctacaaggcagcacggtggtgcggccagccccatccacgggcatagtagtcgagcacgtcagagactctccgtc

SEQ ID NO: 62033 - DNA, 445 bp, Oryza sativa
  Clone ID: PAT_MRT4530_63407C.1
ctgtagaaaaaaaggaaagtgggatcagcccgcggaggatgtcgtcgccgcggcggcggctgctgctgctgtggcggggttgcccgtggtgaacatcggtgccctctccggcgtgtcgatcccgggagccgccggtccgttggggaatatagtcgctgtgccctatactttgccggtgcatctggcgccttcggtgctccagaccgccgcggcagcggtccagaaattgagtcaggcaaaaatgcctgatgagctaatagcaagagaaattgttataaatgacgccgatccgtctgtgcgatataagcttacgaaacggcaaactcaggaggagattcagagatgtacaagcactgtcatcattactaggggaagataccatccaccaaatggacaaactgatggtgagaagccactctacttgcatatatctgctgggtctcag

SEQ ID NO: 62034 - DNA, 389 bp, Oryza sativa
  Clone ID: PAT_MRT4530_63408C.1
agattgagtataaatgaattagagctagtattggggcaaaaaaaacacacttgctataagtaaacagtgtatatatcaacagtttatgtgataaatttaccttttgaaattataaattataaagtagtgcttaatttactccaaaattatcattaacaccgctatttactacaatgatcatcagagagtcaaatattatcggttttggcatctagtttcttctcagcttcacttatgccctccagttcccgcaacaaagcagtgtgctttctcatatccccttcctggacactttgaggtgccttctcgcgataaccagaagcatccatcatgtgtgtcacagcatggtgtagctttgggattccatctctcttcttccttagcttttc

SEQ ID NO: 62035 - DNA, 453 bp, Oryza sativa
  Clone ID: PAT_MRT4530_63409C.1
atgacgacgacgaacagcactggtacgcacgccactcctgacatcaatcagaagtcgaccaactacgaaccgcagcttcgccgccaccgacagcggcggccgctgtcaccaccgtgggggagaacgacaaagatgcgttcaagcgacgacgacgacgaacagcactggtacgccactcctgacatcaatcagaagtcgaccaactatgcaccgcatcttcgccgccaccgacggcggtggccaccgccgtcaccgccgcgggggagaacgacgaagatgcgttcgagcgacgacgatgacgggcaacactggtacgccactcctgacatcaatcagaacacccgctcatgctattttctgcatccgcccttggacgaggcggtgccgccgtcgccgccgctggggagaacgacgaagatgcgttcaagcaacgacgacaacgagcagcactag

SEQ ID NO: 62036 - DNA, 311 bp, Oryza sativa
  Clone ID: PAT_MRT4530_6340C.1
attcattaaaaaaaaaatcacaacctttagattgctggaatacttcaggtgcggtgagaaatttatattactcattactaccatccaaaatgtaccattcacctaactctctccactatttattcacatacaatcatgctggaaacaattaccaaattatacacagtacctctcaattttaatacatttatctctatatctttaaaccactcatattaataacatcttatacatgcatactccacaaaacaaaaccaccatagcagaatccgaccctcttaaattgcccaatcatacgtatcatcaatctg

SEQ ID NO: 62037 - DNA, 918 bp, Oryza sativa
  Clone ID: PAT_MRT4530_63410C.1
atggaaataccgacacctgagctatcatcacaatttctgaaggaaatcactaatgagttctctgatgagcgaaaagttggtgaaggtgcatttggaatagtgtataagggaatgcttaaagatgggacagaaattgctgcgaagaagcttcgggaaacatcaccgattcatgacaatcaatttaaaaatgaggttgggagtcttatgaaggtcaaccacagaaatatagtcaagttaattggctactgttatgaaatacaaaagaaggtggtggagcataatggaaaatatattcttacagaggcagtagaaaaactgctgtgctatgaatatatatctaatggaagccttgacaaacaccttttcggtgaatcaagtcgacttgattggcacacacgcttcaatataattaagggggtttgtgagggtttgcatttcctacacaaaggatcagaaagacctattattcatttggatattaaacctagcaacatactattggatgacaacatggtgccaaaaattgcagattttggtctatcaaggctcttgggtgaagaacaaaccagagtttgcacacaaaatgtcatgggagcaataggatacatggcaccggaatatttatatcgaggtgaaatctccactcaatcagatatatacagtttaggtcttctaattatcgagatcacaacaggggagaaaaacttccccaatagagaggacatcattgctaagaacttcattgagaatgtacgccgaaatcggaccaatattgtgcatatatcactgaagtacccatcgttagacacaaattgcctccagcaggtaaagacatgcattgaaattggactgagctgtgttcagaccaaccggaaggacaggccttctataggggaaattgtcaatatgctcagttga

SEQ ID NO: 62038 - DNA, 374 bp, Oryza sativa
  unsure (1)..(374): unsure at all n locations
  Clone ID: PAT_MRT4530_63411C.1
ttgcanggattccgcncgatgttcnatccncggaaaaaantaantgntctagtcacaantaaactccnntgntcnaatncttcctcangtngttntngccncnccgtaatacgcccctgaatganctanganaacccgatgtttttttggggtgctgtacttggtggtcacttcacttggtttggggattgtgacatggacatntttgtaacgggtnaaggngggggtgggctttctcccttgnantcacttttantttctcctccanatccnggacggtnnaattnggggatcanaaggggtggncaccccccgtttntccnggctttggttcancacgggttcttaacctttacccctgggtccagtggtcc

SEQ ID NO: 62039 - DNA, 348 bp, Oryza sativa
  Clone ID: PAT_MRT4530_63412C.1
atggcgacggcgcggcgtcggccattgggcggtgacctcggccatggcggcttggcgaggaagacaacggcgctggtaacggtagacggcatggcggcagtggctgcggcggcggcggagtgcggcggcgtcgtcgggagcagcggcggcatggcgaggatgatgacggcgctggtagtcgcgacggcatggcggcagttgttccccaacgtgctgagcattcctagcctcctccacaggtcgccggttcaagatttcaaggctaggaagattccggagagcgctgaagcagaaccagagcctgagtgtggctaccctcagcaggaaggcgagcacctaagcatctag

SEQ ID NO: 62040 - DNA, 2604 bp, Oryza sativa
  Clone ID: PAT_MRT4530_63413C.1
atgcagtggagctccaatggtgagtttgcctttcattgtcttgttggagattgcacgttggaattactggcaaaagtcatgcttcttgcattcaagagttgtatcctgttctgcgagtatgatctagcagcatggaaagtgaataattctgtgatacaatgggaggaggagatcaacgcggatgtgaacgcggtcgtcagggccgaagaaatcggcatggccgtggtcgatagggaggagatcggtgcagtgcagatgcgcgtggtcgccagcaacggagcggcacttggagacggggcagatgcactgctggactcttccgcgggacctggggcttccgccgggcctgccgggctctcggcaggtgcttcggaggccaacaacaccctggaggtggtggtgactgtggaggcttccgcaaatggcgccactgcaatcgcggcgaggaggatcacagcgataacgagcgcgcgagccatggccgatggagctgcttgtgctcacgcatcagcacttggagactcggcagatgtgctgctggactcttccgttgggcctggggccggcgcaggcccagccgggctctcagcgggcgcttcggaggccaacaataccctggaggcggcactcactgtcgaggcttctgcgaacggcgccaccgcgatggcggcgaggaggatcacgacgagaacgagcgcgcgagccatggccgatgcagctgttggtgctcacttacgtgcctttgatttggagctctggcctctcggccaatggattcgatgtgtggcccgtgttaccttggatctggcatcagcggcgctcggagatggagcagattcactgctggactcttccgctgggcctggggccgccgcaggcccagccgggctctcagcgggcgcgtcggaggccaacaataccctggagccaccggtgactgtcgaggcttccgcgaacggtgccactgcgatagcggcgaggaggatcacgacgagaacgagcgcgcgagccatggccgatgtagctgttggtgctcacctacgtgccttcgatttggtggttgatgcgatgggtttgcttcgcttggtgggtgacttgatgatgggagggaaggctcacgcggggcagcgcccgagaccggcattggcgccgtcgaccccgagctccaccggtgagcgccgccgccggacgcggaccaaccccgccgtcgggcgccaccaaccccgccagccggggccgccgcggcactcgacgccccaccacccccaccgccccagtgcgcctggtaaccccgccgccgagcgccggcaccccactgccgagcaccggctccgaccaccgcagcctggcgccaccgcccaggccgagcgcctcccactaatcaagagcagcagcgacgtcggcgttgcgcacctctcccgcagctccgccaccaccttctccgcctccacctccgccgccatgatcccggtccccgacgagaatttggtgcccgtcggcggggccccctccgccgccgccgcctcgctcctccacgccgacgtccccatggaggcgcgcgtctgggcgcccctccccgacgacctcctcctcgaggtgctcgcccgcgtcccgcccttcctgctcttccgcctccgccccgtctcccgccgctgggactccatcctccacgacccggccttcctcgccgcgcacgccggggtcccctcccacgggccctgcctcctcaccttctggaggggcgccgcgagctcgccgccgcagtgcagcgtgctcagcctgcccctccgcgcccgctacaagctcccgttcggcttcctccccgcctgggacctctggctagtcggctcctcggggggtctcgtctgcttctccggctttgacggcgccggattccgcaccgtggtttgcaatccgctcacgcagacctggcgggtgctcccggacatgcattacaaccagcagcggcagctggtgctcgcggtggataagaagcgcaggtcgttcaaggtaatcgccgcgagcgatgtctatggggacaagacgctccccaccgaggtctatgactccaaggagaataagtggtcagtgcatcagatgatgcctgcggcgaatctgtgctcgtcgaagatggcgttctgtgactccaggttgtacttggagacgctctcgccactggggctgatgatgtatagagtggatgcgggcaattgggagcatataccagccaaattcccacggtcgctgctggatggatatctagttgcaggagctcgcacacggttgttcttggtaggaaggattgggctatacagcacactgcagagtatgaggatctgggagcttgatcatggtaggacagtctgggtagagataagccggatgccgcccaagtacttcagggctttgctgaggttgtctgctgaaaggttcgagtgctttgggcaggacaacttgatatgtttcacatcgtggaaccagggaaaaggtcttctatacgatgtggataagaaggcttggtcatggattgctggttgtgcaagccagctttgcaatagccagatctgtttttatgagccaagatttgacacgttgatctattga

SEQ ID NO: 62041 - DNA, 947 bp, Oryza sativa
  Clone ID: PAT_MRT4530_63414C.1
ttaagtctcgtattgctccgaccgtctcgccgcatccatccgccgtccgttcctgcacagctcgattccggtggtggcgcccatttcgatcagccggcgttcatcctgccgccgccgttttatctccccgtcggtgacctcgattatcctgccatcctccacccctccgttgctggcgaccacgcgcatctgcactgcaccgatctcctccctatcgaccacggccatgccgatttcttcggccctgacgaccgcgttcacatccgcgttgatctcctcctcccacattggagctccactgcatggcttaactgttccatgctggacaggacgttacctgttctcgaaccagtagcagccgaagagatgggatgaacaatcaacggcaacatcaagatgagggcgacgttgcatcatcagcctctcctccgccggactgccatacaagcagcacatcgtggatccgccgcccttgccgaggcgccgagcacgtacgccgcagccgccacaggtcgctggaggtagagaaggtggatggggcagagggccgcgagggcgctggaggcgatgaacgcggcgagggagatggacgggcgacggaggcgacgatagaggtgaacgggaggcccagaatggcgtcgaaggaggcggcgagggcgggggaggcggacggcgacggagggggccggagaaggcgacgcgggcggaggagacggatggtgaaagaggaggcggacaaggcggcgacggcgagggatacggacggcgatgaagggggcggagaaggcggtgaggccgggggaggcgacggtgctggaggggaaggagatgccgatggcgctggaggcgacggaggcggagagggagaaggaccggcgacggaggcggcgaaggagatggacgccgacggaggcggggatggaggagaatggcatcgattaggatag

SEQ ID NO: 62042 - DNA, 585 bp, Oryza sativa
  Clone ID: PAT_MRT4530_63415C.1
atggagggatatatttgtccagaggcctcgccgtcttctccgccccctccatcgccgtccgtatcccccaccgtcgctgccttgtccgcctcctccgtcgccgtccgtctcctccgcccgcgtcgccttctccggccccctccgtcgctgtccgcctccccgccctcgccgcctccgtcgccgtctgtctcccccacccttgccgcctttcccgccccctccgtcgccgtccgtcggccccgccctctccacctccggcgccgtctgcgtctcctcccccttcggcgcccttgcctcccccgccatcttcctaccctgccctcgccgcctccttcgatgccattctcggcctctcgttcacctccatcgtcgcctccatcgcccgtccatctccctctccgcgtcatcgcctccagcgccctcgcggccctttgccccatccgcctcctctacctccagcgacctgtggcggctgcggcgtacgtgctcggcgcctcggcaaggacggcggatccccacgatgtgctgcttgtatggcagtccggcggaggagaggctgatgatgcaacgtcgccctcatcttga

SEQ ID NO: 62043 - DNA, 735 bp, Oryza sativa
  Clone ID: PAT_MRT4530_63416C.1
atgcattacaaccagcagcggcagctggtgctcgcggtggataagaagcgcaggtcgttcaaggtaatcgccgcgagcgatgtctatggggacaagacgctccccaccgaggtctatgactccaaggagaataagtggtcagtgcatcagatgatgcctgcggcgaatctgtgctcgtcgaagatggcgttctgtgactccaggttgtacttggagacgctctcgccactggggctgatgatgtatagagtggatgcgggcaattgggagcatataccagccaaattcccacggtcgctgctggatggatatctagttgcaggagctcgcacacggttgttcttggtaggaaggattgggctatacagcacactgcagagtatgaggatctgggagcttgatcatggtaggacagtctgggtagagataagccggatgccgcccaagtacttcagggctttgctgaggttgtctgctgaaagagatgtcctgcgaaggctcaagctcaaatgcttctcagttcagtatctggattcagtacatttttctattggagcaaggctaccagccatatcaagtgctgggatcgatagtgttttcttcctcgagacttttatgttcacttcatttttcttttgggcgaggaaacttgtcaacttgattaagtttgacaatatagttatacgagatattgagatatgcatgacaacttcttctgtgttgattggtcaatga

SEQ ID NO: 62044 - DNA, 2561 bp, Oryza sativa
  Clone ID: PAT_MRT4530_63417C.1
ccacgcgtccgcaccaagcgaagcaaacccatcgcatcaaccaccaaatcgaaggcacgtaggtgagcaccaacagctacatcggccatggctcgcgcgctcgttctcgtcgtgatcctcctcgccgctatcgcagtggcaccgttcgcggaagcctcgacagtcaccggtggctccagggtattgttggcctccgacgcgcccgctgagagcccggctgggcctgcggcggccccaggcccagcggaagagtccagcagtgaatctgctccatctccgagcgccgctgatgcctgatcgagtaataatgaagtccaagtgaataattcttcatcccaagaacattgatcaagcatatatgtcctacccttccttcataaaggctaacagagcctcatttttatttttatttttattttttattgctttcttctgttgattgatcgtgttaatcatgcaatatgatgagttaatataagttcgatgaagatatttgtttaaaaaaaaaaacaaaaaaatgaaaaacatcatttataaagactaacatagcctcattttttttatttttttttgtttatcactacctctacctatgttgttgattgatcatgttaatcatgcaacattatgatttaatataagttggatgaagatcttcgtttcccgttaaaacgccgccggacgcgacccaccccgccgacgggcaccaaattctcgtcggggaccgggatcatggtgggaggtggaggcggagaaggtggtggcggagctgcgggagaggtgcgcaacgccgacgtcgctgctgctctctgcatcgacaagctccccactgggtcagtcaggatactgattagtgggaggcgctcggcctgggcggtggcgccaggctgcggtggtcggagccggtgctcggcagtggggtgccggcgctcggcggcggggttaccggcgcacggggcggtgggggtggtggggcgtcgagtgccgcggcggcgcccggcggcggggttggtggcgcccgacggcggggttggtcgcgtccggcggcggcgctcaccggtggagctcggggtcgacggcgccaatgccggtctcgggcgctgccccgcgtgagccttccctcccatcatcaagtcacccaccaagcgaagcaaacccatcgcatcaaccaccaaatcgaaggcacgtaggtgagcaccaacagctacatcggccatggctcgcgcgctcgttctcgtcgtgatcctcctcgccgctatcgcagtggcaccgttcgcggaagcctcgacagtcaccggtggctccagggtattgttggcctccgacgcgcccgctgagagcccggctgggcctgcggcggccccaggcccagcggaagagtccagcagtgaatctgctccatctccgagcgccgctgatgccagatccaaggtaacacgggccacacatcgaatccattggccgagaggccagagctccaaatcaaaggcacgtaagtgagcaccaacagctgcatcggccatggctcgcgcgctcgttctcgtcgtgatcctcctcgccgccatcgcggtggcgccgttcgcagaagcctcgacagtgagtgccgcctccagggtattgttggcctccgaagcgcccgctgagagcccggctgggcctgcgccggccccaggcccaacggaagagtccagcagcacatctgccgagtctccaagtgctgatgcctgccgagagcccggcaggcccggcggaagccccaggtcccgcggaagagtccagcagtgcatctgccccgtctccaagtgccgctgatgcctgaacgagtaagaatgaagcccaagtgaatgattcttaatccctccgttgctggcgaccacgcgcatctgcactgcaccgatctcctccctatcgaccacggccatgccgatttcttcggccctgacgaccgcgttcacatccgcgttgatctcctcctcccattgtatcacagaattattcactttccatgctgctagatcatactcgcagaacaggatacaactcttgaatgcaagaagcatgacttttgccagtaattccaacgtgcaatctccaacaagacaatgaaaggcaaactcaccattggagctccactgcatggaagcagcacatcgtggatccgccgcccttgccgaggcgccgagcacgtacgccgcagccgccacaggtcgctggaggtagagaaggtggatggggcagagggccgcgagggcgctggaggcgatgaacgcggcgagggagatggacgggcgacggaggcgacgatagaggtgaacgggaggcccagaatggcgtcgaaggaggcggcgagggcgggggaggcggacggcgacggagggggccggagaaggcgacgcgggcggaggagacggatggtgaaagaggaggcggacaaggcggcgacggcgagggatacggacggcgatgaagggggcggagaaggcggtgaggccgggggaggcgacggtgctggaggggaaggagatgccgatggcgctttggacaaatatatccctccacat

SEQ ID NO: 62045 - DNA, 206 bp, Oryza sativa
  Clone ID: PAT_MRT4530_63418C.1
ggggtgttgtagaattcgagctcggtacccttaacccgtccaacaccgtggtgtttgcgacggccaaggcctgcagaaggggctctgcgctcagtggggcaacggaaggcgtggggaagagccgcctcggtgaaaatgccgggcggctcggcccgccgatggacgtgccggactcggggatgtcccccggacctggttggtcctga

SEQ ID NO: 62046 - DNA, 504 bp, Oryza sativa
  unsure (1)..(504): unsure at all n locations
  Clone ID: PAT_MRT4530_63419C.1
ccaaaatangggnaaggtnnggnannaaaaaccnaggcattaccttcccaaaaaagttcnaaaaagtttggggtgcacaacgtncacagagctggnagctgcttaatgatgcacaaacaggatgtactgtgctgaaattgctcataatgtgtccacgaagaaaacgcaagggagatagtggagcgcgctgctcagcttgacattgtcgtcaccaacaagcttgccaagctacgcagccaggaggatgagtagttattttggacttggtttttgcctgcagtagacttgcacatcatgaatattgttctacgtatttgtttacatcaggatccgaatattctgagagcaatttgctatctggaattatttgtgactctggcaatgtatgattgccatattactattttgagtatagcaattatgacgtgaaagaaatgtcgttgtttaatgaatgttgaaaaatatatttccatgaatgccctgtcaaaaaaaaaaaaaaaaaaa

SEQ ID NO: 62047 - DNA, 1058 bp, Oryza sativa
  Clone ID: PAT_MRT4530_6341C.1
atatatctatggaggacagaaggaaccaactcggactttttcctgtatgatttctcccagttaaaagaagcaacaaataacttctcaaatgataacaaactgggacaaggtggctttggtactgtatataagggcttgttgccgggtggtcttgaagtagcagtcaaaagactttcagcatgttctgtacaaggtttattggagttcaaaaatgaaattcagctgatagcaaagcttcaacacaaaaatcttgtcaagttactcggctgttgtattgagggagagcatgaaaagatgctcgtctacgaatacttgcaaaacagaagcttggacgtcttcatatttgactttgtgaaaggagcacaattaacctggtcaaagcgtctacgcataattgatgggatagctcaagggattctatatcttcacaatcattcacgagtatgtgttgttcatagggatttaaaagcaagcaatattctcttggacagtgacatgactccaaaaatttcggattttgggatggccagaatatttggttcaaatatgattgaatcaaacaccaccagaatagtaggcacacatggttacatatctcccgaatatgctttcgatggggtttgctcgatcaagtcagacgtcttcagtttcggcgtcttggtcttggaaatcataagtggaaagaggactgctggtttctatccctatgatggcaaactttgcaatctcatttcatacgcttggcaactctggagatctggacaggggcatgagctggtctgttgccgtataggaaacaaccataaagtgatacaaaggtgcattcaggtggcactattatgtgttcaagagagggcagatgataggccttctatcgatcaggtggtcacgatgctaaacagcgaggaaatgacattgcccaaaccaaaccaaccagcttacttctatgtccgatccagtggctcagatgattcatcatgcaataacagtataagtatcacattggcaaggtagagtagtggattcccatcatagccattcaatagaatgatccaaaa

SEQ ID NO: 62048 - DNA, 1101 bp, Oryza sativa
  Clone ID: PAT_MRT4530_63420C.1
ccgccctcggacgcggggacggcggtaccggacgtgtttcacctccggtaccacccatggcggacggcaaggtagcttgcaagcacctcgtcctggtccacggcgcgtgcatcggcggctggacctatttcaaggtggcgacgcggctccggtcggccgggtaccgcgtcaccgcgccggacctcggcgcgtcgggcgtcgacccgcggccgctgcgcgaggtgccgacgttccgcgactacaccgcgccgctgctgggcctcctcggctccctccctccaggggagaaggtggtcctcgtcggccacagcctcggcggcatcaacgtcgcgctggccgccgagctgttcccggacaagatcgccgccgccgtgttcctctgcgccttcatgccggaccacacgtcccggccgtcgcacgtgctcgaaaagttcatcgaggggaagtggctggactggatggacacggagtttaagccgcaggatgcagagggcaagctccccacttccatgttgttcgggccgcagatcgcccaagaaaggctgatgcagctgtgctcgccagaggacgtcactctcgcgggatctctgctgagggtgagctcgatgttcgtggaggacctgcaaaagcagcagccgttcaccgaggggcgctacggctcggtgcggaaggtgtacgtggtcgtaaaccaggacctcgccataccggaggggttccagcggtggatgatcgggaacagcccggtggatgaggtgaaggagatcgatgcggcggaccacctcgtgatgctctcgaggcccgacgagctggcgcggtgcctcgccgacatcgccgaaagctacgcttgagctcgatgtcaacctgctgttaatgaagtcaatctgctgttagtgttactgccgttttagctgtcgcgttttgctgctgtagtctcttttgcgtgcctgcgctgcggtgttcgtcgcaacatactgttgggagcttggaataattcggtcttcttttcccaccaaatttgtttcgggacttctcttatattcagagaattgcaataatggtaaatggtatattatttattgggtgtaaaaaaaaaaaaaaaaa

SEQ ID NO: 62049 - DNA, 165 bp, Oryza sativa
  Clone ID: PAT_MRT4530_63421C.1
atgaggcgaggtctccacagtggttggctgagctctgccgagctactcatcaacaccgactccagatctagcgcctacaagcccgtagacgccacatctggctcttgtgaacttgaggtgttgattctactgcttgaggtgagggaattcgaggttgactgctag

SEQ ID NO: 62050 - DNA, 288 bp, Oryza sativa
  Clone ID: PAT_MRT4530_63422C.1
atgaagttaagcatgaaacgacccccgcataatttaagatgtgtgtgagacttctctttcccgggagcgccagaactcctctcactgctagaaatatggacgcctagagtgcatgaggatttaagttcatggagcaggtactgccaatgcgaggttatcgaaaaggtttgccgtgacgtgtctcatgtgttgggacgaggctcatgtgttaagcagtcgcggagtgcgggtaaagtgtatccactgcagtgtgagtatactagaaaaatgtctctacaaagcattttt

SEQ ID NO: 62051 - DNA, 1287 bp, Oryza sativa
  Clone ID: PAT_MRT4530_63423C.1
atgatgaatagtaccatccttgatgtatttaagtcaagaaatattaatggagaattttctggaactgtcatacatttttattcattcagttatgagggtaaagatgatacatggtataagggtgaaatttttcctgtcatgagcttgaagacaccattagagaaggggaaaggaattagagtttctatatggacattcccagctgagaaagaaaaagaattgaaggaaatgattctggatctattgccgttggaaagtaccgcactgctgaagccaagttttgccgcgtacaattctcatattgaccgtgcaatactttgttgcacaccatgcacctcaaatatgacttcttggatcgccaagcaggttcaaataccttccgattcttatctccaggaggattcaaaaaacatgatacgctccatattaaatctgtcaaaggtgatgtgggacttgggctatgcttgtgatggccaaagatggagtgatgttgaagtggatgaatttatcaagctcatgagaaatccttcagcaagtttggaacatttgctaaatcatccactcttgctgccccctgagattcgtatgtcctcataccttaacttgtggattgagaatttgacaccagaccaacataatctgtacaactcaatcacaagttataaggaaaaagtacccaataataaaactttcatgtatggggatacaactcgagaagctcatcgtttttcacgtaacacagcatcgcactacataagtcattggagacgacttatcccgagcagtaataggacaaaagctccattcgacatggtcgacaaagaactcaagaagtgctttccagggttgccgtgtgtgaggagttttctaacatttgcaagtccaatttttacagtgggaagtgaagtttctcccccaacgatattcttgtggctgtcgattagccctgcgatattttgtactcaatccagaatgaaaatgtgtaacattcactgcatccctggtaggagtattagtaacatgagtttgaccagtggtcctattcactgtcctaacataggaattatgttcagatttcgtaagtctgatttgcctcctcatgggttgggtggcttacgggccttacgtatatatccgaccaaaactatccgaatccgcaaaaaggtccggtcggacggaaattattcgaatcactttcaaccctacttccagcaaccacaccatttcctcccccagtctctactggaaccaaagcagaatacaatccaaagagcagagaagaattga

SEQ ID NO: 62052 - DNA, 286 bp, Oryza sativa
  Clone ID: PAT_MRT4530_63424C.1
gaagatgatccgcgaggctcgactttctgacaggtgtcaggccaagatcatacctaccgaggagttcagtccaaggtcactgatggccaaatgagccaaccaccttcccctggccggatgatgggcatacgtaaccctgggatggaaggaaaccagtgcgccgttggccgtattagtaaggggatgcacaacacctggttgtcagtcctgcttccctgatgaagcaaaaccgaaccgtgactacttgtagttgctgaacctgttttctatctctgcacaagtctct

SEQ ID NO: 62053 - DNA, 204 bp, Oryza sativa
  Clone ID: PAT_MRT4530_63425C.1
tttgggttttttatattttttgggggttttaattttgtttattcccccttttttgaggttctgttttcaagacttaagttcaaaaggggacaacctatcttacaaaaccccaagagtggggggctttaattcacggaccccacacaaccgggctacacaaaaagaagggcgcccttgagggggggcaaccaaccacccccgggg

SEQ ID NO: 62054 - DNA, 1207 bp, Oryza sativa
  Clone ID: PAT_MRT4530_63426C.1
gataattctaccctctcttatgttacaacttacagcaatgtcatcaagtacacatgatcattgtgtgaagcagcatgaaatcgaaggtgatgttgaatttttcgatgaaattttgctgatcatgtcatgtacaataatcaatcaatcaagcagtatcgaagtgcgtgcatggttggattgaatatcgatcgattttttttaaatataattagttcactttgttgcagtattgccggatctcgccgggtgggccggtgagcacgtcgaggttgcccatcttgaccatggcggcggcgaacttctgcgaccacagcttccggctgccggcgtactgcgccaccagcgccgccgtgtcggggcggtcgatcagcgactggtccgacgtgaacaccacctcgtgcgtcagcacgttctggtagtactggttgtccagctgcagcggcgtcttgaagtcgagctgcacgacgcggtcgaggcgccccggcgccgcggcgcacttggcgcgcgagcggacgccgagcgtggcgttcatggcggggtcgatctgcgggtagaggcgggaggagaaggaggagcagtgggagcggccgatggagtgggcgccggagagggtgaccatgtcgtcggcggtgaggttcttggtggcgaagcgggcgacgagctgggtgaggttgaacgacccggggggcaggttggcgagcgcctcggacgcgctcgagacgcggccgtcgaggcggccggcgggcatggcaaacttgatcccgcccatgatgcgcgacgcgtcgcgcgccgcgaacgcgacgatgtcggcgcaggagaccacgcccgggcagcgccgctccacgacgcgcttggcgcggtcgatgacgccgaagccgcgcaggctggggaagttgggcggcgccatcttctccaccgtgccgttgctcgccgggtcggcgtcgagcagcaccgacgcgtcgcaccccctgacgaagcagtcgtggaagaagaggcggatgaggccggggccattgccggcgtcgttgcggacggcgccatggacgatcgtctgaatcaggtcctcagctccggggcatgagttgttgtagtagcccacctgcagccccgccgccgtcgccgcgtaaccaaagaagatcgccgcagcagcgacgagcacactacacgatcggcggcgagcaccgccgtctctgctaccggcggccat

SEQ ID NO: 62055 - DNA, 225 bp, Oryza sativa
  Clone ID: PAT_MRT4530_63427C.1
ttactgtaggagtgttaggtttagggcttccgccgccgcctcctcctccaaaacctcgtcggcgcgccgccgcggccaagccgctgtgctgtacaagaaccggttcggcgacaacgtaagttccgtgcccgacgaggtatttgttcgctgccccctcctcctcctcttcagtgttccttttttttctccgagagcatcggtgatgttacatccatctaaactcat

SEQ ID NO: 62056 - DNA, 390 bp, Oryza sativa
  Clone ID: PAT_MRT4530_63428C.1
atgacagcgggcaccaggagtggctgcggcgacgcgccgtcgccgggcggcagcggcagatttggcaacgccaccctcgggagggccggatctgctgccctaggtagcagctcggtgcgaggcggcggggggtttggcgctcggcggcaggcggcgcgcgtggatccgacgatgacagtgggcaaccgggagcaggcggccgaaagcggcgagcagcatcgacaaggcggctgggagtggggccaccccacatggattcggcaacagcgtcaggtgccggcaaccaggagctggcggcagcggctcgtcccctcgcggatctggcaccgacgacgacggcggcgaccgggaacgggcggcgacggcccgttctcggccgcgtggatctag

SEQ ID NO: 62057 - DNA, 3288 bp, Oryza sativa
  Clone ID: PAT_MRT4530_63429C.1
gcactttttagaccaacggatcaagtcagccgtaagcaaaaggagttgaggaaatgagagctgagataactgcctggtgacgtctctggtggcgacggcgacggggtcctccgcgtccggggtgctcggcgggggcacgttgatgtcgagcggcacggggccgagcttccacctgttggtgcgggcgccacgcatctcgcactcggggcatatccagtcctcgttggcggtggcgcggggccgacgcgcgccggggggggccggcggcggcggcggcggcggcatgagcggcggccagacgcggacgcaggcgaggtggaacccgcgctcgcaggagtcgcagacgatggtccccccggggttctcggggaggccgcacgccgcgcacgggggcggcgggttcccacgccctgcctcccccgggtgccgcgccgccggcggcccgaacggcggcgccctcgccgtcaccgactcgatcgcgctcgccgccgccaccctcagcgcctgcgcctgcgccaccgcgtcccgatggatccccatcgccacctcacgcgcctcgtaaggaagcatccccacctggctcaccacggcgccgcccacggcggccggggccgtcgggcgaggagagcaacaagcaaagcaaagcacgagcaaagcgaggagagggttaagcgaggagaggggaattcgcggagagtcgagtcggggggccaggtgtggggcggatgatgaggccgtggtggagtgggacccagatgtcggtgactcagatgcgggccgcaaaaggtcagaggtttctcgctgatgaggccttcctcctttgcggttgtgccgctgacgtgtgggctgcggtaggtgtgggacccacgtgtcagggagtcggatgggggccgcaaaaaagtcagaggtctcgctgtcgatgactgcgcggggggtggggtgggggagcgtggacgcacgggttgcgcgtgccccggtggtggtggctgtgtccgtccgcgcggctgtttctggtggtgatgcgctggtgtgttttggctggtgtacccggcgcgagaacccattagcaccccgggaaggggtatatgtgttctcatggtaagtaaaacgggttgatgtgtatctatcgatgaggatagggactttgcaggttgccttgttgtgcccataacccttacacctgctgcagcgcaccgcccttttgattgcgattcgaggatcagctggcttttcctttggtcttccaacctgcctccgggttagaatcggtgattgatgtaatgcctcgccttgtgatgggtcagttgatggagcagccacaacaatgtcaggtattggattgattgacatggcataggtcaagcggtagcactctgttgtgaaatacttggcacagaagtcaagtgggttatgatcagtgcgctcaaacaccgcaattgcatgtgagcatgggatcccagagacatgccactttctgcaggtgcagtcccatgtatcaatgttgacaacattgacagcgccatcgcatacctcaaacacattattgtttccgtcattgcctgttgagcaaacaacactgtgtgtaagagctttgcccatctcttcctgaattttctgattggttgatggagttagcggttccgtccatgaattcgaatattccctgcgcgtatacatcatctccatcaagttgcatctgattgtatcaaccaactgcactactgagagctcatatctactggggacccactgaagaattgtctcgggaacattgcaggtgtactggccaagtcgcgaccccttgaagaaggcatctgaccacttctcaggtttagtctccaaaagccattcagcaagcttatcagattcaactttgatgagttcaatacactggttgaattcatcaactttgcatgaatacatggctttcttaacatgctcaaccattgtatcttttagttcttcactccaactgtcatccaattgtgccttaaattcttcaataaaatagttgacatggtagccatgatagctatctggaaatataagagagacctcatccaacagaccacatttgccatttgatatgaatgttagttctccagacacaggcaatgaagcttttagctgttcaagaaaccaatgccaattttcttgactctcgtcgtccactacagagagtgcaactgggaacatatcgccttcaccatcaactgaggtagcagccaacagcttccaatgcttgttcggtttcacagatatcacatcaagaaagaggagaggtctgcagccatgcacaaaaccttgaatggaggcatgaaatgcaacaaagaagcggaattttgaatcttccaaggcctctactgttgccgcacttccagggtttgtctcgacaatcctttggcaaaaccaaggaagctggttgcatgcctcttcatgtgaactgtatagttctttctgggctattgatttgcctcgccaagcttgggagtaattcaggcttagcccatattcccgctgaagatcattagcaatatctcttggcctatagtttggactatcacgcaatttttccttaataacactggccacccacttttgagacgctagacgatgacttttgactgactctgattcacatgtatgacttccaaaaactttcttaatcatgaaatccttctttgcaggagacttggatgcatgtatacgccatggacatccttcagcggtacattccacagtgacacgagaagagtcattcttgacaaatctgtaatggaacctatgtgcaatggcatacttgtgtagtgcatcacggaattcctttggaccttcaaacacttgaccagctccagtaatcgcattctcccaacttgcacaaatcttttgcctcttagatccatctggagtagttgctgctacagcatgatctgcagaagcagcaggcaccacggcagatgtttttaccctgttgtcagccttcttcatgacataaatatatgttgtctctgactctgcatggaattcaaccatgcgttttaggtctttgtcattggaaattgaaatcaaagtcttgttattcctcggaaggaagtacttgaacacataggagtcaagtttgaggttattgagcgttgaagatatctcatgtttgaatgttttaaaagtccaatcacttttcacatgcatcgcgtgcgcctctccaccagaataggacatctgtccatcatcatcagttttgaattctccacctacttgaagaacagctactatctgtttgctccccat

SEQ ID NO: 62058 - DNA, 396 bp, Oryza sativa
  unsure (1)..(396): unsure at all n locations
  Clone ID: PAT_MRT4530_6342C.1
ctctcaatcaaagctgctgtttgcatttacttcgactttggtcgattaggcaggagagtgttcatgtccaggtcagttatcgaccaagaaatttttttttcacatctgcttgtcaaagcagggggggggggggggacnactagacgatggngtgggaaaaaaaaccaggcgggggtggcaaaacagtttaggagttgccatagttaagataactaacgtgtggggccaggaacagtgggtgacantgggtgggtttctgggaggaatgatttttnagatgagttgtaatcggttgttttggatgtgttagngtgttggtttgtggtgcaggtttgggttngttgttgtctggttggtttttttttgggcggtttggttttttttttggggggtttg

SEQ ID NO: 62059 - DNA, 501 bp, Oryza sativa
  Clone ID: PAT_MRT4530_63430C.1
atgacgtcggtggtgacgtcaccaccggcggcggctcgggcgtgcatgctcgccggcgaacgacggcacgacatcgcgaacggagggcacctactggtagcggacggcacggcgaactcaccggtcgacggcggcgacggtgctccggcggttgacaacgacggcgaaggggcggacgaggacggcgacgagacggcgaccacgacggtgacctccccgagctacgtcgacgactggagcgacggcgacacacggctggagcggcggcgacgacggcggcgcgaggctacacgtcgtttgtggccgtcggatggtggatccaacggctcgccgtcgccgtcgggatgcgaggattttcggtcgggcatgagactgtcgtgccgtgtctcagcctgcgagacgacgacgacgaagagaacggtgactgcaactgtgtgtgatgagagggacgtgtcacatgacgtcaccgtcagagggaatcaaaagcagcagctacgagag

SEQ ID NO: 62060 - DNA, 498 bp, Oryza sativa
  Clone ID: PAT_MRT4530_63431C.1
atggcttccaggaacaacaactactaccaccaaggccccaacgtcctgtgggagggctccgcgcctaggggcggagctacaacgaaatggaggagggttcctgagcaccctcttccataccctaccttcgcccctgtccgcgccactgctgccaccgtggtggaagatgatgtgttcgcctctggcaaagtggttatcactaaagacgatatccacgccatggttcaggaattgacgcagatggaggatgatcagtgcgctgctgccactgagagcaatcactctaatctgaataacgccgccgccgacttcgtcccgcacagcaaccgagatgctctagacttcttcctgtccaactccggcttcgttccgtacaatccagcagaactcgattgcaggggctgcacgccggatctgcacacggatagccgctggcgttgtcggtgccgcccgatctaccgtaggaagccgccgctgccgtcgtcgctgttggattag

SEQ ID NO: 62061 - DNA, 375 bp, Oryza sativa
  Clone ID: PAT_MRT4530_63432C.1
attatgagttcagatcgagccgagctcctctggccctgtcgggcggcggttatacgctgcaggctgctgccaccccggcacgcgcggtaggtcgttgcccgtacaaccaccaccactccgtcaccgtcagccatcgtgcgtgcagacacctcctctcgcgcgcgccgtcgatgtacctcccactccgatgacgcgccgtccgttcagccaccgtgtgcgccgtcgatgtacctccccctccgccaccgacagtcaccgtgcgcgccggcgatgtgccttcccctacgtggacgcgccgtgaggagcagccggcgtccggagctggacacgcgggcgccagaagtctgtagtcgttgacgcgcctccgggagctgc

SEQ ID NO: 62062 - DNA, 452 bp, Oryza sativa
  Clone ID: PAT_MRT4530_63433C.1
cccgggctgcaggaatcggcacgaggaggaggaggacgcggcagcggctggggctggggtgcatgtggcacggcagagcctgaagtgccggcgtgctcgactccgaggaagagcaagaggatagtggttgtgtctccgtcgtcaggttcggttttgaagaagtcgagaaagaccacacctcagaaggccagcagaacaaaagagaggggaacgaccgccgccgccggtacaagcttggcctcccggccggttcctcttcgctacccggattacccaagcttacagcctggccaacatactcttagcaataaatacatgtgtgctgttggaaactggatgacagagtgcagcaggatcagcaagctcgaaaaacaagcacatcgtaaggatatcccgactctcaggggtgagcctaaggatccccgtactgctgatgccgtggttagctcaga

SEQ ID NO: 62063 - DNA, 1183 bp, Oryza sativa
  Clone ID: PAT_MRT4530_63434C.1
tcacgccacggttgggcttcttgccgccgaagtagtccttgagtagctgctgccggttgccgccgacgagacgatctcgtcgatgtcacccttgctcagccaggcgtccgacatcgccttctttaccagcagcattgtcttcctgaagaggtccgccatcgccttctttgccagcagcattgtcttcctgaagaggtccgccgtcgccttgtttgccagcagcattgtcttcctgaagaggtcgttgttgagctcctcgaaccacgcccctgttgctgagcacgcgcttggcgcgctcgcaatcgcggcagagcttccccagcgcgcgcgcgtctccgacgttccgcttgatgagcttgatgaaatggtccatgacgcgctggtcgaagtcctcgccgccgaggaccttgaacacgccgttgtcgatggctatgatgctgatgtcgaacgtgttgccgccgaggtcgaagatgaggacgctcttctcggtccccttcttgtcgatgtcgtaggcgatggcgccggcggtcggctcgttgatgatgcggtcgatggtgagcccggcgatgacgcgacatccttggtggcctgccacgcgctgcgcattgttgaagtaggccagcatgttgacgacagcgcggttcttggcggcctcgccgatgagccgctcgccatcgtcggtgaaggtgatccaccaccaccaaggtgtaatatgattcccctggtcgttggcgatgatctcgacaatgccgttccgaagcgcgacgcgcgcttcaccaatcggcgatggtgtgtccgcgatagtcagattgtcatcggaggagcaggaatgttcgtcttccagcatctgatcgcaacccaatcgccggcaactgcagctgtcatggcaggagaatcctccacggatgatgcagctgcagcatacaccctggtaggcatcgaacccagacctgcacatgtggccgacgcagtcaccggggatcgtggagccgacgaggagcagtcaccgggaattgtggagatgatgcagtcgcctgggaatctgggatcgtggattactggcaatccaatggactgtacggccgattatagtagagacagattgcttggaggctttgcaattgatacaaatgaaagagaaaatcttgtcagatcaggtctttttagtcagggaggtgtgtga

SEQ ID NO: 62064 - DNA, 248 bp, Oryza sativa
  Clone ID: PAT_MRT4530_63435C.1
atggaggtcacttcacaggcgcaagtgtgtgccctgattgccttgccctgcctaagacatgatagtaagaaagattttcgttaccaacgagttccaatagttggtgctacggcggaggacgaccttgatgtcctaggtgacatcgaagcacatccccctttcgccagctggcgtaatagcgaagaggcccgcaccgatcgcccttcccaacagttgcgcagcctgaatggcgaatggcgcctgatgcg

SEQ ID NO: 62065 - DNA, 507 bp, Oryza sativa
  Clone ID: PAT_MRT4530_63436C.1
agggagcaaagatgatctttttttcacttatccttttagccgaatcacagtctccaatacataagtttgattattgtaatagtttgcacatataaatacaattcaacaggaaatatctattagcttcattgtactctgatacagtagagggtacaagttatgatacactttggatgtgataactaagttaatggggaagaatggggatcagaaacatttagagtgaaacctaaataattgaatcacattatctatgagaactgtaacctacaagggaaaaaaaatacctaagcaaaattgaattgccaatcgctaaaattctctgaatattggtacagtgcagcacgtagagttcagggactagacgataaaattatccatcatgtgattgataacgtccgcgccgtctgagtttagccaatagctcttcacctggatggtgttatgcgcaaccaatctttgactacttttctggaagctcacatcaacacgttcccacggtacttg

SEQ ID NO: 62066 - DNA, 580 bp, Oryza sativa
  Clone ID: PAT_MRT4530_63437C.1
gattcttattctgtgatgaacaattggcatttgagattattgattttgatatttggagattattggcgaagtggttttgtagatgattggatttacaggtgatgaacagggactgctggatacttggtccggtcagaccaagcatgggttgcaggttaaaatcaatgcatgtggttggtgaagattccgtatggcatacgatggagatattgtgtgcgtatgggatgccgagtcaaatttggaaggagtccaaatttggtacaattggagtttgtaaagttggtttcttgtgtggaaaggttttctagatggattaggatttcttttatgagtttgattcatggctttatgctgcctacctcatgtataaatagagaggagggtgtggcctcccggtatcgcggcggtcagaccgacggcatctgttcgatcagaccggtgacgccgacaggtttcggcggttagaccgaaagatcaacaccggtcagactggcggcacaggtgtggtcagaccgacagatcaactccggttaaaccgatctacatcgaatttgaggcatacataacatcccctgtacct

SEQ ID NO: 62067 - DNA, 1604 bp, Oryza sativa
  Clone ID: PAT_MRT4530_63438C.1
gaacactaaggatttatatgacaaaggttgcattgaccaagttagcgccatcagctagttgcagccaaatcttaacaatatactgctgtttgtgtgtgatatctatcatttagaatttcattcttgttgttccagaattatcagtttacatgacctggttctagatagttccattcaaagaaactcttcaagccaatcatcttgctcctcttttttagattgtgcagaggtaaaagtcttttagatttcaggatgatggatatgatgatacatcatttatcattccttctctagttatggttgtttcagtcactatcttgttttcctgtaataagatttagattgccacttcgcatgccggaagccagttcaattcggctacacaaacatttgacggagttgacctgatgggtgaaaggttggcaaatgaggttttatcagttgtagaacaaagaagaggtgtgaagaagatctcatttgtggcacactctctaggtggccttgttgctagatatgctatagggatgggccgcgccaccgccactccagcccacggggcccattcgcggtggccccgcgccgtcgcgcgcctccgcctcgcgttccgctccccggcgcccgcggccagcggcggcgcgcggtggataggctgcttccgcccggcgccaccggcggcggtgaaggaggcgaaggggaagcggccggaggtggagaaggagcctgcgcggggcggaggggaggacgtgtggagcgcgcaggcggaggccgaggtggcgcagggcgggggtttccccgagcacctcgtcgtcatggtcaatggcctcgtcgggagcgcggatgactggaaattcgcggcggagcagttcgtgaggcggatgccggaaaaagtgatcgtgcaccgaagccagtgcaattcggctacacaaacatttgacggagttgacctgatgggtgaaagaatttataactatccttcagatgaaagcgtaaaatcaaaattgatctacattgatccatgggagtttgttttcatagttcaaacttttgtagaacaaagaagaggtgtgaagaagatctcatttgtggcacactctctaggtggccttgttgctagatatgctatagggaggctttatgaaccaaataacaaaactaaatcttcttcggagaagagcagagatgaaggtgagcgcttggagggtttcattgctggcttagaacctatgaattttataacctttgcctcaccgcatcttggttcaagtggaaataaacagcatcgacttcttgttcgtgatgagaaatatcctcatattgtccatgttgataaaggagcaacgaacagtaatgaagcagaagctcgttctgatctttatgacccagaagaggagatgattagaggccttacacaagtaccgtgggaacgtgttgatgtgagcttccagaaaagtagtcaaagattggttgcgcataacaccatccagataattgcggagtggcatcttaactgtgattattctaaggaagttggggtgaagagctattggctaaactcagacggcgcggacgttatcaatcacatgatggataattttatcgtctag

SEQ ID NO: 62068 - DNA, 1619 bp, Oryza sativa
  Clone ID: PAT_MRT4530_63439C.1
tcacatcttgtgttgtgtcttcaaagtgtcccaacgattctttaattttgtacggtcatattgccgcccggtctgtgcaaagaatttttcttccaagtttttgtagccaaggggactcaaggcagctgttggtctatttcctgctagaacctcatccctacatatctcacagaacactttggaagcatatgcatcccaatgcgcttttggtaccttccctttctccatcttcaataaattgttgcggtaaccaaatattctacaaactgccataaccgattccatgagttgggcaacagatgaagcaggcacaatattttttgttgaacaactaacatcacttcccatctgagcctcaggctttgcagccatagatgacaaaaagaccctgagcttgtgcaaatgaatcccgtgagtgcaggtgatcaaaattaatccatgacagactcttccgatggctcgttctctaagctcccggctggaggaaaagaaagtctggccatggtcgatgagatttgttggatagctagggaagccgaaatccacggatgattttgtcttcttggtgcggcagaccaccgccgtcgccgggctcacgccgcggtccttctccggcgcccaactccttccccgcctccactttgacagcagtcgtgacggtcgcctccacagccacagttctccctcctcgttgcctccccgcaacctcgccaccgctgccgtctccgcacggtcgcgccaccgcctcctcacggccgtgtgacgccattggctccgtatggccgcccccgcctcctcacggctgcgccacggcctccgcaccccgccgcctcgccgcctggggtcggagctcggcctcccgcgccggatccggacaggagggggccggaaccagccaccccgccgcctccaccgccggatccacgcgcatcgccgccggcggcggctcgggatccccccctccagttccccgcaggagagtgcaggagccagcaccgccgcctcattgtcatcggcccagatgcccacctcttcaaccgtcgtcgatgccgccacctcgccgacgccatgcgccaccgtcgagctccacattgcagccgcggaagtcgccaccccggagctaggtcggggtcgtgggctccgaacgccgcgacctcagggggagaaggccccgccgccgtccttgcggccgtgcggtttccggcagccgctcagccggcagcgaggcggaaggagggcgatgggggtggctgcagctaggcagggcgcagcgcctggcgacggcagcggcagcatgaacgaacaggctcctggccaagactgcatctcgaccatatcgaggacatcaccttcccggtgttcaccggactggaggtgctgcctccggctccggctccggcgaccggcaatggcggcggatcaggcgatcatcgatcggaaggaagggctccgaatgatcaagcacaagtcgaggcgttacgccgagctcgacgacggcggcactagaagcgtcaaatccgtgctctaaacctcatctagcttaatttgttcatgagaaataacgacattgtttatgatctacatttaatttaagtacttccaaactcccgttatataat

SEQ ID NO: 62069 - DNA, 400 bp, Oryza sativa
  Clone ID: PAT_MRT4530_6343C.1
ttttgccctttttttttttttttttgtatgaaacagatcctttttattttcatgcacaaattaaatttcttcgctttcctttcacctcgttaacacatatatacatttgtagctagtatgatcatcatcggttcgatccagatttgcagtagtcagcattcatgcatgtaagagagccttcatattttgctgttgggttgggttgggttggcatgattgataagaattaattgaagttcttggtagcctggtaggtgacgccgaactgccagtcgggggggaggacgtgccaggaggaggccttgcggtggtcgccggtcatcaccctgaacgtcaacaactctccggtgaggacctccgacgtctgccactcctgcccccaaatgcgctacaagcggaa

SEQ ID NO: 62070 - DNA, 216 bp, Oryza sativa
  Clone ID: PAT_MRT4530_63440C.1
atggagcttatatccagcggcctccctatcacgatgcagggaggagacggcgaggccgcccccatggcttcgcctactggtcttccggcctgcctgaccgtgcggggcgagccctcggtgccgcgcggagacgagggaagggcgatgaggacggggctggaacggtggcggcaacaggtccagtcgctagcttgcattgactccaacaatcgctaa

SEQ ID NO: 62071 - DNA, 461 bp, Oryza sativa
  Clone ID: PAT_MRT4530_63441C.1
atgaggataacggtaaccaatatatatacaggggaggataggtctcttacagcgatgtacaggagagggagagcgctggcgacagtccgggctggtgaagtgcctcgaatggggtggcgctgcgcagtcatgtgtaggggccggggctggcgacagcgcggcgaggctcaagccgtcgctgcgggcactcttctcatgcaagatcttcagcacctgcatgcacccaggcgctcagcctgacagcgacgcccaataacaatgacatagtggggatgagtggctgtggaggcggcgttgtcgctggttgtggaggcggcgctgcggtgatgaaggcagcggtgggcagcgctgggaagcgggcggcggtgatagcttcgatgacgatcagcgagccggtggcagcggcttcgacggcggcgattggcgagcagcgctggaaagcggttgccagcaatgtggat

SEQ ID NO: 62072 - DNA, 360 bp, Oryza sativa
  unsure (1)..(360): unsure at all n locations
  Clone ID: PAT_MRT4530_63442C.1
ccaaatgctggattataagcacagaacattgatataaaagtccatgattcatgtctccctggttgcaaattacatgatggtcatgggccctaatggcagaccttatgaactcaaactggaaaagatcaacaacattggtgcttgngtaaagatgtgctccaaccacttaaccttggggaaggcggccccgggttttccgccgcgttggccgccgacgcgatctaggggggggcgcgtggtcgccggagggggcggtagaggccgcgttgtaggcggccttgccgacgagggaaaatcccgaagggcgacgatggcgatgccgagccccggcgtggccttggcccaattggttccccacca

SEQ ID NO: 62073 - DNA, 711 bp, Oryza sativa
  Clone ID: PAT_MRT4530_63443C.1
aaaagaacattaatccattcgtatacaaatataatcaatttcctcatagtttgaacataaattaatgttcaaaatgaaacaatttgagcctaatcacatcacaacagcacgacaaagagttatgcaaagacgaggacagggttatcatgcaaagacgggtggataatataagacgtgatggaccacgttttgaggcaaaggtaaaaggcattgatccaatgctggaaggtcccaaccgtggcgaccttggcgagcccgacgagccacctagcaacggtggccagggcctgcgactgcgtcgaccggccgggcactgccgtcgagaatgccatgtctccgacgaggagggccagcccgagcacggcggtgacgaggttggccaggtcgaagcacctctgctccgccacgccgtcctggaagaagcaccggccgccgtcgtcgcaggggcagctgctgaggtaggacggcgagacgatcagcccgttgccggcgacgagcagcgccagctgcgccacccgtaggtcgcccaccggctgcgctcccggcggccccggccagatgaacgccatggtggatcggcggacaggggagaaacaactagaggttttcgggctagctccacaatgaagtgggctagacgatatgggtttcaagtctcacctcttctccttccctaatatctgctctgctcgaattgtggccggacgcgtg

SEQ ID NO: 62074 - DNA, 540 bp, Oryza sativa
  Clone ID: PAT_MRT4530_63444C.1
ttgatgcgtatgtcgcttttgtggttggcaatgccattgccattgccatgccatgcaccggatggaaagccttttcattgttgccctttatttcgcaagtagatccctagaaaaacttatcccaaaaatggtcctttttggggcgccagagtggctgccgccgtcccaccgccgacgtggcggggcgatgctgaggaactcacaggaaccaaccacgtaaaaaataaaatcaaacggatgaaatatgtggcatgtgaaattttccaaagctcaaccgaaaaacttctctcctcgaaaacacaatcttgcaagcggaatttggaggttttaatatttccgaacccggcaaagcgggggagaatcggatgtaactttttctgtagatgtccgtgcatatattatttgcctgattccgagtccagaaacaggaatggaggcggcggcgccagcatggctggcgccctcctcctgccacgtcggttcacgtgcgccacggtagcaggaggacggcgctagagaggctggcgccgtcccgttgga

SEQ ID NO: 62075 - DNA, 606 bp, Oryza sativa
  Clone ID: PAT_MRT4530_63445C.1
ccaacacatgaactacagtaccaaaaagagcccatacatgatcatattggttcacaatgcaaaaaccaggttactgagagaagcggcacagttggccggtcatatcatccgtacctggatttttcatattttggtccttttgaaaaacttatttcgcaaatagtcacatggaaaaacttattccagaaatgatcctttttagggcgccagagaggcttggacggcgccaccagccactctggcgccctccccctgccgacatggcggggcgatgctgaggaactcacaagaaccaaccatataaaaaataaactcaaacggacgaaatatgtggcatgtggaattttccaaagctctaccgaaaaacttctctcatcgaaaacacaatcttgcaagcggaatttggaggttttaatattgccgaacccggcaaagcgggagagaatcggatgtaactttttctgtagatgtccgtggatatattatttgcctgattccgagtctggcggtgccagccatgttggcgccctcctcctgccacatcggtttgcgtgtgccacgatggaaggaggacggcgccaaataggctgacgccgtctcgttgga

SEQ ID NO: 62076 - DNA, 627 bp, Oryza sativa
  Clone ID: PAT_MRT4530_63446C.1
ctcctccggcgaggccaggtacgaggccatatgtcagagacctcgccaagggctaaagccggcaacttgccggccggctgcagagaccaaggccagacgtccctccactatagaggacggccacagagacatccctgccgagaccaaggccgtcctctgcaagaaaaacttatcccaaaaatggtcatttttggggcgccagagtggctggtgtcgtcggacgggcgccagccactctggcgccgtccccctgccgacgtggcggggcgatgctgaggaactcacaggaaccaaccatgtaaaaaataaactcaaacggacgaaatatgtggcatgtgaaattttccaaagctctaccgaaaaacttctctcctcgaaaacacaatcttgcaagcggaatttggaggttttaatatcgccgaacccggcaaagctagggagaattggatgtaactttttctgtagatgtccgtgcatatattatttgcctgattccgagtccaaaaacagaaatggaggcggcggcgccagcatggctggcgccctcctcctgccacatcggttcgcgtgcgccacggtggcagaaggacggcgcctctcgttggatgacggcgccagccactctag

SEQ ID NO: 62077 - DNA, 180 bp, Oryza sativa
  Clone ID: PAT_MRT4530_63447C.1
atgcctaggggcctcggggtatcccgtcgcacccctcgggcctccactccgaggccctcgttcggctaccacgtggcggccgagtggacggaggcgaaggatggcgctagggcccacctgaggacgagcggccgccttgcttttagcctaaggcatgggtggcagctcgacccaggttga

SEQ ID NO: 62078 - DNA, 346 bp, Oryza sativa
  unsure (1)..(346): unsure at all n locations
  Clone ID: PAT_MRT4530_63448C.1
ttttggtgcaggatgccgtttagnanagtcgngcctncgtgnccagatatgncatagccgctgcnggttgtnctctatcctgacaccgaacgaatagccgaaatggtnaaccatatcatggatggcgaattcnanttcaaattcnaggacaacaccgtccttaagtacaaccaagtctttccggacgacnacnaggtggtggcggcgccnatgatgatcgacggcggtggagaccgcgatggcncggatggaggtgatggaggcgacccnttcctatnattagggccctgtttcaaaaaccgctggaatttccattttccctggctataaattatttatcttntaa

SEQ ID NO: 62079 - DNA, 644 bp, Oryza sativa
  Clone ID: PAT_MRT4530_63449C.1
cttctcaggcagttgaaactacaaacgagcatgggaaagctgcgacggcggggagaggtgtcagggtggcggcggctgcgacgcctcggaaggaggagtatggcagcggcgggggcggctgcacggctcgccgttcctgccctcgcccactcttggaaaaacttatctcagaaatggttctttttggggcgctagagtggctggcgccgtcatccaacaggacggcgccagcctctctggcgccgtccccctgctgacgtggcggggcgatgctgaggaaatcacaagaaccaaccatataaaaaataaactcaaacggacaaaatatgtggcatgtggaattttccaaagctctaccgagaaacttctctcctcgaaaatacaatcttgcaagcggaatttagaggttttaatatcgccgaacccagcaaagcaggggagaatcggatgtaacattttctgtagatgtccgtggatatattatttgcctgattccgagtccaggggttgggggggggggggcggcgccagccgtgctggcgccctcctccctcgggcggcgccagcacctcctgccacgtcggttcgcgtgtgccacggtggcaggaggacggcgccagagaggctggcgctgtcccgtactc

SEQ ID NO: 62080 - DNA, 466 bp, Oryza sativa
  Clone ID: PAT_MRT4530_6344C.1
ggcttccactgatggtaacgacgatagtgtatatcctattgcagttctaatcgacgaattaagaaatgaagatgtgcagctccgtcttaattcaataaagaaactttcaacaattgctctagcattaggagtagagaggactcgaaaagaactaataccatttttgaccgagacgatctatgacgaagatgaagtattgttggcgcttgccgaacaacttggaatgttcacaccgctggtgggaggtccagagcatgtgcattgcttgctggcgccgctggaaagtctggcaactgtagaagagacagtggtgcgtgacaagcagtggagtcgctccgaatcattgtagcacagcactccccgagtgatcttgagaatcactttgtgccgttggtgaaacgattgtctagcggcgattggtttacctcgagaacatcagcatgcggcctatcagcgtatgttatgc

SEQ ID NO: 62081 - DNA, 462 bp, Oryza sativa
  Clone ID: PAT_MRT4530_63450C.1
acccctaaaaaaacttatcccaaaaatagtcctttttagggcgccagagtggctggcgccgtcgttcaacaggacggcgccagcctctttggcgccgtccccctgccgacgtggcggggtgatgctgaggaactcacaggaaccaaccatataaaaaataaactcaaacgagcgaaatatgtggcatgtggaattttccaaagctccaccgaaaaacttctctcatcgaaaacacaatcttgcaagcgaaatttggaggttttaatatcaccgaacccggcgtagatggggagaatcggatgtatcattttctgtagatgtccgtgcatatattatttgcctgattctgagcccagaaaaaggaatggaggcggcggcgccagcctcctcctgccacgtcggttcgcgtgcgccacggtggcaggaggacggcgctagagaggttggcgccgtcccgttgga

SEQ ID NO: 62082 - DNA, 293 bp, Oryza sativa
  Clone ID: PAT_MRT4530_63451C.1
gcgcaccatctttctagaactgcttatattgtgagaccaaacttgcaagagtataagctaacaactaatagttcggttggtcttccagctacaaattacacttccatggcgaaaattgacagatcgaaggcaacgctcatcagggcagtctcacctcctgggtacaacataggaatggtcagatatccatcacacacgataccttcttttgctcctatgaaattcacacccacttgcatattgaaactctatgatggtgaaatcgacatgctttttgtgccacacgctctatt

SEQ ID NO: 62083 - DNA, 364 bp, Oryza sativa
  Clone ID: PAT_MRT4530_63452C.1
cccttcccttgtttgcttggaaggagagggggaagaaaagtaggaggacgcggttgcgggttggtccagatctagggcaaggcggtggccggagtttgagctgggcccgccggcggcgagatgaagcagtcgatgcggagccggcaggagccgcggcgggtgagcaacggcgtcatcatcgccgccatgctgctctccctctgcgtcctcagcatcgtcaaggccagatactgctccacccccttcgttaagcccgacgaccagctacaggagcagatgaactccagcatcaggatggagaccgacgagccggcgaccatggcggcgggagagcaagaggaggacgaggaggaggagagtttgc

SEQ ID NO: 62084 - DNA, 639 bp, Oryza sativa
  Clone ID: PAT_MRT4530_63453C.1
ctaattaaacggttgatatgtgttattccttaatttatgggttagttattactaacatagtacggagtactccgtaagtagtactagtatttatggtttttgcgaattgcaagcagatttctggatttttcacattttggtccttttaaaaaacttatttcgcaaatagacccctaaaaaaacttattctaaaaatggtcctttttaggcgccagaatagctggctccccctgcaaaggagagatgtgcaacttttttatttttatttttattttttgatatttttttcacacttaggaactcacaggaatcaaccatgtaaaaaataaactcaaacggacgaaatatgtggcatgtggaattttccaaagttctaccgaaaaacttctcctcgaaaacacaatcttacaagcggaatttggaggttttaatatcgccgaacccggcaaagcggggagaatcggatgtaatattttctgtagatgtccgtgcatatattatttgcctgattccgagttcagaaacaggaatggaggcggcggcgccagcatggctggcgccctcctcctgccacgtcggttcgcgtgcaccacggtggcaggaggacggcgccagcctctctggcgccgtcccgttgga

SEQ ID NO: 62085 - DNA, 621 bp, Oryza sativa
  Clone ID: PAT_MRT4530_63454C.1
gtgcacgcccgtccaaagccgccgccgagtccgagtttgcttctacccggggtgaatcgcgccaagtcttgccgcacggttagattgaagataaacgacggcttcccctatcacaattcaaaccaaccatcgccgtgccgaccattttaaccctcgccgccgccgcgcgtcgagctcggattggcgccaacacgtcgccagccgttttcacccgcggtcaagtcaatccttcgccacatactaaaccctaaccgaagctttgcatcgagtttcacctcgtcgcactgagccgagcaccgccgcccctgctctgctctattcttcgccgccaagaagttttttcgaccgtaatccgttgtttcaaccgatctcgccgctagcccacccacacatcaaaataacccctccaccgctactcgccgtcgccggagaaccctagctacctcccctcctcggccgcaacccctttccccctctatcgctgtatttggggaacggctggaggttgaagaagagaagagagagagagactgacatgtgggtgttgaggattcttctgacacactagataataccagtcaatctcaagacatcaagcaagtcaagttactatttaccttt

SEQ ID NO: 62086 - DNA, 1960 bp, Oryza sativa
  Clone ID: PAT_MRT4530_63455C.1
gcttggaaggagagggggaagaaaagtagaggacgcggttgcgggttggtccagatctagggcacggcggtggccggagtttgagctgggcccgccggcggcgagatgaagcagtcgatgcggagccggcaggagccgcggcgggtgagcaacggcgtcatcatcgccgccatgctgctctccctctgcgtcctcagcatcgtcaaggccagatactgctccacccccttcggtacgctccgcctccgccgtggcggcgcggcgctcttcttcctcctcctcctcttgatttttaagcccgacgaccagctacaggagcagatgaactccagcatcaggatggagaccgacgagccggcgaccatggcggcgggagagcaagaggaggacgaggaggaggagagctctggcggtggcggcgctgagcctgaggtcagcgccacccctgccgtcgtggtcaccgccgcagccggcggcggcggcggcaagaggaagccgacctgccgcatgacgagcaagcggtcggagcggtgcgaggcgagaggggacattcgtgtggaggggaacgcgtccaccatctacatcggcgggatcgacaaggagtggaagacgaagccgtacgcgcggtaccacgaccccgtcgccatggccgtcgtccgcgagttcaccctcaagccggtcaccgagtcgtcgccggcgtgcaccaggaaccactcggtcccggccttcgtcttctccaacggcggcttctccggcaacctgtaccacgactacaccgacgtgctcgtgccgctgttcctcagcacccaccagttcaagggccaggtgcagttcttgctcagtgggctcaagccatggtgggtgaacaagttcaacctcttcttcaggcagctcaccaagtacgacatcctcgacatcgacaacgacaaggacgtgcactgcttcccccggatcgtggtcggcgccaccttccacaaggacatgggcgtggaccccaagcgctcgccggggcacgtctcggtggtggacttcaagcgcgcgctccgccgcgccttcgggctggagcgcgtcgcggcgtcccgaggcggcgccacggggaacggcaagccacggttgctaatcatttcccgcaagaactcgcggcggttcctcaatgagcgggagatggcgcaggccgctgccgctgtgggcttcgaggtgcgcattgccgagcccgatcagcacaccgacatgtccacattcgcccagctcgtcaattccgccgatgtcatgatcggtgtccatggtgctgggctcaccaacatggtgttcctcccccgcggcgccgtcctcatccaggtggtgccattcggcggcctagagtggctcaccactgtcaccttcaagaatccggcgaaagacatggaggtcacctacatggattacaatgtgcagctggaggagagctcgctgatcgatcagtacccgcgcaatcaccaggtgctcactgatccctacgccgtgcacaagcaaggctgggacgcgctcaagacggcgtacctggacaagcagaacatcaagatggacatggacaggttcaagaagacattgcaggaggcgctcgacaggttgccgccagcatgagagcttgatgaactgatgaaagctcaagcccacgaggtggtggtggtggtggtggtagatagataggttggtgtatctatctgtgccttctcttgcttaacttatttttccttttgaaattctttttacgccttcttcttcctttagcaacattcatttgatctgttgttttggaaaagaaaaaaagaggatgaacaagaacatcatgttacatatgcctagctgatgagtaatttataccctttgtgattattaattggttgtttatttaaaaaaaaaaaaaaaaaaagcagcccgggggatccaaaaactcgaggggggcccgtacccattcgcc

SEQ ID NO: 62087 - DNA, 627 bp, Oryza sativa
  Clone ID: PAT_MRT4530_63456C.1
gcggggacccagagagaaattaggagtatcatgggccgagagcccgacagagcaatgggctgggccctttcgtactgtagatttaacttaaaaattaggagtgtgagtctggacgcaagttcttttcttttttttcctttttgcaacttggaaacccctagaaaaacttatcccaaaaatggtcctttttgggacgccagagtggctggcgccgtcgtccaacaggatggcgccagcctctctggcgccgtccccttgccgatgtggcggggcgatgctgaggaactcacaggaatcaaccatgtaaaaaataaactcaaacggacgaaatatgtggcatgtggaattttccaaagttctaccgaaaaacttctctcctcgaaaacacaatcttgcaagcggaatttggaggttttaatatcgccgaacccagcaaagctgggaagaatcggatgtaacattttctgtagatgtccgtgcatatattatttgcctgattctgagtgcagaaacaggaatggaggcggcggcgccagcatggctggcgccctcctcctgccacgtcggttcgcgtgcgccacggtggcaggaggacggcgccatcctctctggcgccgtcctgttgga

SEQ ID NO: 62088 - DNA, 2524 bp, Oryza sativa
  Clone ID: PAT_MRT4530_63457C.1
ccggcccccccgaccccgccgcctccgcccccgaccccgccccccctgccatgtcgaagaaatcacgcggcgggggcgggggcgccgccgccggcgaggatcccgaggacctctcccgctcgcccctccaggccgtcctcctcgccgacagcttcacgctcaagttccgccccatcaccctcgagcgccccaaggtgctgctgccgctggtgaatgtcccgatgatcgagtacacgctctcgtggctggaatcggcgggggtagaggagtgcttcgtcttctgctgcgcgcacgcacagcaggtcaaggagcacctggggaaggcggggtggaccgggaagcctgcggcgagggagatgaccgtcacggctgtggaatcgcacgacgcgatcagcgcgggcgacgcgctgcgcgtcatgtacggccgtggagttatacatggagattttgttctaatcagtggtgataccatcagcaacatgaatttgaaagacgctctccaggaacataaggatagaaggaaaaaggacccacttgctgtcatgactatggttataaagcattcaaaaccttcgatcctaacgaaccaaacacggttaggtaatgacgaaattgttatggcgatagatcctgagactaaagaactactgtattacgaggacagggcagatgtctcaaacctgtatgtgacaattgataaggacatactggccagtaatcctactctccaattgcataataacatggagatcacgcctaacattcttcattacttcaaatctacctacttttcacagatcttcttttacttatgttcgcaggactgctatattgatatatgctcaccagaagttcttagtctttttacggataactttgattaccaacatcttcggcgccatttcgttaagggtttactagttgatgatattatggggtataaaatatatacccatgaaatacgctcaagttatgctgccagaatagataattttaggagctatgatactgtgagtaaggatataattcaaaggtggacttaccctatggtgcctgatgtcctgtctttcggtgatcgtcaagaaatcaaacttcatcggcagggaatctataaggcatcagatgtaacactgtcacattctgcacaaattggtgccaattctgttgttggcaatgggacaagcgttggagaaaactgcaaggtatccaattcagttataggacaaggctgcaatattgggaaaaatgttttgattcatggatcctatatatgggacaatgtcacaattgaagatggatgcaaagtgagtaattcactagtctgtgatggcgttcatttaggggcaggggctattgttgaacctggctgcatactgtcatttaaggttgaagttggaaagaatgttgttgttcctgcctattcaaaagtggcattgctccctcagccttcaaatgaagacagtgatgaggagcttgagtatgctgacaccaattctggagttacagatagtccacccttttccagcatgaggagtgctgaccacccaactgtatctgatgatgatgacttagaggcatcggagactggaacatgtggtgtcgttggttacgtatgggaaaatgttgatgctggaattcaggaagaatggagacaatcaattgctccaattcctaaagataagcttgaagagttgcagcatgctgcgtcttttgatgacgatgatgatggatcagaagatgactttaaaaatcggccaactgtactggaccaagatgatgattctgatgttagcgcggttgaggatgatgattattctaagtttgagaaagaggtggaagagactttccaaagggcgttggatggtatccatcaagataacttgatactagaaattaatgcactcagcaagagcacttggcaaatggaaggacctactgcgaaattacaccaggtcagctgatgaggagatggaaatattattgaagttcgaggaaatgtgccaagaaaatacaaaagaattttctccactattttcaaagatcttgccttacctctatgataaggaggtagtaagtgaagacgcaattttgagatgggcggaggagaaagaaaatgccgatgaatctgataaggttttcgtcaaacaatctgaagctttcattcagtggcttaaggaagctgaagaggaagatgaagaagaggagtagagctggagcttatgcttgcattcctttgagctcttggagaaatgcagcatttgccttgtttgaatggtctgccggtgagtttgcaagcggcaagttttgaaaacctaattgtttgtacattaatttaatggcatttttgttcctaaccaatctggtaaaagaaaggagcaacattgcccacgagccatgggttaaaacgactgtagagtgtagataagttaaaaccctttttcctatgtttgcttcgctgatgcttccatgaagttattttttccttctgatgaatttgtttaactgccaaaaaaaaaaaaaaaaa

SEQ ID NO: 62089 - DNA, 521 bp, Oryza sativa
  unsure (1)..(521): unsure at all n locations
  Clone ID: PAT_MRT4530_63458C.1
agaccggttataagatcataataaaccatccggtaaacttatatagtctaactttacaaaaaccgagcagtttccatccgtgtaacacgtaccgcaaataaacccctgaaaaaacttatcctagaaataatcctttttggggcgccagagtggctggcgccgtccccctgtcgacgtggcggtgcgatgctgaggaactcacaagaaccaaccatataaaaaataaactcaaacggacgaaatatgtggcttgtggaatttttcaaagctctaccgaaaaacttctctcctcgaaaacacaatcttgcaagcggaatttggaggttttaatatcgccgaacccagcaaagcgggggaaaattggatgtaactttttctgtaaatgtccgtggatatattattttcctgatttcgagtccggcggcgccagccatgttggcgctctcstcctgccacgtcggttcgcgtgtgccacggtggcaggaggacngcgccagagaggctggcgccgtcccgttgga

SEQ ID NO: 62090 - DNA, 2176 bp, Oryza sativa
  Clone ID: PAT_MRT4530_63459C.1
atgtcgaagaaatcacgcggcgggggcgggggcgccgccgccggcgaggatcccgaggacctctcccgctcgcccctccaggccgtcctcctcgccgacagcttcacgctcaagttccgccccatcaccctcgagcgccccaaggtgctgctgccgctggtgaatgtcccgatgatcgagtacacgctctcgtggctggaatcggcgggggtagaggagtgcttcgtcttctgctgcgcgcacgcacagcaggtcaaggagcacctggggaaggcggggtggaccgggaagcctgcggcgagggagatgaccgtcacggctgtggaatcgcacgacgcgatcagcgcgggcgacgcgctgcgcgtcatgtacggccgtggagttatacatggagattttgttctaatcagtggtgataccatcagcaacatgaatttgaaagacgctctccaggaacataaggatagaaggaaaaaggacccacttgctgtcatgactatggttataaagcattcaaaaccttcgatcctaacgaaccaaacacggttaggtaatgacgaaattgttatggcgatagatcctgagactaaagaactactgtattacgaggacagggcagatgtctcaaacctgtatgtgacaattgataaggacatactggccagtaatcctactctccaattgcataataacatggagatcacgcctaacattcttcattacttcaaatctacctacttttcacagatcttcttttacttatgttcgcaggactgctatattgatatatgctcaccagaagttcttagtctttttacggataactttgattaccaacatcttcggcgccatttcgttaagggtttactagttgatgatattatggggtataaaatatatacccatgaaatacgctcaagttatgctgccagaatagataattttaggagctatgatactgtgagtaaggatataattcaaaggtggacttaccctatggtgcctgatgtcctgtctttcggtgatcgtcaagaaatcaaacttcatcggcagggaatctataaggcatcagatgtaacactgtcacattctgcacaaattggtgccaattctgttgttggcaatgggacaagcgttggagaaaactgcaaggtatccaattcagttataggacaaggctgcaatattgggaaaaatgttttgattcatggatcctatatatgggacaatgtcacaattgaagatggatgcaaagtgagtaattcactagtctgtgatggcgttcatttaggggcaggggctattgttgaacctggctgcatactgtcatttaaggttgaagttggaaagaatgttgttgttcctgcctattcaaaagtggcattgctccctcagccttcaaatgaagacagtgatgaggagcttgagtatgctgacaccaattctggagttacagatagtccacccttttccagcatgaggagtgctgaccacccaactgtatctgatgatgatgacttagaggcatcggagactggaacatgtggtgtcgttggttacgtatgggaaaatgttgatgctggaattcaggaagaatggagacaatcaattgctccaattcctaaagataagcttgaagagttgcagcatgctgcgtcttttgatgacgatgatgatggatcagaagatgactttaaaaatcggccaactgtactggaccaagatgatgattctgatgttagcgcggttgaggatgatgattattctaagtttgagaaagaggtggaagagactttccaaagggcgttggatggtatccatcaagataacttgatactagaaattaatgcactcaggttatcttatagccttcaacatgcagactgtgctggagctttgttccattccgttatgagaagtgcattagtggctgcacaatctactaatggtaaccttctaaagacaactgcagaagcacttggcaaatggaaggacctactgcgaaattacaccaagtcagttgatgaggagatggaaatattattgaagttcgaggaaatgtgccaagaaaatacaaaagaattttctccactattttcaaagatcttgccttacctctatgataaggaggtagtaagtgaagacgcaattttgagatgggcggaggagaaagaaa

SEQ ID NO: 62091 - DNA, 428 bp, Oryza sativa
  Clone ID: PAT_MRT4530_6345C.1
gttttaatctctccaattttacactgggggtttggctggggtactttaacgctgaccttgctatgttatcctgggcttatccttcccttggcggaatggagtatgttcttcaccacttgctgtcaattatttctttagtctatgctatttattctgaagaaggacagttgtacacatacatggttctcatctctgaaacaaccacacctggaatcaacctccgatggtttcttgatactgttggaatgaaaagatcgaaagcctatcttgtcaatggtgttacaatgtttgttgcatggctggttaagcagatgcgcacctttagctgcattctgatattcgctgtgcccacaatactattagtgatgaacacagcgtggtttgtcaaaatcttgagaggtcttaagaagactctagcaattcaccac

SEQ ID NO: 62092 - DNA, 786 bp, Oryza sativa
  Clone ID: PAT_MRT4530_63460C.1
atggtatttagatttgcctttaaaaatattgtcaggatatcatgtcgatgtgttggtaggggatatttatcttttgcagtcgaagagggaaataaaattcccatccagctgcctggatttttcacattttggtccttttgaaaaacttattttgtaagtagacccctagaaaaacttatcccaaaaatggtcctttttggggcgccagagtgcctggcgccgtcgttcaacagtacggcgccagcctctttggcgccgtccccctgccgacgtggcggggcgatgctgaggaactcacaggaaccaaccatgtaaaaaataaactcaaacggacgaaatatgtggcatgtggaattttccaaagctccaccgaaaaacttctctcctcgaaaacacaatcttgcaagcggaatttggaggttttaatatcgccaaacccggcaaagcggtggagaatcggatgtaactttttctgtagatgtccgtgcatatattatttgcctgattccgtgtccagaaacaggaatggaggcggcggcgccagccatgctggcgccctcctccctggggcggcaccagcctggcgccctcatcctgccacgtcggttcgcgtgcgccacggtggcaggaggacggcgccaggcaggtgccgccccagggaggagggcgcccgcctggctggcgcaggccgccctctttcctggattcttggaaaggaggaagagatttttccaggcacccactaaggtcgtcctagcgagggatatatctgccgagaacaagtga

SEQ ID NO: 62093 - DNA, 490 bp, Oryza sativa
  Clone ID: PAT_MRT4530_63461C.1
tatattaatatgatttttaaaacaactacccctagaaaaacttatcccaaaaatggtcctttttgggacgtcagagtggctggcgccctgcagaggaaagagatgtgcaacttttttatttttattttatttttttgatatttttttcacacttaggaactcacaggaaccaaccaggtaaaaaataaactcaaacggacgaaatatgtggcatgtggaattttccaaagctccaccgaaaaacttctctcctcgaaaacacaatcttgcaagcggaatttggaggttttaatattgccgaacccggagaatcggatgtaactttttctgtagatgtccgtgcatatattatttgcctgattccgagtccaaaaacaggaatggaggcggtggcgctagccatgctggcgccctcctcctgccacgtcggttcgcgtgcgccacggtggcaggaggacggcgccagagaggctggcgccgtcccgttgat

SEQ ID NO: 62094 - DNA, 222 bp, Oryza sativa
  Clone ID: PAT_MRT4530_63462C.1
atggagaagaagatcaaagtggagtggccgccgagagcatacgatgaggaccatctgccgctggccggtggcatcaaagtaattggaagagcccccgtcgctgctaaccggtggcggacgccgatggcgcccaagagcgtcgcagctagctggtaccgcgcgccaccacttctactgctcccggcgccagcgtcgatagactccggcgggcggaaaggctga

SEQ ID NO: 62095 - DNA, 1764 bp, Oryza sativa
  Clone ID: PAT_MRT4530_63463C.1
atggcggccttcttgcgaacgctgcaccggcgaagaacgcgcaatgccgccgccgccgcgttcttggctctcgccgtcgtcgtcgtcgtcttcttcttgtccgtgttcgtcgccacgcggaatgaggctgacatcttcttcagtggcgtcgcggcggcgagctcgtcgtcgccggattcctcgtccggtgggtgcagggagctgcaggcgctcgacggcgatggcgcgaggtgccggtatctgcgggcgcacgcgccgtgcgcgccggtggggtacgtggactacctccggctgctgtactgcgggttcgggcgggcgccatggctgggctacgcggcgctcgcgctgtggctgctcgtgctcttctacctcctcggcgacacggcgtcggcctacttctgcgcctcgctggaggggctctccgccgtgctccgcctgccgccggcgatcgccggcgtcacgctgctgtcgctcgggaacggcgcgcccgacgtgctctctagcgtcgtggcgttcgccgcgggggcacgcggcggcgacggcggcggcggcggaggggaggatgccggggatgttggcctcagcggcgtgctcggtggcgcgctgttcgtgtccaccgtcgtcgccggcgtggtcgctatcgtcgccgggcgtcgcggtggtggcgagccggtgatcatcgagcggcgcgggttcgtgcgcgacgtgtgcttcctcctcgtggcgctctgctacctcctcgccgtgctgctcaccggcgccgtcaccgtctggtccgccgcgtcgttcctctccctctacgccggctacgtcctcctcgtctggacctcgcactgctgcgccaacgcctccgacgaactcgaagtggacgacaccaagcagcccacctccgacctcgccgcgccgctcctcgtcgtcgacgacgacgacgcgtcaccgcctccactccccgtctcctcctcctccaagcccacctccgcgccgagaacgttcgcgcgccgcctcgtcgacctcctccactcgccgctctacctcccgcgacgcctcaccatcccggacatcgcggcgcaccggtggtcgaagcccaccgcggtggccaccgcgctcctctccccgctcctcctcgccgccaccaccgcgcccaccaccacagcgaccaccctcctcgccgccacgctcgcgggcgccctcctcgccgccgccgcggcggccaccacggacgccgcgtccccgcccaagagccgctcggcccgcctcccgtggctcgccggcgggttcctgatgtcggtgctctggtcgtacgtgctcgcgcgggagctcgtcgcgctgctggtctccatcggcgtggcggccggcgtggaggccggcgtgctgggcgcgacggtgctggcgtgggggaactcgctgggcgacctggtggcggacgtggcgctggcgacgcggcgcggcgacggcggcgccggggcgcagacggcggtggcggggtgctacgcggcgccggcgttcaacacggtggtggggctggggctgtcgctgacggtggcggccggggcgcggcacccggaggcgtacgcggtggagggcggggcggcggtgtacgtggcggtggggttcctggcggcggcgctggtgtgggcggtggcggtgctgccggcgagggggatgaggctggacgcggtgctcggggtgggcctcctcgtcatctacttcgtcttcctctgcgtcagcctcgccattctcacgccattgccttcaccacattaa

SEQ ID NO: 62096 - DNA, 207 bp, Oryza sativa
  Clone ID: PAT_MRT4530_63464C.1
atggatgctccgcacgtaacgaggcagtggcgtacaccccccacatcacagcgtttcgcgcgcgatccgacggccgagagcagcgtgaaattggagcttgggcaggccgtctggctggtggcgcgtagcgacgtggatagcagcggaatcgaacacgcagcctcaaaacgctctcagcgcggcaactccagggaggttttaatctag

SEQ ID NO: 62097 - DNA, 1110 bp, Oryza sativa
  Clone ID: PAT_MRT4530_63465C.1
atggcgagcaagcaccagctggggcagcaggaggcgatgcaggaggaggactacatcgacatggacctgacgagcgccgccgcggcgacggcgccgggtgagttcgagttcgacttccacatgtcggggccgctgggcggcggcggcgcccggtgggagcaggagccgctggcgtcgccggcggacgagctgttctacaaggggaagctgctgccgctgcacctgccgccgcggatacagatggtggaggagctgctcgacgggcgcgtcgtcgtcggcggcgccgggcggcggcagctcgccataagcacggcgccggcgacgccgtacgactcgtgcaccgcgtcgccggcgaactcgtgctacgccagcggggagctcaacgtggaggagtacttccaggagtacgcggccaggctcgccgacgccgccgcggcggcgtgcgagaagaagccgtggtcgcggaagctcaggttcatgaggcagctcaacctcggcctcaagctcaaggcctccaaggcctacatcaagacgatcttcgccgccaaaccggcgagctccggcgacgacgacgacaaggacgccattcttggcgcgacgagagaaaccaaagaactctcccatggtggccaccaccaccacagagcatggaggaggaacccgttcggccagatgagaagcaacaggtgcatcgcctcctcacagagcggcggcggccgtggttcggtcggaggagggaagcacaaagagcgcgaccacggcggccacaggaggtccttctccagcgtcatcgtccggtactcgacgtcgaacaagacgtcccctgcgccgcagtcgtcgtcgtgctcctcctcctcgtcggtgcggacgtcgagcgagtccgacggcggcgcggcggcgccggcgctgcggaggagcagcagcgcgagctcggaggtggagaacccgatccaggggctgatcgcctactgcaagaggtcgcagcagctggcgtcggtgaggaagagcgccagcgacgccggcttccggttcctctcgtcggcggcgtccaagatcgccgccgcggaatccgacggcccggaagagctcgtcgagatttgcagaggttga

SEQ ID NO: 62098 - DNA, 1328 bp, Oryza sativa
  Clone ID: PAT_MRT4530_63466C.1
gactggaaggcatcaggaagacaggaactagagctcaccaccgatctcacgtcagacagcagcctcctacttggatgcttggaccagctagttttcctgttcaattttaacaaaaaaatttgggacgtcattcagcatgaccagatgaatttatttagtgatttccacaatagcagtcttccaatttttagactaaatttttggatgattattctagttctgaaagttcatgaagcaaatcgaatccaataatacagaccgatatgcttattaaattcatctataagatattcactaaggtggctacaaaccgaattagttcggtagccgaccatttagtaaatccaacccaaacaactttcatccatggatggaacattttagatggagtcgtcatcagacatgaaacagttcgtgaattacataggaaaaagttgagttacaacggtgatatttaaaattgacttcaaaaaggcatattaaatggtctttcttgctacaaattatatggatgaaaggtttttcaccaaattggatctcttggattgaatccttcatttccaggggaagcgtggcagtcaaagcaaatgataacattggatcttttttccggactaaaaagaggcttcagcaaggagaccctctctccccaatcgttttcatttttgtcgttgatgtgctagccactcttgtaaacagggccaaaacacacgggcaaattaatggtttaattccacatttgattgatgggggatcgtcaacactacaaaatgccaatgacacaatgctttttacgaatgaccttgagaaatcttagaatatgaagtccgtgcttctaacttttgagcagttgtcgaggcttaagatcaattttcataaaagtgacctgcattattttggtgaagcgattgaatatggagatcagtacaactggatatttggttgctaggttggcaactttttccattttgttatcttggtactacgattcattgtaggaatttaagaaatgtggattggaaagaagaaattgaaagattcgagaagaaattgagtagctgaaaataaaaacttctttcgttggacggacgacttacactaatttacttgatacttagcaatctcccaatgcgtatgatgtcattccttgcaatccctagtaggatacttaagaaacttgctcaccttcgatctaggttttattggcaagggaatagacataagaataaatactgacttgctaagtgggacatcacttgtcgtcccaaaaatcaaggtgggctaagaagtcatgaccttgagataaagaatattgtgttgcttagcaa

SEQ ID NO: 62099 - DNA, 297 bp, Oryza sativa
  Clone ID: PAT_MRT4530_63467C.1
atgatggtgcgtggagcatcggacgaggatttgattggagatagtggggccattgtccagcgaagagggcaccacctcggcgcactccgcttcaacgcggcctccacgctcttcctcccgctcgtctccaacaccgtctccgccgccgccaagtgggatgccgcgcgtgtcccgctcctcttcgcctggactgtcttcctccagatgctgcggaacaccatcgacaccgcccgcttgtcctcatccacgagcagcaatggcaacggcagtagcaaattcaggccctccgttgagtag

SEQ ID NO: 62100 - DNA, 330 bp, Oryza sativa
  Clone ID: PAT_MRT4530_63468C.1
atgcagctcaacccgaaagcaagaactcgtcgaaacaaaactaaagcaaaagggtggcgatgcgccgaaatagtattgaacgtgactctatccatgtgcggcaatcaccttgaagcaccttgatccaacccgacatcacacatcaagttgtattgtcgggatcggctacatcggcttacctagcccgactcagactcagccgatcttttcgtagccgatctggactccagccgattcatgctctgttttcgaactcgatctccgcctccaactttgctttgatctgatctgatcttctttcccaatgccgatgttaccaaatttggttgt

SEQ ID NO: 62101 - DNA, 1206 bp, Oryza sativa
  Clone ID: PAT_MRT4530_63469C.1
atggaactgaacaagcaactggtcaggattcaggaggacaaggaaaaagcatgtacacaaccaaaatcgtgcggacatttttcctacgatatgtcgattgatcgacgcgtacatcccaccaaaggtttccggccggacggacgcagcagctcctaccgccaccggtccggccacccggcgctccgcctcttcgtctgggcggcctccatgctcttcctcctactcgtctcctacgttgtctccgccgccgccaagtgggacgccgcgcgcgtcccgctgctcttcgcctggattgtcttcctccagatgctgcagaacaccatcgacactacccgctcgtccttgtccacgatcggcaatggcagcggcaatagcaagttcaggccgacggaccgggtaggcgttaaggccgacggcgaacgagttcttggcgagctcggcggcgacgagccggtggacgagcttggcgaggttgagcaccccggacaagcgggcggtgtcgatggtgttccgcagcatctggaggaagacagtccaggcgaagaggagcgggacacgcgcggcatcccacttggcggcggcggagacggtgttggagacgagcgggaggaagagcgtggaggccgcctagacgaagaggcgaagcaccgggtggccggagcggcggcggtaggagctgagcatgatgaggagggcaatagccacgtaggacaaaaccgggatcaaaaccgccgagggacctattgtgacccgttttggtatagcaaccaccgtgctggtgcggccggcgaggaatgcagcccactgatatacacgccccactaccgtccctcgcctcgtcgggatgctccacaacagaggtcgtcgtctccaactgcgtatcccctttccaccgacagactcactagctaccacgacatcgacaacgtacgggagtcatacgttgaagcggagtgcgccgaggtggtgccctcttcgctggacaatggccccactatctccaatcaaatcctcgtccgatgctccacgcaccatcatcgacgccccctcgggcgccgccgcttgccggcgcaaccacctcctacttcttcccaaagcctactagtcccgctctacaagcgcgcctgcaagaaacaccactacatgaaacgctgccaccaccagcgcccagctccgtccggctcgtcatcggtgatgcaggccccc

SEQ ID NO: 62102 - DNA, 2022 bp, Oryza sativa
  Clone ID: PAT_MRT4530_6346C.1
gagatgacactgcagatggagccgccgccgccgccgccgaggcggtcggtgtcgacgagctgcgacctgcacccgggggagacgttcacgggcttctgcgccgcgtgcctccgcgagcgcctcgcggggctcgaggcgtccaccgccgccgcggccgccgcgccgggccgcaggtccacctccgccatccgctcgctcttctccaggccattcgtcgccgccggcggtgccgacgtcgacggcggcggcggcggcgcggtcccgtcgggctccagcgccgcggtcccggacctccgacgatgcaagtcgttctcctgcggccgcggcggcgacgtgctcgccggtggctgcggggacgagccgcagcggcggtcgtgcgacgtgcgcgggaggagcacgctctgggcgctgttccaccaggacgaccgcgagcgcgtcccgtcctcagccgcggcagcggcgctcgcctctgaagtacaacctcagccgccgccgccgccgccgccgtgcgttcctgaggtgttcctggaggaggagatagctatggctgaggagtctgacgagattactccagtggtggagccaatcttggtggtggacacctccggggagatggaaacggaagccaatggtggacgggaggccaaggccatgaaggaccacatagatctagagtgttcgcaggccaagaagccgcagcccaaggacctgaaggaaatcgccgggagcttctggctcgccgcctcggtgttcagcaagaagtggcagaagtggagacgaaagcagaagctcaagaagcaggacgccgctggcagcaaggcagcagccgcagcaatgccgccgccggagaagccctccaagccctcgttcctccggcggagtcgcctccgtggagaagcctgctcggagttcgccggaggtcggcgttcgtgcgacactgacccaaggttctccctcgatgccggccgaatgtccgtcgacgatgtaggcttctcctgggacgagccccgcgcgtcgtgggacggctacctgttcggcgccggcaccggcattggcctcggccgcgcgcccccgccgctctcccgcctgccgcccattctctccgcgatggaggactccccagccggcatcgtcgagcgttccgacggccaaatcccggtggaggacgactcccagccggagcccgatcccgacgccgacaccccgggcggctcggtgcagacccgagactattacgacacgtcgtcgtcaagccggaggcggcggagcctggagcggaccagctcggtgcggaggccgtcattcgaagtcaccgacgcaaagccagtgctgccggcggcggccgccataacaagcgtcaaagattcgccgctaattgggagctcagagttctaccacttccagcatgccgaggacctgctcgaacaccaccggttcagcaccagctccctcatcgaagacttccccatgagcctggacgccgcgttcccgggccccgacaagaagccccggaggtggcgcaaggcgtggagcctctggggcctgatacaccgccgcgccgccggccgcaggggcggcgcgtccgacgtcgcggacagggccttctcggagccgtggccggagctgcgcgtccgcgggtgcaacgccaggatgcagcggtgcaacagcaacgccagcgcgcggagctctttcagcagcaacagcggcggcctcggcagctcgaggcgcagctacgtcgacggcaacggcaacgtcgtcaagcggcggcgggaggagtgcgccctggagcgcaaccgcagcgcgcgctactcgccggggcacgctgacaacggcatgctgcggttctacctcacgccgatgcggagcggcggagggagcgacggggggcgcgcgagggtggccgcacttgtggaagtcgacgccggcggtgcagttgccggtgtccctgtcgtacaagtgctcctcgtacaagtgccgcttaggcaatctctgcctccgccgccggactcccaggcaactgag

SEQ ID NO: 62103 - DNA, 309 bp, Oryza sativa
  Clone ID: PAT_MRT4530_63470C.1
cctctatttcgggcgccctttttttttttttggtggtgaaaaggatactgcgctcaaatttaacaacgtaaaatgtgtacgttctagatgtgcatagcagccgacatacatcatttacagaaaatgaaccgtacaggtttaaaaccaaaatctagcctgaagttctgaatcgtatgcatttttagtgacctactctagattccaaagatgcaacacagccatccctgggggtataactgggatgcaggaacatgaacgtgcctcagctacacatgatatagcggcccttgtcggatgacatatattgaa

SEQ ID NO: 62104 - DNA, 669 bp, Oryza sativa
  Clone ID: PAT_MRT4530_63471C.1
ggctgcaggcaaccactctctcgctcgctagctcatcgctcaccggccggttgagatggcggcggagggcaatgcgtcgtcgtcgtcgacggcgacgggaagggggtgcgggctggcgctggggaggttggtgaggaagctgaggaggcagagcaggatgatgctgtccacggcgacgtcgtcgcggccgccggcggcggcgaggtgccagtacgacccgctcagctacgcgcgcaacttcgaccggagtggcctcggcgacgacggcggcgacgtctccgcgcagctctaccaccgctacaccttcgcctcccgcttcgttctctcctcttcgtccacggccgctcgccggcagccgcaataggggccgagaccgatgctagctgaggcacgcatggccggcctgcgcgtgccagtgctgcgcgtagctaagctagctagcttagctctagccattagaggtagatgcactcttgttcttcatcctgcagtgttgttaattaattagtgtgttcatatgaggagggagtggtggttgtaagggatttcttccatggctctctccattggccgagatgatggtttcgatctctcgtgctgatttcttggaaatccatgcacattattcctgatataaatcgtcccattaattccttttttcctcgtgcc

SEQ ID NO: 62105 - DNA, 2673 bp, Oryza sativa
  Clone ID: PAT_MRT4530_63472C.1
cggcacgagggagaactagtctcgagtttttttttttttttttttttttttttttttttttgtttttttgtaaattaggatgtacttcatcctaaacaagtccagcattcgatcgatggatacaacagtcatcagtcagggcggcgacttgtacatgatgtcaatttacttgagcagcttagtacaaactgctccggaagattcacgattttctgatcctaaattaaacttctttttacttcttgtactttcttggtgtcacagcgtctttctacgcattgcaaagaaaagttcgacttactgaaccactggagatagtctgatgacatcccacgcgaccctcatcacaccaccgttccttgattctgcctcttggaatgttcttcctgatgcttccgagggatgaggtagctcccgccatttctcaatcttgagctcaataacatcaacgatgcaaacgcgagtatctgtcagggccttcccttgcagtctcccctcaacttggaagatctttcccctgccaacctccttcccatcattatcaatgagcgaaacaagacggccaggttcaaatgagaatgatcttgtgaaagggcggctaagcatgatattttgattgaattctgcctgtgatgttgtctcattgccatctgggctcacaaatctgctgcccttggatatgcctagagcactcatgaccctcgcaggtggcaagtagctctcctcgccagcactttctgaggagtcacagtggtggggagtagctggcgtagatggcttatctgcgttctcaccctcagatagtactcctctttctttcgcaatacgagcaagcttagcttttctgttgttcagccaattctttagctgagatgacgtaatctccgagccctgcccacttaacttctctgaccatgcctgcagtaaagcagcattcttatgcatctcaggctcatcaataagagccttctcgatttcgtttatttgcctatcattcataatggttcgcttccttctcttaggttgtctctcatcatacatgtgagtgtctcctttctcatcatcctgaagaccactttcttttctatctggtgttttgaaatggtccatactgctggatgcaggatcaagatccattttgcagcgcagggatcctgtacttgtactggtacctccccctagaaagcctgaactagttctcgccacaccaagatggactaagtcctggccgactgaattctgcaggaacccaccatttaaagcgacagtgcttctaggagtctcatccctggcatttccctcttgctttgttgagggtgttggtgcaggctcttccatgtttgttggtgtaggctcttccatgttcttcggaaggttatttatactggaatctggaacaacagtacttggtatcaagggatgctgcagtggcttaaagtcttccttgctttctgatgacggatcaatctttactgcctgggatgtactctgtccaacatgtgatttacaccaagtttgtaacttataagcaaattcacttaacaattgcacatcttcctcgtttaacaagttattaggaattaacgatctagcatactcagacaaagatccagcagctgccagtgccagctcagctgcaccaaatggatcataatcaagattagcgtcttcttctatcactggcagattaacagagcaccagtttgagacaaactcatcatgaggaatagccaaaatttgggtcagaaatggaatagtattagttataaatgaagatctgaagtttgaatcatcagaaaagacatcaactagacgcaacgcactgataagcacagaacccatagggtaactcttatcgtgagaatccaaggtaagtttttgttttcttccaaacgcagtcttcagcaaatcaagaacctctagtgccaaggtttgccctagttgcatactctttggtgaagtggcgacttcatcaaggtaagaaacagtttcagcttcacaaagttggagcaaaatagaaagaatcttagccttcaatctggacatggaagcagcaatatcaattgatcccttcagacactctggaacacctaacttcaatatagatcgagagagtgacagaatacctccattcctagagagttcatcatcatgcaggctatcaaaggcaacatccataaagatatcaacctttggatgtgcaagcagaatatgaacaagttcatgccactgagatgaaaagtaacttgtcaacagatgaagactggctgctacaagtgatgagtgtataaaaggagaaacaccaagatgattttccttcttccagtgggaaagaatagatagcacaaaaaatatcaggtccatgacttgttcagataatttcacatcatcgagaagaacctgctccagcctagtgtggcgagctgatagctcagacaaactatgcaagaagcgcataccacggaggacatacgctaaatctgaacctctttcaagttccaaacatacagcaagaaggtgaagaggaagcgaggacacaagcttttccatgtccacctgctttgtaccaccatcttctgtcttctcctgcaagacaaagttctctgactccttcagcatctctccaagttctctagaagttagcccactgagctcctcaataactgacaccat

SEQ ID NO: 62106 - DNA, 700 bp, Oryza sativa
  unsure (1)..(700): unsure at all n locations
  Clone ID: PAT_MRT4530_63473C.1
tttttttttttttttttagacnaatagcaaaactgagaacaatcaatatcacaacatgggggagggtcaccaaaccatgcaaaactttaaacagaatctgtgctacagtgtcaacgagtaaaaacatctgaaacaaaattcaattggacgttgtgctctactatccaagggcttcaatgatgaatcagttgtcacttctgggatttcttttgttgaatcaccttctctcgaggaaaaattccccactcagttagcttcttacatatatcagaaagtgaaacaaagcatgaaaaacattccttaccacctccttgaagtagaccaacaaaattggctctgcaattaagcaacggtgctcctgagctaccctctgctaccatcatatccacctcaattaaattcatattatagccatactcattggtgttactgacatcgtcatagtgtctggaaggatgtgatatgcgccctacagatgttgccctgttcatacaaggcggccacgagatcatcaccacttactctagcgagcacggcaagttctggcttgcaaccaatggaggatgttggaatctgcattgcttccctttcagatttaggagttttgatttgtccacgagaaccaacaagatatccttcttgcaatccacacgggtgacaatggcttcagtaaattttctttctccgcccaaaccgttgt

SEQ ID NO: 62107 - DNA, 325 bp, Oryza sativa
  Clone ID: PAT_MRT4530_63474C.1
ctgccttatcatagtgggagagacgcatcctgtggaagaagagatgatagaattccacatgatcaagtcatgatgaatgaaagtgcttttatggccttgtagctggatacatgatcccaggcttatagctcccttgaaacgatacttcgatgcttccgcccgccgtgaaaggtccaccagtagtagtttactgctccaattgttgctcatttttaagttaaactgggatcagctgttgttctttttttggcctgataccgaatactctcaaaccagtatcgaaccttgtttacattgtgtgagctcatatttgaatgtgttcgtg

SEQ ID NO: 62108 - DNA, 2637 bp, Oryza sativa
  Clone ID: PAT_MRT4530_63475C.1
atgccatcccgaaaacgggattcgctaaaatgccaggatgaagcgcgccgcactcgccactttgccattttcctccttttgctcattttcgaaatgattttcccttctatgcgagttgacctgacgaaattgcccctgcggtcgggtagaaaggggattgagatccagaggctcgaggaggagcctgaacgtagtttagatgttgtagttggtgatgcgggagcggtagatgctgatgcaggagttgaaaccattttctatgtcgcatctgatggagttgtcgaaccagcgccacctcatgggccagctgttgatgcacctcctgctgtggattgggatagcctagaggttttggcccagaatgaggaagaagggaggctagaaatagtggatgatgacaagttttatgagttgttgggattgagggctgaggatgagcaagctgataggaataggcaggctgctggtggagaagcagccccaaatgcagctcaaaatgttgaaggaggagaccctgatgtcaatgttgctggagtaggaggcccagatgacatggatgctgcacttccagtggatgattcaattcctggtgaaaatgtgatggcatatgaccctgacaacccttgcatggatcttggaactgcataccccagcatggaggagtttagattggcaatgagacagtttgctattaacaacgaatttgaattggatgtggtgaagactgacccaacaagatatataggaggttgtaaagtggatggttgtgtttggcatattgttggaagtaggcaggctgacttgaagacaattaaggtgactgtgttaacagattttcatacctgtacatctagcagcagaaggaggaccactacaccaactaccaaatgggttgcttcaaaggctgtgaagatcttaaagactaatccaggtatgggccctaaaagcttgatgataaggttgcaagaagatcacaagtgtacaattaagtatgacacagtttgcaagggtagacagagggctttgttagagttgtatgggtcatgggaagaaagcttccacatgttgtataggtggagagcacaggtcttaaggacttgtcctggtagtgttgtagagattggcaccaaggagccttgcatagatggtttcttggagggttgcagaccatatattagtatagattccactgctctcaatggaagttggaatggtcatatggctgctgcaacagatgctgagactgaggataactgggtatggttcatggaacaattgaagacagctataggagatgttgatcccttagcaatttgtactgatgcatgtaaagggctagagaaagctgtgcataatgtatttgaaaaagctgagcagagggagtgtttttggcacctaatgaaaaattttgttaaaagatttggtagtgatggccactcccatatgtacccaactgctagaacctataggaaaacagtgtggcaagaacacatgaaacatgtaatatcatgtcctggtgtgctagagtggcttgagacctaccatcctttaatgtggatgagaagtgcattcaaccctgaaatcaagtgtgattatgtcaccaacaaccttgcagagagcttcaataactggattaaggattataaggacctgcctgtctgtgagttagctgacaagtatagagaaaaagtgatggtgctatggaataagagaaggaggatagcagagaggatgacagggaaaattttacctgctgtcaacaagcaactggtagcaatgacaaggggattaggtcacctctcagttgttaaagctgatagtttcactgctgaagttgttgataacagcagcatacatgggaagtacattgtgaaagcatgcctgcaatattgctcttgtgaggagtggcagcatacagggaagccctgccagcatgcactggccttgattacttcacagcaaagcagagatgtgcacattgaagattttgttgataggtactacactgtgcagatgtttaggaatgcatataagagggtaattgagcctttaggtgacagatcacactggccagaggttgatttaccatgggtgttgggtgcaccactaccaaggaagacatctggtagaaacagaaaacttaggttcaagggttgtcttgaaggtgggggcaagaagaaagctaaggttatagctgaaccaactgctactgataagggcaagaggcaactgcttagaggcaagaggaggtgcaaaggttgtcgagagttgggtcatacacaaaacagctacaaatgtgcactcaatggaactaagaaaaggaaaaggaagcctagaaggaatactaccaagtatggccacacatctgaaattccaagcccaagtaggcctacagtggacacaatattgcaagacaaccctggaaggttgacaagaagcagtaggttggcacagctgatgaatggaccagggcctagctcccagcccacagtgcaagctggacctagctcccagcccacaatgcaaaccacatcaagctcccagcccacagtgcaagcaggatcaagcaagcagcccacaatggttccagaaccaccaagaagatctccaaggaaaaagcttacaccaaagaactga

SEQ ID NO: 62109 - DNA, 987 bp, Oryza sativa
  Clone ID: PAT_MRT4530_63476C.1
atgtcaaagtttgtgcttgattggtaccttcagaagaagacgcagatggcacccaagacgacatgcaagatgatgcagcaccagtattgcacgacggtgctgcatcctggagttgagccatgtctcgcggttgatcaggtgccccgcgtgtttaggctcctcagggagatggcagagcgtgcaattcttgttaaaccaattccattcttcgatcatatacaagctctctttggtgagtggtcagtggatgctgaccctgtgaccgacccaattgaagccgctaacattaacggtgatgacatggaaatcctcgatccgttgaacatgatgacaaattgtgcagatgacaaagaccctgatggggcacacttggacaagtttattttggaggatgaagatgactgtcatgagccatctggatcctttgctgagagcacaatggctgctctcaagcctggattgaagaagtgcaaagtagtcagcagaacaaaaacaaccccaaacccaaaaccgcaggcacccgtgccacatgatggcaggaaggcggatatggtaaagaagtttgaagtgcatcgaagctttttcatgaacatgggtagggagtaccttgaagcttgggcccataagttcttatctggagtgggccccacccccgcctcctcttctctcacgccgcctccgcttcgtctcctcgccggagttgagccgcgggatccgtcggagatggcgaccggagaagcggcggcggcggcggcgtcgccgccggagctggcgtcgttcctggcgatcgggcttgaccagcgcacggcggagaacgccctcgccaaccgcaaggtcaccgccaacctcaccgccgtcatcgccgaggctggtgttagtgggtgtgacaaatctgtggggaatcttctctacactgtcgcgacgaagtatccggcgaatgccctggtgcatcgtcccgttgtcatccaatacattgtgtcgtcaaag

SEQ ID NO: 62110 - DNA, 2085 bp, Oryza sativa
  Clone ID: PAT_MRT4530_63477C.1
atggacattaagccacgttcaaaactgggcttcgccggaatgccatcccgaaaacgggattcgctaaaatgccaggatgaagcgcgccgcactcgccactttgccattttcctccttttgctcattttcgaaatgattttcccttctatgcgagttgacatgacgaaattgcccctgcggtcgggtagaaaggggatcgagatccagaggctcgaggaggagcctgagcgtagtttagatgttgtagttggtgatgcgggagcggtagatgctgatgcaggagttgaaaccattttctatgtcgcatctgatggagttgtcgaaacagcgccacctcaagggccagctgttgatgcacctcctgcagtggattgggatagcctagaggttttggcccaaaatgaggaagaagggaggctagaaatagtggatgatgacaagttttatgagttgttgggattgagggctgaggatgagcaagctgataggaataggcaggctgctggtggagaagcagccccaaatgcagctcaaaatgttgaaggaggagcccctgatgtcaatgttgctggagtaggaggcccagatgacatggatgctgcacttccagtggatgattcaattcctggtgaaaatgtgatggcatatgaccctgacaacccttgcatggatcttggaactgcataccccagcatggaggagtttagattggcaatgagacagtttgctattaacaaagaatttgaattggatgtggtgaagactgacccaacaagatatataggaggttgtaaagtggatggttgtgtttggcatattgttggaagtaggcaggctgacttgaagacaattaaggtgactgtgttgacagattttcatacctgtacatctagcagcagaaggaggaccactacaccaactaccaaatgggttgcttcaaaggctgtgaagatcttaaagactaatccaggtatgggccctaaaagcttgatgataaggttgcaagaggatcacaagtgtacaattaagtatgacacagtttgtaagggtagacagagagctttgttagagttgtatgggtcatgggaagaaagcttccacatgttgtataggtggagagcacaggtcttaaggacttgtcctggtagtgttgtagagattggcaccaaggaggttgatggccgtgtgcacttccatagatttttttgtgcccttaagccttggatagatggtttcttagagggttgcagaccatatattagtatagattccactgctctcaatggaagttggaatggtcatatggctgctgcaacaggtatagatggacacaattggatgtaccccttagcatttggtttcatagatgctgagactgaggataactgggtatggttcatgcaacaattgaagacagctataggagatgttgatcccttagcaatttgtactgatgcatgtaaagggctagagaaagctgtgcatgatgtatttaaaaaagctgagcagagggagtgtttttggcacctaatgaaaaattttgttaaaagatttggtagtgatggccactcccatatgtacccagctgctagaacctataggaaaacagtgtggcaagaacacatgaaacatgagtggcagcatacagggaagccctgccagcatatactggctttgattacttcacagcagagcagagatgtgcacattgaagattttgttgataggtactacactgtgcagatgtttaggaatgcatataagagggtaattgagcctttaggtgacagatcacactggccagaggttgatttaccatgggtcttgggtgcaccactaccaaggaagacatctggtagaaacagaaaacttaggttcaagagttgtcttgaaggtggaggcaagaagaaagctaaggttacagctgaaccaactgctgctgataagggcaagaggcaactgcttagaggaaataggaggaaaaggaagcctagaaggaatactaccaagtatggccacacatctgaaattccaggaccaccaagaagatctccaaggaagaagcagcctatgcatttgcaatga

SEQ ID NO: 62111 - DNA, 488 bp, Oryza sativa
  Clone ID: PAT_MRT4530_63478C.1
ccatggttttcttggagcccataacccctagaaaaacttatcccaaaaatggtcctttttggggcgccagagtggctggcgccgtcgttcaacaggacggcgctagcctctttggcgccgttcccctgccgacgtggcggggcgatgctgaggaactcacaggaaccaaccatgtaaaaaataaactcaaacggatgaaatatgtggcatgtggaattttccaaagctccaccgaaaaacttctctcctcaaaaacacaatcttgcaagcggaatttggaggttttaatatcgccaaagccggggagaatcggatgtaacattttctgtagatgtccgtgcatatattatttgactgattccgagtccagaaacaggaatggaggcggcggcgccagccatgctggcgccctcctcctgccacgtcggttcgcgtgcgccacggtggcaggaggacggcgccagagaggctggcgccgtcccagggag

SEQ ID NO: 62112 - DNA, 300 bp, Oryza sativa
  Clone ID: PAT_MRT4530_63479C.1
gcagagcccgagccagccgtgctcgtgcacagttgccgccgcctctcctcccaaatctggcctccacttccccggcgccgaagacctttagaagtacctcgccaacgtgaatccaagcttcgccgccgggggacggtggtccagccgcatctcgccgtcgcctcggccgtcgccctcctgtgccgccacctctctcggctccgcaaggtcaagagcaagcccggcagccggttcccttgcgtcgaagaccccgggaagcccgtcgttgcagtcaactcgaagttcgccatcgcgttttga

SEQ ID NO: 62113 - DNA, 2436 bp, Oryza sativa
  unsure (1)..(2436): unsure at all n locations
  Clone ID: PAT_MRT4530_6347C.1
ttaaggtactggtacgggctcagggccagcagccagagtgaaggggaggcgaggcgaggcgagccgtgtcaatgtccaagaaatgtgatggcgcgctccggtgaggcgactggttaggttagccgaggagggggaggaggcgaggcgaggcgagggcgagatgacactgcagatggagccgccgccgccgccgccgaggcggtcggtgtcgacgagctgcgacctgcacccgggggagacgttcacgggcttctgcgccgcgtgcctccgcgagcgcctcgcggggctcgaggcgtccaccgccgccgcggccgccgcgccgggccgcaggtccacctccgccatccgctcgctcttctccaggccattcgtcgccgccggcggtggcggcggcggcggcggcggcggcggcgcggtcccgtcgggctccagcgccgcggtcccggacctccgacgatgcaagtcgttctcctgcggccgcggcggagacgtgctcgccggtggctgcggggacgagccgcagcggcggtcgtgcgacgtgcgcgggaggagcacgctctgggcgctgttccaccaggacgaccgcgagcgcgtccgcgacggcacggcgttcggggcgttcccggcctcgtcctcagccgcggcagcggcgctcgcctctgaagtacaacctcagccgccgccgccgccgccgccgtgcgttcctgaggtgttcctggaggaggagatagctatggctgaggagtctgacgagattactccagtggtggagccaatcttggtggtggacacctccggggagatggaaacggaagccaatggtggacgggaggccaaggccatgaaggaccacatagatctagagtgttcgcaggccaagaagccgcagcccaaggacctgaaggaaatcgccgggagcttctggctcgccgcctcggtgttcagcaagaagtggcagaagtggagacgaaagcagaagctcaagaagcaggacgccgctggcagcaaggcagcagccgcagcaatgccgccgccggagaagccctccaagccctcgttcctccggcggagtcgcctccgtggagaagcctgctcggagttcgccggaggtcggcgttcgtgcgacactgacccaaggttctccctcgatgccggccgaatgtccgtcgacgatgtaggcttctcctgggacgagccccgcgcgtcgtgggacggctacctgttcggcgccggcaccggcattggcctcggccgcgcgcccccgccgctctcccgcctgccgcccattctctccgcgatggaggactccccagccggcatcgtcgagcgttccgacggccaaatcccggtggaggacgactcccagccggagcccgatcccgacgccgacaccccgggcggctcggtgcagacccgagactattacgacacgtcgtcgtcaagccggaggcggcggagcctggagcggaccagctcggtgcggaggccgtcattcgaagtcaccgacgcaaagccagtgctgccggcggcggccgccataacaagcgtcaaagattcgccgctaattgggagctcagagttctaccacttccagcatgccgaggacctgctcgaacaccaccggttcagcaccagctccctcatcgaagacttccccatgagcctggacgccgcgttcccgggccccgacaagaagccccggaggtggcgcaaggcgtggagcctctggggcctgatacaccgccgcgccgccggccgcaggggcggcgcgtccgacgtcgcggacagggccttctcggagccgtggccggagctgcgcgtccgcgggtgcaacgccaggatgcagcggtgcaacagcaacgccagcgcgcggagctctttcagcagcaacagcggcggcctcggcagctcgaggcgcagctacgtcgacggcaacggcaacgtcgtcaagcggcggcgggaggagtgcgccctggagcgcaaccgcagcgcgcgctactcgccggggcacgctgacaacggcatgctgcggttctacctcacgccgatgcggagcgccagcggccggcgcgccccggggggcttacccggggccaaaaggggggggcgggaaaacttaagggggggggaaaaaatcctttttcccccccccccgtttaaaaaatggggccccgggggtgggacccggaggggttgggggggtntttttttgggggggggcggggccccaccagtttgggggggggggccaaaaggggaaaaggggtataaacccaaaaaaaattttttttaaacccccccggggggccccccagggggaaatccccccgcccttttggggggggggggttttttaaaaaaaaggggggggggttttttttaaaaaaaaaacccccctttttagnnggggaaaaaaagaaaaaaggaaaaaacccc

SEQ ID NO: 62114 - DNA, 596 bp, Oryza sativa
  Clone ID: PAT_MRT4530_63480C.1
atataatcacatatccagattcgtggatttgtaaagctaggaatatctggcttccaaaaatcttgaatctagaattgtaccaaatatgatctcaatatctggatttttcacattttggtccttttgaaaaacttatttcgcaagtagacccctagaaaaacttatcctaaaaatggtcctttttggggcgccagagtggctggcgccgttgttcaacaggacggcgccagcctctttggcgtcgtccccctgccgacgtggcggggcgatgctgagtaactcacaggaaccaaccatgtaaaaaataaactcaaacagacgaaatatgtggcatatggaattttccaaagctccactgaaaaacttctctcctcgaaaacacaatcttgcaagcggaatttggaggtcgggggagaatcggatgtaactttttctgtagatgtccgtgcatatattatttgcctgattccgagtccagaaacaggaatggaggcggcggcgccagcatggctggcgccctcctcctgccacgtcggttcgcgtgtgccacggtggcaggaggacgacgccagagaggctggcgccgtcccattgga

SEQ ID NO: 62115 - DNA, 605 bp, Oryza sativa
  Clone ID: PAT_MRT4530_63481C.1
gcacgagggccacgagatggccgaggtgagggatcccctctctcccgatcagatcatgccgggggttgggggttctgatctgttctgcccgtgacgtgccttggttcgatttgaatccgtcgatcgcgcggtcagagtttggttgctttcgtgtggatctcttcggtgtggatggcacctcgatgtccgcgcctggtgctgagttcggggcgggcgtattgggttctgacgagcacttaggttctcctgtttctgcccgtgttagatggctgtttctggtgcccgctcgatccagtgttttggtcttattttcccgatccttctgtctgatctgagtgtctatacgttctaagattacgggattttgatgggtagagcgggctagatcactataaggatcacgctatgaatttccaacaattttttcgttgtgtgatgcttactagtccatcgttagggatgattttgtggattaggttcttctgttggctatatggttagcatttcatacttcatttcgggggcgggggagattggtccatttttggttgtgatgtttctgaagaatgattgtgggattactgaataatatctttggatgtttc

SEQ ID NO: 62116 - DNA, 397 bp, Oryza sativa
  Clone ID: PAT_MRT4530_63482C.1
ttttggtccaactggacggcgccagcctctctggcgtcgaccccctaccgacgtggcagggcgatgttgaggaactcacaagaaccaatcatataaaaaataaactcaaacggacgaaatatgtggcatgtggaattttccaaagctctaccgaaaaacttctctcctcgaaaacacaatcttgcaagcagaatttggaggttttagaatcgccgtacccgacaaagcggggagaatcggatgtaactttttctgtagatgtctgtggatatattatttgcctgattctgagtccggcggtgccagccattgtggcgccctcctcctgccacgtcggttcgcgtgtgccacggtggcaggaggatggcgccagagaagctggcgtcgtcccgttgga

SEQ ID NO: 62117 - DNA, 662 bp, Oryza sativa
  Clone ID: PAT_MRT4530_63483C.1
atttggaatcataatgctactatgtacatatactctgaggaatatttggaattttattcaaatataatccattttggtgcggggtcttatgcacgagacaaggatacgtcaaaaagctggatttttcacattttggtccttttaaaaaacttatttcgtaaatagacccctgaaaaaacttatcccaaaaatagtcctttttggggcgccagagtggctggcgccgtcgttcaacaggacggcgccagcctctttggcgccgtccccctgccgacgtggcggggtgatgctgaggaactcacaggaaccaaccatgtaaaaaataaactcaaacgaacgaaatatgtggcatgtggaattttccaaagctccaccgaaaaacttctctcctcgaaaacacaatcttgcaagcggaatttggaggttttaatatcgccgaacctggcatagcgagggagaattggatgtatcattttctgtagatgtccgtgcatatattatttgcctgattccgagtccagaaacaggaatagaggcggcggcgccagccatgctggcgccctcctccctggggcggcgccagcctcctcctgccacgtcggttcgcgtgcgccacggtggcaggaggacggcgccatcccgttggatgacggcgccagcca

SEQ ID NO: 62118 - DNA, 597 bp, Oryza sativa
  Clone ID: PAT_MRT4530_63484C.1
atagggaccaagggagctactctgatctatacccctgaggaccacgaaagggccctcgatgcagctccagcttctttacaacctagtctacctgtagtctggagggttcagggtctcagtgaaagacactctcatctgtaatcctggagattctgaaagggtcctgtcctgcaggttaatgggagatcctgaaggagggatggtgtggtatataaaacacaagagactcttttacattttaaaagtgggggaccaagaggcaccctgttttctctgaacaaaggcccctagactttagcccataggacttttattagggaaagtgacgtgtttaggttagtgagcaaaagcaggcatggggagtatcgaaactatctcttagtgagattatgggaggctacaagcaataaaagtcacaggggtatacatctaggatatagtgcagttgcctaaagaacaacatagttaatgtataaacgccttgttttattttgacaggagaccctatactttagaattctgctttggcaaacatgcttatctgactttcgccatcaccagcatttcttgacttattgtgcttttgtactaccaagt

SEQ ID NO: 62119 - DNA, 588 bp, Oryza sativa
  unsure (1)..(588): unsure at all n locations
  Clone ID: PAT_MRT4530_63485C.1
gtagcacgaggatgcacatgtggtgggttgacacccattggcgcgtagtcgatgcgagctagtgagatgccaagagtgttgtttaatagagatacgacatcctcaaacaaaaaataactggatttttcacattttggtccttttaaaaaacttatttcgtaaatagatccctgaaaaaacttatcctagaaatggtcctttttggacggcgccagcctntctggcgccgnccccctgccgacntggcggggcgatgctgaggaactcacaagaactgaccatataaaaaataaactcaaacgaacaaaatatgtggcctgtggaattttccaaagctctaccaaaaaacttctctcctcgaaaacacaatcttgcaagcaaaatttggaggttctaatatcgccgaacctggcaaagccgggaagaatcggatgtaactttttctgtagatgtccgtggatatattatttgcctgattccgagtccggcggcgctaaccattttggcgccctcctcctgccacgtcggttcgcgtgtgccacggtggcaggaggacggcgccaaagaggctggcgccgtcgtccactc

SEQ ID NO: 62120 - DNA, 174 bp, Oryza sativa
  Clone ID: PAT_MRT4530_63486C.1
atggcgttggagacaggaataagagtctatgaaaatgcaagccacggctgcagcggcggctgtgggggcgggctagatctccatggacgaccattgatggagcggcatgcggcggattgggcagcgacgtgcaggtcttgctcaaggccgctacagccaattccgccgcactga

SEQ ID NO: 62121 - DNA, 709 bp, Oryza sativa
  unsure (1)..(709): unsure at all n locations
  Clone ID: PAT_MRT4530_63487C.1
cctatatttaagtagataatccgagacaatatcaattattatagtagattatttgtttcgcattctaaaagttatgtttcttataactattgtactccttctttataccatttgtcctaactttttttattaagtccatttcttaagagtggaacccctagaaaaacttatcccaaaaattgtcctttttggggcgccagagtggctggcgccctcnattcaacaagacggcgccagcctttttagtgccgtccccctgtatacgtggcggggcgatgctgagaaactcataggaaccaaccatgtaaaaaataaactcaaacggacgaaatatgtggcatatggaattttccaaagctccaccgaaaaacttctctcctcgaaaacacaatcttgcaagcggaatttggaggttttaatatcgccgaacccagcaaagctggggagaatcggatgtaactttttctgtagatgtccatgcatatattatttgcctaattccgagtccagaaacaggaatagaggcggcggcgccagccatgctggcgccctcctccctggggcggcgccagcatggctggcgccctcctcctgccacgtcggttcgcgtgcgccccggtggcatggaggacggccnctctattctttctttacctccttccttctctgtttttacccattcatctcttctaccctccttgcttttctc

SEQ ID NO: 62122 - DNA, 580 bp, Oryza sativa
  Clone ID: PAT_MRT4530_63488C.1
tctttttttcttttttttcttttttttttcttttttttttttttttttttaaaactgaagggatgtgcttttaaatgtgctgaattgtttaccactgcaacagctgcagcgcgaatatttgccaactttgcatgcggcaaaaaaaactttaggcaaagttaggatcgcattacccacttctccccccttagcaagtaatagcccttctttcgggaaaaacttctggggtaactttacgggcatgagtcacaccaccttttcactttgttttgaccaactttttgatttttcttttaaaagctggagcacttaccctgctttttttatcagggaaaaatgattttttttttttttccgccttgcaaagctggggatccatgggaaccttgccaaaaaaagggacctcctttttctggcacatttttttagcaccaccctttttgttattaaacacctcactgtttgcgacaacagataaaagctctggggctttctccttgatgtagttcagcgcccactcggtggcatttgtttctcccgcctcacttggcttcacaaatttcatgtctgaaaatgcctg

SEQ ID NO: 62123 - DNA, 1500 bp, Oryza sativa
  unsure (1)..(1500): unsure at all n locations
  Clone ID: PAT_MRT4530_63489C.1
ctatctccgacttcggcggggtgattcttcatctccgatcttcggaaccgccttcttggcctctggtcgcgttcttgaggttgccccgccaggacctcgtgcgctccgaaacttctcgccgttcttgttgtactcgtgcattcttggattccggccgccttcttgccgccgatatgaacccttggacgccttctttgtcgtcgtggtcccgtcgatgctggggccgccgccgtcgaagaagccgtcgccgtggacgttgggggcgccgccgtcaccgtggacgctggggccgccgccgccgtggacgctggggccgccaccgtcgccaagaagcagtcgccgtggacgctggggccgccgccgtcgccaagaagccctcgccgtggacgctgcggccgccgccgtcgccaagaagccatcgccgtggacgctggggccgccgtcgtcgccaagaagccgtcgcggtggctgcctctccccgaaccggctggtcaccatcttcgcctcttgggtcggcagttcgacccgcgttgttgacgcatatgctatctcacggcctcaacacgtaaaaggaagtacagaattgggttcacatagtccgacccatcaaacgacacaatgttcaagcgtccaaccacgaaccaagaaacacaagaaaattccacggcaccgacgatcggcgctcagcgctgacactcattgagcgaaatgtgaacatgtaggtcctcgctgagcagggaacctgttaccgcaattgcggcaaacgaatggcaagatcagacgatggtgctctaaacgatagtggcgccacatgtcatccctcgtgaggcgtggtactgtcaccgtctcatcgtcgtcagaaagaacacacaccctgcacaagaatcggtgaccacgagcccacagagaaagcaccggtggtgctggtgccccacctggnnattnttcacanttntggtccttttaaaaaacttatttcgcaaatagacccctagaaaaacttatcctaaaaatggtcctttttggggcgccagagtggctggcgccgtcgtccaacaggacagtgccagcctctctggcgccgtccccctgccgacgtggcggggcgatgctgaggaactcacaggaatcaaccatgtaaaaaataaactcaaacggacgaaatatgtggtatgtggaattttccaaagttctaccgaaaaacttctctcctcgaaaacacaatcttgcaagcggaatttggaggttttaatatcgccgaacccggcaaagctagagagaatcggatgtaacattttctatagatgtccgtgcatatattatttgcctgattccgagtccagaaacaggaatggaggcggcggcgccagcatggctggcgccctcctcctgccacgtcggttcgcgtgcgccactgtggcaggaggacggcgccagcctctctggcgccgtcccgttggatgacggcgccagccactctggcgtccaaaaaaggaccat

SEQ ID NO: 62124 - DNA, 352 bp, Oryza sativa
  unsure (1)..(352): unsure at all n locations
  Clone ID: PAT_MRT4530_6348C.1
ttaaaaaatcacgaatacgaagtgcagcgacgtcgtcgcttcacaagcgcaagcaccggaccatctcccattatatgagttagaatactattacctacgaggtactgtgctctgaccacagaaacagacaacacgacggaaanttaatcattcacgttgacgttgatgtactggcttcaaagctgactgggcttgggcggcataaatggttttacttgccgcatgatttagtgatcctctcattctcatgccgagatgctgtgaagaaggtgcacgcttctctcttgtgctggcaaaagtgttgctggcagcacttcatttcacttcctcggacgcgtgggtcgacccggga

SEQ ID NO: 62125 - DNA, 1345 bp, Oryza sativa
  Clone ID: PAT_MRT4530_63490C.1
cttgttttaactgaagttgaacttcccttgatgtctgggttcctgctgctctccacgatcatggaacatgacgcatgcaagaatatccccgtcataatgatgtcttcaaatgattccgttagcatggttttcaaatgcatgctaaagggtgctgcagatttccttgttaagccaatacggaagaatgaattaaggaacttatggcagcatgtttggagaaaacaactgtccagcggtgttcttgatgtgcagcatactcaacaagaagataatcttacagaaaggcatgagcagaagaccggagtgacgaaagctgaacatgtgactgaaaatgttgtccacaagaacatggaatgcagtgaacaagaaagtgatgctcaaagttcatgtacaaggtcagaactggaggctgacagtaggcaaaccaacaatttactggaatataagcagccaatgggaaggcatttctccaagcctgaccacaagaacaccgagaaaaatggagggactaaaattcatgcatctaatgatggcaacttgattccacggagggaagaggatgcatcactgaggaggatgacatgttcaaatgatattaattgtgagaaagcttccagggatatggagctggttcatattattgacaatcagcagaagaataacacacatatggagatggatgttgcgagagcaaattcccgtgggaaatgatgacaagtgcttttccattccagcacaccagttagaactttctctcagaagatctgactacagtagattagagagccaggagaaaaatgaacgaagaacactgaaccactcaacttcatctccattttccttgtacaactgcaggacagcatcatctaccattaatgctggtgatgctcaggcatgcagcacctcggcaacacatatagatcttgaaaacaaaaatggagattccaaaactccctctcaagacaagagggaaacaaaccaacctcccattagagttgtaccatttcctgttcctgttggaggactaacatttgatgggcagccattctggaacggtgcacctgtggcatcccttttctatccacaatcagctcctcccatttggaatagcaaaacatctacctggcaagacgcaaccacacaagcaatttctctgcagcagaatggtccaaaagatacggatactaagcaggttgaaaatgtagaggaacaaactgctcggagtcatctaagtgctaatcggaaatggtacaactctaatgggaggttggtttgtttccctcttgtcttgagagggagttttggaatctctattatgcggacgcgtggtcgacggggattcgac

SEQ ID NO: 62126 - DNA, 663 bp, Oryza sativa
  Clone ID: PAT_MRT4530_63491C.1
tcgatctttttctagctaagtgaaagccatgcaacactagttggtagtctgtttgaactggaaacttcaagtctagaacgactgaacgagtaacatcccggcctagggcttaataggattaatagaatactcatatcaacaagttgcaacttcttttccggaagccaatctccaaagaactccagggttaagcgtgcttggcctggagcaatttgggatgggtgaccgaccgggaacccgggtgcacatgagtgaggtcaaagtgtgcagaaaagatatgagggcagtctatgacctatgaaagctatcagatactgaggaactcacaggaaccaaccatgtaaaaaataaactcaaacagacgaaatatgtggcatgtcaaattttccaaagctctaccgaaaaacttctctcctcgaaaacacaatcttgcaagcggaatttggaggttttaatatcgccgaacccagcaaagcagggagaatcggatgtaactttttctgtagatgtccgtgcatatattatttgcctgattccaagtccagaaacatgaatggaggcggcggcgccagccatgctggcgccctcctcctgccacgtcggttcgcgtgcaccacggtggcaggaggacggcgccgtcccgttggatgacggcgccagcca

SEQ ID NO: 62127 - DNA, 1710 bp, Oryza sativa
  Clone ID: PAT_MRT4530_63492C.1
atggggggtggagtggaggagaggaaggtggtggacttggaggacggggacggggaggaaggggaggatgcggcgccggtggcggcggggtcgagcagggagacgcggatgctgccgaggatgccggtgcgggtgctgctcgctgagggcgacgactccacgcgccacatcatctgcgcgctgctccgcaagtgcgggtatcgaggtgagcgtctgtgccgcacatccagcggtgttcttgatgtgcagcatactcaacaagaagataatcttacagaaaggcatgagcagaagaccggagtgacgaaagctgaacatgtgactgaaaatgttgtccacaagaacatggaatgcagtgaacaagaaagtgatgctcaagatcagaatacggtccacacgaacagtttgataaagcctattacggaatacttgtttgtttcaaggactgtcgttattatgctgagttcagatctgttcgctgttgttcgtggactgaattttggatcccctcttgcagagttcatgtacaagaatggtccaaaagatacggatactaagcaggttgaaaatgtagaggaacaaactgctcggagtcatctaagtgctaatcggaaacatctccgcattgaaattcctacagatgagccgcggcatgtttctccaaccaccggtgaaagtgggagcagcactgtgctggacagcgccagaaaaacgctcagtggcagtgtctgtgacagctcttccaaccacatgattgcccctactgaatcatcaaatgttgttcctgaaaatcctgatggtttacgccacctgagccaacgagaggctgcactgaacaagttccggcttaagaggaaagacaggtgctttgagaagaaggtgcgataccagagcaggaagctactagccgagcagcgaccgcgggttaaggcggaacgacggcggtccggcaagctggtgcgtgcgtacggcgacgaccgccgagcggctcttgcttcgccggctgggggcgcacccgagggcgacgcaaagccgtgccacgacgtccgcggggcaacgccaagccgacgcttcccgtcttcggcaaaggatggtggcggggtgctccaggacagcgcgcagggaacccgacacgactgcgaggaggtgaaggtgcggcggtgccgcttcctggaaagctccggtgtgctcatgggtttcaagtccgataagaaggcgcggttctgcgaggcccaccaccgggctcgccgcttccgccacctcgccacggcggccctcgccgtggccgcgctcgccgccgccgccgccgccgcgctcgtgctgtacctcgtccaccgccccgaaggcctggtagcacacgtgtcctaccgcgggaacccggtcatgccgccggccccgctcccgcccgtggcgcaggaccgcggcgcggacgtggcgatgtcgccgctgctcggcggtgcggccgtgccggtgtcgccagacgcggcgcgcgcgctggcggcggactgcgcggcgcggcgggtgcagctccggctcgtcgtcatgggcagggtcaagtacaggagcgggccgttcaggagcgggtggcgcgacctgtacgtgcggtgcaacgtcgtcgtcgggctgagcacggaggccgcggtggccggcggcggcggcggcggcgacgtgccgcttctcgagtacccccggtgcgccgtggatgcttga

SEQ ID NO: 62128 - DNA, 378 bp, Oryza sativa
  Clone ID: PAT_MRT4530_63493C.1
atgggagctaaagttggagctgtgccaaatatccgcgacagcttggagtggaacaaccaggccgatctgaaggcgacccggccggtggcgttgtatcatctccgattctctgacggcgccggccgccttgctaggcttaacatctcaacatggctcaccaaaattcatctcgaacatgcccagtgtgtcggctgcggctttggccgtgctttctccatcaaattgacgccgtctctggccggcacaggcttcacgtcggcgtccactgccgtgccgagggctccccggcgtaaccgttcgtacgcactcaacggcttgggagatgagatgtcagcagctgggcaaggaggcaaggcagggaacagctcactgctgtaa

SEQ ID NO: 62129 - DNA, 461 bp, Oryza sativa
  Clone ID: PAT_MRT4530_63494C.1
acccctagaaaaacttatcccaaaaatggtcctttttggggcgccagcctctttggcgccgtccccctgccgacgtggcggggcgatgctgaggaactcacaggaaccaaccatgtaaaaaataaactcaaacggacgaaatatgtggcatatggaattttccaaagctccaccgaaaaacttctttcctcgaaaacacaatcttgcaagcggaatttggaggttttaatatcgtcgaacccggcaaagcgggggagaatcggatgtaactttttctgtagatgtccgtgcatatattatttgcctgattccgagtccagaaacaggaatggaggcggcggcgccagccatgctggcgccctccttcctggggcggcgccagcctcctcctgccacgtcggttcgcgtgcgccacggtggcaggaggacggcgcgttgccatcctcttcgattgcaacgat

SEQ ID NO: 62130 - DNA, 657 bp, Oryza sativa
  Clone ID: PAT_MRT4530_63495C.1
atggacgtctccaggaaggcgcggttctgcgaggcccaccaccgggctcgccgcttccgccacctcgccacggcggccctcgccgtggccgcgctcgccgccgccgccgccgccgcgctcgtgctgtacctcgtctaccgccccgtgatgccgcaggcgtccgtgccgcgcgccgccgtgtaccgcctcgccctcgccaacgcctcctcctccgcgcacgcgctcgccgcgagcgtgcagttcacgctggtgctccacaaccccagcgacagggcgtcgctgctctacgacggcctcgtcgcctacgcgtcgtaccgcggggagccggtcatgccgccggcgccgctcccgcccgtggcgcaggaccgcggcgcggacgtggcgatgtcgccgctgctcggcggtgcggccgtgccggtgtcgcccgacgcggcgcgcgcgctggcggcggactgcgcggcgcggcgggtgcagctccggctcgtcgtcatgggcagggtcaagtacaggagcgggccgttcaggagcgggtggcgcgacctgtacgtgcggtgcaacgtcgtcgtcgggctgagcacggaggccgcggtggccggcggcggcggcggcggcgacgtgccgcttctcgagtacccccggtgcgccgtggatgcttga

SEQ ID NO: 62131 - DNA, 652 bp, Oryza sativa
  Clone ID: PAT_MRT4530_63496C.1
ctgccactctaagagaaagaaaagaagaactcacaggaactaaccatgtaaaaaataaactcaaacggacgaaatatgtggtatgtggaattttccaaagctccaccgaaaaacttatctcctcgaaaacacaatcttgcaagcggaatttggaggttttagtatcgctgaacccggtgaagcgggggagaatcggatgtaactttttctgtagatgtccgtgcatatattatttgcctgattccgagtccaaaaacaggaatggaggcggcggcgccagcatggctggcgccctcctcctgccacgtcggttaacgtgcgccacggtggcaggaggacggcgcccaaagaggctggcgccgtcccgttggatgacggcgccagccactctggcgccccaaaaaggaccatttctaggataagttttttcagggccaacccagttgagtcagcgtgggaccacttggcacgcaccaccatctccggcatcgccgccctccgcgatatgacgtgtgagcgctgcaacagctccaatggccatggcgatctctcctcgctcttcgccggctccaacgacaacggcccagtgcctccgatggtggcttcatcggcactcggcaccatccgtcatgcccggccacaagagggttag

SEQ ID NO: 62132 - DNA, 768 bp, Oryza sativa
  Clone ID: PAT_MRT4530_63497C.1
atgacgccgacagatcttgtgaagatggatgtggaagttgacgatgaagacaaggccatagttcttttgtgttcgttacctgaatcgaatgagcatgtggtgactactttaacgtatggcaaggataccatcaaaactaaatatatcacttctgtgttgctggctcgtgatcagttgagaaagaacaaagagggtgaaacatctcaagcggagggtttgctagtcaaagaagatcatgttgggcgtaaggtaaagaagaacaaaaagaagaagatggtgcagtgcttcagatgtgatgagtgggggcatataagcagggagtgtccaacactaaaggaaaaagcaaaggctaatgcagtgacttcttcaaatgactcagatagtgatggttgtgatcttctcacaatgtcaagggatgacataagttatccggccgtgagagtaggtgaagtcaaaatcaagctagaagatggaggcgaacatattcttcagggagtcaggcatgtagcagggctaaaaaggaatctgatttcgcttggaaccttgcataaagatgggttaatattccacggaaatcggaataggaagaccatggagatcatgatgggcaagacaactgtgatgactggagagaaggtggagtcccaactttacaagctgcgagggtgtattgttgcaggtggagtctatgaggaagcggttgctgggatagcaattgcttttggtggtggcgggtctggcgcagattcatcgggcggcttgcggtga

SEQ ID NO: 62133 - DNA, 2620 bp, Oryza sativa
  Clone ID: PAT_MRT4530_63498C.1
ctctaaactagtggatccccgggctgcaggctcgaggagagagagagaggaggaggagaggtggttgcgccttgcgcggtgaaagggtagttaccgccgcgggcgactccggcgaggaggggcgagtgggctggagctagcggcgggggaatggggggtggagtggaggagaggaaggtggtggacttggaggacggggacggggaggaaggggaggatgcggcggcggtggcggcggggtcgagcagggagacgcggatgctgccgaggatgccggtgcgggtgctgctcgctgagggcgacgactccacgcgccacatcatctgcgcgctgctccgcaagtgcgggtatcgagttgccgcagcctctgatggtgtgaaagcgtgggacatactaaaggaaaaatctttcaatatagaccttgttttaactgaagttgaacttcccttgatgtctgggttcctgctgctctccacgatcatggaacatgacgcatgcaagaatatccccgtcataatgatgtcttcaaatgattccgttagcatggttttcaaatgcatgctaaagggtgctgcagatttccttgttaagccaatacggaagaatgaattaaggaacttatggcagcatgtttggagaaaacaactgtccagcggtgttcttgatgtgcagcatactcaacaagaagataatcttacagaaaggcatgagcagaagaccggagtgacgaaagctgaacatgtgactgaaaatgttgtccacaagaacatggaatgcagtgaacaagaaagtgatgctcaaatgtatttagcccttcagatctgcatcaatgttggtgaactaatttatcaatttttcaagtcagcgaaatgtcacagttcggtcctcttgggtattgcaaaatggagtacatatgacaacagtaagagttcatgtacaaggtcagaactggaggctgacagtaggcaaaccaacaatttactggaatataagcagccaatgggaaggcatttctccaagcctgaccacaagaacaccgagaaaaatggagggactaaaattcatgcatctaatgatggcaacttgattccacggagggaagaggatgcatcactgaggaggatgacatgttcaaatgatattaattgtgagaaagcttccagggatatggagctggttcatattattgacaatcagcagaagaataacacacatatggagatggatgttgcgagagcaaattcccgtggaaatgatgacaagtgcttttccattccagcacaccagttagaactttctctcagaagatctgactacagtagattagagagccaggagaaaaatgaacgaagaacactgaaccactcaacttcatctccattttccttgtacaactgcaggacagcatcatctaccattaatgctggtgatgctcaggcatgcagcacctcggcaacacatatagatcttgaaaacaaaaatggagattccaaaactccctctcaagacaagagggaaacaaaccaacctcccattagagttgtaccatttcctgttcctgttggaggactaacatttgatgggcagccattctggaacggtgcacctgtggcatcccttttctatccacaatcagctcctcccatttggaatagcaaaacatctacctggcaagacgcaaccacacaagcaatttctctgcagcagaatggtccaaaagatacggatactaagcaggttgaaaatgtagaggaacaaactgctcggagtcatctaagtgctaatcggaaacatctccgcattgaaattcctacagatgagccgcggcatgtttctccaaccaccggtgaaagtgggagcagcactgtgctggacagcgccagaaaaacgctcagtggcagtgtctgtgacagctcttccaaccacatgattgcccctactgaatcatcaaatgttgttcctgaaaatcctgatggtttacgccacctgagccaacgagaggctgcactgaacaagttccggcttaagaggaaagacaggtgctttgagaagaaggtgcgataccagagcaggaagctactagccgagcagcgaccgcgggttaagggtcagtttgttcggcaagatcatggtgtccaagggagctagggctgtccaaacttcaggagattgctgtgccacggttatcctggtggtcagtgtcagattttgtttgaagagtgaaagtatgattgccctgacctacagtcagcagtgtatggtggtgttgcatatatatacaggctaacttcgtgtgctaggttaggccatggacctcgtacattgtagagtttgtcagtagggatcatattttgcttcagatctagataagctgcgtttatcatgtagcacacgtatttatgttttctaaattgtatctagccaacagttaacgtgtaagctggacgtgtgtggatgtaaggtgtcaaggatatccaaagacaaagttcttttgtacagtttcttacactgaacatcgttggtgtagtttcatactttcagtaaagcttgtgatgcttccgaaaaaaaaaaaaaaaaaactcgagactagttctctctctctcctcgtgccgaattcctg

SEQ ID NO: 62134 - DNA, 472 bp, Oryza sativa
  Clone ID: PAT_MRT4530_63499C.1
cgtccgtattccgggtcgaccccgcgtccgcccacgcgtccgtaaaaagaaaaaaaaaaaaaaaaaaaaaaaaaaaaaaaattaaaaaaaaaaaaaaaaaaaaaagaaaaaaaaggtatgaaggttataaagatttaaaaaacttatgttgggggagcgtgttgagtttttttttggttctattttgtttactttcgttggtgggcggttcctttgggttttgggtgggaaactggtttggccaccaattttcttcgctttgtagtggtattaacctttgaggcccgtcttggcgtttttggctttatggcccttagggcttgtcctttcggcctttgcacagcttggctggttgattggcccctggctggcgctttgttttattggctgggggtgggggggtttcgtgtttcccccccttttgactggtgagcttggtagcgcccgttcctttggcttttttacttttttt

SEQ ID NO: 62135 - DNA, 324 bp, Oryza sativa
  Clone ID: PAT_MRT4530_6349C.1
atggcgaggcaggccgtcgccgcgtccggctggtcgaccaggccggcgtcgtgggccatgcggagccgcctcgcctcgacgagcgccgccgcgaccatggcgagacaggccgccgctgttagaaagcgtgataccgaggttcgctacgggaaagcacgatatcaccacggtatcgcattaccaatacgcgagagcgtgacggtcttgcgcgtcaaatgggcgaggagatttgagctagcggtgtcgcttcttggttatacgatatcgacgcggtatcgcgtttccactgagcgagagcgccacgtcgtaccgatttgggagtaa

SEQ ID NO: 62136 - DNA, 618 bp, Oryza sativa
  unsure (1)..(618): unsure at all n locations
  Clone ID: PAT_MRT4530_634C.1
ggggggaaaattggaggatttatttcccacttttttcatcatttacaaatactaacccatgcgaaaattttcaagcaaaaaagttccttacaaattcttccaaacaaacaaggggaaaaaaccttttttttcccatttcccccttgaactttccgtaaatacccccattccaccaaactcccctttgttttttacaaaaaataattttttcaaccccgtaacttttaattaattcccgaaaaattaccaaacctttaaggggaaaaatcaattggcgaagggggggccctcgtcgggctccgggggggccttgcagaaggcctcaagcgggggggggggctccttgagcttgtcccgcccgggggttcccccccccctcaattcctccaccttgtcccaccccgccgggcacttgccgtttgccggggtctccgggcacccctcctttgccttgggaatgctctccaacattttggccaaaaagtccgggggggttnccgggccctttccccttaccgccggaaaacccccgggggcaacacggggaaacaccacgcgttcaatttcggggaacgggctaaaaagggaaaacccccccccccccggggttaacaggcc

SEQ ID NO: 62137 - DNA, 1896 bp, Oryza sativa
  Clone ID: PAT_MRT4530_63500C.1
atgaacattgacgacgcgttggcggaggaattgcaattgcaggaagccatcctcttctctgccttccaagaaatgatcatccaggacaccgacgacgacgactccatcggcaatctgattctgatcggccaagatcaggggcaagaatccaagaaacccttttccgttgccgatcatggcgagtcctcttcgccgtcgccgttgacgatgacgacgactaccggcggcggcggcgccggcgagttctactgttccatctgcatggagacggtgcccggcgctctcaagttcagcgtcagcccatgcctccacgccttctgcgtgtgctgcatcggccagtacgtcgcggccaagatcggcgagaacaccgccgacgtcaggtgccctgaccccggctgcggcggcggcgtcgagccggagagctgccgcggcgtcgtcccctcggaggtgctcgacaggtggggcctcctgctgtgcgaggcggcgatcgtcgcgaggaggctgcactgcccgttccgggactgctcagagccgctcctcgccgacgccgacggcgagggcggcggcgtggcggaggccgagtgcccgagctgccaccggctgttctgcgcgcggtgtatggtgccgtggcacgacggcgtcgggtgcgaggagttccaggagctcggggaggacgagcgcggccgggaggacgtgatggtgcggcggctcgccggcagggagcggtggcagcggtgcccccagtgcaggatgtacgtggagaaatccgagggatgcatgttcatgaagtgcagggccgcaggggagggaccaccggacatgagcgccaacgtcgacttggatgccaagaggttggtaccgctgaaggcttggggaagatgccgaggttgttggagctcgagctcaagctacccgcggagtaagatgttgatgtctgagatcggatcacaagacgagtttgtgaagacgaatacagactatatcgagaagggcgagtattctggtggcgacagaccagttaggtcgcgggttggaaagatggcgccgacaggtatgaaatttgatttggtgaagtttgacggctccggaaattttggcttgtggcaaaccaaggtcaaagatttgttagctcaacaaggagtttcaaaggctttgaagggtgaaaaaccggccaagatggaggatgacgattggaaggagatgcagttgcaggcggctgcgacaataaggctatgtctttcagatcaggaaggggcagatctgacagcacatgtgaacgttttcaatcaactagtcacagattttatgaagatggatgtggaagttgacgatgaagacaaggccatagttcttttgtgttcgttacctgaatcgtatgagcatgtggtgactactttgacgtacggcaagaagaccatcaaaactaaagatatcacttctgcgttgctggctcgtgatcagatgagaaagaacaaagagggtgaaacatctcaagcggagggtttgctagtaaaagaagatcatgttgggcataagttaggcgatgacacaagttatccggccgtgggagtacgtgaagtcaatatcaagctagaagatggaggtgaacatgttcttcagggagtcaggcatgtaccagggctaaagaggaatctgatttcgcttgaaaccttgcatgaagaagggttaatattccgcggtaatcggaataggaagaccatggagatcatgaaggacaagacgactgtgatgacgggagagaaggtggagtcgcatctttacaagctacgagggtgcactgttgcaggtggagtccaagagggagcggttgctaggatagcaattgttttcggtggcggcgggtctggcgcatactcgtcgggcggcttgcggtga

SEQ ID NO: 62138 - DNA, 912 bp, Oryza sativa
  Clone ID: PAT_MRT4530_63501C.1
atggcgccgacaggtatgaaatttgatttggtgaagtttgacggctccagaaattttggcttgtggcaaactagggtcaaagatttgttagctcaacaaggagtttcaaaggctttgaagggtgtcaaaccggccaagatggaggatgacgattgggaggagatgcagttgcaggcggctgcgacaataaggctatgtctctcagatcagaagttgtatgggctaaagatgcaggaaggggcggatctgacagcacatgtgaacattttcaatcaactagtcactgatcttgtgaagatggatgtggaagttgacgacgaaaacaaggccatagttcttttgtgttcgttacctgaatcatatgagcatgtggtgactactttgacgtacggcaaggagaccatcaaaactaaagatatcacttctgcgttgctggctcgtgatcagattagaaagaacaaagagggtgaaacatctcaagcggagggtttgctagtcaaagaagatcatgctgggcataagtctaaggatgcagaagcgtggatattggattcagctagctcgtttcatgtgacgccaaggaaggagtggttctcttcatataagtctggtgagtttggttttgtctacttaggtgatgacacaagttatccggccatgggagtaggtgaagtcaaaatcaagctagaagatgaaggtgaacatgttcttcagggagtcaggcatgtaccagggctaaagaggaatctgatttcgcttggaaccttgcatgaagaagggttaatattccgcggtaatcggaataggaagaccattgagatcatgaagggcaagatgactgtgatgactggagagaaggtggagtcgcatctttacaagctgcgagggtgcactgttgcaggtggagtctag

SEQ ID NO: 62139 - DNA, 1431 bp, Oryza sativa
  Clone ID: PAT_MRT4530_63502C.1
atgtggaggaggaaacacgaggtggggatcgcgcatcgacaggagatcgtcagccgtggcgatgagatcgatggcgacaacgaggacgttgcggaggccgcgacctcgctcgcgatcagaccggcgatggcggaacgtgaccggaagacggggccgggcgtggccgaaggcgaccggagagatcggaggggtagcgccatggacggcgcgcccgacgaatgcgaggcttgtgacaaagtgcgcgcgtatgggtggaccaagccaggccgacgagatcgtgcagagcagaggcacatcgagggcggaagattgggcgagtattctggtggcgacagaccagtcaggtcgcgggttggcaagatggcgccgacaggagtttcaaaggctttgaagggtgtcaaaccggccaagatagaggatgacgattgggaggagatgcagttgcaggcggctgcgacaataaggctatgtctctcagatcgggtcatgtaccatgtgatggaggagacctcaccaaagataatttggaaaaagttggaagctcagtttatgtccaagactctgaccaataaactgtatctgaagcagaagttgtatgggttaaaaatgcaggaaggggcggatctgacagcacatgtgaacgttttcaatcaactagtcactgatcttgtgaagatggatgtggaagttgacgatgaagacaaggccatagttcttttgtgttcgttacctaaatcgtatgagcatgtggtgactactttgacgtacggcaaggagaccatcaaaactaaagatatcacttctgcgttgctggctcgtgatcagatgagaaagaataaagagggtgaaacatctcaagcggagggtttgctagtcaaagaagatcatgctgggcataagggagtcaggcatgtaccagggctaaagaggaatctgatttcgcttggaaccttgcatgaagaagggttaatattccgcggtaatcggaataggaagaccattgagatcatgaatggcaagatggctgtgatgactggagagaaggtggagtcgcatctttataagctgcgtgggtgcactgttgcaggtggagtccaggaggaagcggttgctgggatagcaattgcttttggtggcggcgggtggcgtatattcgccaaggtggagtttgttagaatagaggaggggaaggagggcagcgcccattctcctgccggcgctgccggagccgagaaccgcgagatctggagcacccacactcggtacggctggatccgtggttcccaggtggaggggatggtggaaactcgtcaccggcaagagatggtggtgatggtcggctgcatcttgccgatggcgctgggcggaggctcggtagccgacccgccgttcgtcgaaggtatcgcacaggcgctcgccatgcggatctag

SEQ ID NO: 62140 - DNA, 1062 bp, Oryza sativa
  Clone ID: PAT_MRT4530_63503C.1
atgtctgaggtcggatcacaagatgagtttgtgaagacaaatacggacggttctgagaagggcgagtattctggtggcaacaggccagtcatgtcacggattggtaagatggcgccgacaggaagggacggatctgacagcacatgtgaacgttttcaatcaacagtcactgatcttgtgaagatggatgtggaagttgacgatgaagacaaggctatagttcttttgtgttcgttacctgaatcgtatgagcatgtggtgactactttgacgtacggcaaggagaccatcaaaactaaagatatcacttctgcgttgttggctcgtgatcagatgagaaagaacaaagagggtgaaacatctcaagcggagggtttgctagtcaaagaagatcatgctgggcataaggtaaagaagaacaaaaagaagaagatggtgcagtgcttcagatgtgatgagttggggcatataagcagggagtgtccaacactaaagggaaaagctaaggctaatgcagcgacttcttcgaatgactcggatagcgatggttgtgatcttctcacgatgtcaagtgcacagtctaaggatgcagaagtgtggatattagatttagctagcttgtttcatgtgacgccaaggaaggagtggttctcttcatacaagtctggtgagtgtggttttgtctacttaggcgatgacacaagttatccagccgtgggagtaggtgaagtcaaaattaagctagaagatggagggctaaagaggaatctgatttcgcttggaaccttgcatgaagaagggttaatattccacggtaatcggaataggaagaccattgagatcatgaagggcaagatgactgtgatgactggagaaaaggtggagtcgcatctttacaagctgcaagggtgcactgttgcaggtggagtccaggaggaagcggttgctgggataggaattgtttttgtggcggcgggtctagcgcagactcgtcgggcggcttgcggtgaagctgcaaagaagacaacccaagtctggaagacaggtggatcggcatggtga

SEQ ID NO: 62141 - DNA, 1766 bp, Oryza sativa
  Clone ID: PAT_MRT4530_63504C.1
tcaccgcaagccgcccgacgagtctgcgccagacccgccgccaccaaaagcaattgctatcccagcaaccgcttcctcctggactacacctgcaacagtgcaccctcgcagcttgtaaagatgcgactccaccttctctccagtcatcatagtcatcttgcccttcatgatctcaatggtcttcctattccgattaccgcggaatattaacccttcttcatgcaaggttccaagcgaaatcagattcctctttagccctggtacatgcctgactccttgaagaacatgttcacctccatcttctagcttgattttgacttcacctactcccacggccggataacttgtgtcatcgcctaagtagacaaaaccaaactcaccagacttatatgaagagaaccactccttccttggcgtcacatgaaacgagctagctgaatccaatatccacgcttctgcatccttagactgtgcacttgacatcgtgagaagatcacaaccatcgctatccgagtcatttgaagaagtcgctacattagccttagcttttcccttcagtgttggacactcccttcttatatgcccccactcatcacatctgaagcacttcaccatcttcttctttttgttcttctttaccttatgcccagcatgatcttctttgactagcaaaccctctgcttgagatgtttcaccctctttgttctttctcatcacatgctcatacgattcaggtaatgaacacaaaagaactatggccttgtcttcatcgtcaacttccacatccatcttcacaagatcagtgactagttgattgaaaacgttcacatgtgctgtcagatccgccccttcctgcatctttagcccatacaacttctgcttcagataccgtttattggtcagagtcttggacataaactgagcttccaacttttcccaaattatctttggtgaggtctcctccatcacatggtacatgatctgatctgaaagacatcgccttattgtcgcagccgcctgcaactgcatctcctcacaatcgtcatcctccatcttggccggtttgacacccttcaaagcctttgaaacttcttgttgagctaacaaatctttgaccctagtttgccacaagccaaaatttccgaagccgtcaaacttcaccaaatcaaatttcatacatgtcggcgccaacttgccaacccgcgacctgactggtctatcgccaccagaatactcgcctttctcagtaccgtctgtattcgtcttcacaatctcgtcttgtgatccgatcgtgtcagcctggcttggtccacccgcacccgtgcgccttcttcccaagaactcgtgcaatttgcgtcgtcgccatacgcgctgtccgtacaccgtacgcaccgcagtcgcaaccctcgtgttcaccgtccacgacctcatcgtcatcggccctccacgtccgccgcgccgtgccaggctcgctggcttcgcccttccgtcagtagcctccctgccgccgcggatccacattcaccgcgtgcgtcgggtgcgccgtccatggcgctacccctccaatctctccggtcgccttcggccacgcccggccccgtcttccggtcacgttccgccatcgccggtctgatcgcgagcgaggtcgccgcctccgcaacatcctcgttgtcgccatcgatctcatcgccacggctgacgatctcctgtcgatgcgcgatccccacctcgtgtttcctcctccacatgtcttcttgatccaatgc

SEQ ID NO: 62142 - DNA, 1617 bp, Oryza sativa
  Clone ID: PAT_MRT4530_63505C.1
atggcgacgcgaccaggccctttgaccgaatggccatggcaatggatggggggctacaagtacctggtcctggctcctgtggccatgcacacggcacacaggttggccaccaaggggtggggagactttgacccagcgtacactttcatgttgccaactctgctgctgaggatgatccacaaccagatctggatcagtttgtctcgataccagactgctcgcaggaagcacctcattgttgatcgcagtctcgacttcgagcaggtggaccgagtattatacttggcatgggcacgggcagaaaaagcgcgcttcagtaaatgtgtaattgcagatgatgctgtcatccatccgtttgctgaacatttagcctatttcctgctattttcaatctccatattgccgccaatttttatgggctgtggttctgtcctggctggtgtcttgtacattacttacattgatttcatgaataacatgggccactgcaattttgagctgatgccaaagtggatgttccaaacttttcctcctctcaagtatctcatatatactccatcgtttcactctctccatcatacccagttccgtacaaactactcattgttcatgccattctatgactacatttacaacaccatggatagttcaagtgatgagttgtatgagagatcattgaaaggaacagaggaaacaccagatattgttcacctgacacatatgacttccttgaaatcaacgtatcatctaaggattgggattacttccatatcatctaaaccatgcaatgactcagtgtggtatatgtggatgctatggcctgttgcgtggttatcaatggtactggcatggatttatggatcttcagcatttgttgtcgagagactaaaactgaagaagttcagcatgcaagtatgggcactaccaagatacaacttccaagtaatggattcatccgcagcagaacaactcaatggaagcggtgaattgtttgccaaaaaatatccaagattaagggtacgacttattgatggaagcggcttagcaactgccgtggtgctcaatagcataccttttggtacaaagcaagtttttctctgtggaagtaattctaaggtgacccgtgcaacagccatagctttatgtcagagaggtgtccaggtaatcctgaatcaagagaaagaatatggaatgctcaagtctcgagttccagagagtagagctatctatctgaaattctctaatgatgaaacaccacagatttggataggagatagcatagacgatgcacaagggagggcaccaaagggaactatatttattcccacgtcacagttcccccttaagaaggcacgcaaggactgcacttacttgagtaacccagcaatgaagatcccagagacaatgcagaatgtccacacctgtgagaattggctgccaagaagggtgatgagtgcatggcgcattgctggaatattgcatgctttagaaggttgggaaatgcatgaatgtggagatgatatgatgaccattgagaagacttggtcggcagctattaagcatggattcaaacctctgacaaaaccttgctctctgaattctggaacggacctttaa

SEQ ID NO: 62143 - DNA, 1069 bp, Oryza sativa
  Clone ID: PAT_MRT4530_63506C.1
tctttagcaagtcacaataaggaaggtggagtagttgctgtgcagacaaatgttggtacaaggaagcatgtaaagggattattcaataaagaaactagcttcatttctgagtcaatggatggcatggatgagttcccttctccatctagaattgcttccatggaaatggctgcatcttcaagagcttcttttctccacaaaattaaaggttcttgtgaggaaaaccaaggtgctgaagctgcacagttgtgctctcaagttgtatgttcaaacttgtcacttgtggatcctctttgttccattgttccatgtagtatatctttcaacgaaggcccccctagtcaggccccgcgtccgatacagagtaaaggggataaagaattgatcagcaccaaagaatttccatcaaagcaagatctggagggagaagctggtccatcttgcacaccagtatctaatattctgctcaggcgaaggaaatacagttctctcagaccttttagcacaatagcacccagaccatatgtatcaaaaagtactgaacctcataatgatgttgatgaggcagtttgtcagcagggaagttttgcagcagtaactttaaataaaaagatacgacgtgtgcaagcctctaaagtatgtgtagaaaataattttgaagctggaaatttgcacgaattttctaaggttctaaagaatccatcttatgctcagggggtcagtgagcatcaaaacagtatgaagagtcttaaaagaaagaaagcccaattttcagaagctaaaattagtaccaggaaaaccaagaatattagaaggacgcagactaaatctcgattcagctggtcagatagcagactcattgacacaatcgaacccagggagtacattgataataaagaagccctatttcatggactggattttttgttgactggatttcagagtcacaaggaaaaggaaattgagccattgatccgaaaatttggaggctatgttctttctagagtgccatcctgtccacttgataaaagaagcaagctggcagagcttgctaggtgcaagcctccca

SEQ ID NO: 62144 - DNA, 1086 bp, Oryza sativa
  Clone ID: PAT_MRT4530_63507C.1
atggcgccgacaggtatgaaatttgatttggtgaagtttgacggctctggaaattttggcttgtggcaaactagggtcaaagatttgttagctcaacaaggtgcttcaaaggctttgaagggtgtcaaaccggccaagatggaggatgacgattgggaggagatgcagttgcaggtggctgcgacaataaggctatgtctttcagatcagaagttgtatgggctaaagatgcaggaaggggtggatctgacagcacatgtgaacgttttcaatcaactagtcacagatcttgtgaagatggatgtggaagttgacgatgaagacaaggccatagttcttttgtgttcgttacctgaatcgtatgagcatgtgatgagaaagaacaaagagggtgaaacatctcaagcggagggtttgctagtcaaagaagatcatgctgggcataaggtaaagaagaacaaaaagaagaaggtggtgcagtgcttcagatgtgatgagtgggggcatataagcaagaagtgcccaatactgaagggaaaagctaaggctaatgcagcgacttcttcaaatgactcagatagcgatggttgtgatcttctcaaaatgtcaagtgcacagtctaaggatgcagaagcgtggatattagattcagctagctcgtttcacgtgacgccaaggaaggagtggttcttttcatacaagtctagtgagtttggttttgtctacttaggcgatgacacaagttatccagccgtgggagtaggtgaagtcaaaatcaagctagaagatggaggtgaacatgttcttcagggtgtcaggcatgtaccagggctaaagaggaatctgatttcgcttggaaccttgcatgaagaagggttaatatttcgcggtaatcggaataagaagaccatggagatcatgaagggcaagacgactgtgatgactggagagaaggtggagtcgcaactttacaagctgcgagggtgcactattgcaggtggagtccaggaggaagcggttgctgggatagcaattgcttttggtggcggcgggtctggcgcagactcgtcgggcggcttgcggtga

SEQ ID NO: 62145 - DNA, 519 bp, Oryza sativa
  Clone ID: PAT_MRT4530_63508C.1
atggcgtcctccaccgccattgcccttgctctcctcggcattgtgcttcttcttcccggcaatgccttcgtcgtggtcgcctacccacgcggcggcggcggcggggactacaggatgcagttcttggggcagcagaacgcggcgagggcggcgatggggttgccggcgctggtgtgggacgagcgggtggccgggtacgcgcggtggtacgcggagtcgcggcgcggcgactgcgcgctggtgcactcgtcggggccgtacggggagaacctgttctgggggagcggcacgggttggtcgccggcgcaggccgtgggcgcgtggctcgccgagcagccgcggtacaactactggagcaacagctgctacggcggcatgtgcgggcactacacccagatcatgtggcgcgccacgcgccgcgtcggctgcgccatggtcgcctgctacaacggcaggggcaccttcatcacctgcaactacgacccgcccggcaactacgtcggcatgcgcccctactga

SEQ ID NO: 62146 - DNA, 274 bp, Oryza sativa
  Clone ID: PAT_MRT4530_63509C.1
atggacaggttcgccgcccttgtctccggccgccgtgccgcatccgccgccgcagccgcggccgccgaggtggaggtggaggaggagagggacgaggcgggcctccgcattcggctcggggagagcgacagcgtgcgggaacgacggccacagacgacgcccttttcgccggcacctcacggcgtgggggcggaagagcggaggggctggggtgtgattcgcggtgttatcggctgcggatgcggtgccctctggtatggattcggcgcgggcg

SEQ ID NO: 62147 - DNA, 290 bp, Oryza sativa
  Clone ID: PAT_MRT4530_6350C.1
gggccaacaagagcccaaatttttttttaattaaaggaactagcccccgggggtactgggaaccaatcaccaaaagctggaaaattttggcatcccccccaaaaaaaaagggggaaattgggggcaccaccaacgaacccagggatgcaactggagctaaaaaaaaagggggggggaatggaaatatcttgcaaaaatagctcgctttgagttggggcaaatgggggaccccattttgaatcaaatgttggccggccgggaaaagaaagatgatgtaaaaggggtttttt

SEQ ID NO: 62148 - DNA, 1410 bp, Oryza sativa
  Clone ID: PAT_MRT4530_63510C.1
tcactgcaagccgcccgacgagtctgcgccagacccgccgccaccaaaagcaattgctatcccagcaaccgcttcctcctggactccacctgcaacagtgcacccacgcagcttataaagatgcgactccaccttctctccagtcatcacagccatcttgccattcatgatctcaatggtcttcctattccgattaccgcggaatattaacccttcttcatgcaaggttccaagcgaaatcagattcctctttagccctggtacatgcctgactccctgaagaacatgttcacctccatcttctagcttgattttgacttcacctactcccatggccggataacttgtgtcatcgcctaagtagacaaaaccaaactcaccagacttgtatgaagagaaccactccttccttggcgtcatatgaaacaagctagctgaatctaatatccacgcttctgcatccttagactgtgcacttgacatcgtgagaaaatcacaaccatcgctatccgagtcatttgaagaagtcactgtattagcctttgcttttcccttcagtgttggacactccctgcttatatgcccccactcatcacatctgaagcattgcaccatcttcttctttttgttcttctttaccttatgcccagcatgatcttctttgactagcaaaccctccgcttgagatgtttcaccctctttattctttctcatctgatcacgagccagcaacgcagaagtgatatctttagttttgatggtctccttgccgtacgtcaaagtagtcaccacatgctcatacgatttaggtaacgaacacaaaagaactatggccttgtcttcatcgtcaacttccacatccatcttcacaagatcagtgactagttgattgaaaacgttcacatgtgctgtcagatccgccccttcctgcatttttaacccatacaacttctgatctgagagacatagccttattgtcgcagccgcctgcaactgcatctcctcccaatcgtcatcctccatcttggccggtttgacacccttcaaagcctttgaacctccttgttgagctaacaaatctttgaccctagtcgtgttcgctataatccgatgtgaccaatcttccaccctcgatgtgcctctactccgcatgatctcgtcggcctggcttggtcgacccatacgcgcgcactttgtcacgagcctctgcacagcaagcctattgagccccttgtaccatgtttgaccaatgtcctgccgagccgcccaaaaatcgctgccgctttgttgctttggttcggctctctcttcggcacgtgcgtcgggcgcgccgtccatggcgctacccctcagatctctccagtcgccttcggccacgcccggccccgtcttccggtcattttccgccat

SEQ ID NO: 62149 - DNA, 1473 bp, Oryza sativa
  Clone ID: PAT_MRT4530_63511C.1
tttttttttttttttttttttttttttttttttttttttttttttttttttttcccaacggatggatgtattaatggatggacatggaaatagaaaacaaaagttgtattgtaggagtatacaatacaatacaattaggaaggaatacatcctggcagtgaggagggagatgaaatgaaactagcttgaaagaggtagtagtagctagcatttgactcgagtataattaattagcagagtgaatttattatgaggtgttacataaagaagcaacaagtctggttatccatgtgcaaagtgtggtacggtgtggatgaatcatccagccgtccgtccgcacttgaactgagctgctctgctctgctcggcggcctgatttgcatcttccaaattgctcgatctgctcgccgccgcgcgccctggcttgcactgcagttgaattgatctctggtgttcatcagtgtgtgtattgacgatggatgtagccaacgatccatcatcaagaaggcgctagctactggagtatgtacagaagaagcaaactgatggagcaaggatcgatgtgctagtaattaatttgtacaagcgcaggcaggcaggcaggcacaccaggatggatcgtgtctcgatctgcctttgacaaaagcaagctctcatatgtacacaagcaaaggcaaacgccgggttgggttagcaggacgccggcaccagcggcggtttcatctcatcctctgcttcgtcgtcttcatcctcttccgcgtcccacaggaaactcgcgtacgatccaagcacgtagcagtcatcgggcgcggcctggacggcgcgctccaggtaggcggcggcgcggtccttgtcctgactcgtctcccacagcagctggccgtagaggctgagcaggtcgccgtcgtcgggggaggccagcagcgccctggcgtagcactcctccgcgccgcccaggtcgccctccacctcctgcaggtacctcccgtagttgcgcagcaccagcgggttctccggctccaccctcagaacccgccggtagtactcccccatgtccatgtgcccgccgccgcctccgccgcgcccggacgtcttgtcgtcgtcgtcgttgcccttgccgcgcccggcgccgtccaccaccacgaccacgtcctcctccaggatgtcgcggaggaggaggggcagcggcgatgatgccgtcgcgggcgcggatctggcgatgtcggcgtcggaggtggcgcggcggaggctctgctgctgctgctgatgatgatgatgcatgctgcgcggggagacgcacaaggctgtgggggagcggcggaggcgtggggagagggaggcggagcgcgtcagccgtgtgccggtggcttccatggatggatttggatctacttacttgtcgatcgctgacgctgagcttgagcttgagctcgccggcggggtgagtgagttttatagaggagaagaagcagg

SEQ ID NO: 62150 - DNA, 1038 bp, Oryza sativa
  Clone ID: PAT_MRT4530_63512C.1
atgacggaatcaatgtcgtgcctagaggggagggggtcacccaggaagaagaaggcagcggtgaagaaatgctcggtgcgttttacgagcagtcaatctcctttgaagccgattgatttgtcatgggtccctgactggatggattgcagctcggcatgtagagtttgcattcgggttggtccttatgtcgagtttactaagaacggagacccaaatatcatggagatgaggaggctccctttatttgttgatgtgagtgatgacgcacagaataggacagagccttgtgtggagcagggcaacactgagccgcaagatgtttgcactgacattgtgttgttcacacaacaaagtcaagtaggacagtcctctatgccttctactaaaccaaagaagtgtagcacttacaaaccggttgatgcttggggagagaatgatgaggtagagtatgtcggtgtagatgatgagaaggataagtacaaggatttggtttcagatgatgaagagcatgatctagattatgaacctgggtctgatgaagatgtcgacgacttagctgcagatgatgagcagggttgtgaatctgtagtgcatataactgatcttgacaatcctaagatagctgttgatgtaacatttgaagacggtgaaacatttaaaagatgcattaggcagtatgcagtactaaaagaggttgaacttgcaattccatatagcgaatcgacgaggtacagagcatactgcaaggccaagaggtgcaaatggaggattcatgcatctagattacaagacaaattatgcctaaaacttacatgctcaagctttggacacttcacgaaccgcttgtttgggttagcaggggtcctcgatgtctttgcttccaactgcgtaccgcataacggacacttaccgacgtgcaactcgcctgtgactgggttacgcattgacgacgagcccgtgtacaaggattggtccatctcgccggccacctcaatctgccgcagatcgccgccgcacttctctgctcgaatctgctag

SEQ ID NO: 62151 - DNA, 560 bp, Oryza sativa
  Clone ID: PAT_MRT4530_63513C.1
ccggttggccccggttttcccccgttacttcttccggcgcgtctggatttcggtggcccccgtctgacgacggcaagctgagcccgagggacttcctcggcgtcggcggtcgtccagggcatcagcggctcgcggcaatggggccgccgcgccatggccggccggcctccacgtcggctcactggacccggccaacatgaactgaagtcatcacagagaagaaaaaaaaccatagaagatggaaggagatgatcatgctgctaatttcatttcatcatatcagaattagtcacagaaactggaggtaattatattaagaagagaaaagcgatctcaatccatgcccagatggatgtttctggggaaatctggagctgttaatggtgagtcgtagttgctagctagctagccagagctgggaggaataataataatacctggattaagtggccagaacttaattttgtaccggtacctttcgtttgtttttcatgtacttttggccacgggaaatgggtctcttttgatgtgaagtcatccaaaaaaaaaaaaaaaaaaaa

SEQ ID NO: 62152 - DNA, 208 bp, Oryza sativa
  Clone ID: PAT_MRT4530_63514C.1
aggattatattttttgtgcgcgccgggaatgagaccatggcggaccaccacaaagaccaggtggtgacaaaacgggcgagcggcggcagccaagaatggggctccccaaggactcgctggcacgctggcgggcggtggggaaagcgccagtgcgtggggccactggggcacccggcgggcgccggggacgagcaaactccggcaggac

SEQ ID NO: 62153 - DNA, 1302 bp, Oryza sativa
  Clone ID: PAT_MRT4530_63515C.1
atgtcagccagggaaggagaaccgcttgcctggctggtcctacctgcggatttcgaggagtatctcaacttgcaatcggcgacgttcgcgcagctgtaccgctgcttgccgatctcgcttctcaagaaggagaacgccgacgatggcaacagggtcttcatgcctgtatctgctcttgatcggctcgggtatctgcacatcgagtacccgatgcagtttcagattcagaacgccaccacgctgcagacctcgtactgcggcgtgctcgagttcaccgccgacgagggcttcatccacatcccgaccatgatgatggagcacttgggcctgcgagagaacgatctcgtgctgctgcgaagcacgtcgatccccaaggccaccttcatcaagctgcagcctcacacctctgacttccacaagctttctgaaccaagatacctgctggagtacaacttccgcaactacttctgccttacgaccggcgagacgatcgccgtggcggcgggggacaggttctactacctcgacgtcgtggagacgaggccggccgacgctgtctgcgtcatcgagaccgactgcgaggtcgagttcgaccaggccctcgaccaagcggagcccgccgccgccgccgccatgcaggtcgacggcgtcggcgccggcgagccggagccggcccggttcaccggcttcaggatgcggatggacggcaagccggtggaggaggagaagaagacgatgccgccgccggcgacggcggcggcgccgcccaaaagggggcttcggtttggctcgtcggctcctgccgccggtggtggcgtcaaggaggccaagtccggcgagaaagacgatgggaatcggttcaccggcaagaatccattgcatcctcttgatatcgaccacacgcccccctccccgagcgacggcggcgccgcccgagcagcggcggcagtggcggcgcctctccccccgagcgacggcggcggcggtgccctccccctagcgacagcgccgctgcccgagcagtggcggcggtggcggtgcctctccccccgagtggtggcggtgtcagcgtcctcccccgcgagcggcgacggtggctctcccaccactggcagcgcggctgcgtcctccctcaccaccggcagcgcggctgcgtccttccccaccaccggcagcgcggcggcgtcctcccctaccaccggtggcagtggcggcgcccttccccatcaccagcaggcggcaacggtggcggcgcccaacccaatcccaagcaacggcgacggactcgatggacaggagtag

SEQ ID NO: 62154 - DNA, 231 bp, Oryza sativa
  Clone ID: PAT_MRT4530_63516C.1
taaccttgatggggacgtctatatagagcaagctgaaggagctcatctctggctactgaaatgcatgtccactgagttggtgaaacctcatgcgaatgctactcaatgcactaagacgctggggaattgtgatggactgatgaaaacttttgtaagtggaaacaaactgcagactactgtaccatgtatgtcacatgagccagcaaaatctgacggaggatgtggacctgc

SEQ ID NO: 62155 - DNA, 1386 bp, Oryza sativa
  Clone ID: PAT_MRT4530_63517C.1
gcacgaggcaccctcatctccacagcgccagacaatggcgccaagacagcggctgtcattccgccgcctcgtcctcctcctcgtcgcctccaccgccctcgcgtgctcggtgctcgcgggcggcgccgtggcgagcgtggtcgagacgctcggcgtccggcgtcacttcggcagcccgaagcgcaacaccacggggcagcacggggccggccggcgccgcggcggcggctccgcccggagcggtctggcgtcgtgcaacatgttccagggaagctgggtgtacgacgactcgctgccgatgtacgacacggcgggctgccccttcgtggaggcggagttcgactgccagaagtacggccgccccgacaagctctacctcaagtaccggtggcgtcccagctcgtgcgagctcccgaggttcaacgggctggatttcctcagcaaatggagggggaagaagatactgttcgtgggggattccatcagcctgaaccagtgggagtcgctggcgtgcatgctgcacgcggccgcgccgtcctccaggaccacctacagcaggggcaccccgttctccaccgtcacgttccaggactacggggtgtcggtggcgtactaccggagcacctacctggtggacatcgtcgacgagtccatcggccgcgtgctgaagctcgactccatctccggcgacgcgtggctcggcgccgacatgctcatcttcaacacctggcactggtggacccacaccggcagagaccagccatgggactttgtgcaagatggaggccaggtgatgaaggacatggaccggctctcggccttctccaaggggatgtctacatgggccagatgggtcgattcgaacgtggacacatccaagaccagggtctacttccagggcatctctccaacccactacaacggagcggactggggggaggggtcgaggagctgcgcgcagcagacgcagccggtggcggggtcggcgtacccggcggggccggtgccggcgcagagcgcggtgaggagcgcgatcgccggcatgtcgaagccggtgttcctgctcgacatcacgctgctgtcgcagctgaggagggacgggcacccgtcggggtacagcggcggccacccgggcaacgactgcagccactggtgcctcgccggcgtgccggacgcatggaaccagatcctgtacgcctcgctccttgcatagagggaaagaattggaaggggatatatctctcaatccgattggccgttctctcataatttgttggttgattgtatggagagtatttcaattggtggttccataattggttaactgataaaaaaaaaaaaaaaaaaaaaggcccctacgtacacaaacaagtaccaaaaaaaaaa

SEQ ID NO: 62156 - DNA, 2628 bp, Oryza sativa
  Clone ID: PAT_MRT4530_63518C.1
ttctttgatggcttgggcatcttgagcatcggttccagggataaccttgagagacttggtcatgtcagccacattcttgatagccgatctcaatctggacttttgttcttcaatggcatttggtagatcggatagcttttgcttttctagatccagctcggcgttgcattcttcgagttgagctgttaaatcaattttgcgagcttcaagccgatctatattcgactgaattggcccaacatagagttgatctaacttggctttctcttcatgcacaagctgctgattggcttggatagtagcttcaatgtttttccgttctcgccgatcggctatccgttgcttagccttctctagcttaaattggtgttgttcaaggtacacggctggagtgatggtgtttaccagatcgtccagaattgaggcttggatttcagcaaatcgtgcccggattgaaccacaatcagccaccagattatccaggaagattctagctgaagggatatgtcttcaagtgttttcttgacagtgtcgtccaaaggggctagagccttacttgtagtttcttcttctgtctcatcaaagtaatctttgatatcaaaagaaaacagatcggctaaagctgggatagcaggagcagctggttgtacttcttcttgaatatggtgactccctacagccgatggagttttatcgcttgatgattgctggacaggagaagaaggaggaggaggctgtagtggagccggtttgagagatggtgctgtcgattttttcttcacagcaattctctttttttcatttgcagcttgatcaacatcctctccgatctcttcttcttctagagcttgttcaacggatggatcaagggcaggcagatcatcggctggattaggtttctttaatttagccttcttctttggggctggagaagatgtgtccacaaccgatgacctggttcttctctttttactagcatcggctggttctctgatgagcccttgaagaagagttgaagtcttgggggcattatagccgatgacaggaggagatggcccacctccatttggaattaaacctggggcatattcgatatctctgccactattgctttgatgtggaggcgaggattctgttgtctgaggtataacatcaggaaagaggtctgtcatgtacattgaggccggttggtggaacagatgcaacttccattcaccccaccatctgtcaaatgatctgctcctgaacctggccagctctatattttcaatactgccaagagaaggcccttggagattgagcagtcggtccatcaaagttgatgaaatttcccctcggcattggattttatcggcaaagaacaagccgattggtaattgacccatcgcaagttgtctggcagagctcatcgggtgataaaactcataagaaacatggatatttcttccttgatgaatgccaacagggatgatgcatggactgattgcagccgagaaaacttctctggacttttggtatctttcatgattgatatcctcaaatctaaagtccgatggattttccaggagagtcgagtcttcataggggaaccaaatctgagtgtctttctgaaagccatcataaaaactgcagaaccagtccttgagcagttcagctgatagctttgctcctgcatcggctggtgtggaagcatattctccataagatgtacatctacaatgggtgcgttcctctccatcatcttccacaatcggctccagtcttggaaattcggcttctgtcacggatggccgattgacgaatttcatgaccattagattcaaccaagattgcaacagccaccatggtccacctgctccaactactgagccgacggctatcttagccgatgcattgttcagcatttggtacaaatagccgaggagaatcttgcctaaggggaattgtctctttgattccaaggcctcggctacaaactgccagttggttgtagggccgcagcttgattcacagaagaggaatttctccagccacattagcagaaaggctacatgctctcgaggggttacagaaccttagcccatatatgctgctacataactagaccaaccgcctatgctcttggtcctgaagtcatattgattcttcgtgttcggactcatgggattagccgatgaggtgacatccaaaccggtgatcatggtgatgtctattagagtcggggtcatcggcacttggttaaacaggaaggcattgatggtgttggaccagaaataggaggcggaggccattaaaggttcgtctttggctgagttagctatggtaaggtcgagtgcttggccgattccgatctcgtcccagtgaactctcttgctagccgaaatgcgcttgaaccatgtaatccagcttttctcgggtggagtttttccagtgacctagatctgggttggccaatctgaaaggaatcctattggtttcgccgatgatgaactcggtaggatcagggttaccaactgggccgaggaagtagtaattttcatgcgataggcttggaattgcaactaagttggagagatgctcagcgtactcggctgatggtgcggcagatggactggcagatgacgacat

SEQ ID NO: 62157 - DNA, 330 bp, Oryza sativa
  Clone ID: PAT_MRT4530_63519C.1
atggctccaaatcaatccaaagaaaccatcgaatctggcgcggaactagccgtagaactcggtgaagacggagagcgtctcgtctgtaaccgcgagggcgaggacgacgagcagcagcgcgggctgccgccgccgttcccctcgtccttccactaccgcgagcctccgcagccgagccgccaccgtcctagccgccgaccgccgcccccggtttcactgcgccccgatgccaacaagccatcgccgctccccccgtcctcccgcagcagcttccaacgaagaaagagaggatatacaatgtacacccagcagcacgtacccatgtcctag

SEQ ID NO: 62158 - DNA, 786 bp, Oryza sativa
  Clone ID: PAT_MRT4530_6351C.1
atgggcaagtctgtaaagaaatccgtaaaaaagccaaagaccaaaaaagcttcttctggacttggtccttccattttttcggagaagaggctgaggaaattgcttaaaaaaggcgctattgcagatgccaaattagttatccgtcctgttgatgaatcgggtccttctcctcatcctgggtacactcttgtttttgaggatttctttgaggctggttttaggtttccttgcagttcttttgttgtcgaggttcttggtctttatgggattgagttccctcaacttactccgaatgcggtcgtccgtcttggagtgttcgagtggattatccggagttgtggtggcacgccgcatggctcagatttcgcttattttcatactatccggcgatacacaaagcaaaatacccaatttgggtgtgttagcttcacgccgcgctcgaatcgtggttgtccttggccacttgtctctaccatgcgaaccaagtggggatcaaaatggcaatctaaatggatctaccacaaaatcccagccgatctaaaagctatggagaaatgtcctttcgttttttcttgcaaggatccagaggttatttcagagcctgctgtcaatttgtcgaagaacttttcctccatccgatctcggattgaagagcttgtctccaagtttagcgttcgagatttagttgaagagttcatttgtctcggaattcggcctctctcatccggctggactttgactcttggtgaagttcctcaagattcgacatctgaacttcctcctttt

SEQ ID NO: 62159 - DNA, 646 bp, Oryza sativa
  Clone ID: PAT_MRT4530_63520C.1
gcacgaggcacgcaagcaaccagcgaaccctagctacagagagattcgcatcaaggaagaagacgagagaggctcatttgaattagagatagagatgaagcccaggcccttcaaggaggagttcaccttggaggagagggccaaggagtcggccgccatgatcgcctcctaccccgacaggatccctgtcattgttgagaaattttcgaggagtaatcttccagaaatggagaagcgcaagtacctggttccatgtaacatgccagttgggcagtttattttcatacttcgttccaggctacatttgtctccagggacagcgttgtttgtgtttgtcaacaacactttgccccagactgctcagctgatgggcagtgtgtatgagtcatacaaagatgagggcgatggcttcctctacttggtgctacagcagcgagaagacattcggttgaccaactcctccgtgggagatctgcttttacctcgggcgtcaataatatatgcatgtatatatattactgatgattagaaattacaattatgtgttatatactgtatattgattgatgtgaatgaagtgttacaaggaggagaaaagtttcataccgaacttaattatcccacctaaaaaaaaaaaaaaaaaaaa

SEQ ID NO: 62160 - DNA, 659 bp, Oryza sativa
  Clone ID: PAT_MRT4530_63521C.1
tcatcataaaccaaatcgtattatatcttttagtggatatggaagtttgaattagccgtgtcaatatgcaaactcgactgtttcagaagctaaggatgtatttggttccttgcatcaatatcatcttggctcagatcatgcagtagccagcagtttggtttcctgcataggccaatgagcctgtctctgtgcatgcaaaaagttagctggagcatggcctggagggaatgagttttagtttcattacttaccggcttggtttgcttgagtcaagaaaagcttcccatgagcattgtcccctctagataccttgaaaaatgtgcagatgcatgaaaccaaagtacttcagtcgggggattgggcaaacaaactcaactagataaacagtttcaacatgcgcgctggaccatttgaaccaggtttaatgggaccggccaggccacccagcacccaggcaaccaaatgcaccgtaagtatacatgatagattttgtcaggaagggtgcttatcagggggtctgactttgtcttggctgtgaagttcttctctcattgatttggttgcaaacttttgctagcatatatggactgagttttatacctgccttgcaaatttaatcttgactgcttgggatctggttttattacaaccctcattaa

SEQ ID NO: 62161 - DNA, 3285 bp, Oryza sativa
  Clone ID: PAT_MRT4530_63522C.1
atggacgaagatattttctgtggcggacggtggacggagagccagaggcattcgattctaggttgggttgatcgtatccttcccttccgctcttgccctcacgtttcggagaggtccccacgttcgatggcgattcgccggcgcggcttttgcatgggccgcacggccaacctcgacactctcatggagccgctagacgagccaccattgttggtgattgaagagaccgagttccccctcccacaaccttccatggcgctatccctccctatggcacttgcccacgttgcggacaagaccatgcggcaggggcttatccccatgcccggcgacagcgagtgtcagagaggaggggtcatcgcgacgtcattgagcaagaagctgcagcgggaggaagaagctccggctgagggcatcaatgaggcctttacggtgccgtggtgtaggatgggttgcggccccaccaaggagaggatgagctccttcaatctcgtcgcttcttgtgcttcgtcatctttcttggtgtgctctggcaaggatgtagcggcgatgaagaaggcacgagaaggcttcgtcgcacgcgccgcgcgagctgagctcctcctcccccaccccacccccacccaacccaaccacccccccgtgcctgcacggcccccggcggtcaccatccaccaggcgccgcgccgcctcgcgctctcctcgccccgccatgtgctggcgagtggcgcggcaacgaacaaaagggacccagatggatcgtaccgtccgaagcgcaaacaagatgcaggcatgcggctgtctaaaattcggattgtgggcgtgcttgcatcgcatgatgagctgacaggtgacaccatcaaccgatttggtccacgcctccacgtgacaggtgctcgaagaagaagggctctgcttttgcttgctttgctccccgacccggccggcacggcgtgcgccgccaagccgccgccgcccgccatgggcgccatgggcgcggcggcgttcgacttcgagtacaagagggacgcgtatggattcgcggtgcggccgcagcatctgcagcgtttccgcgagtatgccaagatttacaaggaagaagaagaggagagagcggacagatggaaggacttcttggacaggttggctgaatctgcagatgacatcacaaccagcatttcaccttccaaagaggactctgctgctggagatgtcaatggtggagaacaccttgatggagctgaaaacttagagaatagcaataggggtggaataaaatgcaacaatgaagaagaggagggagaagaggatgcagaaaagagcgatacaccagaaaattcgaaggaaattgatggcaacaatcaatcgcaagaagcaaatggtgaggcggacgatatcaatgatgtatctgccaactcagaaaatctgaaacaggagagcattgcaaactccgtagaatcggacaaagctccagaagaattgaaggaggtgagtgggtgttcagaggaactattaaatgatgagaatggtgattctgaaggattaaaagattctcatggtgccttggaaggattaggtgaagcgaacaacgacaactcggaaaagttagaagagcttttcttggataaggggttgttggatgaactgaagcctataagagttgagtctgggaagcgggtgcgggcatcaatcagaatcattgagaaaatgatgagctctcgagtgggcaagataaggaacactgcaaatgacatgtgtggaaatggtgaagcacagcttgcatcaattgaagaggaggaaagggcagcagataagagttgtagaggggatccagcagaggaatcttctaatccagataaggtggagcaggcacaggacagggaacaaggtgattctgcgagtgctgctttggagggaggcaatggcgagtcttatttcccttggagggaggaactcgagagcttggtccgtggaggtgtgccaatggctcttagaggagagatgtggcaagcatttgtgggtgttggtgctcgtaaaattactgggtactacaacaaattactagatgaaggtactgaggaattggatgaaaagaaccctgaggaccaagagttgaaagatcagacaaatgcacagaaaaagcccccagagaagtggaagggacagatagagaaggatttgcctcgaacatttccgggacaccctgcactagatgaggacgggagaaatgctttgcgacggttattaacagcatatgcaaggcataacccatcagttggatactgccaggccatgaacttttttgctggcctatttttattattcatgcctgaagagcatgcattctgggctctggtgggggtcattgatgagtattttgatggttattacactgaggaaatgattgaatctcaggttgaccagcttgttcttgaggaagttgtacgagaaagattcccaaaacttgggcctgccctggtgaccacaaaggatgctggagatgcaattacattattgcaatctcttgctggctctacttttgacagcagtcaacttgtgttgacagcttgtatgggttttcaagcagtcagggaaatagggctgcaggagttaaggaaaaaacacaggcctgatattatatctgctatggaggaaagatcaaaagaccgccattcttggaaagataagaagggtttagcaactaaactttacagctttaaacatgatcctctatgcccacaagttaattccaaggaaggggaagatgatttgcaagtgaatggggaaatgcaatttttagattctgggtcagcaaatctagaaacctaccttactagttcagctctagataatgagttggaagagggcattgatcttcaagatcaggttgagaaattggaggcagaggtatctgagttgcgaaagtcctttgcagacaagcaagagcaagagcaggcaatgcttcaggttttgataagaatggagcaggaacagaaagtggcagaagatgcccgcatagctgctgagagagatgctgctgataagaaatatgctgctcagttgctccaggagaagtatgacgcagcgatggcagcacttcgacaaatggagaagagagctgtaatggccgaaactatgttggaagctacaaagcagtaccaggcagggcagtttaaggccaaccagtccttcaatccaagggaaagtctagttccactgaaacacctgaaggctaaactcctgtcgaatcaggacatgattgttgctaaggattggattacctga

SEQ ID NO: 62162 - DNA, 606 bp, Oryza sativa
  Clone ID: PAT_MRT4530_63523C.1
cccacgggtatcctaacacctgcccaaaagaggaccgaggagtcttcctcccccgtccaccgctgctcgcgaatcaccacagatcgccgcggcggagacgaagagcggcggcgcagaggctctcagatccggcgagatggcggcgaaggcgatctcgagccccgtgccggtggactggtacccgacgctggccgtcgtcatggtcgccgtcggcctcatgttcaccgcctctttcttcatctatgaagcgacttcatccaggcgtaaccgtagcttagcaaaggagattgccacagcaaccatcgcatctgtttttctggggtttggatctcttttcgtgcttcttgcaagtggtgtttatgtctgatcgcctggggccatgcagaaagcattttgttgtgttatctattccatagtgaaagttcatctaggatatgtaaggtcctgaaattacgtgcatgttcctacttcttaggtaatatgccttatcgacatgggtatgctttagataaaaattgacgagaggtgtttaagacttatttttgtgccattatattaggcaaaatttgctacagtgcaccgaaagattgcggtctttgctgtgac

SEQ ID NO: 62163 - DNA, 821 bp, Oryza sativa
  Clone ID: PAT_MRT4530_63524C.1
tttcggtccggattcccgggtcgaccacgcgtccggtgcttgtaaaattactgggtactacaacaaattactagatgaaggtactgaggaattggatgaaaagaaccctgaggaccaagagttgaaagatcagacaaatgcacagaaaaagcccccagagaagtggaagggacagatagagaaggatttgcctcgaacatttccgggacaccctgcactagatgaggacgggagaaatgctttgcgacggttattaacagcatatgcaaggcataacccatcagttggatactgccaggccatgaacttttttgctggcctatttttattattcatgcctgaagagcatgcattctgggctctggtgggggtcattgatgagtattttgatggttattacactgaggaaatgattgaatctcaggttgaccagcttgttcttgaggaagttgtacgagaaagatgcccaaaacttgcaaagcatatggatttcctgggagttcaggtggcatgggtgactggaccatggtttctttcaattttcatcaatatgcttccatgggaaagtgttcttcgtgtttgggatgtgatcctttttgaaggaaatcgaacgatgttgttccggacaacgcttgctttgctcgacttatatgggcctgccctggtgaccacaaaggatgctggagatgcaattacattattgcaatctcttgctggctctacttttgacagcagtcaacttgtgttgacagcttgtatgggtggggatcctctagagtcgacctgcaggcatgagttaaggaaaaaacacaggcctgata

SEQ ID NO: 62164 - DNA, 329 bp, Oryza sativa
  Clone ID: PAT_MRT4530_63525C.1
atggcggaagaatgccagttcctatatctcgctccgaacgaaggatggagcggcgccaacctcgacactctcatggagccgctagacgagccaccattgttggtgattgaagagaccgagttccccctcccacaaccttccatggcgctatccctccctatggcacttgcccacgttgcggacaagaccatgcggcaggggcttatccccatgcccggcgacagcgagtgtcagagaggaggggtcatcgcgacgtcattgagcaagaagctgcagcgggaggaagaagctccggctgagggcatcaatgaggcctttacggtgccgtg

SEQ ID NO: 62165 - DNA, 619 bp, Oryza sativa
  Clone ID: PAT_MRT4530_63526C.1
gtgcaatcatgggtatctgtgtccaacgtttgaccgtccgtcttatttgaaaaatttatgaaaaaaataaaaaaaattagtcatacataaaatactattcatgttttatcttataataataattttcacattttggtccttttgaaaaacttatttcgcaaatagacccctgaaaaaacttatcccaaaaatggtcctttttggggcgccagagtggctggcgccgttgtccaactggacggcgccagcctctctggcgccgtccccttgccgacgtggcggggcgatgctgaggaactcacaagaactaaccatataaaaaataaactcaaacggacgaaatatgtggcctgtgaaattttccaaagctctaccgaaaaacttctctcctcgaaaacacaatcttgcaagcggaatttggaggttctaatatcgccgaacccggcaaagcagggagaattggatgtaactttttctgtagatgtccgtggatatattatttgcctgattccgagtctggcggtgcaaccattttggcgccctcctcctgccacgtcggttcgcgtgtaccacggtggcaagaggacggcgcaagagaggctggccccgtcccgttgga

SEQ ID NO: 62166 - DNA, 551 bp, Oryza sativa
  Clone ID: PAT_MRT4530_63527C.1
ccgatctttcacgagcgcgcgaccgggtcgtcagcgtgcgaatacgcattcacctgcacgcgtgcctaggacacattgatcggggcgagactcgtgggcgtcgccaccaagaacctgttctgatatggatgctcatgcctcatcgagcatcgcatcctatactagagcaagttgattgggctgggggggctgcggaccgttcttgggatttccagaaaacaagtgcctctcgtctcggaatgcggggccagctggacttcgattatgaataaatgcacacctatgactgcctgacccacttctccagttttatgatccgtgcgcggtatgccattcgcgccgattgtaagaaccagatcgaaacagtccttagagccatcgacaattcgattcccggtcaattgcgtgaaggttatggtacgagacagaaagttccgccaggagagctcgcacttggtgcagccgatattcaacatctctcttttgcctcgcacatccagacaatcctgccgcaggtccacagcaacctaaagaaatacgcgattggctcg

SEQ ID NO: 62167 - DNA, 888 bp, Oryza sativa
  Clone ID: PAT_MRT4530_63528C.1
aaaaaaaactatttatgcaacttataatttatataaaagaactgcataccaaattaagcctacaagtgcaacacctcgagctaaagaatataatgttgcttagcaagtggttatacaagttactcacctagatggaatgtggtagcagatgctacataataaatattcgagataataaccttagctaaggcttattggaaagcgggggactcacatttttgcaaaaatcatgtttggaaaccgaagaaaatcatgtttggttcctttcatattagggacggctcccaaataaggttttgggaaggtaagtggttaggtaatccctcatttggatatcaatatcctggtctctataatatatttaggcataaacagtcaattatcccacatatctttcaaacaaacccacaaaaattttcatggagacaggatttaattggagcacaatcagctgcatgacataacttattgcctcgtagagctgatttggtttcgatacaggagcaagataaaattcactggaacctcactccaatagggtctcctcgatcaaatctcactacttagttcttgttcacacgggcatcctgaatatcaatagacgtatttggaagataaaagtattgctaaaagctaagattttcctttggtacttacgccaagatgtaattctcaccaaggataacctagctaagcgaaaaagaaaagttagtaagaagtgttgcttttgtcataaggacgaaaccatccaacatttgttcttccaatgtcacttatctcgttcgaccgctaaccccaacagggcacagacacaccgccttaaactgcagacaccctacagtctcacctggaggaaaagtcagtcgcacgatggtgccgacgccgccg

SEQ ID NO: 62168 - DNA, 192 bp, Oryza sativa
  Clone ID: PAT_MRT4530_63529C.1
atggcccgacatcgtggagggcaccactgccgcagccatcgggggtcggtagcctgccaccgcacgccgccgccgctgcctcccttcctgtcggatctggcggaggggaggtcagtgtccatgtcgaaggcgcaggtgcccttgtcttcttgctactgctgcggctgcaccgatgccaacaagaggatgtag

SEQ ID NO: 62169 - DNA, 800 bp, Oryza sativa
  Clone ID: PAT_MRT4530_6352C.1
cccacgcgcggccgcgctccgaaaccctaacgccacccgcgccgccatccccgagcaccaccaaccccaccccccgagcgagcggagcggagaacgcgaggcgaggcgaagcaaacatggcggcggctgcggtgtacggcgccggcggcgcgatgaagggcgggaagctcggcatggaggaggcgcgggagctgcagctcaaccgcatccgcatcaccctctcctccaagaacgtcaagaacctcgagaaggtttgcgctgatctggtgaagggcgccaaggacaagcagctgcgcgtcaagggccccgtcaggatccccaccaaggtgctccacatcaccacccgcaagtcgccgtgcggtgaaggaacaaacacatgggatcgtttcgagttccgcatccacaagcgggtgatcgatctcatcagctccccagatgttgtgaagcagatcacctccatcaccatcgagcctggtgtcgaggtcgaggtgacgatcgctgatgtgtaatgctgccaaactagcactaccttagacctacctgtcttgtttctctgctgcttagaatctcggttccgattgccatgcgtgtaacggacatccaactggtttagtgtatctgggtcttttatatgtgcgcggatgctatggatctttctcatgtaagaggtgtgtaactcgccagttttgcttcaccacatgaaatttggtattggattcaaaaaaaaaaaaaaaaaaaaaaaataggggccgccgctccgggtgctatgggagatttttctacgctactggtttgtatat

SEQ ID NO: 62170 - DNA, 632 bp, Oryza sativa
  Clone ID: PAT_MRT4530_63530C.1
gtacttgtacttttgatgatgcatgcactggttcaccggttaccagctgcacacgcggatcccaggaaaagcctagttcttctatgctgtcatacaagaggacttgactggttgttgggcctgccattgtgcatgcatgcacatattcactaagtgcaacccttagaaaaacttatcccaaaaatggtcctttttggggcgccagagtggctggcgccgtcgttcaacaggacggcgtcagcctctttggcgccgtccccctgctgacgtggcggggcgatgctgaggaactcataggaaccaaccatgtaaaaaataaactcaaacggacgaaatatgtggcatgtggaattttccaaagctccaccgaaaaacttctctcctcgaaaacacaatcttgcaagcggaatttgggggatttaatatcgccgaacccggcaaagcgggggagaattggatgtaactttttctgtagatgtccgtgcatatattatttgcctgatttcgagtccagaaacagaaatggaggcggcggcgccagccatgctggcgccctcctcctaccacgtcggttcgcgtgcgccacggtggcaggaggacggcgccagagaggctggcgccgtcccgttgga

SEQ ID NO: 62171 - DNA, 348 bp, Oryza sativa
  Clone ID: PAT_MRT4530_63531C.1
atgtgcacgtacgtaaaggcgcacacccgtcgagatgatcgaactgaagcttctgtccctcccccacctcctgcattggcccaaacgtacgcgctcaccggccacctgctggaagtggaacgtgcacacacagaaattggattaatcggcgatcagcagcgctctcgtacgatctttgactggggcaccggggataacgacggttttaaattatctgcaccgtatccggccgggtcggcgtcaagtggtcgaatcgtggaggacgaggagggctcttctggaaatccctggacagctttgctgccgcggccggtggagttggtcgctcctgcccaaaaccaggaggat

SEQ ID NO: 62172 - DNA, 1581 bp, Oryza sativa
  Clone ID: PAT_MRT4530_63532C.1
atggaaactgatcgcagttggatgtacaagggccgtcgaaagcgtggcgaagttactgctgagtggatatcgaagactacagaatttcttgacaaggcattcagcagggagacaggacgtgctgggcagcatatactgtgtgggtttatcatggtgagacatatcctgccacgtgaaagcgatatatgccaaagcattgaagatgaagatagggtggcagagattgatcggatggatgagatgatagatgatgtccatgatgcttatgtctcagttgaggaggaagatccggagcctacagcgcaagctttctttcaaatgctgtctgcagcaactcaacctctccacgaacacacacaggtatcacaacttgatgctatcacacgactactagctgtcaagtctcagtatgctatatcaattgctggatttgatgcacttttaaatgtgatatgtgctctcctcccacaaaggcacaaactaccagcaaacttgtatgaggcaaagaaagttcttagtgcattgaacatgccatatgagaagatagatgcatgccctaaaaattgcatgctctttaggaaagagaatgcgcagaagacgcactgtgataagtgtggagagagtatgtatgtggaggttgaagacagaaatggtcacaagaaacaattaactgttgtcaggaaggccaagcaaatgacatggcacaagaatggtcatcggtaccatcctgacaagattgtacacccagttgatgaccaaacgaaggacaatatcaaggctcgccttgatcaagcagcactttgtaacagacctgaattgaacctcatccaaaaacatgcatctagtcagtgggtaaagccaagagctgacttttgcttgaatagagctcagaagaaggaagtattagaatggtttcaaacattgaaattccttgatggctatgggtcgaacctaaggagaggagtgaatttgaaaaccatgcggatcaatgggttaaaaagccatgattaccacgtaatgatggaacgtatctttccagtcaagttccgtggatacttgccaactcatgtgtgggaagtgctagcagagccaattggtagactacaagtacccaatgatcaagattacaattatgttcctaatagcaatgttgtccactatttccaagaagatggtctatccggcagttttgtaatcgatcttggtcaagaactcaataatgatcctgagcaagttgccattagcagggatactgaagatatttgcaatgacaaggacttgaagcttctcaatggatcatctattcaagatgaagatgatgatgacgaggatgatgaatcttattgcacttcctcatctgctgaagatgatgagccatcgggggtcggtagcctgccaccgcacgccgccgccgctgcctcccttcctgtcggatctggcggaggggaggtcgccgctgccacgaaaggcatgttcttgttgtgcaccatctcccacaggtcagtgtccatgtcgaaggcgcaggtgcccttgtcttcttgctactgctgcggctgcaccgatgccaacaagaggatgtag

SEQ ID NO: 62173 - DNA, 651 bp, Oryza sativa
  Clone ID: PAT_MRT4530_63533C.1
gaggcgccagcgtggcggattccttgctccgtttcatccggtagtacagaactacaggagggcaagggcatattccacgtgctcccgaacccgtcccaacccaaccaaccgtcctggatttttcacattttggtccttttaaaaacttatttcgcaaggtagacccctagaaaaacttatcccaaaaatggtcctttttggggcgctagagtggctggcgccgtcgttcaacaggacggcgccagcctctttggcgccgtccccctgccgacgtggcggggcgatgctgaggaactcacaggaaccaaccatgtaaaaaataaactcaaacggacgaaatatgtggcatgtggaattttccaaagctccaccgaaaaacttctctcctcgaaaacacaatcttgcaagcggaatttggaggttttaatatcgccgaacccggcaaagctggggagaatcggatgtaactttttctgtagatgtccgtgcatatattatttgcctgattccgagtccagaaacaggaatggaggcggcggcgccagccatggctggcgccctcctcctgccacgtcggttcgcgtgcgccacggtggcaggaggacggcgccagagatggcgccgccccattcgatgacagtgccagccact

SEQ ID NO: 62174 - DNA, 2739 bp, Oryza sativa
  Clone ID: PAT_MRT4530_63534C.1
atgatgatgaaacacctttgcaaatttggtttcaggccagcatatactgtgtgggtgtatcatggtgagacatatcctgcacgtgaaagcgatatatgccaaagcactgaagatgaagatagggtggcagagattgatcggatggatgagatgatagatgatgtccatgatgattatgtctcagttgaggaggaagatccagagcctacagcgcaagctttttttcaaatgctgtctgcagcaactcaacctctccacgaacacacacaggtatcacaacttgatgctatcacacgactactagctgtcaagtctcaatatgctatatcaattgctggatttgatgcacttttaaatgtgatatgtgctctcctcccacaagggcacaaactaccagcaaacttgtatgaggcaaagaaagttcttagtgcattgaacatgccatatgagaagatagatgcatgccctaaaaattgcatgctctttaggaaagagaatacgcagaagacacactgtgataattgtggagagagtaggtatgtggaggttgaagacagtaatggtcacaagaaacaattaactgttgccaagaaggtacttcgttatcttccattcatcccaagaattcagcggctgtacatgtctgaatcgcaggccaagcaaatgacatggcacaagaatggtcatcggtaccatactgacaagattgtacacccagctgatggtgaagcctggaagaaatttgatagggacttcacaggcttttcaatggaagcccgcaatgttagaatagcaatagcaacagacgggttctgtccatttggtatgggttcttcttcgtacacttgctggcctatgtttgtcattcctttaaaccttccacctggtgtttgcatgcgccagcacatcatgttccttaccttgataattcctgggccaaattatcctagcaaacacattagtgtattcatggaatccttagttgatgaacttatacatgcttggcagcaagttagcaatgaaccacctcttcgtctctcaggtcaagagatccgtgcccggttagataaccttgtccctgctgctaatggagataagtttaatgtcgctgaggcaattttcaatacttgctttgacattccagaccaaacgaaggacaatgtcaaggctcgccttgatcaagcagcactttgtaacagacctgaattgaacctcgtccaaaaacatgcatctagtcagtgggtaaagccaagagctgacttttgcttgaatagagctcagaagaaggaagtattagaatggtttcaaatattgaaattccctgatggctatggatcgaacctaaggagaggagtgaatttgaaaaccatgcggatcaatgggttaaaaagccatgattaccacataatgatggaacgtatctttccagtcatgttccgtggatacttgccaactcatgtgtgggaagtgttagcagaggtaagcttcttttatcgcaaactttgcgcaaaacagtttgatcctatagagatggcaaacatgcagtctcaagtaattgttttggtttgcaaattagaaaagatctttccacttggattttttaatccaatgcaacacttaatgatccacttaccatatgaagctagcatgggtggacctgtgcaatttagatggaattaccccattgaaagaggccaaaagtatcttaagagcaaggttagaaaccgagcacgtgttgaagcatccatagcagaggcttacatactagatgaaatctcaaacttcacatccatatactttgctaatcaagtgcagacaattcacaatcctgttcctcgatacaatgttgctactcagtctattgattgttccctaaatctattctttattaggggggattctactagccgtggagtccctcgacacctaactcgtgaagagtggaatgctgccatgttgtatgtgcttacaaaccttactgaagtggatgactacattgggaaattcatagatgaggaatggactagacgaggtatcccaacaaggcaacaacaagagaatatcttacggaatggtgctgggagagatcgtcctaatttcgtatcttggttctatcaacaaggagaaaatagtgacacaactgagtattatggttacatcaaagaaatagtagaaatcagctttgatggcagaaaacctctcacacttgtgctcttcaattgccattggtttgacccaagcaaagtgaggtatacaccaagatatggtctggttgaggttgctcatgcgtcaatccttccaaaattcgaaccatttgttttgtctcatcaagcgacacaggtgtattacatgccgtacccatgtaaatttgtgcaagacctcactaattggtgggttgtgtataaggtgcagccaattggtagactacaagtacccaatgatcaagattacaattctgttcctaatagcaatgttgtccactatttccaagaagatggtctgtttggcagttttgtaatcgatcttggtcaagaactcaacaatgatcctgagcaagttgccatcagcagggatactgaagatatttgcaatgacaaggacttgaagcttctcaatggatcatctattcaagatgaagatgatgatgacgaggatgatgaatcttattgcacttcctcatctgctgaagatgatgaagttcccactagtagggatatcttatttgacgaatatttctaa

SEQ ID NO: 62175 - DNA, 3294 bp, Oryza sativa
  Clone ID: PAT_MRT4530_63535C.1
ttagaaatactcgtcaaataagatatccctactagtgggaacctcatcatcttcagcagatgaggaagtgcaataagattcatcatcctcgtcatcatcatcttcatcttgaatagatgatccattgagaagcttcaagtccttgtcattgcaaatatcttcagtatccctgctaatggcaacttgctcaggatcattgttgagttcttgaccaagatcaattacaaaactgccggacagaccatcttcttggaaatagtggacaacattgctattaggaacaaaattgtaatcttgatcattgggtacttgtagtctaccaattggctgcaccttatacacaacccaccaattagtgaggtcttgcacagatttacatgggtacggcatgtaatacacctgtgtcgcttgatgagacaaaacaaatggttcgaattttggaaggattgacgcatgagcaacctcaaccagaccatatcttggtgtatacctcactttgcttgggtcaaaccaatggcaattgaagagcacaagtgtgagaggttttctgccatcaaagctaatttctactatttctttgatgtaaccataatactcagttgtgtcactattttctccctgtcctatagtcaccaaaccactatttattgtagttgcatttggcctctcatgttcatatttgtgtattcggaatcgatacccattcacatcatacatattatatagcaagactcgagtgtggcatcctttagctacttgcctcaaatcatcactcatagtttcatctaacatactttgttgatagaaccaagatacgaaattaggacgatctctcccagcaccattccgtaagatattctcttgttgttgccttgttgggacacctcgtctagtccattcctcatctatgaatttcccaatgtagtcatccacttcagtaaggtttgtaagcacatacaacatggcagcattccactcttcacgagttaggtgtcgagggactccacgactagtagaatcccccttgctcttaagatacttttggcctctttcaacggggtaattccatctaaattgcacaggtccacccatgctagcttcatatggtaagtgaatcattaagtgttgcattggattaaaaaatccaggtggaaagatcttttctaatttgcaaaccaaaacaattacttgagactgcatgtttgccatctctataggatcaaactgttttgcgcaaagtttgcgataaaagaagctcacctctgctagcacttcccacacatgagttggcaagtatccacggaacatgactggaaagatacgttccatcattatgtggtaatcatggctttttaacccattgatccgcatggttttcaaattcactcctctccttaggttcgacccatagccatcagggaatttcaatgtttgaaaccattctaatacttccttcttctgagctctattcaagcaaaagtcagctcttggctttacccactgactagatgcatgtttttggatgaggttcaattcaggtctattacaaagtgctgcttgatcaaggcgagccttgatattgtccttcgtttggtctggaatgtcaaagcaagtattgaaaattgcctcagcgacattcttctcattgtgcatgacatcgatgttatgaggaagtactagtttgtgaaagtacgggagtctccacaaactagatatatgtgtccaatggtgatccttgccatagcctacaaacttatctccattagcagcagggacaaggttatctaaccgggcacggatctcttgacctgagagacgaagaggtggttcattgctaactgtagtgtttgatagaaaagaatttgaatcacttctaaaactatgatcaattgggaggaactggcgatgacaatcaaagaatgagtactttccaccaaacttcaacctttttccttggagtgcctccatacatgttgggcatggcatctttccatgcacacaccaaccggaaaatataccatatgctggaaggtcatggatagaataaagaaaggagactcgcatgatgaaattcgtcttggtggcacgatcatatgtcaacacaccttgctgccaagcatgtataagttcatcaactaagggttccatgaatacactaatgtgtttgccaggataatttggcccaggaattatcaaggtaaggaacatgttgtgctgccgcatgcaaacaccaggtggaaggtttagaggaatgacaaacataggccagcaagtgtacgaagaaaaacccataccaaatggacagaacccatctgttgctattgctattctaacattgcgggcttccattgaaaagcctgtgaagtctctatcaaatttcttccaagcctcaccatcagctgggtgtacaatcttgtcaggatggtaccgatgaccattcttgtgccatgtcatttgcttggcctgcgattcagacatgtatagccgctgaattcttgggatgaatggaagataacgaagtaccttcctggcaacagttaattgtttcttgtgaccattactgtcttcaacctccacatacctactctctccacacttatcacagtgcatcttctgcgcattctctttcctaaagagcatgcaatttttaaggcatgcatctatcttctcatatggcatgttcaatgcactaagaactttctttgcctcatacaagtttgctggtagtttgtgcccttgtgggaggagagcacatatcacatttaaaagtgcatcaaatccagcaattgatatagcatactgagacttgacagctagtagtcgtgtgatagcatcaagttgtgatacctgtgtgtgttcgtggagaggttgagttgctgcagacagcatttgaaagaaagcttgcgctgtaggctccggatcttcctcctcaactgagacataagcatcatggacatcatctatcatctcatccatccgatcaatctctgccaccctatcttcatcttcagtgctttggcatatatcgctttcacgtgcaggatatgtatcaccatgatacacccacacagtatatgctggcctgaaaccaaatttgcaaaggtgtttcatcatcatatctcttgtttgaggacgtgtgttgttgcagtagttacaaggacacaacacaccagcacgtcctgtctccctgttgaatgccttgtcaagaaattctgtagtcttcgatatccactcagcagtaacttcgccacactttcgacggcccttgtacatccaactgcgatcagtttccat

SEQ ID NO: 62176 - DNA, 419 bp, Oryza sativa
  Clone ID: PAT_MRT4530_63536C.1
tcccaagtgatgataaagactggttgaatagtcagcaggcaggccgtagattggctagcgtatgtaacagtatgatgagatcatgcagtcagtatatcctgttctgagtcgtggaaaagatttgccctttcatggacctaggtcgactctgttcatcacaaatcagagcaggctctgggaatatcatatgatggtataaatatcatatattttagctgtgctgaaactcttggaatttgatcctccgtacttggcatatttcattaaggaaagggatcacacacatggcatccttctaaatcttcctaggcccgagctggagagggattgatggcagctcttggctcctcttgcttcccttttattaaaaggacatgcctctctccactgtccatgatcatcccctgggcccttgtaaa

SEQ ID NO: 62177 - DNA, 4020 bp, Oryza sativa
  Clone ID: PAT_MRT4530_63537C.1
atggcatcgaaggagaatagatccgaggctatggtttcgggggctgacgggataaaccaaggcgaaaacttggatccaattggtgagggcttggatgatcatcatggcaacctagatcagggtttgtcgagcgccatggtgcttttcaaaaagaagctaactgatggtgaagaggaagatgacgatgtcttggatgtggaccttggtgaagaggtggaggagatgaaatctaagtggctgatcattgctcgcttctactcaggacaaagagaaagactcggttctttgggggataatagattcttggttgagtttgcttgcgaagctgactacaaccgagttgtgtatgggggcccttggaaacataagggtgatgctcttcttgttgtcccgtatgatggccttgctagaccttctgaaatctgtattgaatcgctccctctgtggttacggatatacgatcttcctgagattatgatgactactggtttcgctaggagtttgggtggaaagatcggggaggtactggaggtaggaggagctatacacgacttcctgcgggttaaagttgcttttccgctatcctctcctttaaaacctctgttgaggatttggattaaggataaaggtgttatgtcttttccagtgaagtatgaaaatgtgccttttttctgtttctcgtgtggacgaattggtcatgcagagcgggaatgcccggaggtgggatcgtctagcgctcaggtgcgctttgggaaggagcttcgagcttcaccgttaaagaggaaacttcagagttttgctccctcttcaatctctaccccaaaagctgccaaggtgctgaattttagtggtgcccaacgggagaaggttcttactgcctctagttcttctaaagcttctgtgcttagtaatccaaagttgaacagcggtggcgcgactatgttcttggttggggagaaagcggatcaggaagagaaggcggccagtgttgaggcagaagcctcgttgtatccattgccgaagggaatcaccgcagctctagaggaaggtgtctctcagatgaagatgcagttagacgatggtgagctgaacttggcagctcgggggccatgcagtagagagcgagtgtccatgagttcagattatgggctgtcgggggaggaaacaccgcaacatagtgccgggattgtctctggtgtggtgaaccaagatgtaaagtcccctggcgggcaatccaaaaagaagcaatgggtgccaactagggagactgatcgtgcagttaaagctaagagcctatccataggcagggatattggcaaaccaaggaagataactgtcagattatcagcagatgcagtagaagcaaggaactgtatgcagattcgggaacagctaccctggtgggcgctcacggcgagccccaccaggaacaatgaatgctctagcctggaactggtccgtcttgtgcggatgtacagcccgaggctggtgtttctctcagcaaccagacaagatcaggagagagttcagggtctcagatggaggctaggtttgaagaattgcctggccttgaaaggagaaggatcaggtggtggagtggcacttatctgggatgaaactttatctgttcatcttttgtctatgagctgcaggtccgaccactgtcctatactgcttcgggtggagagagagaaataccgacctgtcaaatgtttccgctatgaaatcatgtgggaacgagaggattctttgggggaggctattaagctggcctgggagcaggaaggtaccgctttgaatcttggggagtggagtgtcagggtttttggttctgtgtcgcaggagataaaggagatcaaagctaaggtggaggaactatcaagtttggatccaattaaccatgacggtgagattaggaagttgtatgcccgcttagatgagctgttgtatagggaagaaatgatgtggctccaacgatcgcgggtgtcttggttaaaggagggagaccgcaacacaaagttttttcaccgccaggcagcttggagagcgaagaagaataagatcaattgtcttaaagatgaggatagtagatatgtcgagaacaaaggagatatggaaaagttaacgagggatttctttcaaaagttatatgcaagagatgagggagtggatcctggtgagttagtggacttgtttgatgtccgggttgatgcaactgaaggcctctcgacgattctgaaccatgaagtggttgctgggcgacttgaggaactgaaagtttgtcgaagggcgccgggggtttcccatttactctttgctgatgatagcctgttgtttgtcaaagcatgcccgcagcaggttgaatctgctaccttcgagagtaattatttgggtctccctactctagaggggagaatgacggcagacaaatttaaaacaatcaaggaacgcttgatcaaaagactgaatagctgggcagaaaagttcatgtcgtcgggagcgaaggatattcttatcaagttcgtggcgcaggcaatacctacctatgtgatgggggttttcaaactttcggtgtcatcctgcgaagcttacactaaactggtgagagacttttggtggggtgacgaggaggataagaggaaggtacattggacagcctgggataatttggttctccctaagtgcatgggtggactcggatttagagatgtcagaattttcaatcaggcgctactggggagacaagcctggagattaattcagttcccggagagtctatgtgctcgcattctaaaggccaaatactttccaaactgcgatctgattgatgcagtgttcccagctgatacatcgcagacatggaaaggaattgaacatggaccgcaacttttaaaggaaggactgatctggcgcattgctgatggcaagagggtcaaattctggaaggaccgttggatcccaagggagtcctcttttagggtgtcaggtatgaaaagtcgatgtcggctccgatgggcatcacaattcatcatccctgaggggaattgttgggacgaacagctaatcaggcgggtctgtcatccttttgatgccgatgaaatgttaaagattaagttgccccaatttcctactgatgattttctggcatggcactttgagaagtatggaatgtacacagttaggagtggataccgtgctgctctgatgaagcaaatcaatacggactgtgtctcttttagctcggctaactctgactggcttctgattctgcttgatagactaagccctgaagagcgagcaaagctcctccttgtcctgtggagctcctggttcttaaggaatgacagcttgtttggttcaggttcatcgactgtccatggctctgtcttgttcttgcagagcctgtgggaatccattagtaccacaaaggtcaatcctgttactgatataaaagggaaaggcccccagatgggtactaaatctgctactacggttgcccggagtagtcccagtgatttggtgcgctgggaagcaccgccgcaaggatgggctaaaattaatgttgatggagctttcgtgcagcaaatcggagaagcaggtactggaattgtcatccgtgatcatgtgggtgatgtcctcctgacttcatggaatgggatccgaagctgtcagtcgcctgaggaagctgaagctcaagcgtgcagggatgggctacggctagcagcagactggattcagatgccggtgatcctagaatcagattgtgcgaatgtggtggctagccttacgtcgggagctaagaacagatcgcctttgtggcaggtcttccaggaaatcaagtcgattcttccacttcttcctgcttttaagtttaataggattaataggggagctaacgaagttgctcattgccttagccagttggctaggcgcctgaagcaatcttcggtgtggcgtatctgtgcgcctgagtgtgttaaggagagcttagccaaagactgtatccctcctaatctttaa

SEQ ID NO: 62178 - DNA, 501 bp, Oryza sativa
  Clone ID: PAT_MRT4530_63538C.1
atggcgctcgggaaggcgaacccgacggcgtcgacggcacaactcggcgcggcggctagcggcggccagggcagcgggaggcagcggcggtgggtgcgcggcactagggcgatggagtgcacgggagagctcggtaagagaacggaaaagcgagaaggaggtgcgggcatcgtttatataggcacggagtggtcggacgtggccgggaacgggccgatttcgccggggatgtgggggaggtggacagagagagagagagagaggccggcttcgaatctcggccagctcgggcacgagcgcgggcggagaagtggggcggcggttgcaggggagtgcggggcgcgtgcagggtgtgggcgacgtgcacgggaggcgcgggagaggcgggaggcggcggttgtgggcgcgggcagcgctggccggaggagggagacgggcccgacaggatttatcggcccagtctttgaagatgttcatagggataggatttacgcgcatgct

SEQ ID NO: 62179 - DNA, 514 bp, Oryza sativa
  Clone ID: PAT_MRT4530_63539C.1
tgactgttatagctaagctttaatgccattttgctgggcccagaattgtataaacacatcaaaattgccgccgatgatgttgagacaaagcaaattgtgtttcaagacacccaagataaaatgccatcaaatataatatctgttgtgcaatgcggaggatccatacatcttctgtggtctcaagaagctaaattttctattaagccaaacatcacaagacaaccaaacactgactataaaacgactcagcttcattttggtgaccttggtagatgagatacagaaacccaattatcatattaaatttgatcaaggttattgaaaagaagcctcgttcgactttatctagtgtacaatttataaaagcaattgaccacataaacaaggggttatcaaaggataaccagttaatgttcattcatctggacattacaaatttggaatatattaaatatctggattttgaagattttgggtattacattagtatagattagttagattattcattctt

SEQ ID NO: 62180 - DNA, 369 bp, Oryza sativa
  Clone ID: PAT_MRT4530_6353C.1
atgcacggtacagcgggatacggccaagacggggcacaggtggctcggcagcggccgagggaggtgccgaggagctccaacgaccctccaccggtgacggcggcacaagacggagcaaaggtatgtggcccggcactgcacgccatggttgaggtccggttgcaagatgctatggcgataggcgagaacttcggacaaattgacgagggcgtgagcatctacgatacgcccatggtggaggcacagtcggtggccggttgcggccacgctgcaagcggcgtcgccaggacagcggcggtggagccacggcgggcggacgacagggatggtggcgccaagtccggtggtcggcagcgcgttgatgggtag

SEQ ID NO: 62181 - DNA, 2194 bp, Oryza sativa
  Clone ID: PAT_MRT4530_63540C.1
atgcgctactgccgccgccgacagccaccgcgtcgcgccccggcccgctcgccgctgacagccaccatgatcaagcgccgccacactcgcatgctatcactcctgtccagggtgcccaacgaggagtactcgtatcatcattcaccgccaccaggaggaggcctcagccgacatcatcaacatggggatgaactcatcggcgacggaggcggggtggacgaactctccggcgatgggggtaggcaaaaaaaccaaataatatttgagtggatctatacccgcaagagcccagatccaaatccgagcgagccgatgaatttcttcagctccgtcctctccgccgccggcgtcggcggcgacgagcacgaggaggagcggggagagggggaggaagccgcggcggagcagggggaggagggggaggcggagtccggcggcgggtggagcttcggtgggctgatcaagacgttggcggaggagatcgatgtgcggccgcgcgacgagcaggaggcggaggagggcggggaggaggtggcggaggggaagggggaggtcgaggaggaggctgatgcgggcggcgggtggatcttcggcgggctgatcaagacgttggcggaggagatagaggagcagcggaaggtgaacagccagctggaagccgaggaggaggcggcggctgctgctgctgcggctgccgcggcggcggcggaagaggagggaggggaaaccgcgggttcgggcgacggcggggagtggagcttcgggggcctgatccagacgttcgcgacgcggtcggagtcggtgctcgagggctaccgccgcgacatccaggacctcggctcgggcctccgcctcgagacggcaaccctccgcgccgccgccgcacgggccgccgcggcgttccccggcgcgctcgaggccggcgcgtccgccgcctccaacaggctcgagtccgtcggccaggcagtcgacgacctcggcgccgccgccgccgtcctcctctcccacgccaacgaggccctccgatccgtcgacgccgacggcgaggatggcgccggtgacggctcctcccatccctccgactccgcctccgcctccggcgcctcctggcgcgcgtcattgccgtccaagaagtacacccgtttcgaggcgcaggtgctcgcgctgcgcgccgaccctgccaccttcaccgaggagccggaggatgccgatgggttcgctaagtggcgggatgcgttcagaatcgatgagaggaaagaggagatcgagggggtgctgaaggagagccccgggctggagagcttcgtagagaggcttgtgccatcggtggtagactatgacatgttctggtgccggtatttcttcgccgtcgataagctcagacaagccgaggatgtccgcaccaagcttgtgaccagggcaatgtcaaaggaggatgaggaagagctcagctgggatgtcgatgatgatgatgaggatgacgacaatggtgatcacaaggaaggtgccaacaccgtagtgaataagaaagaagagcaaattgaggagcctgttagccacaaaacagaggatgataaacaaggagcggatacacctgatgtttcagaggacaagaagactactctggcagctgagaaggatggcaatggcgaatccaaggatgaagtagcagcaccaaagtcgagcaatgacatggggcgagaagagaaaatcgactcgtctaaggagagtgaattctcagcggcatctcctccatctgcacaggaggaagatcttagctgggaggagatcgaagatgttggtgatgaagatgagaagaaaaaaccgattccacggtcaagccctcctagcaaagctgaggatatcagaaaacgatttagttctgtcgaagatgatgaagagctgagttgggatattgatgagtgaaaaaacctctgcatcacttaatttagtggtctgaaagttgtcagcttaaaatgttatcacacttttttccactttggtgtcaattgggatttccacagtgctggttgacatatgatgtgaatattggatggtcactagtcattcaaattcaatggggttgtttgtttgattactgcccaaaaaaaattttcaatagaatggtagggttcttctgttatgaacttacgattggtaatttgatttcacatagtgcctacttttcttcttg

SEQ ID NO: 62182 - DNA, 559 bp, Oryza sativa
  unsure (1)..(559): unsure at all n locations
  Clone ID: PAT_MRT4530_63541C.1
ggtgcagaacgcatggctgtggcggatccgccacaaggtctgggaattgtggcctgtcgtgtgaactccgattgataccttgtgtgngttgcacaaaagcttgtgtgtgcngcacctgtgtntgtacgacacaacgagtgggggtgtgacaatgcataccgtggtgcaatgcagacacctggatgcacatgcacaaccaatgggccaaagacccacagtgaggaaatgcactgtgtgntgtgctgtgtgccaactggggtgatgtgccactgggcacagccagaggcacgggaggatgaccggtgattggctgtgtggtgctgatggctggacgaaatgaaaacctgggaccggtgggtgtgcatgcaggacccaacccccctgctggttgaatggctgaagtttgggggatgaatggagtgtnggcnatgtgttggtgtgtgtgccccatgctgacctgacctgtggtgaagtgtggtgaacgatggctgatggatgatgggacctggagtgctgactgtgtgttgtggctgtggtggaaaaaaaaaaaaaaaaaaaa

SEQ ID NO: 62183 - DNA, 729 bp, Oryza sativa
  Clone ID: PAT_MRT4530_63542C.1
atggcgttggagggagccgcgggcggcggcggcgtcggcggcggtggcggaccaccggggcaggaggcggggaagaaggtggggtggagcaaggaggaggacaagctgctgcgggagctggtgcggaagcaaggcgggaaggactggggcgtcatcgccaccgcgttccccggccgcaccgacaagtcgtgccgcctccggtggaggcagcacctggaccccagcgtcgacgtcgcgctgcccttctccgccggcgaggacaggaagatcgtggagctgcaccgcgtccacggcaaccgctgggccaccatcgcggccttcctccccggccgcagcgacaacgccatcaagaaccgctggaacacccacctccgcaagcgccacgcccaggacgtgcagcagcgcccgtcaggtggcctcgccctcggcctcggcggcggtggcggcgctgggcaggctgcgggcgggaaactgacgccggtgtgcctccaattgttccctccgacgcaggcaccgccgatcggggagaacttaccggggccggcaagaagcgctgtgccggagctcctcaagctcttccccctggctcccggtgatctcaaggacaatgcgagcgcggcggcggcgatggatgtgggtaacgaggccgtccgcgcgctccccgagttgaggctttccccggcggcggtggtgttcgacgcaatgccgctgcaggctatccggatgtag

SEQ ID NO: 62184 - DNA, 894 bp, Oryza sativa
  Clone ID: PAT_MRT4530_63543C.1
atgcagcctatgagtacgaagatttgcttgggcataggagcgaagcgagagatttttcaggatcttgctccactcctgtggcactcttatggaacaattgctgcactactccaggagattgtgtcaatctatccatcactttcacccccaacattatctccaggggcttcaaaccgtgtctgcaatgcacttgcacttcttcagtgtgttgcctcacacagtgacacaaggattcctttcttgaatgttagttttgcgcataggaatgttcatctgtatgtggctttatgcttccagttggctattgttgatgattctgaagtcattgggtttctgctgcaaactgaaataattcctctgtgtctccgtactatggagatgggcagtgaactttcgaaaacggttgccacctttattgttcaaaagattctgcttgatgatgttgggcttcgctacatatgtgctactgctgaacgtttctttgccgtagccagtgttctatcacagatgctgtgccgtgcagcagcagcggaagtaggctttggagtggcgcggcgtgtgtcagatctgcctgcggcggcggcagcggcagcggcagctcactgcctcatcactggtgtagctgtcacctgtcagtggacggccttggggaggcgccgccgccaggctacggcgttagcgggcgggataacgggaggagaagggggttgggttgggtacttaggttgggttgccgatcctgccccttctccgaggatgcgacagctgttactgcatgggagggacccaaggggggaggcaagcagtggatgctcaattcctgcacgtattacagtgcttgcttgttcctctaacgtggagcgcacactttttttggagacatatttactttga

SEQ ID NO: 62185 - DNA, 2103 bp, Oryza sativa
  Clone ID: PAT_MRT4530_63544C.1
ccctcccctcgcacggcgatcggatccagcgcacgggtggggaagcaggcggcgccgctctcccccacgcacccgaagtgcggcggcggagcaggaacctcacttcttggtggcggttgaatctccaaatttccaaactcggaaggctagtaggcaatggccgtggcactagaggcagggaggaggaagcgagcggcggtggtagttctgggagacattgggcgcagcccgcgcatgcagtaccactccctctccctcgccaaccaggctggtatggaagtggacattgttgcaaatggaggaagtgacccgcatctattattgagagaaaatccatcaattcacatccatgaaatgaaatcagtgcagttaacaggaatattaaagatatccggtgccctgacactgctacttaaagctgccatccagtttatcatattgatttggtacctttgtttcaagattcctcgccctgatgtcttcattgttcagaatccaccctctgttccaacattggctgctgtaaaactggctagctggctaagaggtgctaagtttattgtggactggcataactttggatatacactgcttgggttgtctcatggcagaagccatatcattgttaaaatctacttctggttcgagaagcattttggacggatggctgatggtgccttctgtgttacaaaagcaatgaaacacgagcttgatcaaaaatggggaatcaaccactctaaatatttgattgctgtaagaaaatttcactttgatatagtttctactgtttgctcttacaacacagagaaagaagtggaagacaggaacactactgtatttacaagctgggtcgatggtgaaattttcttgaagcctaatagaccagctcttgttgtcagcagcacaagctggacaccagatgaagatttcagcatacttctggaagcagcacttatgtacgatagacgtgttgctgcaactttaggagaagatgattcaatggacgagggaaagctttggattgatatcaagaacgggaagcaatttgtctacccaagactgctattcattatcactggcaaaggacctgataggatgaagtatgaggagcaaataaagaggttgaaactgaggcgtgttgccttccggactatgtggcttgcatcagaggactaccctcttttgcttggatcggctgatctaggtgtatcattgcatacttcctcttcagggctagacctacctatgaaggtggttgatatgttcggttgtggattaccagtttgtgctgcttcattctcctgcattgatgagcttgtaaaaataaataataatggacttcttttttcaacatcttctgagcttgccgatgaacttatgatgctctttaaggggtttccggaagaatgcgatgacttgaaatccctcaaggttggtgccttgaatactgggtcatcttccaaatggtcgacagaatgggaacgttatgcactccccttggtgaaccagtcacctgagtatgccttaccaatttctttcgtaaggaaatttgcagttgcaggtcataggttgaaatgcatgataacatacgacaggtagtataggcgcactgtgcacttgagtgagcatatggcatatgtacatttgaaggttggggagagaccatatcatatttttgtttgcttacaccaaggcaggatgtatgacaactagaactgaccctttagtttgatataggacctgactcgaatctcctttgatattttatttggtaagcaaaagggaaacccttttttgtaatagaagttgacaacacgttttgtaaacagacatgtacatgtactgaagtacggtcgtacaaaaaagaaacgctagtctcctctctcaagaaaagaaaaaaaaatccaggaaattgttcttgttgcctctttactgccaccgggggtgtctatatctccagatccaacacaatgtctggggaatgaattcaaggatgtaaaacatcagattctatatatgttagcctgcaagaaccgctacaatatactattctcattttctgtcagacgaacatgaacttacactctgaatctgttctgatcc

SEQ ID NO: 62186 - DNA, 368 bp, Oryza sativa
  Clone ID: PAT_MRT4530_63545C.1
ggggaaaatggttcttttttcctttcaattcaagggcaaaacctgcatacatatttggaggcacaacaaaatttgcaaaaaagtttggggggtggattttttaaggggctgggcctaacgtggggacctgaccacaaacttttccagacctcgattgggttggacatatatgggagattcttatcagggcaaatttcaaaggttaaacacaatattcaccagatttccctcttttggactgaatatcccagttttgaaatagacccaaaatggccccttacctacacctggttttccaaacatggtggggaatttttcaagaagacaaagccaaaaggggaacatttttttgatcatgccaccagggg

SEQ ID NO: 62187 - DNA, 201 bp, Oryza sativa
  Clone ID: PAT_MRT4530_63546C.1
atgcctcggccaacttgtcggctccgggcacagacgagatggcaggcagtgaaggaggagaaggagcgggcagagttcgcgtggtcacgacaacggccggagtttcctccgcggtgctgggggagctccgatggcggcttggagaagaaagcgagtgagaacgatgtcgtctttgatagagcctgttcacaagagatgtag

SEQ ID NO: 62188 - DNA, 489 bp, Oryza sativa
  Clone ID: PAT_MRT4530_63547C.1
atggatcaggaggtgatcatggcgacgccaccgctgacgccgccgcctcgcgcgaggtcgtgccgcgacaggtggcgccaccacctcgcccgcgacgtctaccaccgccccttcaccgcccgcgaagacgatgagctcctacgcctccactaccgcctcggcgaccgctggaaggagatcggccgcgccgtctacggccggacctcgcgcgtcatgaagcaccgctggagggagctccggcgcggcggcttccccgctgctgccaccaggaaggagcaggcgcctgccatggacgcggacgacatggtggaaagcgaaatggaggagtcagatcagtcgctgccgccgctcaccaagaaggcggagctccaattggtctaccgctccttcattggcgagatcagcctcaacctgcgactggggaagtttgacatcacagccaaacctttggcttatcccacgccctaccgctttgatggagctgtttga

SEQ ID NO: 62189 - DNA, 408 bp, Oryza sativa
  Clone ID: PAT_MRT4530_63548C.1
atggtcctgggccgaatgcaagtgtcgtcggacgtgcgcaaggtgatggggactactccacaagatgatcagtgggctattcttggagggactggagaatttgttgccgcagagggtattgtcgaacacaagatagtccaggtagattgtaccgggaggatttatgaaatcaaaatccatgccttctacattccaatgaactcatcggcgatgtcagaggatgccattggagacgtcttgtatatgttagaggacgtcgttggtgatgaggccaccactttggttgtcgttgtcgtcgtagatgacgtgatcgacgccgtcgtcggtgacgcggtcgttgccgtcgtaaaggacacgaagaccatcggcgatgttgtgtcggagaagaccatcgtggtgatgatgtag

SEQ ID NO: 62190 - DNA, 4044 bp, Oryza sativa
  Clone ID: PAT_MRT4530_63549C.1
atgtcgattgctgaaggagaagttgtcaatctgaaccagaaggtggtggatctcagcacgaacctcgaccgcatcctgggatcgctaaagggtgtggaggcttggattccaagcgtcgacgctggaatgcaaggcctccggcggtcggtggaaggaatcaaggcgcgggtcatcaagctggaggcccagtcgtcgacggcgacgcctccgccaaatgggcaccgcgtggacaacaagtaccagggtgaagcgactgcggcagagtctgcccaggagcgaaccctggtcaagagtaagatccaaatccctcaatctgcagttaatttcgaagttggggagagttcagagtgggggattgggaattctcaatttggaacacaggggcctagattacctaaaactgaattccctaagtttgatggagataaccctaagttgtggaagaaaaaatctgaaaaatactttgacatgtatcaagttccttatgcaacttgggcctcctttgctacccttcacttcgtaggaaatgctgctctgtggttacaaacttatgaggaattacatgctgtagaaagttggtcgggggtgtgtgtagcagttaatgggaagtttggtagggataggtatcaacaattcttagagaaacttgataacttgaaacaagagggaactatagaggagtattacagtaggttcgaggagttgatgcataaggtactggtgtataataggggttatgatgagaccttctttgtgactaagttccttgggggtttaaaaactgagattaaggcagcaattaagctgcacaggcctggtactgttgatgctgcgttgtctcttgctaaaacgcaggaagagctattgatggaggtgaatttgaaggcatatcacaagaccactataaaggagtcgttcaagaataatttcaaggtgccaagtctagctaagggcatccttggccctccacctgatgagatcaagaaaactgaagaaaggcctaaatgggaagaacaatatgactcattgaatgcagctagaagagctaggggagagtgctttaagtgtggagaaaaatttggtccaggccataagtgtccaaaggctgttcagctccatgtcttggatgaattgcttgaggtctttcagttttctgatgaacctgggcaggtggaggagagtagcagtgatgaagaactgcttttatctgaaaatgctttgtttggaactgagggcaagcgtactatatggttgcaaggactgattcagcaggtcctcattttgattgattcaggtagctcaagcagttttatggcttctcatttggtggacaggttgcatctggttcccaatagcatacctagtgctctggtgatgataatagatggtggaaaattgttttgtgatgagatggctgagcaagttgagtggtggtgccagggtaatacattctcttctaacttcaagattctcgggttgggtggctatgatttgattttgggaatggattggcttgaggctcatagtcccatgtggattcattgggggcgtaagactggtatgcataaaaagggggtgatttcacagttaatccagctatgttccattcaagaaatagctgcaaaccaggaggcaattccaagggaaattgaggcggttttgcagcactatcaaggactgtttcaagaaccaacagaactcccaccacacagaacctttgaccatgagattcctttgttagatggggccaagcctgtcaacattaagccctacaggtatgctcctaaacagaaggatgaaatagagaaacaggtcactcaaatgttgcagcatggtgttatacagcctagccatagtccttttgcttcccctgttctcttggttaaaaagaaggatggtacttggcggttctgtgtggactataggggtttgaatgacattactgtgaaaaacaagtacccaatgcctgtggttgatgaattgttggatgaattgtcaggtttaaaatggtttactaaactggatctaagatctggctatcatcagattcggttagtggaaaaagatgagtttaagactgccttcaagactcaccaaggacattataaatttcgtgtcatgccattcggattaaccaatgcaccagccacttttcaggggttgatgaacactatatttgcacatgccattcgcaagtttgtgctagtttttgtggacgacattttgatctatagcaagaccttggctgaacatgtctgccatctgaaatcagtactgacagtgcttcaacaacatcagctctacatcaaaagaagtaaatgctctttttcacaaccttctctggaatatttgggacatataattggtgctattggggttgccactgatcctcagaaggttcaagctataagggactggccagtacctaaaaatcttaagcaattgagagggtttttgggcctggcagggtattatagaaagttcatcagaaattatggggtcatcactaagcctttgatagagttacttaaaaggggtaccttctttttctggtctacactggaacatactgcctttcaagaagtgaagcagtgtcttcagcaagcaccagttttggccatgcctgacttcaaccaacaatttgttattgagactgatgctagtgacaagggtattggggcagttctcatgcaggctggccatcctattgcttttctgagtaaggctttgggacctaaagcacaagggttttctacatatgagaaggaatgtttggctattctcatggctgtggataaatggcatcaatatttgcaatatgctgagtttgctatcctaactgaccacagaagcttgactcatctgtgtgatcagaaattgtcaacacctatgcagcaaaaggccttcctgaaattgttagggttgcaatggatggaagttgtggtcgatggttatcaccatgatcctgctacaaaacagttattggttgaattaagtttacatcctgatggggtcaacaatttcacattggttaatggcattatcaaattcaagggtagaatctggctagggaaacacgtggaagcccagcaagctgtcttactctccctgcacaatagtggcgttggaggccactttggtatagctgccacttaccaacgaatcaagagcatgtttgcctggcctggactaaaaagggatgtcaaggcttatgttcagtcttgtgcaatctgtcaacaagcaaaagccatcatctctgacagggacaggatctttacaagtgctttatggcaggaactctttcgactctcggatgtcaagttgaatatgagctcgtcttaccaccctcagacggatggccaaacggagcgtttgaatcaatgtttggaagcttatttgcattgtgctgtttattcttcccccgctctgtttgcccgtaagccaactagcttcggtgtgattgatatgggtcaaagtactatcccggatgtgcaacagttgcttgtcaatcgggcgaaattgaacgagttgcttcaccatcatctggttcgagctcaacagcgcatgaaagcacaagctgacaagcatcgttcaaaacgccagtttgcccctggtgatatggtttacttgcgacttcaaccatatgttcagctaaccatggccaaacgttcttgtcacaaattgagtttcaggtactttggaccttataaagtcctggaacggattggagcagtggcttatcgattggcattgccggctgggagcttgattcacctagtggttcacatctctttacttaagaaggcagtgcaacctgatacaccagtcagttcagatctacccctgacttgttctactgatgaagttgaagtctatcctaaagccattctacgtcgtcagttgatcaagcgtggtggttcttccattccttctgttctggtacgatggtcagggcttcctgatactcttgccacctgggaaaatttggccgacttatggcgtcgttttccatctgcgctggcttgggggcaagccagtccttaa

SEQ ID NO: 62191 - DNA, 786 bp, Oryza sativa
  Clone ID: PAT_MRT4530_6354C.1
atggcgggctgtgagtgcatggttttgctggtcgcacccatagcagttaaggaccggttcacgggaaaccctgggagacttaccgtgcttaccacaagcgggagtggctgttttactgctttcaactactgctttgaaatgcctgctttatgcaaaagaacccctagcttcctttggttatatcctgcatcatacctcctcttccgagttgaagttcttctcagttggagctgtctcagagaggttggtttcgtcgctgccgtcaagccgtcacgcactcacgcttcctccggcggcggcaaggcgacggcatcggcggccaaggcgcgggcggcggcggcgagcaaggtgcgggcgacggcggcggcggcttatttgatgagagctggggctgtcattcatagccatgggatggaaacttgcattgcaaccatgcttaatactggtgcaaaagagtttaggggcacactaacagaatatctgtcagaaaaactgatatatgcaaactgcgtatctgtcagtaatccgttaactgtcggtaaaggaccatctgtcggactgtcgagttatctgtcagcaaacatttatctgtcggaaaagacctttgccggcagcacttggcctgacagaccctatctgtcgggaaaacttatgctaacaaataatttgacagcatataggtcctttcctgacagatatgtagtaagcaaacttggggcatggtgtagtggatgtacatactccaagctcgagaaaaagctcgaaggtcgaatgagccgagtatga

SEQ ID NO: 62192 - DNA, 473 bp, Oryza sativa
  unsure (1)..(473): unsure at all n locations
  Clone ID: PAT_MRT4530_63550C.1
ctggggtgggggggggtttttaaaatnnnnnggaagagcaatatttactttacttgcggtttattcacgggagctaacccaacaaaaagagagagggaaaaaaacgaagacgggatacagctggggaagaaattagggtactcanctctnaaaaatgggaagatggggtnnctatcttttatcccaaccaaaaaacctacctcctgaaaagggttaactagggggctctcttaattaagggataatcgctggataatccagcccagcgaactgaggtgaaaaagcaggcttattcagggcagccgttgaggaggtggaggagctggaggagtttaacgaggaggaggaggaagcggggacttcttcatcttgctggtgaaggtggcggcgatcctcatcttcttctggacctgggcgaggcttggctcccggatgcccccgctgggggcggggggctgcctgggggggggcgg

SEQ ID NO: 62193 - DNA, 631 bp, Oryza sativa
  Clone ID: PAT_MRT4530_63551C.1
aaatatgaaagacaacctttttttctttttatttcacccaaagtttcacatggcacatatgatgatttctgagcttatttgtatcttccgaaccttttttttggtaaaacccattacaagacaccgccaagggggggaatgggcctgggggccccctagtccctagggggggtcccctttctagatggcccgttaaaagccaacagagcttgggcttgggcccgtttccggtcaaaggggagatcaccaaactgctggagttgtagctgctgccctttggcctgaacaatggtaatggcccggtggggggattgttgcgcccccagcgcgagctggtgccagacttgggtggttctcagttgaaacgcagctgtttgcaagaaggggcttgccgctttgccctactggtgccttacgaactctttttatgggctaagcacatggttgctgtggcgggcccggcgcctggggcggtttttgcctttatccttgcccttaaacctcaaactgggcagaggcgcctggctgccccttttgccgggggggcctgggcgaaaatggtcctcttggctgggggacccttgttctttctattttgctggggccccgggggtcgccccgggatttccgg

SEQ ID NO: 62194 - DNA, 858 bp, Oryza sativa
  Clone ID: PAT_MRT4530_63552C.1
atggacgcgtctccgagctcctcgtcgtcgtctcctgtggcgccggaggtggtgcaatgggccggcggcgccgacggctttggctcggcggcgatcggcttcgcgtgcagggtgctctgcgccgtcgccacctgcgtcttcgccgcagtggggtcggtggtcggggcggtgaccgggagcgcgatcgggctggcgacggagagcggaatgctgcgcggcgccggcatcggcgccatctccggcgccgtcttctccatcgaggtcgccgagtcgtcgcgcgacctctggcactccagcgactccgccgtctggtgcctcgtctacatggtcgacatcatctccagcctcctgagtggaaggctggtgcgggagaaggtgggtcccgcggttcagagcgcggttcagagtcagataagcgccatcagctcgccgttcgccgagaccagcgacctgttcgagaccggcggcaccaagggtttaccggcggacacgctccgccggctgccggcgatcaagatcaccggcgacaacgccgtcgactccgccggcgagcccatctgctgctccgtgtgcctccaggatttccgcgtaggtatcttttcaagaatactggaggcgaaaaaatggcatgtgtgtagcaatcactttgatgagatgaatgaactggcagaaactgtggataaggaaaagaggacagttgttgcttcagagagtcagaaatggaagacggggccagaattcagctgcgacgaagcagcagacaacgctcgacatggagccgtagtacatgagcgtgtatacaacgacttgacaattgtgttgaagaaccaaccactcgacgagtcgacggagacttaa

SEQ ID NO: 62195 - DNA, 550 bp, Oryza sativa
  Clone ID: PAT_MRT4530_63553C.1
cattatcctgtcgggatttggcgagagatgcggagatgagagtgacggaaaaggcgacgagagcggcgatgatctcggcggcgtttgctcgcgcgcgctcgacggaaaaggtgattcaatttgccagttatcaaaaaaaatgtacttcattcaatatatattgacgtgctttgcacgtgaaaaatcaccttttttggagtgcggtggcggctggggatgacctcggctctatcagggggcagcgctggactgcggcggatgtggaagacctcggctccgtcggggtctgcgcttgactgcagcggcggcggatggggaagacctcggctccggcggtcacagcggtggactgcggtgccagcggcggtggaagggcaccactagtacagatccttctatctgtgacgggctctaatatgcttagaaatagcgggccgtcacaaggaagtcatctcaatcgggccgaaaagtgcccgattgagatatggtcgcacagacatgttagatgggcataaaacttaagcccatcacggatgacacctatcagtga

SEQ ID NO: 62196 - DNA, 1368 bp, Oryza sativa
  Clone ID: PAT_MRT4530_63554C.1
atggcgccggcggcggcgaggtggctgcggcgggaggtgttcgtggggctcgcgctggggcagttcgtctcgctgctcatcacctccaccggcttctcctcctccgagctcgcccgccgaggcgtcaacgcgccaacttcgcagtctctgctgaattacgtccttcttgcgcttgtttatggtgggatactgatctacagaaggcaacacctgacgattaaatggtactacttcttgatccttggcatcgttgatgtagaagctaactatattgttgtgaaggcttatcagtatacatccttaacgagtgtgatgctcatcgattgctgggcgatcccgtgtgtcattctcctcacttgggtcttcttgaagacaaagtatggattgaggaagttcatcggtgttgtgatttgtgtggctggcattatattggtagtattttctgatgtccatgcctctgatagagcaaaaggacccaaccccttgaaaggtgatttgtttgtcattgctggggccatgctttatgctgtcagtaatgttaccgaggagtactttgtcaagaaaagcagcagaattgaggtgatggcaatgctgggcgtttttggagcagttataagtgcaagaaaatatgcttctatatcccatttccttaacactgctacagaagcatacttgaacgacaagaacttcggtcaaccgaatggaatgctgattctacctttcattggatttgcggtagcaatgttcttgttctactcaacagtaccgattatattgaagatatgtggtgcaactatgctcaatctctcccttttgacctcggacatgtgggctgttctaatccgtatcttcgcttaccatgagaaggttgattggatgtatttcgttgcttttgctggcacggcagctggccttgtcatctactcatacaagggctccaaggtggcggaggagacggcgcaggtcgccggcgcgacggacgaggaggccgcgacgcgagttgccggcgccggagacgatgagccagcctccaccaacaaggaggtctcctcgttggctgctactacctcaagtgtgatagctggtagcctggtacatatgggcaagagagatttctatggaggctctgatgtacagagtatttcaggcagtcagtttcaacattgtgccagccagagtatagaatgggcatggctagtgaagagagtcgaggtgatccaaaatataacaaatataaagttagctagtgcaagaaatctggaggataaggctgcgcaagccttttttggcactcccggggtggaagccaggtccaagtccaaccaacactcgttcgtgaaccgtcgcatggttactctaatttactag

SEQ ID NO: 62197 - DNA, 1140 bp, Oryza sativa
  Clone ID: PAT_MRT4530_63555C.1
atgttgccggtcattttcgagtacgtctactacgctatcgagcttcgggttgcggctgcgttgccccctcggccgcggtgccactgcctgcggtccacaccaccactagttgttgtagtgctgagaggcgccctcctcagcatggctacatcaccggcggacttctcgccattgcatcgacatggagttgtagctgtgttgtcctctcggaccgcagcttcgcagctagcgtcgtcttcatcgccattcgcgcatcaacaacctcgccgtccgcactggttatcgtcagccattcagggtcttcttcctctacttcgagcatcgccgccgtatctccaagttgccactgtcgccgctctaggccggtggtccagctacctccaaatgcctactgacatcgccgtccaagccattggttccgctacttcgccatcttcttcgtctagcatgactcatcgccagcgtcgccgtatcttcctcgactacacttcgctcttctccggcaactgcgtgctgctccagcaattctccctctatgctgttctcgcgccgcgaccgtcttggaggccttctctgttagtctcctccgacattggcgtatggttcatggtggtccctgccttgcccgtgcggtattggcaacaccggcgcacgcattcgtcccgagttgtcccggggtctgacaaaccttgtgtgacgtctcgtccttcacggtttgactacatcggctcttcggcgtcatctatctcaatgactgcctcgattgcgtcaccgtcatcgtcttcagcgcgtcctcgtgcacctcactctacggcgccccatgcgcgctctgtggctcggctacttcgacatcagcttcctgactttggctacatcgaccacggctactctacgcatggctacctcgaccacggctccctcacaccctacgctttggctacgtcgactacggcacaaagggctatcatccgtattgagcactcttgccgatgtaaagatctctgtggtcttgcaaataactcaagttcagatcatgataccgaagatattgaaactggaaatgaagaggtgaattatgggacaaccactattgatcttgatgctgaaacatcatatgtgagcaagccaaagacaggctaa

SEQ ID NO: 62198 - DNA, 570 bp, Oryza sativa
  Clone ID: PAT_MRT4530_63556C.1
gcacggccccgggcccacttccgcgtgatggacttcgatcggcacggattcctgaccaaattgggtttcgccgcactgacgtgctactcggtgctcgcgatctacagatcacggggagagcccggcgccgtcgcgttcgtggccggcgcctacgccgccatcgtgctcctgttccattccctgcgaaggttcgagctcgcgggacacgcggacagagggaggatcaaggcggtggtctgggtcctgacgacgctgctcacggggatgttcgccgccagggtcgctccgctcatgccgccgctcgtcgccgtcctggtctggtccatgtccgccgccacagtcgccggtgggttctgggcttttttcatcagccactgatggcagatgatcaggtcgtcggctcctttagttcccttccccatgcccactcgctacacaaagatcaagcgacagatcatcaactctcgggctggacgaagaacgcgcgccatagggggtgatttctgggaaatcacattaaaaatgggtgaagccctgagatctcgtcaacacaacttcatcatcaggcgg

SEQ ID NO: 62199 - DNA, 598 bp, Oryza sativa
  Clone ID: PAT_MRT4530_63557C.1
ccggccgccgccattctgttgggggtgctgggtgctcctccttcccttctccggcttggcgagctatacgctctcctccttgctggaatcactcattccctcacaatagcagctgtacctggacctaagccgcttcccagaatccaaatcgctgcgctgcatcgacctcacgctccacaatttcttcaacgctactccaccgaaccgaaacggaccagagtccaaagttgtcgcggctgatgcctgcatccagaagcagaacaataataaggaggaggccgccaccgccaccaccagtcgggacgctgctttatctttgaggcggaagaagacgcgtggttatgctgccctgtcttcaccagcccaaggagatacccatctccatcttcgtcccctgcctggaggaagccggtgacttcgacggtggcaacctttacataatggataagaggagtaaaacaggaaagttaggaaacaatcaattcgaggccttcatctactgccactatcgtggaagcagcaccttgaagtcctggacccgccagatcctcctgccaccgccatgtatctatgacagagcatacttgggcagggacct

SEQ ID NO: 62200 - DNA, 1095 bp, Oryza sativa
  Clone ID: PAT_MRT4530_63558C.1
atggccctctctcggaggtttctgaatctgatcatggacagccgcttcccagaatccaaatcgctgcgctgcatcgacctcacgctccacaatttcttcaacgctactccaccgaaccgaaacggaccagagtccaaagttgtcgcggctgatgcctgcatccagaagcagaacaataataaggaggaggccgccaccgccaccgtaagcagcatggataggattcaacttccaagccccatcttcaacttccaagcttcacgttcaggtattgacgactattggaagatagactgcttgccgctttttgatcgcagggtgcccaaggagatacccatctccatcttcgtcccctgcctggaggaagccggtgacttcgacggtggcaacctttacataatggataagaggagtaaaacaggaaagttaggaaacaatcaattcgaggccttcatctactgccactatcgtggaagcagcaccttgaagtcctggacccgccagatcctcctgccaccgccatgtatctatgacagagcatacttgggcaggtacctggagatcagttcctatgctttgcttggtgacggctcgaacatctgcatctctgtaaaaggtgtcggcacctattgtatggacatgcggagcttcacatggagccacctcggcaaatggatgctacccttcaccggcaaggttgagtatgtacctgagctcaagctctgggttggcatttctgccgacacccaagacttggctgctgctgatctctcatcgatgaattcccagccacagctactagctacttgtaaggagtttgaccagccagaggaatggaagcgatgcaaggattctcaacttgtcaaccttggctcgggcaagttctgcattgcaaggttctttcacaataagactccccaaggggactccgatgaattaattgggaagaacattactgtcttgaccggtgtggaggtggtgccgagtgtttatcatgccaatggcaacgacaacagtaggaaaggggaactccaaatgatccctcataaatcgagattgtatgctggcagcgataccatctgggcagtgttgtga

SEQ ID NO: 62201 - DNA, 309 bp, Oryza sativa
  Clone ID: PAT_MRT4530_63559C.1
tcggttcaaaaagaatttgcaaaccccaaatgcgccgagccgccgccgccgtgggggtggggcccgccgacccgcagctgctggcggcggggttcgagtcggacattgtgttgagctcgccgcgcctcggccgggccgtgcacgcgcgagcgctgaggctgatcgccccggcactcttgcccttcatctgcgcgcaccttgtcaacctctacttcaagctcgacctccccggggcggcggaggcggctctcgccttcgacccacaccccaccgtggtttcgtacaccgctttcatattcggcgcggggc

SEQ ID NO: 62202 - DNA, 496 bp, Oryza sativa
  Clone ID: PAT_MRT4530_6355C.1
acagagaaagaacgatcacaatgctaatccaaagattgatttcccaagaacacaaacttagaaccataatgactagtgtaccattcaccctaaatctgcagcagcagcagcagcaaaggcgactgttttcattgatcttgaattcttgatcgcatcggcgtcaggtggacaggtgctacgatgattggggtggtggcgccgccgccggcgccggtagcggcagagtcttcttctccttcacctgcggttttgagatgagagccttgggccggtccttgaagaggatcttgtgccggatcacgccgatcacctccagctccgtctccgccgccaccgccgtcgtcttcttcttcctcagcacgaggagaggcttcttgagcgccaccttggtgccggcgagctcatggtaccccacggtgaaggtgaacgccgcctccacgatggcccactccgggcaccccgcctcgccgcacccgcaccgcacgcggatctgcat

SEQ ID NO: 62203 - DNA, 1108 bp, Oryza sativa
  Clone ID: PAT_MRT4530_63560C.1
atggccctctctcggaggtttctgaatctgatcgtggacagccgcttcccagaatccaaatcactgcgctgcatcgacctcacgctccacaatttcttcaacgctactccaccgaaccgaaacggaccagagtccaaagttgtcgcggctgaggataggattcaacttccaagccccatcttcaacttccaagcttcacgttcaggtattgacgactattggaagatagactgcttgccgctttttgatcgcagggtggtgtgtgcggaccagtcgggacactgctttatctttgaggcggaagaagacgcgtggttatgctgccctgtcttcaccagcccaaggagatacccatctccatcttcgtcccctgcctggaggaagccggtgacttcgatggtggcaacctttacataatggataagaggagtaaaacaggagagttaggaaacaatcaattcgaggccttcatctactgccactatcgtggaagcagcaccttgaagtcctggacccgccagatcctcccgccaccgctatgtatctatgacagagcatacttgggcaggtacctggagatcagttcctatgctttgcttggtgacggctcgaacatctgcatctctgtaaaaggtgtatggacatgcggagcttcacatggagccacctcggcaaatggatgctacccttcaccggcaaggttgagtatgtacctgagctcaagctctaggttggcatttctgccgacacccaagacttggctgctgctgatctctcatcgatgaattcccagccacagctactagctacttgtaaggagtttgaccagccagaggaatggaagcgatgcaaggattctcaacttgtcaaccttggctcgggcaagttctgcattgcaaggttctttcacaataagactccccaaggggactccgatgaattaattgggaagaacattactgtcttgaccggtgtggaggtggtgccgagtgtttatcatgccaatggcaacgacaacagtaggaaaggggaactccaaatgggcacctatatgatccctcataaatcgagattgtatgctggcagcgataccatctgggcagtgttg

SEQ ID NO: 62204 - DNA, 1682 bp, Oryza sativa
  Clone ID: PAT_MRT4530_63561C.1
ggtggtcagtggccatcatcgtccaaagtccaaagtcgaaaccgacattccggaggcgcctccggatcccgattccaccgggtctgaaaaatccccaatctcacgcgtcctccccttccacccgcctcttccaacgaaacgcgaaaccctagcccgtctgatctctctctatcgccatggccggcggcaagatgaaggagcacgacggcgccagcccagccaaaatcttcatcggcgggctgcctaaggacaccaccatgggtactttcaaagaatactttgggaagtatggggagatagttgatgccgtcataatgaaggaccgctttacccagaaacccagaggatttggatttattacctttgcagatcctgctgttgttgacagagtgattgaggacaaccatgttattaatggaaaggaggttgaaattaagagaactattccaaagggtgctgcccccctaaaagatttcaagacgaagaaaatatttgttggtggattaccatctgctttgaaagaagatgaattcaaggagttcttttcgaaatttggaaaggtggtggaacatgaaatcattcgtgaccattcaactaaccggtcacgaggatttggatttgtagtctttgatgcagaaaaaactgtagatgaattattagctaagaaaggcaatatgattgatctaaatggttctcaggtggagatcaagaaggccgaaccaaagaaaccctctaacccacctcatcgttcatttgatagtgaacctaggggccgtccacatgcggatggttatgatggattgggcaactcttataattatggtggtagctttggcccctatagatcacctggaagttttggcactaggcctggtggttacagtagttcttatggccctggtgactatggtagtggctatggtgcttatggtggagcattaggaggatatcgtggagaatcatctctctattctagtcgctttggtagcacttatggaggaagctttggtggtggttatgctggtggcagttatgctggtggtttaggtggtgcatatgggcgtgatgctgggggttttggtggttctagctatggccctagttatgactcttcttcaggtcctggtgctggtgttggctttggcacgggtggactctatggtgctagaggaggctatggtagcagtggtgctggtgcttctggtcgttatcatccatatgcaaggtagacagcttcagatgctgccatgtgtgtgttagataagcttgcagaaggtcggtactagacaaggcaagataaattatctgcagctagaaaagaagagttgaagtttaatctgctaaggttatgtacctctcctgctagatttggctctgctaaggtttatgtacgcctgttagattggctctgctaaggttgctgtaccactcctgactcctgttagattggcttgtagaatttaaaatcactttttcagtgtttagaattcaagagatcgcacatatgctttgattagatagcaaagtcactatggctgttagtttagctcgtatttagtcgatttgagatgcaactggagcatattttctgtggatctttcctatcataggcttgatatgatggcgatgaagtatcttgaattcatagtagtatatcatcgtttttcttcaaaaaaaaaaaa

SEQ ID NO: 62205 - DNA, 517 bp, Oryza sativa
  Clone ID: PAT_MRT4530_63562C.1
ctctagagcggcgtcgcgatctagcggacgcgtgggatttcatcgaacaccttgtgtgcgtaatctcaccgtaccaaagaccatattgagggactccccgtccggacctagaggttggagggagtggagggggtgtcgtgctgccgctattgccattggggaagccgaggaccgctggacaccgggaaccacgcgtcgaacactttcgggcgtcaccaacagctagccgcgtctgcttcgtctgcaccgcaccacgcgtcgccgcccttcgccgtctctccatcttgggagaatccatcttcgaaacgaagaaaaaactgcaacccttgagaaactagtccctcatcttggaactctggaagcaaccagagctcaaattcatgaaaccagggagctagacagtaagcactgaacatgatctcagggcatccgacttgctgcagcttccaagaagtcaacttcgagctagcagtggttcatcccaaagttacaaactgccaagatcaccgagctagaa

SEQ ID NO: 62206 - DNA, 735 bp, Oryza sativa
  unsure (1)..(735): unsure at all n locations
  Clone ID: PAT_MRT4530_63563C.1
agatctccctactcccatccccgccggccgccgccattctgttgggggtgctgggtgctcctccttcccttctccggcttggcgagctatacgctctcctccttgctggaatcactcattccctcacaatagcagctgtacctggacctaagaatccaaatcgctgcgctgcatcgacctcacgctccacaatttcttcaacgctactccaccgaaccgaaacggaccagagtccaaagttgtcgcggctgatgcctgcatccagaagcagaacaataataaggaggaggccgccaccgccaccgtaagcagcatggataggattcaacttccaagccccatcttcaacttccaagcttcacgttcaggtattgacgactattggaagatagactgcttgccgctttttgatcgcagggtggtgtgtgcagaccagtcgggacgctgctttatctttgaggcggaagaagacgcgtggntatgctgccctgtcttcaccagcccaaggagatacccatctccatcttcgtcccctgcctggaggaagccggtgacttcgacggtggcaacctttacataatggataagaggagtaaaacaggaaagttaggaaacaatcaattcgaggccttcatctactgccactatcgtggaagcagcaccttgaagtcctggacccgncagatcctnctgccaccgccatgtatctatgacagagcatacttgggcagggac

SEQ ID NO: 62207 - DNA, 1056 bp, Oryza sativa
  Clone ID: PAT_MRT4530_63564C.1
ctatacgctctcctccttgctggaatcactcattccctcacaatagcagctgtacctggacctaagttcactccgataatggccctctctcggaggtttctgaatctgatcatggacagccgcttcccagaatccaaatcgctgcgctgcatcgacctcacgctccacaatttcttcaacgctactccaccgaaccgaaacggaccagagtccaaagttgtcgcggctgatgcctgcatccagaagcagaacaataataaggaggaggccgccaccgccacccccaaggagatacccatctccatcttcgtcccctgcctggaggaagccggtgacttcgacggtggcaacctttacataatggataagaggagtaaaacaggaaagttaggaaacaatcaattcgaggccttcatctactgccactatcgtggaagcagcaccttgaagtcctggacccgccagatcctcctgccaccgccatgtatctatgacagagcatacttgggcaggtacctggagatcagttcctatgctttgcttggtgacggctcgaacatctgcatctctgtaaaaggtgtcggcacctattgtatggacatgcggagcttcacatggagccacctcggcaaatggatgctacccttcaccggcaaggttgagtatgtacctgagctcaagctctgggttggcatttctgccgacacccaagacttggctgctgctgatctctcatcgatgaattcccagccacagctactagctacttgtaaggagtttgaccagccagaggaatggaagcgatgcaaggattctcaacttgtcaaccttggctcgggcaagttctgcattgcaaggttctttcacaataagactccccaaggggactccgatgaattaattgggaagaacattactgtcttgaccggtgtggaggtggtgccgagtgtttatcatgccaatggcaacgacaacagtaggaaaggggaactccaaatgatccctcataaatcgagattgtatgctggcagcgataccatctgggcagtgttgtga

SEQ ID NO: 62208 - DNA, 564 bp, Oryza sativa
  Clone ID: PAT_MRT4530_63565C.1
atgagcgcctgcggaggcgccggtgaagacggggcattgcctgcatcgggtgactgtggaggcggtggtgaagatggggggctgttagagggtggctgcggcggcgagacgttgttgctcggtggtggcggcgaggccttgggcgctggcgggcttggaacaagtggaggaggagatgatggcaccaccggcggagttggggttggcgtcaccggtgtaggggttggtgtcggctttggtgatggtactggaggtggcggaggaaacaccggtggaggtggtggtgaggttaccgggggtggcggaggaggtgtcgctgaagggacaggaatcggcggaggaggaggcggcggcgacggcggcaacggggcaggggtcggctgcggagtaggctgcgttggcgccgcaccggacatggttgcgctgcgtgcaagtgcaacgtggtgcaggagcggtatgtttttctgctccgagtatgaagcttgcgagtctctaaagtcaagccaaggtaagattatttttcttgggcaatttgctgaaaacggtttggggctttgggcttaa

SEQ ID NO: 62209 - DNA, 477 bp, Oryza sativa
  Clone ID: PAT_MRT4530_63566C.1
ccacgcgtccgcccacgcgtccggggcaaagggtctaagcttctgtctggattgattgatcaactgctttgtgttgtgtcattggttgtctttctaggcctgatacatgtaaagccggagctgcgtgagttgttgaagaccacatcagaaaaagactcgagagcggtggcgtcgaactgatatgcttgtgaagtagctggagcttgggagttgggagcgagctagattacaacaatgtcatttatcggtttttctttggaataaaatgagttgttttgttaggagaaagtagtatttttcctttctgcttttagtgtctcttgagaaagaataaaatgagtcctggcatcataagtaggtgggttagtcgactaggttcgagcctcaccacatctcaataaatatcgatatgtgacccctcctttcatatccagtatcttttaagtgtgccttgtctcctagatataatttctgttt

SEQ ID NO: 62210 - DNA, 218 bp, Oryza sativa
  Clone ID: PAT_MRT4530_63567C.1
atgagtgtttgtcatgatcccatcgatggctttggaagaatccaaaggcaaagccgtccgacgcggggcaagaatcagcaacgaacgagtagcgtccagggggatgaaaacggccacatgctacgggtggtttcgcccattacgaggctcgttcgttcgtgctcgcgccatggcgcggtgtcgcgttgtcggatgatcagcgagccggggctgccgtt

SEQ ID NO: 62211 - DNA, 471 bp, Oryza sativa
  Clone ID: PAT_MRT4530_63569C.1
atggccacactaccaagttcaacggccgcggccgacgcgttgcctgccaaacagatgcagcacgacacggcaaggcgaaggaggggggcgagaaacgagggcaaggcagcgcgcaccaccgcgttctacccggccgccggcgcggggtacacgacaatgaggtcgaggtcggagaaggccgcgcgcggcgaatgggatggacttgggggcggccgccctgtgcgaattgggttggaaagctacggattcccctcccccatcccaaaacctagggctagaggatttggccgtgccggtggcacgagcaagcggcggcgacacgaacaggcgacggggaggcacggcgacgcgacgcaggggagtagcaggcggcggcgcgaaggggagagtaagggcaaacagaagcttcaatttgaaaaaacaagggcaaaatcacaaaccctaaaaagaagaggtagtatgactccatga

SEQ ID NO: 62212 - DNA, 1608 bp, Oryza sativa
  Clone ID: PAT_MRT4530_6356C.1
atggctgcgcgccgctgggcttggggacctccagcccgcgccttctccaccatcaccgcgaaggccaccgtgccgctcgcccacctggccgaactccccacgtcgctcccgacctcccgctacaccgtcaccccgcccgtccagccatggccgcgccgcctcaccgcgcgcagcctcgcgcgcctcctgctccgcctcccgacgccgcacctcgccgtgctcgccttccgccacgcgctcttccacgccgccccgccgcttcccccctcgctccccgtcttcgccgccgtcctctcccgcctccccgccgccgaccccgccctcctcccccccgtcctctccgccctccgcgccgccaacctccccgccttctccgaccgccccttccttcccctgctccgctcgctcccgcccctcccttccctccgcctcttcctctccctcccctccttcaactcccacccctccgtccgctccttcaacgccctcctccactctctcgtctccgcccgccgcctccgtctcgccgccgcgctcttccgcgccgcgcccaccaagctctacatcacacccaacctcgtctcctgcaacatcctgctcaaggggcttgttggcatcggtgacctcgatgccgcactcaaggtactcgacgaaatgcctggcctgggaatcaccccggatgtcgtcacctacaccacggttctctctgcctactgtgggaagggggatattgaaggtgctcagaagctcttcgatgatataatcgctagtggacgtagaccagatgttacgatgtacaccgtgctcatcgacggttactgccagtgcgggaacctccaggatgcagccagaattatggatgagatggaggctgctagagtgcaaccaaatgaggtcacatattccgtggtgatagaagcatgctgcaaggaggaaaaacctattgaggcacgcgattttatgcgagagatgctgggggcaggatatgtgccagacacagcgctaggtgctaaggtggttgatgtgctatgccaggatggaaaatcagaggaggcgtatcaattgtggagatggatggagaagaagaacgtgccacctgataacatggtcacaagcacattgatctattggttgtgcaagaatggaatggtccgagaggcgaggaacctgtttgatgagcttgagaggggtttcaaaccaagcttgctgacgtacaactcacttatttcaggattatgtgaaaatgaagagctacaggaggctgggcgggtgtgggatgacatggttgaacgagggtatgaaccaaatgccatgacttatgaggccttgatcaagggattatgcaaaacagggaagccaaatgaaggggctacagtctttgaggaaatggtgtctagaggttgcaagccaagcagccttcttttccaagttttggttgatagtctttcggagccaagacatgaggataccattagaaaaattcttgaaactgcagctttatatggtcggtatttcctggatggtgattcttgggaaatttttgtcaggaaggtggtaaatgcaactgatacttcgaacaagcatctcgatttagtattagatatgtga

SEQ ID NO: 62213 - DNA, 2959 bp, Oryza sativa
  Clone ID: PAT_MRT4530_63571C.1
gcgcacgctttacaggtggctcccccgccgtctcccccgcgtgccctcctcgccgtcgtcgctcgctgcccatttcatcccccgcacggcacgcgcgggacgaaagcaaagcacgcgcacacactcaaacccgcgcctcctccgctctcgtccgtcgcttcggttcggttccggctcgatcggggaggttcctcggggcgaccatgtcgtcggccgtcgtcgcgtcatccaccacgttcctcgtcgcgctcgcctcttcggcgtcacggggagggcccaggagggggagggtggtgggcgtggccgcgccgccggccctgctttacgacggccgcgccggaaggctagccctacgggcgccgcctccgccccggcctcggcctcggcgtcgggatgcgggcgtggtgcgccgcgcggatgatggggagaacgaggcggcggtggagcgggcgggtgaggacgacgacgaggaggaggagttctcttcgggcgcgtggcagccgccccgctcgcgtcgcggcggcgtcggcaaggtcttgaagcggaggggcaccgtcccgcccgtcggccggtacggctccggcggtgatgcggcgagagtgcgcggggcggccgcgccggcgccggcgccgacacaggacgccgcctcaagtaagaacggagcgcttctcagcggccgcgacgacgacacacctgcctcacggaacggatcggtcgttaccggcgccgacaagcctgccgccgccacgccgccggtgaccataacgaagctcccagcgccggactcccccgtgatccttccatccgtagacaagccgcagccggagttcgtcatcccagacgcgacggcgccggcgccgccaccgcccggttcaaatcccaggtcgtccgctcctctccccaagcctgacaattcggaatttgcagaggataagagcgcaaaagttgttgagagtgctccgaagccaaaggcgactagatcttcccctattcctgcggtagaagaggagacgtgggatttcaagaaatattttgatctgaacgaaccggacgccgcggaggatggcgatgacgatgatgactgggctgattcagatgcgtcagattctgagatcgaccaggatgacgattcgggccctttggctggggagaatgtcatgaacgtgatcgtggtggctgctgaatgttctccctggtgcaaaacaggtgggcttggagatgttgcaggtgctttacccaaagctttggcgaggagaggacatcgtgttatggttgtggtaccaaggtacggtgattacgcggaagcccaggatgtaggaatcaggaaatactacaaggctgctggacaggatctggaagtgaaatatttccatgcatttatcgatggagttgattttgtgttcattgacgctcctctcttccgtcaccgtcaggatgacatctatggggggaacagacaggaaatcatgaagcgcatgattctgttttgtaaggctgctgttgaggttccttggcacgttccatgcggtggtgtgccctatggggatggcaacttggtgttccttgcaaacgattggcacactgcactcctgcctgtttatctgaaggcatattacagagacaatggcatgatgcagtacactcgctctgtccttgtgatacataatatcgcttaccagggccgtggcccagtagatgaattcccctacatggaattgccggagcactacctggatcacttcaagctgtacgaccccgtcggcggcgagcacgccaacatcttcggcgcgggcctgaagatggcggaccgggtggtgaccgtgagccccggctacctctgggagctgaagacgacggagggcggctggggcctccacgacatcatacgggagaacgactggaagatgaacggcatcgtgaacggcatcgactaccgggagtggaacccggaggtggacgtgcacctgcagtccgacggctacgccaactacaccgtggcctcgctggactccagcaagccgcggtgcaaggcggcgctgcagcgcgagctggggctggaggtgcgcgacgacgtgccgctgatcgggttcatcgggcggctcgacgggcagaaaggtgtggacatcatcggcgacgcgatgccgtggatcgccgggcaggacgtgcagctggtgctgctgggctccggccgccgcgacctggaggtgatgctgcagcggttcgaggcgcagcacaacagcaaggtgcgcgggtgggtggggttctcggtgaagatggcgcaccggatcacggcgggcgccgacgtgctggtcatgccgtcgcggttcgagccgtgcggcctcaaccagctctacgccatggcgtacggcaccgtccccgtcgtgcacgccgtcggcgggctgagggacaccatgtcggcgttcgacccgttcgaggacaccggcctcgggtggacgttcgaccgcgccgagccgcacaagctcatcgaggcgctcggccactgcctcgagacgtaccgcaagtacaaggagagctggagggggctccaggtgcgcggcatgtcgcaggacctcagctgggaccacgccgccgagctctacgaggaggtccttgtcaaggccaagtaccaatggtgaagagaccatgtccgcccgcggtctccgcctgcgcgttcggcagctatagctatagcctccctgaagaagcttggcgctgctgtggaggtgcgactcggtggcggtgtggcgccggcgccggcgcttgcaggggaggtgtttgtgctgaccgagctgtgcgttgaggtgcgcaaattagcttccggtttgtgtgttcatggcgaggcatggtggagttgagggagtattaagctttgtttcagatgcatcatgcatgcgtaataggatgttgtatttaataatgtgtttgttatgtccattgatgcgatgttacttcttcatta

SEQ ID NO: 62214 - DNA, 3697 bp, Oryza sativa
  Clone ID: PAT_MRT4530_63572C.1
gcgtcgtcggccatgaagcggaagcagaagcccgccgccgccgacgccgccgccgaagtcgacgccgacgagccctcccaagccccgctccctctcgaggccttctcgggtgacgtctgcgccgccctcaccgcgcgctacggccgctccaccgccccgcagcaccgccacctcctcgcctccgccgccgccatacgctccattctcgtcgacgacggcctccccgtgacgccagcatcctacctccccgccgccatctcggccctccaagccgccggctcggctgaccccgccgccgcttccgcccttgcctccctcctcgtcatcctcctgcccaatatcccctcgtccccatcgtctctcccgccagcgtccgcctccgaatctgcctcagcgctcgccgtcttcctctcctcgcccgatgcatcccagctacccaccggcaccgtgcgctcggtggtcaagtcccttggccatttggctttccatgtcgacgctgcagccgattggggctctgtggcctctcctctggaggctctccttgctgcttccgtcgaccagcgggccaaggttcgaaggtgtgcacaggagagtgtggagaagctatttgcgcacttgaaacaatgtggttgtgggaagaaagttagtaatgctgcaattggcatgtttgataagcacattgcatctgtgaaaaatcatgtcaatttgaattcagatgcttctgagggtaaggagatggaggctgcaaatatgctaagtgcaatggttgttgtagttccatacctatcaaagaaggcaatgaagactgtgttttcagaagtttatcagctgttaaccccttgttttagtccacttacaaggcatgtcttgaagcttatggagaccttgttggaccatctgaaggctgagaatgttgagtcagacttggtgaatcttatcccattgttgttggcatacctgaattatgatgaaaagaagcctgatgataccattgtcgcagcattgaagctgatgaaaaattgcttggcgaaactagttggtcgaccaaatttgtggatggaggttcttccatctgcatttgaggcagtttcaggggagagttcgtatgcctttatgaaaaatataatacttacattgtcacaaatcgctgcgaaaacagacaaagaatcagagcggaagaatgttgaagagtgcattggggcagctgtcattgctttggggccagataaaatcctttcactaattccaataggttttgatgaggaccggctaacatgctcaaatacttggcttctgcccattttagataagtatatctatggggcctcaccacaacaattcctagagcgcattgtacctctagcagaatctgtacaacaagcttctaacatggccaagtcagcacggaaatgtgaagacttgaaatcatgttccaatcagctgtggaatttgcttcctgccttctgccgctacccagttgatatatgtcagaatttcggttctctatccaagttgctactagagatgttgaaatgtgacaagtatctgtacaaatccgctgttaaagccctgcagcaacttgtagatggaactagaagattaagtagcagtgagcaaaacagagaaatatatgtggagctttctactttgttctcctcgaaaattattaacttaagctgcccaagctttgagaggtgctctaaaaaagatgctcgtaagaacatgaaagttctggcatcacattctgtgtatcttctttctactgtcacagattattttctagattcttcaccagagaagcgttctcatttgaaggatgcattgagatgtttggctcaactttctggtagcacgaacatttgcaaccttttcctttcactggttaaaagatttggtttagaagatactcagtcagagcaagagaatattgaatgccaaactaatgaggtagacaagaaggatgaagagggtactgatgtagatgaggagaaaaataaaaagaggtctcttgtaatggaacttatttcgacattcgctgaagctgctgacgaggatctgcttgatttgctttttggatttgtcaaatcttctttactgaacaacaagcaaccttgtgagggcaaagctctatttgctctaagcataattttgaaggaacacaatgaatattctttggctcggttggatgaaataatgatgcttcttcatggaataaaggcagacttggataatgaagttttagaaggccaattattatgctaccagtatttgttggttcacatgattaaggctaatgaagagaacacgagcaagaaggcgttcctgattctaaacgagttaatagtcgcgttgaagtccaagaaggaaagtagaagattggcatatgatgtactcctggctattagtaatagcttgagaagctctgagtcaaacagtgaagattcagatcttcaacgactattcacaatggtgatgggatatctttcaagtccagctccacacatagtgagtggggcaatagctgcactatcgctgcttatatacaatgatgctaacttttgcttggaagttccaaatctgataccatcagttttagttttgctgaagcataaagctattgaagtaatcaaggcatctttgggctttgtaaaggtgttggtaacatcattgcattcagaaaaactgttggaattgcaagcagatatcatgagcggcatattaccatggtcgtctgttacaaaacaccatttcaaaggaaaggttgtgttaataatggaaatactgattaggaaatgtggctttgatgctatcgacttagttacacctgaaaagtacaaggcttttgttagaagcgttgaagagggccgcaagggaaatcataatccagcagatggcgcagagtctgaggcacaacaacctacgcaacatgctgctaagagaaaaaacggtctgattctgatgttggaactggacaagagggaacacacactcgggcgccatcgaggagtttgccagctggaaagaaggaattcttcgttaaaggggccaggaatgctcgctctcctggtgtgaaaagccaacgaagcaaaccatcaggccgcaatggtgatagaactaatttcaaatccaaatctgaaccacggccaggaaatggccaaaataccaagggcgacaaacctcaaggtttcaacaaaagaaacagaactggtaagttcgacaagacacaaaatcgtgggggtaaagcatctgatcgctcttctagattcaagaagcctagaactgcagcaacaacatgaaagccaaggctgtcatttgccccatccagctatcaagctgcataaacgcttcttgttagcctcatatctttcaccggcaaggtcaggtcctttagttgagtccatgccgggaccttgaaatttgcatgcaccttgattcctttaggacttttgagaactgcgatagagaaggtagctggctaaaaggagcaattcttcagggaatctgcgtcagttaaaaggagcaaatcttcacttcagggaatgcgcactgtctgcgttagtaaaagagagcagtggtgtcgattgagaatccacctagttgtacattaaaattttgacttgtgggtggattgaatcatacgaaactattgatctagggggcatcccttcagtgttgtattacaatttatacgcaggtg

SEQ ID NO: 62215 - DNA, 225 bp, Oryza sativa
  Clone ID: PAT_MRT4530_63573C.1
agagaaacgggcttgattttactatttatgttaaaaacaattgttcaaaattaattccggggcattttggatgtaaacaactcaacataaatgccctgtaaatggaactgctatcctaatctggttctttctctgcgattctctgtgaggattatatttacatgcatgttatctactaacctaaaacacatagaactaaataaaacactgtacaaagattgcttg

SEQ ID NO: 62216 - DNA, 324 bp, Oryza sativa
  Clone ID: PAT_MRT4530_63574C.1
atggccgtgagcgtccgcacccgggtggggaagcttcgcggcgggaggcggcagctggtgctgtggctctccgcggtggtcgtctccgccgccgaggaaggctacctcaccgtcctctacaagggcaacttcccgccggaggatcccttcaagactgtccgcgtcgccgcgagggaagaagccaagaggatggctgccccggccgccgccatcgccacttccacaacagctctcccctccggcaacaatgcggcggctcctcgtccaaccacggccggcaagtcggtggcggtgctcaagagagttttctcggaggcgttctag

SEQ ID NO: 62217 - DNA, 1715 bp, Oryza sativa
  Clone ID: PAT_MRT4530_63575C.1
acaaacataaacaaattggatagaaaaggagcggaaaaagatccgtggattagactccttttcttccccaggggtttgtattaaaaaatgcaacaccctgttctgaccatattgtactatgtatcaccatttgataaaccgagaaatatttctctctctctgattcaagtagaaatacaaatggaaaaattcgagggttattcagaaaaacttaaatttcctagacaatatttcgtctacccactactctttcaggagtacatttatgtgtttgcccatgattatggattaaatggttcccgaacttgtcgaaattattggttctaataacaagaaatttagttcactacttgtgaaacggttaatgattcgaatgtatcagcagaatttttggattaatttggttaatcatcctaaacaagatcgattattggattacaacaatttttttttattctgagttttattctcagattctatttgaggggtttgcgatcgttgtagaaatcccattctcgctacgagaacagtcttgtccggaagaaaaagaaataccaaagtttcagaatttacgatctattcattcaatatttccttttttagaagacaaatttttacacttacattatctagcacatatagaaataccatatcctatccatttggatatcttgcttcaactccttcaataccggatccaagatgttccatccttgtatttattgcgattctttctcaactactactcgaattggaatagttttattacttcaatgaaatccgattttattttgaaaaaagaaaataaaagactatttcggttcttatataactcttatgtatcagaatatgaatttttcttgttgtttcttcgtaaacaatcttcttgcttgcgattaacttcttccggaacctttctggaatgaatcatcttttctaggaagatggaacattttgggttaatgtaccctgctttttttcggaaaaccatatggttcgttatggatccccttatgcattatgttcgatatcaaggaaaggcaattcttgcatcaaaaggaactcttcttttgaagaagaaatggaaatgttaccttgtccgtttgtggcaatattctttctctttttggactcaaccacaaaggatccatctaaaccaattagcaaactcttgcttcgattttctggggtacttttcaagtgtaccaataaattctttgttagtaaggaatcaaatgctggagaattcatttctaatagatactcaaatgaaaaaattcgataccaaagtccctgttactcctctcattggatctttagcaaaagcccaattttgtactggatcggggcatcctattagtaaaccaatttggaccgatttatcggattgggatattcttgatcggtttggtcggatatgtagaaatctttttcattatcacagtggatcttcaaaaaagaagactttgtatcgactaaagtatatacttcgactttcatgcgctagaactttagctcgtaaacataaaagcacggtacgagcttttatgcaatggttgggttcggtatttttagaagaattttttacggaagaagagcaagttttttctttgatgttcgccaaaacaacttacttttctttccgtggatcgcacagtgagcgtatttggtatttgaatattctccgtatcaatgatctggtgaatcctcttaat

SEQ ID NO: 62218 - DNA, 2319 bp, Oryza sativa
  Clone ID: PAT_MRT4530_63576C.1
atgagaggggttcaagataggaagcagaagaagaagcaggacctgcaggttctcgggcccttccctggatgcttgggtaggatgataaacatgtttgacctcagcaatggcgtggtcgcgaccaagatgctcacagagaaagcgcatagagatggtaaagaccgtggtaatgctttcaagatggcaattggtccattctcatcacagatagaagataaaaagagagatagtcagcctagaaagcagtccccaactaaaagattgagctcaccaactaaaagatctggtgaggctcctgttaaattgctcatggagcaggacatgtggaaagaagggatgtctggcgaggagccactgaatgttgttgccagattgatgggtctaaatgatgctgccggccaccaatctgatctgaaatcgggaaaaagatcagacaaggaatatcgatctggtggttttgatgagaacagtcggaatctcagaccaaagaaggacagcaaaggccacccaaaccaaaaggcaggaacacacagtgaaccatgcagtggtttcagtgatcaaactttaagaatgaatagcagcaggaataaacaccaagggaaggagccttcttgtgagaagagaatgacccttgtgcgtgaaaaatttgctgaagcaaaacgtctggctacagatgagaagcttctccacacaaaggagttccaagaagcattgcagtttttaagctcaaataaagatctgttcttgaaattccttgatgagccaaatccactgttatcacacaacaattatgagttccaacctgataccccaccttcggagacaaagcaaataaccatactgaagccatcagactcaatcaagagaaatggcaacactcttgtagggaggcagctctattcagacggagatgaaagtgaagggaacaggtgcaggcgtcatcagagtttaagtgtttccccaacaaattcaacattgtctgaaccaacaagaattgtagtactaaagccaggacttgtaaagtcccaggaacccaagattctgaggtccccttcatcatcatcaactgcagctgatagtgaagatgatagtatgtcggcagttgatgagacagtgccaagctcaagaagactggccaaagagatcacttggcagatgaggatgcgtttgaaagacaagcaggatgaagaaaacctactctcttatgagttccatgatatttatattggagatgactccttcagcaagtcagaagttgagaatgcaaaagaagtgtctggagtggcagcccttactctgcatcatgctctagtcagacatcccatcggcgtgaaccatcagtggtcagagaagccaaaaaaaggatttttgagagattgtcaattgtatcatccaccgtcggtggtgaggaagaaagggaagcacgcagaaaatgtcgatgatatttctatgccaaggctcatggctagttcttggcacatgaatgatatggaaaacatgcctgccaaggatatttcttccatcccggttattggtgccccaggaatctttggtgagtcacaggaccaaccaagtcctgtttctggggacctgaaggaggagaggagggccaaggatgacgtgtacagctttcacggccacgtgtcacacgacagcgtggggctcgcgcttagctttagctcgtcgaagaaaaaaagaatcggggagggcggcgatcgagtaccggaggctgaccccggaaggggcggggaggggagggcggcagcggcgccggtaggagacgccggcgaggaggaagccatcggcgacggcgtgacggcgggcggcggcgggagggagggtagagccgccgccgtcaggtctcgcctccgccgcactctcctctctgtctccgccgatctgctctgccgcgacgcgccgccggcgagaagggacggcctcctctccttcccgaccccgcgcgagcatccagtttcgaggatggcgactctgaggaacctgaagatcaagacgtcgacctgcaagaggatcgtcaaggagctccgctcctacgagaaggaggtggagaaggaggcggccaagactgctgacatgaaggagaaaggcgccgacccctacgatctcaagcaacaggagaatgttttagccgagtcaaggatgatggtcccagactgccataagcgacttgaaactgcactggcagacttgaaagcaactctggctgaattgaaggaatcaaatgaacaaggtgctgagattggagaggctgagagtacaatcacagaagttgaagctgtcgtcaagccaacagaagattga

SEQ ID NO: 62219 - DNA, 833 bp, Oryza sativa
  Clone ID: PAT_MRT4530_63577C.1
gcaacccagagaggcagccgccgccgtcaggtctcgcctccgccgcactctcctctctgtctccgccgatctgctctgccgcgacgcgccgccggcgagaagggacggcctcctctccttcccgaccccgcgcgagcatccagtttcgagtttcttctggatttctaggatggcgactctgaggaacctgaagatcaagacgtcgacctgcaagaggatcgtcaaggagctccgctcctacgagaaggaggtggagaaggaggcggccaagactgctgacatgaaggagaaaggcgccgacccctacgatctcaagcaacaggagaatgttttagccgagtcaaggatgatggtcccagactgccataagcgacttgaaactgcactggcagacttgaaagcaactctggctgaattgaaggaatcaaatgaacaaggtgctgagattggagaggctgagagtacaatcacagaagttgaagctgtcgtcaagccaacagaagattgaattcgttttttatgaaatccctgcaaacctctgttctgttggggccatagtagctcaactagtattatgatgtttgctgtgaattcatgtatccattttgtggttcctgagccctaacttggaagatctggcactgaaccatccttactttatgtgcttgcttgttcttcctgaagtacacagttaagcatggttgtgtccactaaaaaaaaaaaaaatcccccttttctttgtcattattgttaaaatcctttggttcgacccttcaaagggcttgggaaaatgcgcttaatcgtttttaagtaatcaaaagttttcaccaccc

SEQ ID NO: 62220 - DNA, 2669 bp, Oryza sativa
  Clone ID: PAT_MRT4530_63578C.1
gcacgaggaagcagtcccaactaaaagattgagctcaccaactaaaagatctggtgaggctcctgttaaattgctcatggagcaggacatgtggaaagaagggatgtctggcgaggagccactgaatgttgttgccagattgatgggtctaaatgatgctgccggccaccaatctgatctgaaatcgggaaaaagatcagacaaggaatatcgaggtggtggttttgatgagaacagtcggaatctcagaccaaagaaggacagcaaaggccacccaaaccaaaaggcaggaacacacagtgaaccatgcaggggtttcagtgatcaaactttaagaatgaatagcagcaggaataaacaccaagggaaggagccttcttgtgagaagagaatgacccttgtgcgtgaaaaatttgctgaagcaaaacgtctggctacagatgagaagcttctccacacaaaggagttccaagaagcattgcagtttttaagctcaaataaagatctgttcttgaaattccttgatgagccaaatccactgttatcacacaacaattatgagttccaacctgataccccaccttcggagacaaagcaaataaccatactgaagccatcagactcaatcaagagaaatggcaacactcttgtagggaggcagctctattcagacggagatgaaagtgaagggaacaggtgcaggcgtcatcagagtttaagtgtttccccaacaaattcaacattttctgaaccaacaagaattgtagtactaaagccaggacttgtaaagtcccaggaacccaagattctgaggtccccttcatcatcatcaactgcagctgatagtgaagatgatagtatgtcggcagttgatgagacagtgccaagctcaagaagactggccaaagagatcacttggcagatgaggatgcgtttgaaagacaagcaggatgaagaaaacctactctcttatgagttccatgatatttatattggagatgactccttcagcaagtcagaagttgagaatgcaaaagaagtgtctggtgaaataagtgaggatttggagttcggtactcctacttctggccgttcctgggatttcctgagcaggagtggcagcccttactctgcatcatgctctagtcagacatcccatcggcgtgaaccatcagtggtcagagaagccaaaaaaaggatttttgagagattgtcaattgtatcatccaccgtcggtggtgaggaagaaagggaagcacgcagaagtatgggcacactaggtgagatgcttaccattccagaagtcaagaaagaccaagaagtgtttgggggagtcacattggagaacccatcacctgagatggattccgaagaaccgttcttgtgtttgccacggtctcgatctgttccgatttctttgtcttttggaggcactgagctaaatggagtagcgaccggatgtcaggaagccgagaaggaaaagaacaggaagtcattatcatttagggaaaaggtttccagtctgttctctaaaaataggaaagtggctcgggggaagctagatccatctggaattccatcaactgatgatagactcaagcatggaaattctgctactgttactgatttcagcgaaaacgctgatcattctgcactggacaatccgcttaactgtactatacagaatgtcgatgagatttctatgccaaggctcatggctagttcttggcacatgaatgatatggaaaacatgcctgccaaggatatttcttccatcccggttattggtgccccaggaatctttggtgagtcacaggaccaaccaagtcctgtgtctgtactagatggaccatttctctccgataacagcaggagcttgctgtgctcatctgaaagtttcatcaccgcatccccacaagctttgtcgagatctccacttatcggatcattttcacgctcactttcatgggaagatcccccactggaagtcatgtcgccaaattccttgagactatcaaggcttttctctaaggctgacgaagatcaagactcattgacatttatccagaagttagtctgctctgctggcatagatagagaaggttgcatgttatccggtcctttggaactgtatttgcttgagaaggtctcagattaccaagaagagggaaccaaattacgggaaaggcggtcgaaagagaagtttctattcgatgctgtcaatgaggcactcacagagctcacttggactgcagaactgatggcgtatccattgggaaggtcatcttctttggaacgcaaagattgtgagaatgctttcagtaactcggcagctgatgaaatttggcgagtcataaggaactggtcgattcttgacaagtatccacccggagaaactattgaaagaaacctcctggtggaaatgatactgaagagagaggtgttggaggcggccagcagcgacacgacacgattggagacattcgagctcaccagtatggtctgtacaatggtcttggagcccctgattgcagatgcagttgtagatctgagtgcctgactaacaactagcgaggtacctccacttttctaaccactaattttgcttatgcctcctaacattgctgtttcacgcgatacttgctgctgtaacactgcttcattcattc

SEQ ID NO: 62221 - DNA, 426 bp, Oryza sativa
  Clone ID: PAT_MRT4530_63579C.1
agccacggcgcgtgcaaaccctgcgttgtaacgagcatgccaccagggggcaacgccatcttcacctttaaattatacaagacccagggcaagtatgcaatcttgggaggccggtggcgtgagagaggggagaggcagctggtgactgggactacgaggcgatgggggacggagcgcagggcaggcaggcgttgtgatggcaactcagtgcctccttcacgggggagccgtggcgatggggacggcaaggcgagcggcttggtgacggggaatagggtgtgggacaggcgggcgagcatcatgaaccaacggtcttcgtgggtggcgacccgctgctcgaggtggagcggtggtgtgacccgcggtcaccgaggtcaccgcctggttccaccaccttttcatggccaccgtcgccgccacccctag

SEQ ID NO: 62222 - DNA, 867 bp, Oryza sativa
  Clone ID: PAT_MRT4530_6357C.1
atggttgtggtggctcacggggtggaccgggggagcgaactcgccgccgccagcgaggaggatgatgggtactccacctccaccaccgatgacgacgacgacgacgacgacgtcgagccccacggcccggcgtcctccgggctccgctgggtcccttacgccgcggcggtctccgccgtccgcgccctgctcggcgcctcccaccacgacctccgcctccgcgcgcaccagctctcgcgctcgctcagcgccgtcttcttcgctggcgcggggaacgagggggcggtgctcgtctgcgccgacgtgccgccgctcgggccggcgctgcgggacgcgcagcgcacgatggtgcgtgtcgcggcggaggaagcggaccacgccgcgtgcgactgctactacgacgccgtccgcgacgtcatgcggctgctggtcggcgacgccgggctgttcaggtcggccttctcgtcccactgggtgttcttctccaacgtcgagttccagtctcgcttccgcggctacaacccggcccccgccgtggccgccgcgtccgcgctccgctgggtccctcacgcggcggcggtgtccgccgtccgcgccctgctcggcgcgtcccacgaggacctccggctccgcgttcacggcctgtcgcgctcgctgagcggcgcgttcttcgccgtcgcgctggtggccgcgcagcgtgccatgatgcaggtggcggtgaaggacgccagccacggcccgtgcgactggtacttcgacaccgtcggcgagctcatgcggctgctggtcggcgacaccggggtcggccctgcggtgttcgaccgtgcgtcgttcgagtcagccttcgctctcgaatgggagaactga

SEQ ID NO: 62223 - DNA, 396 bp, Oryza sativa
  Clone ID: PAT_MRT4530_63580C.1
gtgacataaattacttctgctgataatatatatagtttctgtttgcatatgaacacaactgttcttatttacagtgttttcttttgtaagtagtactttcgctatgtagtaggagtataaaaactgagaaatttggcacttcctgggccaatgatatatttttaagtgtgatagaattcatggcctcaatcctcctgcctcccatgccaattcttccatcaccttcttgtgcacaagaataagagaaatcctcaacgagctgagttagcaggcatcatcttggccgaatcaggcatttcatgattaatttacctgttgatccttcccattacgatcgcgttcttcccttaacttcgcattttattttgatgcaccttttggtggtgtggagctatt

SEQ ID NO: 62224 - DNA, 384 bp, Oryza sativa
  Clone ID: PAT_MRT4530_63581C.1
atggaggctgtgcacgccctgccagtggcgtggcactcccacgcgcaccgatccggcagcggcggctctcccccgcacagatctgtcgtcgcggccctccccctccacagatctggtggtggcggcagggggcgacgtgcattcaccatctccgccatcgtcggcctccccctccctcacagatccggcaacagcggcatccatcctcacagatctgggggctgtgctcaggagcaaagccaccccaagcacagccacctgcgggctatgctcggggcacatctacagccagctcctgagcatgccctctacgggctgtgttcaggacacatctgcacggtcccactatgccatgcttggggcacatccgccttctgctcccga

SEQ ID NO: 62225 - DNA, 518 bp, Oryza sativa
  Clone ID: PAT_MRT4530_63582C.1
ccggccgggatctcatctcagcacacactaacacagccggcctgcaagcttagcttagctagctctcagttaacttgtgatcaatggcgcagcaggcaagggcgcagtggccgcagaagcagaacaagctgttcgagcaggcgctggcggtgtacgacaaggagacgcccgaccggtggcacaacatcgcccgccgccggctaccaggccgaaaggttgaagcatttgaagatctaggtgtgtggatgtattgattgaagaatcgcgcgcggatagcatgatgatgtgtgcgactattgacgatgcgtggtgtggttcacgtagacgcaaggatgcatatggcgatatctgcagatgcatatgcatgttaataactaggagaaggagcagtttaattatcacgcggtcgatatcgatcgatcgatctctcaaccatgtgcatgtctagctatcactcttaccttatttctacgtgtatagcatgagtacaaagcaaaaaaaaaaaaaaaaaagcggcc

SEQ ID NO: 62226 - DNA, 1357 bp, Oryza sativa
  Clone ID: PAT_MRT4530_63583C.1
ctcgtggagtatccggttgccccttctagtgtgtaacttggagcaaatttggaccctgagacgcaaatcagtcatggctggttctcttgcggcgtctgcattcttccctgtcccagggtcttcccctgcagcttcggctagaagctctaagaacacaaccggtgaattgccagagaatttgagtgtccgcggaatcgtcgcgaagcctaatccgtctccaggggccatgcaagtcaaggcgcaggcgcaagcccttcctaaggttaatggaaccaaggttaacctgaagactacaagcccagacaaggaggatataataccgtacactgctccgaagacattctataaccaattgccagactggagcatgcttcttgcagctgtcacgaccattttcctggcagctgagaagcagtggactctgcttgactggaagccgaagaagcctgacatgctggctgacacattcggctttggtaggatcatccaagacgggctggtgtttaggcaaaacttcttgattcggtcctacgagattggtgctgatcgtacagcttctattgagacattaatgaatcatttacaggaaacagctctgaaccatgtgaaaactgctggtctcttaggtgatggttttggtgctacgccggagatgagcaaacggaacttaatatgggttgtcagcaaaattcagcttcttgttgagcgatacccatcatggggagatatggtccaagttgacacatgggtagctgctgctggcaaaaatggcatgcgtcgagattggcatgttcgggactacaactctggtcaaacaatcttgagggctacaagtgtttgggtgatgatgaataagaacactagaagactttcaaaaatgccagatgaagttagagctgaaataggcccgtatttcaatggccgttctgctatatcagaggagcagggtgaaaagttgcctaagccagggaccacatttgatggcgctgctaccaaacaattcacaagaaaagggcttactccgaagtggagtgaccttgatgtcaaccagcatgtgaacaatgtgaagtatattggttggatacttgagagtgctccaatttcgatactggagaagcacgagcttgcaagcatgaccttggattacaggaaggagtgtggccgtgacagtgtgcttcagtcgcttaccgctgtttcaggtgaatgcgatgatggcaacacagaatcctccatccagtgtgaccatctgcttcagctggagtccggagcagacattgtgaaggctcacacagagtggcgaccgaagcgagctcagggcgaggggaacatgggctttttcccagctgagagtgcatga

SEQ ID NO: 62227 - DNA, 396 bp, Oryza sativa
  Clone ID: PAT_MRT4530_63584C.1
ttttcttttctaaactcttataatttatcttggacctcggataggctggcaacccaaggatggccgaatggccacatgtgtcccctctgccatcggactcaggagacgggtgtgcatctactagcaagttgtaggtacactagaaggctttgggtgtcgctagcaatctggacggcttgcgacctactaaaccccaaccactggtgacatgcttcgacagttatagaatggtgggagaacacagcaaacacaataggagctccgaaaaaggcgatgcacaccctaacgctgttagtggcctgggagatatggaatgaaagaaaccgcagaaacttccaacacgaagagcttccgatggccagcttgctgacaaaggtcaaggagaaggccaaaact

SEQ ID NO: 62228 - DNA, 274 bp, Oryza sativa
  Clone ID: PAT_MRT4530_63585C.1
cggcacgagggtttctttttgttggtgagatggaccggtggttcccgttggcagtagcgattggagcgctgctggccaaggaccacagaacagaaaatcaacttgtgtgctccaggccggatgctgaagagaagaataatcagcgtctttgtccctgtatcaggtatggaatacttgatcttgtcttctacgatcactatagattggccacaatttatcaggtatggaatacttgatcttgtcttctacgatcactagagattggccacaattt

SEQ ID NO: 62229 - DNA, 3323 bp, Oryza sativa
  unsure (1)..(3323): unsure at all n locations
  Clone ID: PAT_MRT4530_63586C.1
atgcaggggttccccggcggcgcccccgatccgcagcagctgcagtccaccatgctggccatcgagcaggcctgctccctcatccagatgcacatgagtccagctgatgcggaaaaagttataagttcactgcattcatctccaatgccttatcaagcatgcagatttattcttgagacatcccacatgccaaatgcgagattccaagctgctggagcaattggtgatgcagcaataagggagtggggaatcctttcagatgacaacaaaaaaagcctaatagtatattgcttgaactatgttatggagcatgcaagttccccggaaggttatgtgcaagcaaaagtttctgccgtggcagctagactactcaaaagaggctgggttgagttttcagaccaagaaaaagctgccatcttctttgagattgagcaatgcgtacgaggcatccatggacctaatcgacaatttgctaccatcaatttcttagaagccttggtttcggagttttcccctgggactgcttctgctatgtgcctgcctaaggaattccatgagcaatgccaatggtcacttgaagtgaagtttctgaaggacttctattgctgggcacaagctgctgtgttcaattctgcagacaggatattgaatgtaaatgcaagtgtagcagaggagaaagcatgctcagcagcatttcgccttatgttccagatattaagctggagtttcaagcacaatgtggagcatgcaaattcagaagctaagataaattctggtttgaggagtgatgccataaatctgaagaaatttgagcgttcgctggtgaagccagggtctgtgtggagtgatgttctaatatcaagtgggcatgttcagtgggttttgaacttttatactgctgcccgccagaagttctcatatgatacgctatgggttgattctcctattgctacctcctgcagacagctcatagtgcagctatgctcgttgacaggctctgtgtttcctaatgataacgcagatggacagattcaataccttgtgcgcatattatctgctgttgtacattggattgaacctcctgatgtcattgctgcatcaattcgaagtggagcaagtgaaagtgagtttgtagatggatgccatgcccttctttcaatggcgtctttgactacttgttcgctttttgacaacctcctgaagtcaacgaggaactatggcacaatcaacctactttctgctttgacatccgaagctgtcaagtcttttctggataaccagaatgaagaagaaacctggggctcggagtctcttgatatattgttagaaacatggaatgttattctgggggatgttgattccgagaaaagtcctatgtcagttgatggagcaattgctgcttcaagtttgtttaagatcatcgtggagtcacatttgaaggagcgtgatgagcagctggccttgtatgctcagattgcacgttcagctgctgacacaactataccctttcttgcacaattgttttcagagcgatttgcacggctgagtcagagaaatggtgaaaatgatcctactcagactttagaagagttgtactggctgttgctgataaccagtcatgtcctaacagattcaggcgaaggagaaacactgcttataccagaagcattgcaggttggattcccctatgtagttgaagtagcacagcatcctgtagttgcactctcatggtccataataaatttttctcgacagtgtctagatccaggaatcagggcaaggtacttcagtccgcgactcatggaggctgtgatttggttcttggccagatgggtcgcaacctatttagtaccacttgatgtgagtagggggcaagtaaacagagcagaaattgacagtgtggataaacacatgctccaacattctagaaaaatgctaaacagttttgcttgggagaataaccaaggagagcgtgttcttgattttgttgttcttatttcaatggtagcacttactacatatcagggagaaattgagctgcagacacttacatgccagaagctacttgctacagttgttcgacggaagcacacatgtacttatgttgttcagttggactcgtggcgtgatcttacaagagcttttgcaagtggacgttctttattttcattaactggacgcttacagagatctctagcagaaacacttgcctgtgcagcttcctgcatcaaagatcctgaagcatctgtgcagtatttgagggacctcatgggaccggttgctggatgcctagtagagaatgctaacaggagtgatctcaaatctgtggcacagcaagcagatgttgtttatatgtctgcagtcatatacatgatactcaagttcgtcgttgattttgttgatggtcaagctgtgtttttggatgctaaggaaacatcagttttggtaatgctctcactttcttcaagtttgcgcagtgagtcacaagctgaaaaatataaggatctacgtgctttgcttcgtcttctgactaatatatgctcaaaggatttggttggtttcctatctgatagtagcattgaaggttcacaagatattgctgaggtcatctatgttggagttgatattgtgactcccttgatatctttggaccttctgaagtaccctaaactcagtcgtgattattttgctcttatctctcatttgctggaagtgtacccggagaaggttgctaacttaaataaggattgcgacattgtcgacaggtgccttacagcaataaatgctctcgcttcttaccatttcaaagagagacttggaggtaggggaggacttagctcacagcttatggaatcagaaggatcaaatggcaaacttcaggaaagcatatcaagtcactttttgaggctgcttctgcaattgcttctgttcgaagatttcagaatggaactagcaggttctgctgcagatgctttgcttcctttgattttatgtgaacaaccgttatatcagaggctgctgcaggagttagttgagaaacaacagaatccaacagtgaaatcaaggctgggaatggcatttcataacctcacaagctccaacaatctctccaactcgctcgaccgcccaaataggcagagattcaggaaaaacctccgcactttcttgggcgatgtctcgggcttcatgcagataaaatagacgtgacaacatgataccagtgttcactgatcggtcactgaaaccacagaagatctacccnccgttgtgccaggagcgcatgtgtgaatgatgcgatgcgagtcgtgagcaagaatgttgac

SEQ ID NO: 62230 - DNA, 345 bp, Oryza sativa
  Clone ID: PAT_MRT4530_63587C.1
gtgtttttttttttaactttgtaatactagcgactgtaatcataaaagacataacagaatccaatcaatgatccacgtacaatgtacacacctccgacagaagtacagagacaacagtcatagcaaggacagctaaaacttgttacgggagcacgtggagggataaaaataaaaaaaattaaagaactcctttcctgcaagcactcctttcccttcccatattttcttatcaattctaaagaaaaaatatgggaggaaagaataaaaccaaagtgaatataggaaaaaagttgataagttgcgtaagctagcacaggttcacatccctgtaggagggtgggtgtg

SEQ ID NO: 62231 - DNA, 440 bp, Oryza sativa
  Clone ID: PAT_MRT4530_63588C.1
gggggggttgttttttttttttttttttttttttttttttttttttttttttttttttttttttttaaatttgtaattttaaaaagaaaaaaaaaaaaaaaaaaaaaaaaagaaaaaaaaaaaaaaacaaaaataaaaaaaaaaaaagggggggggggggggggaaccaccccacaaacccccacccccacccccggacctaccaacctaccccataaggagtcccaaaaaagcttgaaaaaaaaaaggtaaaagctttatcctgggtgaaaatgttaaacggtaaaaatttcacaaatcacaacacccaaaaacacaaaaccaaaaagcgggaggcccaaaggggggagccaaaggacataaataaagtaaaagacaaagcccgactgccaggcgccaaacccgccatcccaaccgggctaatcaaattatcaacccgc

SEQ ID NO: 62232 - DNA, 3699 bp, Oryza sativa
  Clone ID: PAT_MRT4530_63589C.1
atggactgcatcgccgggagtgatcccttcctcgacagcacacgaggagaacaacgaatcaggccagctcgtgagctaaacgggccgccaatatgggccaccttggatgtttcggattcacaagccaacgcatcaaagctcaccgtttgctcagccaaaggcctcatgtcactgatgtcagcagtgaatattgtcgacgtcagctacgtcgctgtgccggcgacggccgcgctgccgccggagccaatcaaactcacggcgatggaagcgctgtggctccctttcccggtgctgcagcacgtcctgttctacgaggccgccggcttgacgccgttcgacagcgtcgtcgattcgctccggtcatccctcggcgcgacgctggcgaccttcgcccctctcgccggcaagctcgtccacctcgaggacaccggcgacgtcgccattgcctgctcggcctcggacgcggtgaggttcgtggaggcggagtgcgacgccgacgtccgccgcgtcgcgggcgacgaggcgcacgacctgcggacgttcgagcagcttgtgccggagctcgacatgagcaagctgccgacgtcggtgctggccgtgcaggccacgcgtctccagggaggcctcgcggtcggcgtgacgttgcaccacggcgtcgccgatgggaagtcgttctggacgttcgtggaggcgtgggcgtcggcatgccggtgccggggcgaggcgccggccgcgacaccgtgcttcgaccgctcggttatcaagtggccaggtggtgaggagatcgccaggagcgtgttgccgcgcatcacccgcgacggcgaagtccacggcaaaaccctgcatcggcctccatccagcttcgtcgccgtcgtcgcgatggcctcggcattcttcgcccgatgcaagaccaccgccgcggacgaggacgccggcggcgacgtgttccttttcttcttcgccgacgtccgcgagcgcctcgacgacccacccgtcgacgcgggatactacttcggcgcttgtttgacagggtgtctcgcgagactcccggcgcgcgacgtccacggcgacggggcactggcggccgccgcgtcggcgatacaggaagagatcctcgagttggcggaggacccgctcgccgggtggaatttcatgagcctggcgggcaagatcccctcggacagggtgatgaacgtgtccggctcgccgggattccgcccgtacgacgtcggcgacttcgggtgggggaagccgaggcggacggagccgatcaggatgaaccacgacgggcaggtggcgctcgtgcgcgccgccgacggccatggggtgcaggccgaagaacacgcgcccaagtttgctctagggcccaaaatgggacgagacgagccagagtgccacccgtgcttggagaactgcgcattggcggaggtagcgaggaggaaagccgacggtggaggaggcgagccgtcgtcgtcgttcgtcgtggccggcggcggagggggcgaggagggaagacggcggcgcgcggatctggagagccgtcgtcgtcgctcgtcgtggccggcggcggagggagcgaggaggggaagcggctggcgcaggcggcgaggaggaagccggcggcgcgcggatctggagtgccgtcatcgtcgctcgtcgtggccggcggcggagggagccggcggcgcgcggacgtgggagaggagggagccgtcggcgaggagcgagccggcggcgtcgcggtcgtcgtcgtcgtcgtggccggcggcggagggagccggcggtgcgcggacgtgggagaggagggagccgtcggcggagggagccggcggcgtcgtggtcgtcgtcggcgtcgaggagggagccggcggcgcgcggatagtccaaagcctcatgtctgcagtgagcatcgtcgacgtcagctatgtcgctgtgccggcgactgccgcgctgccgccggagccgatcaagctcacggcgatggaagcactgtggctccctttccccgtgcttcaacacgtcctgttctacgaggtcgccggctcgccgccgttcgacagcgtcgtccggtccctccggtcctccctcggcgccacgctggcgagcttcgcgccgctcgccggcaagctcgtctacctcgagggcaccggcgacgtcgccatcgcctgctccgcgtcggacgcggtcaagttcgtcgctgcggaatccgacgccgacgtccgccgcctcgccggagacgagctgcacgacctggcgacgtttcagaagcttgtgccggagctcgacatgggcaagctgccgacgtcggtgctggccgtgcaggccacgcgcctggagggagggctggcggtcggcgtcacggtgcatcacggcgtcgccgatgggaagtctctctggatgttcctggaggcgtgggcggcggcgtgccgcggcgaggcgacgccggtcgcgacaccgtgcttcgaccgctccgctatcaagctgcaccttggcgaggagattgcccggaccgtcttgcggaagtacgcgcctaaattgcctcaggtagccgagctggaaattttcgtcgaacaacggaatcggttcacccgccggacgttcaccgtggacgcgcagcaaatcgagcgcctcaagcagcgcatcgcccgcgacggtgaagcccgcggcgcgccactgcgtcggcctccgtccaccttcgtcgccgtcgtcgcgacggcatggacgtgcttcgcccgatgcaagaccaccgccgcggacgacggagaagtgttccttgtgttcatcgccgacgtccgcgagcgcctcgaccctcccgtcggcgcgggatacttcggcagttgcctgaccgtgcgcgtcgcgaggctcccggtgcgcgacatccacggcgacggcgcgctggcggccgcggcgtcggcgatccaggaggagatcgccaaggtggccgaagacccgctcgccgggtgggatttcttgaggctgatggagacgctggtccccgtcacggagagggcgatgaacgtgtctggctcgccggcgttccggccgtacgacgtcggcgactttggttgggggaagccgaggcggacggagccgatcaggatgaaccacgacggacaggtggcgctggtgcgcgccaaggacggccgcgcggtgcaggggagaggacggatgtcggctgctgtgactgtgcgtgtcgtgggagtcagccatgtcgctgtaccggcgaaggctgcgctgccgacggagccgatgaagctcaccgcgacggaggcgctgtggctacgcatcccgctcctgcaacacgtcctattctacgagagcgccggcagcagctggccgccgttcgacggcatcgtcgactcgctccggtcctccctcggcgcgacgctggcgaccttcgccccgctcgccggcaggctcgtccacctcgaggacaccggcgacgtcgccatcgtctgctcggcctcggacgcggtgaggttcgtggaggcggagtgcgacgccgacgtccgcagcgtcgcgggcggcggcggcgacgcgcccgacgacgacctgcggttgctggagcagctcgccccggagctcgacatgggcgagctgccgacgtcggtgatggccgtgcagtccacgcctctggtgggaggggtggcggtccgcgtgacggtgcaccacggcgtcgccgacgggaagtccttctag

SEQ ID NO: 62233 - DNA, 954 bp, Oryza sativa
  Clone ID: PAT_MRT4530_6358C.1
atggttgtggtggctcacggggtggaccgggggagcgaactcgccgccgccagcgaggaggatgatgggtactccacctccaccaccgatgacgacgacgacgacgacgacgtcgagccccacggcccggcgtcctccgggctccgctgggtcccttacgccgcggcggtctccgccgtccgcgccctgctcggcgcctcccaccacgacctccgccttcgcgcgcaccagctctcgcgctcgctcagcgccgtcttcttcgctggcgcggggaacgagggggcggtgctcgtctgcgccgacgtgccgccgctcgggccggcgctgcgggacgcgcagcgcacgatggtgcgtgtcgcggcggaggaagcggaccacgccgcgtgcgactgctactacgacgccgtccgcgacgtcatgcggctgctggtcggcgacgccgggctgttcaggtcggccttctcgtcccactgggtgttcttctccaacgtcgagttccagtctcgcttccgcggctacaacccggcccccgccgtggccgccgcgtccgcgctccgctgggtccctcacgcggcggcggtgtccgccgtccgcgccctgctcggcgcgtcccacgaggacctccggctccgcgttcacggcctgtcgcgctcgctgagcggcgcgttcttcgccgtcggtgcggcggcggcaccgttcgcgtcgggggcgcggtttccggaggggaagctgttcgtctgcgccgacctcccgccgctggggccagcgctggtggccgcgcagcgtgccatgatgcaggtggcggtgaaggacgccagccacggcccgtgcgactggtacttcgacaccgtcggcgagctcatgcggctgctggtcggcgacaccggggtcggccctgcggtgttcgaccgtgcgtcgttcgagtcagccttcgctctcgaatgggagaactga

SEQ ID NO: 62234 - DNA, 936 bp, Oryza sativa
  Clone ID: PAT_MRT4530_63590C.1
atggcagctgagacgtgcgtttcggtgtcgcctgcagaggtggccgaggcggcggcgatcctcgacgtcgccggcgacggcgacggcgaggcgaaagggcagatcgtcgtcgtcgacgacgactccgactccgaacccaacccgtacgagtaccgcgtattcttcgagtggttgtgggacgactactgcaagatcgacgacgtcactaggggccccacgttccgaacgcccggggcgcggatattcccctgcgtggaggtgtactcgtgcagggtgattgacctcacaggcggattggagtggccgatcaatgtcttcggcttcgtcgcggtgcgtgatgggctcgaccgcaagcgcaactacatcttcaatcgcccgaggggcgacgcccagacactcaccacggaggacccatctttcatcttgacagggcctatccgtgcaatcaactgctctcagcgtatcgaattcgaaatcgatctcaaggttagggggaaaacacaatccgataaggataaggtgttgagtgccagatacattgtgtatgaaactatggggccaaatagtatagttgggcaggttagatcaaaggcaaggccaggcaagcgttgctcggtagaggtcacctttgcccatctcgcggggcggtggaggcggcgatcgagtaaagatggttctgtactagctgttgctgatgatggtgtgatcaagcttgctcggagtgtcgccgtcgtcgaaagtacaggggtgctgaaccttcatgcgatcatcactcgaaatgatggtagtagtagtggggatgatggggttggtgttgctgctgaagatcatgccgagttcgctgctcaaagatttgaaagttcttgtagaacacttgatcttgggttctgtaagatgctggcaactgtctcctggtcaatgattcctttgatttag

SEQ ID NO: 62235 - DNA, 562 bp, Oryza sativa
  Clone ID: PAT_MRT4530_63591C.1
caacgcgaagaagaataagaagaagaagagcaacagcaaggagcacgtaaacgctacttcgtcaatgttggctatatctaccttctgttgcttttattatgacaaaccttctaatgtcagcaccaacacacgcagcgtagcgcgtggctctttctagttcacatcatacgacatacggtatcctgaatcatcgaatatgggaattcagggctgtcaccacctgtcgtctacctttgacaaatccgtgggatgcacagcaaacatatagaagtttctccgaatccagagtagagtgtactaacagctccggtactcctctataattcctcatagaaagctatactcgtcgaggtagaagtcgaagagtgcgccaaacttctaggcactcctacagagcttcccctcactctctactattttctaatgtacaaaagatacaatagagcatcttgtaaatttagctcaaagttgtgtgttgtgaagtgtgatggagtcctccttttatagcatccatatgacggttacagccataagaaatgtccaaactactctacaatcatca

SEQ ID NO: 62236 - DNA, 363 bp, Oryza sativa
  Clone ID: PAT_MRT4530_63592C.1
tgtgttttttggaaaacaggggggtattacttttttttttgctgttttttttttttttctttgtatattttttttgtttattgagagttggttgctggcctggcccaacaaactgaggacagaacccaaagggtgctgaaaaaccccccccttttgggggaaaaagagggggccatagccgccggcggatggccttgttggctgcacggtccggccgggggggaagggttcgtttttaccacctccctggttttctggggggcccccggcaaaaaggggggggggggcaccgagaccgtgttcagcggggtcaagaccttcttgggggtggccgccggttgcggacgggacggctatgacagg

SEQ ID NO: 62237 - DNA, 204 bp, Oryza sativa
  Clone ID: PAT_MRT4530_63593C.1
atggcaccaactggatctatattagggaatttattggagaagaagcatcgcctccgctcatgccacccgcgccactcctacgcccgacgactgaccgtgccgccgatcctccgtgtagcgaccgctagtgccgctcctctatctgtgaccctgccgcccgtgccatcgctcctctgcctaacgatcgccagcgcccacccatga

SEQ ID NO: 62238 - DNA, 2495 bp, Oryza sativa
  Clone ID: PAT_MRT4530_63594C.1
gctatcaccaggcttgattttgctggttcctcaagctcagcccctctcaccgccgcgacctacgccgccctcgtctccgcgtgctcccgcctgcgctccctcccgcaaggccgccgcgtccaccgccacctcgtggcctcctcatcctcctcgccggatgcacagctcgctgggaacaccgtcctcggcaaccacctcatcaccatgtacgggcggtgcgccgccccggactccgcccgccaggtgttcgacgaaatgcccgccaggaaccccgtctcctgggcctccgtcatcgccgcgcacgtgcagaacggccgcgccggtgacgctctcgggttgttctcgtccatgctacggtcaggaactgccgcagaccagtttgccctcggcagtgccgtgcgtgcttgcacggagcttggggacgtcggcaccgggaggcaggtgcatgcgcatgcgttgaagtcagagagaggcagtgacctgattgtgcagaacgcactcgtcacaatgtactccaagaatggcttggttgacgatggattcatgctctttgagaggattaaagataaagacttaatttcctgggggtcaattatcgctgggtttgctcaacaaggttttgaaatggaggcactacaggttttcagggagatgattgttgagggctcgcatcatccgaacgagtttcattttggtagtgcctttcgtgcatgtggggctgtgggcagctgggagtatggagagcagattcatggcttatccatcaagtataggttggaccgtatttatatgtaggatgctcactgagcgacatgtatgcgcgatgcaagaatctggactctgcaagggtagcattttacaggattgaggcaccggatttagtttcttggaattccatagtaaatgcatactctgttgagggcctacttagtgaggccttggtcctgttctctgagatgagagactctggtttgaggcctgatggtattactgttaggggcctgttgtgtgcatgtgttggccgtgatgccctatatcatggtaggctgatccactcctacttggtcaaattgggtttagatggggatgtttcagtctgcaattctttactcagcatgtatgcaaggtgttcagatttatcctctgcgatggatgtttttcatgagataaaggatcaggacgttgtaacctggaacagcattcttactgcctgtgcccaacacaaccatccggaagaagtcctgaagttgtttagtctcttgaacaagtctgaaccgagtctggataggattagtttaaacaatgtactgagtgcttctgctgaattgggttactttgaaatggtgaaacaggttcatgcatatgctttcaaggcaggactagtggatgatagaatgcttagtaatactctaattgacacttatgctaaatgtgggagtttagatgatgccatgagactctttgaaataatgggaaacaatcgtgatgtgttctcttggagcagcttgattgttggatatgcccaatttggttatgcaaaggaagcatttgatttattttcgaggatgagaagcctaggaatcaggccaaaccatgtaacgtttatcggagttcttacagcatgcagccgagtcggttttgttaacgaaggctgctattactacagcattatggagcctgagtatggcattgttccaacacgagagcattgttcatgtatcgttgatttgttggctcgtgctgggaaactaactgaggcagcaaattttattgaccaaatgccatttgagcctgatattataatgtggaagaccctgctggctgctagcaaaatgcacaatgatatggagatgggaaagagggcagcagaaggtattctgaatattgatccttcccattcagcggcctatgtcttgctgtgcaacatatatgctgcttctggcaattggaatgagtttgcaagattgaagaaggcgatgagaactagcggcgttaagaaatcacctgggaagagttgggttaagctgaaaggggagctaaaagtctttatagtggaggacaggtcacatccagagtctgaggaaatatacgcaatgctggagttaattggaatggaaatgataaaagctggttatgttccaaagcattcatggaaacatgctattgttgatcatattgatagtgatttgttcaatgaagagatgctagctgaatatggttgagtgggagataaagaaaacagtaattgctgactctggggtattcgcatgtcttccttgttgtaagaaatacttgttaatcaccaagataattattaaagctttgtcagaattacaatgcaacatacagaagttgcataagcttggcatcatgcaccatttgagaacttaccagtatgttatagattatattttgcctaaataatttgaaagaagaagtgggttcgacaaatcatgcatagtcagcctgctgaaggagctaagctattcatgtaa

SEQ ID NO: 62239 - DNA, 288 bp, Oryza sativa
  Clone ID: PAT_MRT4530_63595C.1
accacggggagggtggcatcgtcgtcgacgccgtcgaccgtgctgcctggatccctcctctccgacctcgacgtcgtcgaccgtgctcccacggctccctcctctccgaatgtgctccacaccgccgcgcgctgccggccgtcggcgctcatctgcgtgctcagctcggcgatgagctgcgcgctcaagtgcggcggcggtggcccggcgctcgtctccctctcggcgtcatcattttcactggcggccgatttaacacagccgctagcacgctggcggctggcttaa

SEQ ID NO: 62240 - DNA, 243 bp, Oryza sativa
  Clone ID: PAT_MRT4530_63596C.1
atggccttgcacggagggccacacccggcggcggccggcgcggaggccggtgcggcggcaggcaatggaggccgtctgttgaaaacagaggaaaggcaaaaatttaaaggaaaaacaatcgtttatggatctatggtattttcttcttccagttcaaagttggcaatgggtgtggctacactgctacagggacaacatttgtcctccttggtacttctaagttgcttccatgactgcctctaa

SEQ ID NO: 62241 - DNA, 579 bp, Oryza sativa
  Clone ID: PAT_MRT4530_63597C.1
atgaaggcggtcaggacggtgaagaagaagctagctcaaggcgaggaggaagacatcggatggactttgagattcgtgctccatgtcatctcctccaactccggcaaacctcttcttctctggcgccggcgaggaccctacgggttagggtcccggggtggggtggggtgggagtggaagggggaggggggaggggaggagttcgccggctctagagggatggctgggggaggcggtagcccggcggtgggaggcggatcaggcgggcgacgaggcggcttcggcggcaccggagccgcagcgttggaggagggtggtgggccagcatcggtgacaggggcacctcgccgtcgacggctcgagaagaaaggaggggaggagggggtagggggaggaggctggtcgggggaaggggggcgtgggctcgccttcgccgttgacgccctctgccagccggtgaggctggcggcggtgcggtggggcggtggcagcgggggattgggcagagccgctcgcgaacgcgatgggaggggaacgagaggaggagaggcagggttaatgcatttgcacgaatcataa

SEQ ID NO: 62242 - DNA, 2367 bp, Oryza sativa
  Clone ID: PAT_MRT4530_63598C.1
atgcgctacttcgtgctggagacccggctgctgtcctactacaaacgcaagccccagcacaagatgcccaagctccccattaagtcccttcacatcgacggcaactgcagggttgaggaccggggcctcaagatgcaccatggccatatgctttatgttttgtgcgtttacaacaaaagggagaagcaccagcgcatcacgatggctgcattcaatatccaggaggctttaatttggaaggaaaaaattgagatggtcattgatcagcaacaaggagtggtggcgtctgatggtaatctagcccacagctcatcgcaacaaaaagtgagcttagaaaatggaaggaaatcttctttctctgatcatgaaagtctgtacagccatgaagaggaggaagaagaagaggacaatcaacgatcattaatgcgaagaacgacgattggaaatggtcctccagaatcgttatatgattggacccgtgaaaatgatttgggaatatcaaatcagggaagtcctgatcatgttttctctagaagacattgcgccttgtcagatgccaaaatggcaagcctccgcatttttgaggaactccaagatgttgattaccttgcaagaagctgtagcagagccatgaaggctgttggtgttgttgaggcatcctgtttgtttggcctcgtgatctttgttatgtacgatattggcgacgtaatgatgatgggagctatggttgttgtgctatttcaatccagagagcacccaaactgtggtccacaaccaggatttgtgagggcacaaatagagagtggtggttttaatatttctgctctgatatcccgtaatggaagaatccgaactcaagtacagcatctcatgcagatagatttaaagggttggggagttggttacttaccttcttttcagtgctgcttactgcactgattatcgcaacgttgggcaccatctacttgactcctgacagcatacaacaatacaacacatgtgtacagagatagaggaaccaactaccggcgctcatgtcatgtcaaacaatgtggcctaatctgacttgaaagtgatcaaaatgcctgaatgtttaaagtgtatgtaattatgcttcaatgcttgatgaggaatctgatgaagatgaagatcaaatacctgaatctgagcaagagacatcaactcatggccatgatgcacctgttaaactgccagtgctggatgaggaggattcagatcagattgatgtttctggattttctggaaatttacgccgggatgatcgcgacaacactcgtgattgctggagaatgtctgatggaaataacttcagaattcctgctggaaagcctcttatgaagcttgttgctgttgactggtttaaagatgtgaaacgaatggatcatgttgctagaagaaaaggctgtgcagtacaagttgctgctgagaagggcctttttgcattggcagtaaatctacaagttcctggcacaactaactatagtatggtattctattttgttacgaagaaactgataccgaactccttattgcaacgcttcgttgatggtgatgatgaattccgcaatagtaggtttaagttgattccatctgtccccaagggctcatggattgtccgtcaaagtgttggcagcacaccttgtctgctgggaaaagcagttgacattacctatatccgtggtccaaattatttagaaatagatgtggacatcggttcatctacggttgcaaatggagtcttggggctagtgtgtggtgtgatcacgacactagttgttgacatggcttttcttgtccagggaaatacatatgaggagctcccagaacgactgatcggtgcagttcgtgtttcgcacattgaactgaaatccgcaatagttcctgtccttggggattaacaaacttactactgctgcctactgcactgatgatcgcaacgttgggcaccatctacttgactcctgacagcatacaacaatacaacacatgtgtacagagatagaggaaccaactaccggcgctcatgtcatgtcaaacaatgtggcctattctgacttgaagtgaacaaaatgatgaatgtttcaatgtatgtaattatgctttgtgctcaatcattctggtaggtattagtacaattgcgtggcaaaaagaaagaaaggagattaaaaactagaaattaggagactggagagtgaggcccaggttagggtcagctcagcttgaataaaaatagccatgtttacttgagtttacgttggacagtaagaaaggaattgagatgactacatttgcaaggtgaaaacacactacaccattcttcatgccatattacttctatgataagat

SEQ ID NO: 62243 - DNA, 607 bp, Oryza sativa
  unsure (1)..(607): unsure at all n locations
  Clone ID: PAT_MRT4530_63599C.1
gcgttcggnacaacacaanataatactatgcaaaccggccttcaaatggaccaaagtagacaatctacaatgcttgatgaggaatctgatgaagatgaagatcaaatacctgaatctgagcaagagacatcaactcatggccatgatgcacctgttaaactgccagtgctggatgaggaggattcagatcagattgatgtttctggattttctggaaatttacgccgggatgatcgcgacaacactcgtgattgctggagaatgtctgatggaaataacttcagagtgcgaagcaagacttttatatatgataaaagcaagattcctgctggaaagcctcttatgaagcttgttgctgttgactggtttaaagatgtgaaacgaatggatcatgttgctagaagaaaaggctgtgcagtacaagttgctgctgagaagggcctttttgcattggcagtaaatctacaagttcctggcacaactaactatagtatggtattctattttgttacgaagaaactgataccgaactccttattgcaacgcttcgttgatggtgatgatgaattccgcaatagtaggtttaagttgattccatctgtcccca

SEQ ID NO: 62244 - DNA, 481 bp, Oryza sativa
  Clone ID: PAT_MRT4530_6359C.1
caaagcacgcacacgatgaggctcacgacgaaatcgaaaagccgctgcttagactgaacacaccacacacgagcacgagcacggagaagtcgagagagagagaaggtggacgggaaggttgtgtggatcactggagccagccgcgggataggggaagttcttgcaatgcaatttgctagtttaggagcaaagctgatactatctgctcggaacaaggaggagcttgagagagtgaaacataacatcatcaacaagcatccaaatagcagagttgaagtattacccatggatttatcatcgggtgaagagtctctgaaagagcatgtacatgaagcagagtcactcttctccaatgcaggcgttgactatatgatccataatgcagcatttgagcgttcaaaaaggagggctctggaagaaactgaacaaggtcttaaggctacttttgatgtcaatgtctttggtactattactctaactc

SEQ ID NO: 62245 - DNA, 414 bp, Oryza sativa
  Clone ID: PAT_MRT4530_635C.1
acggcgggggaattccccgaatataaaaaacccctaaaaaataaaaagggccaacaacatttttgccccccagccttttttaaaaatagttttcaaacaagggcaaaatacccccccctttttgggacctggagatcgatctcacccataggcaggcgggggaacacacataacgcgcgggccctagaaagagccaggggtaaatttagggctgaccaacctttcatttgcatgggagaaccgcggggaaacaaaagctagggctgggcggaaatggcaaggggaccccaaaccccccggccgacgatgctacagggggccctaagcccaaggttgggatccagaccccgcttttaataagcgtgcccaaaaacgcgggggaagggggaccccccaggcattttggcgaaaagg

SEQ ID NO: 62246 - DNA, 1167 bp, Oryza sativa
  Clone ID: PAT_MRT4530_63600C.1
atgtcgtaggcgacgagcggtacgtcctcgaggctcgccgtcctcatggcgctggggatgcacatcccgtcgacgctgggtattggcatcggcgttaaggaccttatcagcacgatgggcgccgtcaacgggatgcctctgagtgtcattctgcggtgacggacggtgagaaatctaggcacgacgtggccgcgccggcggcgaaggcggacgcgttggcgggtgtcagtgacgactgtaattagttccttctcggctacgccggccgatgcgcagttcggcggctaataagatatcatctgcgtctcatctcatggccgctttaactgttgctttggcttcgtgtctgttgacgtcaagtgttcgtgcgctgaaatttttaatgactcttggcacgcatctttgggttctgacctggctgtcaacccagttaccatacttttggacatcatcaatctgatcaagtaattcagccggagcatcaagatctccctcatggtcttgctccttggagtcggtatcgcgtcggtgaccgatctccagctcaatctcctcggctcgatcatcgccgtgctcaccatcgccgcgacgaggctgaaggtgtcgtcgacgcagctgctgtaccagtcgtcgccgtaccagtccgccgtgctgctcgtcaccggcccgttcgtcgacaagctcctcaccaaccgcgacgtcttcgccttcacctacaccttccaagtcgtggcgttcatcgtgctgtcctgctcgatcgcggtgtgcgtgaacttcagcacgttcctggtgatcgggacgacgtcgccggtgacgtaccaggtgctggggcacctcaagacgtgcctcatcctctccttcggctacgtcctcctcagggaccccttcaccttccgcaacgtcgccggcatcctcgtcgccatcttcgggatgggcctctactccttcttctccgtctccgagtcccgcgacaagaagctcgccgacggcccctcccctcctctccccatctcttcctcccagatggcggagatgaaggactcggagccgctgctgggcggcggcggcggcgcggcggcgaagagctcgccgtggaacgaggtgaaggggttgcagagcttcgacgaggtgccgaggacggcgaagagcgcgttcagccggccgtga

SEQ ID NO: 62247 - DNA, 230 bp, Oryza sativa
  Clone ID: PAT_MRT4530_63601C.1
ggaggcactataaaaaagaggggggacattaaaccgctcgccatcttaatatatccaacattaacaagggcggtagtccaattattagtacacacgattcttcctcactctatattttagctttttttttctaacccattttaaatgatgcacccccacctgaacagaatttgttttactactacaagggatgtcccaccaaaaaacttcatatctcccccctctttttt

SEQ ID NO: 62248 - DNA, 950 bp, Oryza sativa
  Clone ID: PAT_MRT4530_63602C.1
cgaagatactactggtagtaaagtggaaaaggagagacaaatggtggattaaaaaatgctgttatctagattcaagatgcagagtcaaaactactccgtctctggacctgcagagtagctctgaatttcttcaccttggtagaatgattgactgatctttgctcaattgacagcttacggcttacgcaaatccacactaataatcgaggttctactaaaatttccagggttccaaacacactaaaaaaatcaggggaggacctccaaatcagacgaagacagcagacaacgctactactactagcagctaaaacatcctgagaatcgcggcgagcacggcggcggcggcggcgtagaagagcgaggcgcgcgaggcggtgaatgcggcggcggacttgtccttggcggcggccggcggggacggtggcgggagcttctcggtcttgatttggaggcgcatgccgccgaagcagtagccgtagctgcagatgaagtagtaggtcttggtctcgttgagctcgaaggcgtaggtgcggcccttgctgtagttggagatggcgttggtggcgtcgcacgtattgtaccccgccgcgtccacctggatcacgtccgcctgccccgccgtgtagtagaacacgagccagtcgcccttgtagaaggggccgtgctgggcgggccagtcggagtagttggtgttgggcttccagttgatggagaacttgttcgccgtcgtggtcgacggcagcgccgcgcacgcgcacatcgccaccaccagcagcgccgccctcctcctcgtcatcaccatcgccgttgcactcacctcctccccctcaaaaaaaaaacacaaatcgagctgagagaattcgcttgctctcccgctctcgccgcctgaaacgaaacgagagtggtgaggtggccggcgcgcgtgggggaagctctcccccggccgg

SEQ ID NO: 62249 - DNA, 4575 bp, Oryza sativa
  Clone ID: PAT_MRT4530_63603C.1
atgtactaccactacctccacgggttcgaggagcttgtgatggagcacaccggcgagccggagttcacggtggccatgccgggcctcccgccgatggcgatccgcgacctccctagcttcttcaccgacctcgacgacactaggctctccgccgcattccatggcgtccagacgacgatcgaacagctggacatcgatcgccagagcggcagcagcagcggcatcgccggagcgaagaagccttgtatcatggaggaggatgggcgtgtagaccagtcatgcgacaaggaggaggatggcgtacaggaagaaggcgtaaaccaagaaggcgtagccttgaagcagaagcggacacggaagcgtaatcctaaatatgagggcggcgtatgggccgccggttgcgagttcgtgaaactggaaaagccacgctacatcacaaagcaggcggcgcaaatcatggcgcaagagggcaagctcgatctgcttctgaagaccctggaggagaatgagaagaagagggagcaagcggagacgagggcacgggcggatctggcggatttcaagaaggcaatggaggcaaggctaccgcaagtggagcagaaggttaacgacatcaactcggtggtcgcgactctgagcaccaaggtggaacagctggagggttcgatgctccgccaaggaagacaggaaaagggagcggtcgatgccaaggaagatccattctctccatcgccatcaccagcattgatacatggtatgagggaatctctctttactgccgcgagtccttttgggggagaagctggggatacagtggcggtcactggagggggaaatttgggaagtagtttgcctccgatgtcctgtccgcagtttagtggcgacaatccgcagatgtggagagctaactgcgaagtttattttgatgtgtatgggataccccctagcagctgggtgaaggtggccacgctgaatttcactgggaatgctgcattctggttacaatctgtgcgcaatcagctaataggagtcacttgtataatgcatcagttgaatgcctacgagagtactgcccctattctttactttgtgaccaaatttgtggatggtctcaaggatgaggaagaagccttggagggagttaaaactgcaggaagtaagaagatggaagttggggtgaactatattaaacagcctcccagaatcatgaatcctatggtgggttctacaccacagaggaacagtggaatgggaactgaagaaaggagatcggcagaagtatctaaaccacgggaagacaggttctctgctcttaaatcttataggaaagctaagggactgtgttttacttgtggagaaaggtggggaagggatcacaaatgtgctacaacagttcaactgcatgtagtacaggagttgttggaaacactgagtattgagactgatgagcaacctgaatccgaagcagttagtgcagaagaggaagttaaactaatggccatatctcaacaagctttgaatggcactgagtccagtaaatctataaggttaagggggtggattcaaggcacggagttattgatgttggttgattcgggaagttctcattcatttatcgatgaagaagtgggaaggaaattaacaggagtggaaccattacaacaacctctgaagggacattgttttaagagtaacttcaggctgctagcattggggggatatgacattatacttgggatggactggttgcagcagcatagccccatgaaaatagattggaatcaaaaatggctggagtttaattataatcagcaattgattagattgatgggggtcgctcagcagactaatcactgttttgagatttcaggagagcagttacttgggatggctaaaataggtgccatcatgtataaccctgaattaaaggatgaaattgaaaggcaaatcgctgaaatgttggattcgggagtgattcagcatagccaaagtgcttggtcatcgccagcacttctggtaaggaagaaggacggtacttggcgactatgtgtggattacaggcagttaaacaatgtcacggttaaaagtaaatatcctgttcctattattgaagagttactagatgagttaactggtgccaagtggttctctaagctggacttacgagcgggttatcaccaaattagaatggtacctggagaagaacataaaacagcgtttcaaacacattctggccattatgagtatagagtcatgtcatttggtctgacaggggcaccagccaccttccagggagcaatgaatgccacattagccccagttctcaggagatgtgcactggtattctttgatgacatattaatatacagtcctaatttgcagtctcatcttcagcatctcagagaagtgttacaattgttaaagctggatcagtggcaagtgaaattgagcaaatgttcctttgctcagcaggaggtgtcctatttgggacatgtgattggggtccatggggtgtcaactgatcctacaaaagttcaggatgtattgaactgggcagttcccaaaaacattaagaaattaaggggcttcttgggtttagctggatattatagaaagtttgttaaggggtttggagtcatcagcaaacccttaacttacttgctaaggaagggagtgacattccagtggacagaagagaccaatgaggcattcaaccaactcaaacagtctctagtctcggctccagtgctggccttgccagacttttccaagcagtttgtagttgagacagatgcaagtgatactggaattggagcagtactttcacaggagggtcatccagtagcattccttagtaaggctctgggacccagatcaagggggctgtcaacttatgagaaagaatatgcactgtcaaggaaagaaaaatcagacgactcacagatagtggccatttctgcttgtacaccaacctggctgcaagcagtaactgaaggatacatcaaggactctttttcttcccagcttttggctgaactagcagttagtccttctgccagaccacacttttctctccaacaaggaattattagatacaagggaagaatttggattggtgataaccccagcttgcaacagcaattgatcaatgaaatgcatagcaaacctattggtggtcattcaggttttcctgttacttataggagaatgaagcagttgtttgcttggaagggaatgaaagaagctgttaagactcaattaaaacaatgtcagatatgtttacaggctaaacctgaaagggtaaaatatccaggtctgctgcaacctctcccagtgcctgttggagcttggcaagtaatttccatggactttattgaaggacttcccatttctgagaggtacagttgcatcttggtaattgttgataagttttccaaatatgctcacttcctacctctcatacatccttacactgctcaatcagttgctaccacattcatgaaaaatttttataaactacatggtatgcctaaggtcattatctcagacagagataggatattcactagtctcttttgggaacatcttttcaccaagtcaggcacagagctgcacatgagttcttcataccatccccagtcagatggccagactgaaagagttaatcaatgcctagaaatattcctccgttgttttgtgcattctaccccttctaaatgggcagcttggcttcatctagcagaattttggtacaacagctcttatcactcggctgtgcagagaactccatttgagatcatttatgggtttcctcctaaccactttggcatcagtagtgaagactgtatcaatcctgacctggatgaatggctggctgatcgaaaactaatgcatcagttaattcaacaacacgttcatagagcccagcaacaaatgaaggcgtatgcggacaagaatcgcagcttcagggaattcaaggaaggagattgggtgtatttgaaacttcagccctatgtgcagtcgtcggtggctagaagagctaatcacaagctgtcgttcagatattatgggccttatcaggtgctggagaaggttggaactgtagcatataagctaaagttacctagcgattgccacattcatcctgtggtacatgtttcacaactgagagctgcagtgggtttctgtccgccagtgcaacaacagctaccgtcacctttggatactttacaagtgccgttgcaattcctagacagtcgagtaaccaagaaaggtaacaaagttctaacacagttgcttactcagtggtcaggaatgtctcctgctgatgcttcttgggaggataaggaggagcttcgtgctcgttttccactggcaccggcttgggggcaagccatttctcaaggaagggagaatgtcagtatcatggaggaggatgggcgtgtggaccagtcatgcgacaaggaggaggatggcgtacaagaagaaggcgtaaaccaagaaggcatagccttgaagcagaagcggacacggaagcgtaatcctaaatatgagggcggcgtatgggccgcgtga

SEQ ID NO: 62250 - DNA, 272 bp, Oryza sativa
  unsure (1)..(272): unsure at all n locations
  Clone ID: PAT_MRT4530_63604C.1
gaagaagaagaagaagaagccgagccgaaataaaactagcctccccgcgacgccggncgccccnccccgcccgatcnccnccgcactcgccgcccntccncctcnccgcaacgcaccggccaccgncnncgccanctgagggagagagagagacgccgaggtttgaggttggtgagggagctgaggcgtcgggagaaggaggaggagcgagantgtggagagagatcgatggcgaggttcgaggtgtacgagaacaacggcggcacgtgcgt

SEQ ID NO: 62251 - DNA, 378 bp, Oryza sativa
  Clone ID: PAT_MRT4530_63605C.1
atgacagaacagatcttggggctcttgagctcgcggtcacctctgttgtcaccattgctgctcctgcctccttcccattgtcatatggcatttgtctgcgacggccacatctacgagcactgtaggcatctgagctacaacattcttacatcttcacttgggccaggtagatccactgacatggaagacgaggtcggcactagatccggtgtccctggcctcctcgttgtcagatgcaacggcggcggcatattggctagagtaggagaagggagaggaggagaatcacgtgctcgcagcttggtggaggagaggggaagggccagggaatcgcgtgaccaagtgccaccgatcagtttaggagcatttggcacttag

SEQ ID NO: 62252 - DNA, 3171 bp, Oryza sativa
  Clone ID: PAT_MRT4530_63606C.1
atggcgatcacacgtttgctcctccagctgcttgctcttccctccactgtcatcttcctctttctcgccccggcttcccgctccatcgacgccggtgatgacctccacgctctcctatcattcagatcccacatagcaaaggatcattcggatgcactgtcttcctggagtgttgtcagcaatggcacctctgatggcaccaatggcttctgctcatggagaggcgtgacgtgctccagtggtgcgcgccatcgtcgtgtcgtctctttgcgcgtgcagggtcttggcctcgttggcaccatctcacctcttgttggcaacctcaccggactccgagagctcgatctgtcagacaacaagcttgaaggtgagatccctcctagccttgcaagatgcttggcactgcagaggctcaacttgagtgtcaatttcttgtctggtgtgatccctccatccattggtcagctgtcaaagcttgaggttctgaatattcgccataacaatatctcgggttatgtaccatctacatttgcaaatcttactgccctcaccatgttcagtattgctgataactatgttcatggacaaatcccatcatggctgggcaatttgaccgcgctagaaagttttaacattgcgggtaatatgatgaggggcagtgttcctgaggctatatctcagcttacaaaccttgaagctttgactatatctggaaacggattagaaggtgagattcctgcatcattgtttaatttgtcctcccttaaggtgtttaatcttgggtccaacatcatatcaggttctctgcctacagatattggccttacacttcccaatctaaggtattttattgccttctacaatagacttgaaggacaaattccagcctccttttcaaacatctctgtccttgaaaaattcatcctccacagaaatagattccgaggccgaattccaccaaatagtggtatcaatggccaattaacagtatttgaagtgggtaacaatgagcttcaagctacagagccgagggattgggaatttttaacatccttggctaactgcagcaatctaatctacatcaatcttcaactgaataacctgtcaggcattttgccaaatacaattgctaatctctcactagagctccagagcattagattgggaggaaatcaaatttctgggattttacctaaaggaatagggaggtatgccaaactcacaagccttgagtttgcagataaccttttcaatggcactataccttcagatattggaaagctcactaatctccatgagttgcttctgttttcaaatggattccagggagagattccatcatccataggcaacatgacacaactaaatcagcttcttctgtctggtaactatcttgagggtagaattccagcaactattggcaacctaagcaagttaacttctatggacctttcaagtaatcttttgagtgggcaaatcccagaagagattatcagaatttcttccctgactgaagcacttaatctctcgaacaatgcattaagtggccccatttctccgtatattgggaacttggtcaatgttggcataattgatctctcatcaaataaattgtctggtcagatcccaagcacccttggtaattgccttgcattgcaatttttatacttgcaagcaaatctcctccacggactaatcccaaaagagctcaataaacttaggggcttagaagtgttggatctctctaacaacaaattttcaggacccatccctgaattccttgagagcttccagcttctgaagaatctgaacctttcattcaataacctatctggtatggtgccagataaggggatattctctaatgcaagtgctgtatcacttgtaagtaatgatatgctatgtggaggccctatgttctttcatttcccgccatgcccatttcaatcttccgataagcctgcgcatcgttcggtggtgcatatcttgatctttctgattgtgggagcattcgtctttgttattgtttgcattgctacatgctactgcatcaagaggctaagggaaaagtcatccaaagttaatcaagatcaaggtagcaaatttatcgatgagatgtatcagaggatatcgtataatgagttaaatgtcgcaacgggttcattctctgcggaaaatttgatcggccgtggaagctttggtagtgtatatagaggaaacttaacttgtggttcaaatgtaatcactgtagcagtgaaggttcttgatctccatcagaccagagcagccaggagcttcatgtccgagtgcaatgccctaaaacggattcgacatcggaacctagtcaggattatcactgtttgtgatagcttggacaacaatggtgatgaatttaaggcacttgtattagagtttatctccaatggaaaccttgacacatggctacatccaagcacagaaaatacttcctacatacctgggaagctaagcttgatgcaaagattaaacattgctcttgatgttgcagaggcactggagtatcttcaccatcacattagtccttccattgctcactgcgatattaaaccaagtaatgttcttcttgataaggatatgactgcacatattggtgacttcagtttagcaagaataatgagtgcagaagcagaaggccaatgcttgggtgagagtagctcagttggaattaaaggcactattgggtacttagcaccagaatatggcatggggacagaaatttctagagaaggtgacatatacagctacggtgttctactgctggaaatgcttactggtagaagaccaactgacacaatgtttcatgatgatatgagtcttccaaagtatgttgagatggcctatcctgataatttgttggaaattatggacaacgcaataccacaggacggaaattctcaagatattgtagattggtttattgctcctatttcaagaattggtttagcgtgttgcagggactctgcaagtcagagaatgagaatgaatgaggtagtgaaagaattgagtggcataaaggagtcagaaatgtgtggtatgattaacacggcatcactgtacattacatggcagcaagaaaggaaagacgcattgagcatgcatgcatccaacagcaaaggtttccatggggtgtag

SEQ ID NO: 62253 - DNA, 1902 bp, Oryza sativa
  Clone ID: PAT_MRT4530_63607C.1
atggctgttgcagttccggatcacacattcaacaatggttactcctcaaagaatcaaattgaggggagatcacttagttggaagcgtgtgtttgtccaaactgacaaaggctctgtcttgggcattgaattggagcgaggagaaaatgcacacaccgtaaaaaagaagctgcagttagcgcttaatattcccactgaagagagttcactgacatgtggtgatcaacttttgaacaatgatctcagctacatttgcaatgactctccattgcttctcactaggaatcacatgcacagaagttgctccacaccttgcctctctccaaatggaaaggatgttcaacactgtgatgatagtagagtcattgaaatcgtggggtgcacaagcccttctgcaagaatgaagcagttagttgatgatattgttcggggaattgaaaaaggcatcgaaccagtagctatcagcagtgggatgggtggtgcctactatttccgagacatgtggggtgagcatgctgcaatagttaagccaactgatgaggaaccatttggtccaaacaatcctaaaggttttgtagggaagtctcttggactaccaggtcttaaaaaatcagtgcgtgttggtgaaacagggtcccgagaggttgccgcatatcttctagatcacaagaattttgcaaatgtacctcccactatgctggtaaagatcacccatagcgtgttccatatgaatgagggtgttgactataaaacaaagtctagtgacaacaaaacacaagcttttagcaagcttgcgtctttgcaagagtttattcctcatgactatgatgctagtgaccatggtacatcaagctttcctgtctctgctgttcataggattggtatacttgatattagaatcttcaacacagacagacatgcaggaaatatacttgttaggaagctttataatgatgctagcagatttgaaacacaaacagaacttattcctattgatcatggcctttgtcttccagaaagcttagaggacccttactttgagtggatccattggccacaagcatctattcctttctccgaggaagatcttgagtacattacgaacctagaccctataaaagatgctgaaatgcttcgcatggagctgcatacgatccatgaggcaagtcttagggtgttggttctctcaacaacatttcttaaggaagctgcggcttgtggcttttgcttgtctgagataggagagatgatgagcaggcaattcactaggaaagaagaggagccaagtgatcttgaggttttgtgcatggaggcaaggaattgggttgaggaaagagagtggctgcttccacaagctgattttgaaggagaggatgacaatgagtccactcagtttgatctcgattctgaggatgattcaactacatttgaagcatcattttccaacaatatcaggccaatcaaaggtaattctagggatccaccatcaaaattagctgaagtaaatgaatatgtggatgaagatgacaacaatgagttcaacaaggatgatgtgggaacctgcacaagtccaattactacttggactccttccacctcaaacttgtccatttcgtccaatgaacttagcttcagtggaagacgcaaatctcatagtggcgtcgcgaagaacaaggttacttctaaaattaacagcaatagttatagtggcaatcatagtgccaaggagaagctccctcacaactccagcttcgcaaagttatcagacttgagtgccaacaaatggagcccattccttgagaagttccaggatttgctccagagcatgttccaagatcgaaagcaaactgcaggccgcaacccatggctgacgcagaggctaggcacttcttgccaattttaa

SEQ ID NO: 62254 - DNA, 663 bp, Oryza sativa
  Clone ID: PAT_MRT4530_63608C.1
gcacgagggattgccccgtggggcgatcgccatggacgcggcggtcgccgggcagcacgcgaggcggcggatccggccgccggagccgctggtgatggccgggtcgccgtcgacgcccgccgccttccggtgcccgagctcgcggccgcgggcccggtcccccgcgagcctgcccaccggcgccacgtacgaccgggcgtccatacagcggtggctcgataccggccaccgcacctgcccggccacgcggctcccgctggcgtccaccgacctcgtccccaacctgctcctgcgcaggctcatacacctgcacgccgccacgctgccgccctcgccctccccggaggtggtgctctcgcagctcgcggcggcgggcggggagcccgccgcggcggagaaggccgtgcgctcgctcgccgccaagatcgccccggagaaagggaagcgggcatccgtcgcgtccgccgtcgccgctgaccttgactccgccgtgccggccctcctctccttcgccaagggcggggcgggcgccgacgcgcgcgtcgacgcggtgaggatcctggccaaggtggctcccgagctggtcccttacttgaccggagacgggacggagaagcgcgggagggtcaggatggccgtcgaggccttggccgccgtcttgtc

SEQ ID NO: 62255 - DNA, 372 bp, Oryza sativa
  Clone ID: PAT_MRT4530_63609C.1
atggggcggcgtcagtcaccggggcttgagctcgtcgcggcggaggagatggtgaggactgcgaccggcggagtggagcaaggcgtcggctgcggcggaacaaagctggcggccgaagcaggcggaacggtagcgtcggccgagcgcgtggcaagcaaaatggagcgccggcggcggcgggcattcgcacggtggctggcgaagcggcaaggggaggagctgtgcacgagcggcggaggaggagctgtgcgcgttctcctcctcctcgagctcgtcaccatcgtcgtcgtcgcccgccaccaccccgctctgcgccgctggatctgcaagccaccatcccgcaacggcgtcgtgattcggcgattgggatga

SEQ ID NO: 62256 - DNA, 417 bp, Oryza sativa
  Clone ID: PAT_MRT4530_6360C.1
atggcctcaagccggcccgacggccatggcgcggcggcggcgcgacaccagcggacggcggcggcgatgcggcggacggcggtggcgcggcggcggacggcggtggcgcggcggcggctatgcggcggcgcacggcggcacggccccgaagcgaggcggcgcggcaaaagcggcagcggcgagtgggttccgggggcggaatccgacggcgaaggggtggacggggtagccctcgggctcgcgaacccgaaggtggcaacggcgcgctcggcggcggttctagcggcggcgagcggcagccgaaggtggctaaggcggcgactgcggcgggtgcacggctctagggcggtagagggcatgggagagctcggtgaaatggggaaaaagggagagggaggggcggtgatgcttaaatag

SEQ ID NO: 62257 - DNA, 469 bp, Oryza sativa
  Clone ID: PAT_MRT4530_63610C.1
gcacgaggcatctgcatgcatgtatttacagcaccactggagcttcgctaatggcgacatcggggctagctacacacactgtacatgctgctgatctcctgcgaaaactgaagataacagccagctctgcatgcttggctagcctagctagctgcaggattattgctgtggtaattattgattttgatgctagtattagcatgttgaggaagagagctaagccaagtagcagtagtggaggcagctacaagcagcagcacgagattgcgtttgatcacggcggcggcggcggcggcgcggctgccatttcggctcccaagctgttggtgccttctagctccggcgaggcctcgccggaggccgtcctgatgagccccacctccactctccagacggccagcgcgacgtccccgtgtagtggacgtaccaccggcgccgccgccacggccgtcccgttctcccgccgccg

SEQ ID NO: 62258 - DNA, 1092 bp, Oryza sativa
  Clone ID: PAT_MRT4530_63611C.1
gctacttctgctcttctgtcttatggagatagattaactatggtcaattcagttttatcttccctcccaacttactatatgtactctctttcccttccaaagtcaataattgaaaacattgatagagctagaagaaattgtttatggagaggaactgatattaattctagcaggaaatctttggttctttgggaaagggtttgtcaacctaaaagtagaggaggtctaggagtcattaacctgaggctgcataataatgctcttttgctgcaattttaactactctagcacaaatttcacattgggctctcaataccttgggttagcttgatctggtccacttattatattaacaaagttcctcatgcgattcactcttatgctgtttctttgaaggattcagtgagtttaacctcttccaagagtatttcgcagcgttttaatctccctctgtctgagcaagccttccatgagtatgatacaatgtctgcagctgatcctttagatcaattatctgatgagaatgatgtctggtcttatgtttggggaaatggtttgttctcttccaagaaaatatatgacattaatttcatgcatatacatgcgcctagttatctagcttggatctggaagagtaagtgcgctatgaaggttaaagtttttggatggctcctgttaattgatcgactcaatacttatgacatgcttgacagaaggcattgccctcccaataattcagatctaacttgtgtcctttgctcaacctgtgcaagagaaaccacctttcatctattttttcaatgtccttttagtgctgattgctgggcacagtttggaattgtctgggatatttctcttgccttcacagatatgctgcatcaggcaatgaattcttataggtctacgcactttgtggagaaaattctttatgcagcctggaatatttggaaacagaggaactccctgattttccagaatttagcaccctcaatttcttcttggaaagctctctttaagagtgatctttcccttttagtttttagattaaatgtttctgagagacggtcccttttgaattggttatatcttttg

SEQ ID NO: 62259 - DNA, 436 bp, Oryza sativa
  unsure (1)..(436): unsure at all n locations
  Clone ID: PAT_MRT4530_63612C.1
gtcccatatatattcgctggtgggtatgtttgctcctatactggtttcatccttttgttctcagaatctccggctgcccacctctggcttcggcgcaagctgctgcaccgatcaccngcatccatcgacatgataacccgcgcttgtcggggatcaacccttctttcttaaagaggatgacggttgttgcccaccttggtcctccctcgcggggcgatcgctcgccaaccacctacttgcagccttcctggcccgcgcgttgcctggttgctgggctgcttggcctcctgctgctctgcgggccgcctgcgatccccctaggctgcgtgtagtgcctgtgcttgccggcttgggctgggtggggccgggccgtgggggggcggggcccgtggcgtgcgtcgggggggggccgggagcgggctggggtgggggctgg

SEQ ID NO: 62260 - DNA, 4632 bp, Oryza sativa
  Clone ID: PAT_MRT4530_63613C.1
atgcctccctcgccgccgagtgggtgggatttccaccctggtaatgagatcagggatcagtgtcgtcgtctccatggtactccggtgcactcttcttctttctattgctttcatcctttcaaattggtggtggacgtcccccgttccacttttcgtcttgaggagtcctctgttgccattgctcttagagcttgtttgggaggttcccctgctggattttttgtttcgcatctcaatgatcggtgttacaatttctgtgttcgtgacaaatctgttggtttgtggatttacaacctccgatcatatatttgccgtgattatcacatgaggtttttcttatggcgtgatggtggtcctaattggaggtttgagtttcgtcggtgggaatctgagcagctcagtgagtggtctgttgttaagagaaagaaatctatgtctgttaaatcaaagtctgttactgttgcttcatcctccattccaatctctaaggtttttaaccgcttccatgttcatgattcctctcgttcatgttccaaatttctgattgcaagctcatcagatccgaactctcagaatccaatctctgggcctaaagtttcgaaggttgttgataaaccctctgatccgattcctaagcctactcccagtgctgggcctaaacccttgggtagtggtccattcaaacggttttcccctagggttcgaaaagtctgggttaaaaaatcggttgtcaagcctaagtccccccgtcttccactctctgctgctgcggaaaaccccttttctcgagaaagctctccgtcttcaatggcgaaccttcatccaaatcctctccgattcatccctcccggactgcatttgcacccagctgggcctcatcgacgccggcgagtggactcagttaacttcactccctcaatcatgagtcatgagcagtacgtcttggctctggtccttcctccgttgcctgaagatcaatcggatgagcatcgtgctgagattagggagtttcttgatcaggtcaggaatattcgtgtgcttgcttccttcccgcatccgaatgctgtcgctttattccagattagttcacctgttcatcgggatgctttagttcttggtgagcccattgcttatgatgcggttcatgaggtctgttttgttagacataatcagggtccgaattggcgtaatgctccctataatcatagaggttgggtcatgttgcttgatttcccgctggactatgttactttgcataatgtgaaacaagtcatttcaacctttggtgagctggactggtggtatgattctgatactctcaagggtagggttttggcaagagtatggtataaagatttagactctgtgccacagtatgttgtttgggagcaaccaaatgctccaaacggccagtcatggactatctatgtttataccctaaatggtgagtttgctgatgctttccctcttgatgatgatctgccgatgggtgaaggtcctgtgtatcctaatgttaattttgaggatgttccagcttggcaatttggtaatgtgcagaattttgatcaggaagagaatcagggttgggataattgggatgagggtcaggacaatgtgaatgacaatgttgattttttgcctgagattccacagcctactgatgtgctacaaattaattcctcctttgctagttctattttagctgtcaattcagggaatgatgttcctgttgtttctggggctaatgaaattcttgatcctgttccacttgctgttgcgccgcctcctagtgtttttttagccctcactgattctgacgccccagttaaaccagcaaaaaggacttacaagaagagagcagttggatctgccactcctgttgttgctacaggattaagaagcagcaaaagactccttgctatttttgatgcacgcaaattgagttttaaggatgatattcttgttgagcctgatcctaatcaaggaattgggaaacctaggggcaagtctgtaaaaaagctcaagcaggttgctcatgaggtgggccttcttttctcaggaagttctctgcaagaatctgacttcatggaaggtgtaaattcagcggataaatgcagagctgtcaggcaagctgttgatgatagtagttgctcagttttttgtttacaggaaaccaagaaggaaagttttgatactgcttatgttaagaagttagctccgaaacgctttgattctttctctttctctccttccgttggagcttctggagtctatggcccgtgtgttgatcctgatagatccctctttgcccagtggttgtttgatttgcaaattcctgacaatgaaaattggatcctcttgggtgactttaacttttacagatctgttgagaacaaaaatagggcaggttgggatatgaatgacatgatgattttcaataatataatcagtaatcttggtctccttgagttgcctttgaaaggtaggtcttacacgtggagtaatatgcagaattcacctctcttggagcaacttgactggttctttacgactgtttcttggactgcttcctatccaagcaccttggtaaagcctttggctagatctatttctgatcatgtcccatgtgtggtccaaatagaaacttcaatcccaaagtctaatctcattaggtttgagaatttctggatagagcatgagggtttctttcagttgatttcttcaatctggtctaatcatgggactggtttggatgctgctaagaatataacatcaaaatttaaatctcttagaaaaggtctcaaaaaatggagtaaaggcttgtccaagttgtcctcactcatagcaaactgtaatctggtcatagcctttattgataatcttgaggagataagagatttgaccttggctgaatggaatctcagattcattgttaaaaggaaagttttgcagtacctgagatataagcaaatgtactggcagaaaagatgcactataaggtgggcaacttttggtggtgagaatactaaattttttcatgcagcggctactgagaggttgttaaaagaatgcctactgatagagcacccggtccagatggttttaatggatgctttattaaaagttgttgacctattattaggcaggatttttacaccctttgtgctcagttttgtgaagaaatcaacacctgagagggttaatgactacggaccgatttctctccaaagtgtggctctcaagcttttaacaaaggttcttgctgataggcttcagtctgtaattacagaactcatccatcaaaaccaatatggtttcatcaaaggcaggacaatacaggattgtctctcttggtcttttgagtacttacaccagtgccaacaatcaaaaagggagatagtgctgttgaagttggactttgagaaagcttttgatactatagagcactctactattttggacatcatgagacaaaaaggttttgattcaaagtggttgaattggattgatttgatcttttcttcagcatcttcttcagttcttctaaatggggttcctggaaggaatttttattgcaaaaggggtgtaaggcaaggggatccattatcacctcttttatttgtgctagatgctgatttactgcagtctgttgtcaacaaagcttattctcagggtgttttgactattccaatcccaactcctgataatgactgttcccagtttgtacagtatgcagacgatactctacttatcttgatagcttcctcaaaagagcttttctgtttgaaggctattctcaacacttatgcagattctaccggtttgaagattaactacagtaaatcatgcatgattcctctgaatgtggatatagaaaaggtgcagcatttgtccaagatgtttggttgctcagtgggcactttacccttcacctatttaggtctgcctttgggaacaactaggccaaagataattgattttgcccccttagttgatagggttgagagaagattgtctgctacttctgctcttctgtcttatggagatagattaactatggtcaattcagttttatcttccctcccaacttactatatgtgctctctttcccttccaaagtcaataattgaaaacattgatagagctagaagaaattgtttatggagaggaactgatattaattctagcaggaaatctttggttctttgggaaagggtttgtcaacctaaaagtagaggaggtctaggagtcattaacctgaggctgcataataatgctcttttaatgaaaaatatgcacaaattttataataggctctcaataccttgggttagcttgatctggtccacttattatattaataaagttcctcatgctgatcgccctagagggtctttttggtggaaagatgttctacaatttgcagacatttttaggggattgtccacctgtaaggttggggatggaaagacttgtctgttttgggatgatttctggaataataaagtcaggtcagtaatgtacccaaggattcactcttatgctgtttctttgaaggattcagtgagtttaacctcttccaagagtatttcgcagcgttttaatctccctctgtctgagcaagccttccat

SEQ ID NO: 62261 - DNA, 1875 bp, Oryza sativa
  Clone ID: PAT_MRT4530_63614C.1
atgaagcgagaacttctcattgcggccccaacccacgaggcgatgcgccgggcgcactggtcggaggtgaagctcaccttcgatcagagcgaccaccccacggtgtttgcccgtggaggggagttggtgttggtggtctccccgaccgtctacaacgttaagctgaggcgcgtcctgatcgacgccataaaggccccagggatgaagcttcacccgtcgctgccaatcatcagcgtgatgccaggacacacgtggcttctggatcacatcgagctcccggtcgcgttcggcgaccccaccaacttccgcattgagcggctagacttcgatgtggcaaacctaaatttgccctacaaagcggtcctagggaggctcgcgttggtgaagttcatggccgccacccactacgcctaccaccatatgaagattccaggacccaacggccccacaaccatctgcggcgacccagaggaggccggtggagccccggaggcctccacgtcacgtgcctccaagaagcggatcacctcaggtgacgaggtgcccatcaaggagataacccttggcggagacctgtccaagaccgccaagattggcggtaacttggacaccaaatatgaagatgcactcgtctccttcttgcggacgaactctaacatcttcgcttggaagccgtcggacatgcccagggtccgcagggaggtgatcgagcaccgtctcgccgtgcggcggggtgcgcaacccatctggcagaaggtacagcgccaggccctagagcagcaagccatcatccgtgagggcgtgacgtggctcctggaggtcggcttcatccgagaggtcatccacccagagtggctggcgaacccggtggttgtcccgaaggccaacagcaagctccgaatgtgcatcgactacacggacctcaacaaggcatgccccaaggatcccttccctttaccacgcatagatcagatagtccactccactgcagggtgcgaccttttgtgtttcctagatgcctatttaggataccatcagattcgcatggctagggaagatgaggaaaaaactactttcattactcctgtaggcactttttgttacacaactatgcctttcggtttaaataatgcaggccctacttttcaacgcatgactcgtattaatttgagtaatcaaatagcacgcaatgttgaggcttatgtcgatgacttggtggggggaggtcccgagaccaccacgggggagcaggaggcactggtgagcggccccgaggccactcgcacgaacgcggaagggagcccaccgggtcccacgggagacgagcgccccgaggcaggcacccctgatgataaagaccggccccgccgaaaggtgcagcggcccatctactttgttagcgaggcgctccggaagccgtgccactattttcaggcgcactgggtttccgtggtgacatcctaccccctcgggcagatccagcacaaccgagagggtaccggacagatcgtcaagtgggccatcgaactagctgagttcgacctactcttcgaaccgcgacacgcgataaagagccaagtcctagccgacttcatcgttgagtggacgccggcggacgattccgacctgccctccgaccccttcctctccgaaggcaccggggccggagtcatgctgacttcgccaagcggggatgtcctcaagtacgtcgttcgtcttgatttccgagcaacaaacaacatggcggaatacgaagggctccttgcaggactaagggcaaccgcagggatgggcatctgccgactcctggtcctgggcgatttccagctggtcgtaaaccagttctccaaggagtaccagtgcaccgactcgtag

SEQ ID NO: 62262 - DNA, 927 bp, Oryza sativa
  Clone ID: PAT_MRT4530_63615C.1
atgcgtgggggcatcaagacaacatgcgccggtgccggcacggatgccgacgtgagggccagcccaggcaacctaaccgacgtagacgctgaccatctgtcgcccccgctgcccaccatcgttgccaacgctggatcggcctcccccgccacccgctgtccacaccggcaccggatcggctacctcatcatccgccatcaaagtcgatgctggatccgctgcgagggaggagcgcccttggcgctggatccgctcggagcggcaccgcccgaggctgccgaaccgcccccaccgcagcggcgtgagatcattgagctcactcgcgacatcgaggcatcgacccagctattcatctgggccatcaaggaggccaagccaccaccgccgccgccggtgtcaagggagagtggctcgatggcaagggatatgaggagcacatcacggataggggtctcctggtccggggtcgccgccccactcatgttcctccccaatgaggccgaggaagtgcaggttgctagcaccagcgtggagaagtctgtggccaagctgatggatggcgacacggacaacacggctaggagggcacctggtagagagctcgctgtgagggccagggcggcagtaggtcgggcgtcaccaagccgctcatgtacctccccgtcgaggccgagggcatgcaggagggggtgggcggcccggccggcggagggcagcgcggcggcggcgcggagggccgtggcggcggtgcgccgtggtgaggagaacctcggccgcccgtcccccttcgccgccgaccaccggagctccgccgtcgccgtcaagccgagccgccgccgccgtcctcttcgtcgccggccatcatcgttcgtcgtttgtcgttgtggtgagtaccgttgggttcgcctcgtcgtcctctacgcgtag

SEQ ID NO: 62263 - DNA, 1151 bp, Oryza sativa
  Clone ID: PAT_MRT4530_63616C.1
tttttttttttttttactcaagttattgtcgtatatactcaacctttcacacatttaacacacacgattgattaatcagtatacctagacaaaatgccgcacaaggaattatcagtccttccctgacacgatacgatgtcctcatgtccatgaaacaacacgcgacagtatttttcagtccatccatgactcgtgacgatttacacgcaagtacacataattaagtatgtagcttattccggtcgtacgtgcgacgccgcgtcgtgtcggtcgccgtcgccgccattggcgccgtcgtcgtcgtcgacgatgggcaccaccttgggcacgtgcaccggcagcgcgtcgatgtcctgcgcccacgcgccggcgtcccggccggcgccgccgtcgaccgtcctgagcgccttccagacggcgctgttgcacttgaatccggagccgaacgcgatctgccacacccggtcgccgcgcctgatcctccctttcgcctcgcagtaggacagctcgtaccacagcgagctgctcgacgtgttcccgaacctgtagagcgtcatccgcgacggctccatgtgccacgcgctcagcttcaggctccgctccagctcgtccagcacgccgcggccccccgcgtggatgcagaagtggtcgagcgccgcggtgaagtccgggaggtagggcttgacgccggcggcgtggccgaacacgcggcggagcaccaccgtggcgaggaaccggagctgctccgacagcgggagcacgagggggcccagcgtcgtgatgttggtgcgcagcgcgtcgccggcgacggacatgagctccttggacagcgacacgccgacgttgccggcgccgtcctcctcctgcgtcacgcacgcgtagctccggtcgctggcgccgccgcggtgggtgcgcaccgtgtgcatcagctggtacttggcgcgccgccgctcggcgcgccggttggacaggagcaccgccgcgccgcccatccggaacagcgtgttggtcaccagcatcggccggtagttgcccatgtacgcgttcagcgtgatgttctccgtgctcaccaccaacgcgtacgtctcagcgtgcacctgaaggaggtgcttggcgagatcaatggcgatgatgccggcgctgcagcccat

SEQ ID NO: 62264 - DNA, 219 bp, Oryza sativa
  Clone ID: PAT_MRT4530_63617C.1
atggccatatggcccgacggcccggcccaaggcccggtgatttggcccagcccgactcaggtcgtgcccgtgccggcccggctggacagtcgtgtcgtgcctgggctgctacctcggcacgctgggccggcacggcccggcacaaagttcagggatgcgaaacagacgtattttcaaccatatgtaaggcatggcacaaagaatagggaggaaaaatag

SEQ ID NO: 62265 - DNA, 396 bp, Oryza sativa
  Clone ID: PAT_MRT4530_63618C.1
atgtcgacgaagacagtgccggagccggagccgcacgtcctcgccgtggacgacagcatcgtcgaccgtactgtcatctccagactcctgcgcagctccaaatatcgagttacgacggtggatagtggcaagagagcactggaggttctcagcctggatcggaatgtgcatatgatcatcacggattactgcatgccggagatgacagggttcgatctcctcaagagggtcaaggagtcggcggagctgaaggagattccggtggtgctaatgtcgtcggagaattcgccgacgagaatccggcggtgcctggaggagggggctgaagactttttgatcaaaccggttcgcccgtctgatgtgtcgcgcctttgcaaccgcgtcatcatgaaatga

SEQ ID NO: 62266 - DNA, 381 bp, Oryza sativa
  Clone ID: PAT_MRT4530_63619C.1
ttccggaggacggcggaacaccagcaccttgaggccgagccggcgcgacgcgccctccggtggtgtgccactaacgcgcgctggtgggcaccggccaccaaggctgagaatgcgcaggcggaaatcgagcctacgagctacacgcggttgcctacacccccggacaggacaatttttttaattgtcaagaacatggtccacaacatcaatgacttaacttaaggatgaggacgcaaatatagccttcacccgtcgtgctgtacttgctggcatgttacaggtgtagtgaagaacaaaaaagctagtgcgccctacaaggatacggtaaagtatggcggaagctgcattaattcaggccctcattaagattggatctgattt

SEQ ID NO: 62267 - DNA, 1251 bp, Oryza sativa
  Clone ID: PAT_MRT4530_6361C.1
ccatgaggctcacgacgaaatcgaaaagccgctgcttagactgaacacaccacacacgagcacgagcacggagaagtcgagagagagagaagagagatggtcctccccgtcctcgcgcccctcgccggcgccaccgccgtcgccttcctcctcttcaagttcgccaccgtcgatggggatttcacgctggtctcgcgcggggcgccgcggcgggagaaggtggacgggaaggttgtgtggatcactggagccagccgcgggataggggaagttcttgcaatgcaatttgctagtttaggagcaaagctgatactatctgctcggaacaaggaggagcttgagagagtgaaacataacatcatcaacaagcatccaaatagcagagttgaagtattacccatggatttatcatcgggtgaagagtctctgaaagagcatgtacatgaagcagagtcactcttctccaatgcaggcgttgactatatgatccataatgcagcatttgagcgtccaaaaaggagggctctggaagatactgaacatggtcttaaggctacttttgatgtcaatgtctttggtactattactctaactcgccttcttgcaccctcaatgatggatagagggatgggccattttgttgtgatgagtagtgcagctggaaaggttccatcacctggccaggctctttattcagcctccaaacatgccctcaatggctatttttcttctctgcgctctgagttatgtacaaaaggcattaaggttactgttgtctgtcctgggccgatcgaagcaccccaatcttctggtgcaacctcttcatcacaaaaaccatcttctgagaaacgtgttccagttgaaagatgcgctgaactgacaattgttgcagcaactcacggactaaaagaagcatggatatcatatcagcctgtgctaggggttatgtacttggtgcaatacatgccgacggttggtctctggcttatggacaaggttggtgcaaagcggctggatgtagcagcaaagaaaggcaatgcgtacggttggaatctccttttcggtggcaagaagtcagcatgatgaagttgtccaataataggggagtcaaaatggctgtataaatttgtggattctgaacatacggattttggtatttacttttactactgttacagtagcaccttacctaaacaagttctcgaattctaaaggagcccttgatgaacgtctgttaattttacgaaaaaa

SEQ ID NO: 62268 - DNA, 409 bp, Oryza sativa
  Clone ID: PAT_MRT4530_63620C.1
gccgagcggcgtcgccgacgccggcggccctcgcgccgccgcgccatgaccggcgcgcctttcttttctcttcttctccgctccccccaccgtctctaacccccaccgtgtgagagagagatggcggcggccgaaaagacggagatggcggcgccgccgcgggctccctcgccggtgcgcgcgtgcaccggcaggtgcgcgcacggccgtcgagtggctcctcggtggtgccctttgccctccccccttttgccggcgacggccggcgacaagaaggtgagctgaagctgctgggaacatgggcgagcccctacgtctccagagtgaagctcgcccttcacctcaagggcctgagctacgagtacgtcgtcgaggaggatcacttcaacaacaagagcgagctcctcct

SEQ ID NO: 62269 - DNA, 2182 bp, Oryza sativa
  Clone ID: PAT_MRT4530_63621C.1
gactgcgccgcgccgcggcggccgccgctgcggcggcgcgtggccgcgcggcgtccggttcggcgacatggtctggggcaaggtcaagtcccacccgtggtggcccggccacgtctacagcatcaccctcaccagcgacggggaggttcgccggggctaccgcgacggcctcgtcctcgtcgccttcttcggcgactcgagctacggctggttcgagccgcacgagctcctccccttcgaggagcacttccgggagaagttcgcccagccgggtggccgcaacttccccaccgccatcgacgaggccgccgacgaggtcgcccgccgcgccgccctcgcgttcctctgcccctgccaccgccccaacgccgctcgcccccacgagctcgacccgaggtacctcctcgtcgacgtgcctggattcgacaccgacgccgagtaccaccccgagcaggttgccgcggagcgggagaagatcgatccgcgggcgctgctggactacctgaagggtgccgccgtggagcagctggacgccgccgagctgatcggcaagcccaagcggcacatcccggcggtccagatgagctccatgcttgaggcctaccgcctatccagatacgcgctgaaggatcccacctacgcccaagctttcgggatggactacgacgaggcgcaagcggcgaaaacagcgttggagaagaaagctcgagaaggtatactcactcgcatgcccaatcctattaaccgagtcacatggaagcttggaaagacgtggagagccaatgggggttggagaggcatcacagaatatgctcctcctccgttagatatttggtggccgatgagcgagacagacgccagcatttgtgccgtccaggagcaaagcactggtgaattttgtcctgccgtgtcagtcggactgtcaccctgtcttggcttaaataaaaaagctcttgaagcattaaacccccaaaatggatcaaccaatccttgcctctctactctttagcctttccaattttctgcgttagataatgatcaattgacaaagaagaaaccgtccatgccggacgccttcccggcggcgcccatggcccccgctctcgacgacgtcccgccggggttcccttccgatcccccgacgccgccgctccccagcagcaccctcgccgccgacgaggagttcttgctgcagaggcgcactccaccgccgctgctgtccgcgccacccaccccgctcgcgcttcctcccgccgccgccgggcaggtcggcgacggcggcgcgcccacggacgccgccaccgccgccgcggcgccgaagaaggcgaccaagccgaagaaggcagccgcccgcaagcgcgagcgcgaggaacccgctgacgccgccgccgctgccgccgcaggcggcgttgccggcgagcctaagaagaagaaaaagaagaagctcgccccggggttattgcctgctaaggtagaccatgatctgaagcaggtaatatccgagcttcaaagccttcctctcgttgcctcctatgtcgccggccgccgcagcatctctgacgaagctcgctccttcctcctcgccttccgctccaagtctttcaagaagagcctaagcccaatgccgccaccgccgccgacggccagaagccgccggcgaagaagaagccggccgcgaggcccggcgacaccaccgccgcctccgccaaggttgccggcgtcaagcgcgccccgtctgatcgccaggaggagcttgccaccaagaagaaagccaagctcaacaagatcaagacgctcgccactgacaagaaggccgccggtctggagctcgccgccgcggcgcctgcggcggcgaggaagaatgatgcgatcgctgccaggaagaaggagaaggacccgcgctctggctccggcgatctaaaacaaaataaacacgacggcgcttgatgatgaagttcccgccgaagtcttcgctgcaatcggtggcctccctcaaagcgagggtcgcgcggtccggccgctcgacgtcgacggcattcgcgtttaactggagttccacatggtgccgcgtcatctacaggttcaaagtcgacgccgacgttgtgctcaagtacgcgcgcgccaacaacaccatggttcggcagggtgggccaactactacctccgcggtgtaagtggacgg

SEQ ID NO: 62270 - DNA, 588 bp, Oryza sativa
  unsure (1)..(588): unsure at all n locations
  Clone ID: PAT_MRT4530_63622C.1
catctctgacgaagctcgctccttcctcctcgccttccgctccaagtctttcaagaagagccatgagaacgatccacccgaggacaacaaggcctctaagcccaatgccgccaccgccgccgacggccagaagccgccggcgaagaagaagccggccgcgaggcccggcgacaccaccgccgcctccgccaaggttgccggcgtcaagcgcgccccgtctgatcgccaggaggagcttgccaccaagaagaaagccaagctcaacaagatcaacacggtcgccactgacaagaaggccgccggtctggagctcgccggcgcggcgcctgcggcggcgaggaagaatgatgcgatcgcttgccaggaagaaggagaaggagccggctctggctccggcgatcaaaacgccaatcgcgacggcgctgatgatngaagttccgccgaagaccacgctgccatcggtggcctccctcaaggcaaggttcgcgcggttcggcccgctcaacgtcgacggcatccgcgtctactggaagtccacatgtgccgcgtcatctacaggttcaagtccaacgccgacgtcgcgttaaa

SEQ ID NO: 62271 - DNA, 642 bp, Oryza sativa
  Clone ID: PAT_MRT4530_63623C.1
atggcgctgtgcatccgccgtgccatgccagagagagcactccatgtgaagaacacggcaagggatgcgccggtggccacgccggctctgctgctgccgccgccgctgctttgctgctcatcatcggaagccgcgaagcgcccgataaccctcctcgacggcttctctgagcttctggcgccactggagcagcgagctgctctcgatggcgctccggatcctgagcagcagcacctccagccgctgcagcttctcgtgtgcggtagctggcgcctgcagcctccgcccaacggtggatatcgtccggttagtgatctggccgaccaccgcggaatacaatcgctgctgctgggctgcccgctgctgtggaagctggggagagcagagagcctcctcgccgtgggaggcggtctttgtgggcttcacacgccggggtggtttagatgggccgcaacggagcacgtggaaagtgaccccgtcccaaggcctcttgtaggccgttggaagagattacgcgaaacatatgggcctcttttcgccgatgtgatgtactcaacccacggtcttacaatggggcacggcgccaaccagcaagagaacgaaacgctgctgatccagacgtcacaagcgcaagaacgctag

SEQ ID NO: 62272 - DNA, 523 bp, Oryza sativa
  Clone ID: PAT_MRT4530_63624C.1
atatatgactgagtcaattcctgagaattccacatcacttgccattctcttagcagtcattgtattccatattggttttagagttatggaataacagggttttatgtatcttagaaaattcagttttggtgagacctgggatcaagcaaataccatttgttatttttgtgtaatggtttcttaggtaccattttcagtgtaacagtggtgctccaataggtgccttttttcctcctttccacatctttttctcactatgtttcactgctgcttttattcagtgttcttgttcatagtggaggagtacatggcggtcactactatgccttcattcgaccaacgctatcagatcaatggttggtttttctttgactttttttttgtctctagtactacaacaatacaaaattattcaactatttgccatttaccagataatattattaccctgttcctatgcatggccacttgatgacagctgaatagatgtgttctccgagacaactccctggcactctattcg

SEQ ID NO: 62273 - DNA, 1745 bp, Oryza sativa
  Clone ID: PAT_MRT4530_63625C.1
atggagggatgctcagagcttcaggaagaagacaaagaagatctgattaaagaaattttcaaagaggaagttttggcagttgtgaaagaaatgagaaaaaattgggaccctggtcctgatggtttcccccattgaattctatgaacatttttggggcttgattagtgctgatttgatgaaggttatattagatttccaacaagggctcattgacataaaacctgaattatggtgtgataatctagtctcaaaaactcatttacagatttagaagtataggccaatttgcttgttgaatgtgagttttaaaattataactaaagtgttaatgatgagattggttacaatcattcaatacttgatagccaaaaaccagacatcattcataaagaacagaaacataatggagggggttttggtcttgcatgagagtttgaattccttacatcagaaaaaacagagtggtttgttattcaaggtagatttcgaaaaagcatatgacaaagtcaattggagcttcatttttcaagttctgaaagcaaagaaatttcctgacaaatggtgtgattggattatgaaaactgtgagaggtgataaggttgcaattaagatcaatgattagattggtccttatagtacatataaaggtctcagacaaggtgaccccatgtcgccattgctttttaatttggctgtagaagcactgactatgatggtacagagggcagaacagaaacagttgattcaagggttggagataaataatgagtgtagtattccaattctgcataatgcaatatgcagatgacaaaatctttttattgagagacaagctggaagatgcaaagaacctgaaaaacattttgtgtttgtttgaacaattgtcaggactgaaaataaatttcaacaaaagtgaagttattttccttggaaatgatgtactgaggcatcaggaatacagcaaaattttcacatgcaacaaagatcagggaggcatggttttgttagatttagacattatgaacaaagcacttctcgggaaatggctttggcctttggaaaatacagatggtatatggcagcaattacttagagaaaagtatctgataaagaaaattcttgcaaacaagaagttgaaaaatggtgattctcatttctggcaggggatgatagatattaaggaggcattcatgcagttcataaggaaaaagccaggggatgggaagaatattcttttttgggaagataattggttgggtgggagacccatagctgaacaaataccccaggtttacagtgtcactcattcaaaaaatataactctagctatggtaaaagaaaaaggttggcaatcaattgtttttagaagaaacttaactggagacaggctgaggagttggaatgaataaaacaaagttacaaagatgtgataatatcaaactgtctatacaaaaaagataaactaagaatggggaatacactctcaaaactttttacacttttttgaaaatacaggatatgatccattggatacagggcaaggacaaaacaacaagccaattgattctagtgggggttgcagcagtactttggtcaatctggaaacatagaaataatgcatgttttagtcaaatttatcctattgatccaactgaaattattttttgtgcttgttactggatatcaacctgggctgttttgacctgtgaacgcctgtttgttttggatgtggcctgatcgctgta

SEQ ID NO: 62274 - DNA, 256 bp, Oryza sativa
  Clone ID: PAT_MRT4530_63626C.1
acagaagcaaagcatcggcatcacacaggtccttacttaccgtgcgaaaagcgtacagcaggtccatccttgccaagcgggtgaggcaaggcccaagggcgcgcatctcaaacgaaggctgggattcccaaacatgaccagcttgtaccagctgtttttaaccaacagaacgctccagcttatgagtcggaaacaactaacagaaaaagctgatattgtgcgatttacaaatagaaaacctagggtcgttgatgta

SEQ ID NO: 62275 - DNA, 1054 bp, Oryza sativa
  Clone ID: PAT_MRT4530_63627C.1
cataattgcgttccattgttactatatattttacctcctaagctccacatatatacttctaggctgcatagttttgacccttgcaatcgttgcatcacgtccttaaggtatcatgaaccaacgatcggttgcaccgtctctagtgttgctgataagacacttgtaagacatgtagtgttataatcgatagtgaaagttgcagcaaccttgtgagttaagatttggttgagaaccttggattgcctacacaatgcatcctcatcgatattacttcaaatggttcaacttttgtggtatctgagaataaccaaggtaatgaggaacacaaataaaggcgtaaataaaaatggcctagtcatagctacatgtatcaatgaaaaatgtttaattgaccaagtacctataatttttgaagatgagaacaaaggtaataataatggtgctacatttactcaaaatattatagttatgatgtatgtccactacttatgctacaacagagcaactcatagtgaaaataattgatgaaatacatttgtcacaagataatttgcttgctgtttctggtgataaaaaagagttgtgtgacgtttcactcatatctatgccacaactagtgaataaacatgttaagtctataattgaaccaccatgtgttgtgtttaaacatattattcgcgttgcaagagagaaagaagatcttagattgttatcttttttaaatacttggggctatattcaatttgatgacctttgtccactcaattgtttagataagaaattattttttagttgtttaaatgagttacaggttggtttgcaagaaggggagtgttgtggttctccaagtctaatttcagaatccaaccatatggctatcaagaagtctacctcaccctatgttgtgatagatatggataagttcaacaggctcaagacaatgtgaaaccgaggacggtttctaatcaacgaggggaggatgatgaggacatcactagatcggataagaccatggctatcttatatattcataagtcaaaggtacatgcttttt

SEQ ID NO: 62276 - DNA, 444 bp, Oryza sativa
  Clone ID: PAT_MRT4530_63628C.1
atgcgcgcttccctcgagagagcttttgccgaatggcttggggagaggaagacgaaggcgcaggcggaggcggcggccctggtgctgaggctgacaggtggggaccccggaatcttccgtatcaaccctgcaattctgcagcagaggaggttgggtgttgcggaccccagcaaaatacctttatttttgcagatggcccttgtaagtggtccgattttcacagacgataccttaagagctagccagagggtggtggcggcggcggctctaggcggtggtggcgcggagggtggaggaggcgtcggcggctccgccgtgaggggggagggcgtggctgcgcggttccaggcgctggcgattcccggcggtggatcccttccctccctcccagatatggccggaggagggaggggcgacggtggcagcgcggccggacgtgggtag

SEQ ID NO: 62277 - DNA, 436 bp, Oryza sativa
  Clone ID: PAT_MRT4530_63629C.1
atgccaccgcgctgcccgccgtctaccgccaccgccccgcgcgcgcacctgccggagccgctcgctctaccccaccacttcctcacacgcggccgtcgccgcctcggatctgtgtgtcgccgctgtctactccccagccccgcgactactccgccgtccacgaacgaagagctgctctcctttctcggctcctccgttgggatcgagaagctattcggacaacctccactccaaccaagcaccgccagagaggacagagctggggctgaggtggggagaagaggagccagccgccggtcggcccgtccgtcgctgcccccgtgctcccacctcctgctttcacgccgactgccactgctcttccggactggcagagcccaagcagtaggaggcaccgatgaaggtcccttcttgcagcaggaattgctcaaatcag

SEQ ID NO: 62278 - DNA, 1239 bp, Oryza sativa
  Clone ID: PAT_MRT4530_6362C.1
atgaagccgggattgctgaagtctcggcggagcagcgccggggacgaggaggagggatctggcggcagcggcggcctccccacggcgacacggaaggagtggtgctggtcgttggggattctcctcaaggccgtggcggcgctgctgatcctgatggccggcgtgctgatcggcctggccaccagcgcgagcctgtcctgctactacgtcgagggcagcggcaagcaggcggaggcgcggcgcggagatggaggcggcggggaaggggggtcacggtgtcgcgacgacgggtgtggcgcggcgctgagcttccagcggttcgtgcaaccgcacccgccatgggggcactcgatgaaggacgaggagctgttctggcgcgcgtccatggcgccgcgcgtggaggagtacccgtaccagcgcgtgcccaaggtggcgttcctgttcctgacgcgcgggccgctgccgttcgcgccgctgtgggagcggtttttccacgggcacgaggggctctactccgtgtacgtgcacgccctgccagagtacaggctgaacgtgtcgtcgtcgtcgccgttccacggccggcagatcccgagcggcgacgtgtcgtggggctccatcacgctggtggacgccgagaagcggctgctggcgaacgcgctgctggacttctccaacgagcggttcgtgctcgcctccgagagctgcgtgccggtgttcaacttcccgacggtgtacgagtacctggtgaactcggcgcagagctacgtggagtcgtacaacatcgacgtgccgcagtgcgcggggcggtacaacccgcgcatggcgcccgacgtgctggaggagcagtggcggaaggggtccgagtggttcgagatgagccgagacctcgccgccgacatcgtcgccgaccggaagtaccatgccatcttccgcaagcactgcacgccgtcgtgctacccggacgagcactacatcccgacgtacctgcacctccgccacggcgcgcgcaacgccaaccgcacagtcacctgggtggactggtcgcgcggcgggccgcaccccgcgcggttcggcaaggccaccgtcacgccggcgttcgtgcaggccatccgcaacaacgggacgcgctgcgcgtacaacggcaagcccaccaccgtgtgctacctgttcgcccgcaagttcgcgcccagcgcgctcgggccgctgctcaacatgtccaccacgctcctcgaattctga

SEQ ID NO: 62279 - DNA, 1054 bp, Oryza sativa
  Clone ID: PAT_MRT4530_63630C.1
ggactggtaaataattctggaaatccacacttcagtgatatgcaaagtttttttccaaacttccaactttccatcacatcaaacctttcatacacacacaacttttctatcacatcgtgatagaaaactttcaatcaaacttccaaacttcagtgtgaactaaacacagcctcacaacaatgttttatcatctactgtccataactttgctttatatgatacacatgttcattttctgaaaatgtcaggacctgagatctggaaggatacagccggcaaagttgatatctttgtaaccgccgctggaacagggggcacactgtcaggtgtaggaaggtacctgatttgagcaattcctgctgcaagaagggacctgaagaaattaacgcctaatttgcatctctgcaagcctgcatactgcctcatctcaagtcctcatcaccttcatcggtgcctcctactgcttgggctctgccagtccggaagagcagtggcagtcggcgtgaaagcaggaggtgggagcacgggggcagcgacggacgggccgaccggcggctggctcctcttctccccacctcagccccagctctgtcctctctggcggtgcttggttggagtggaggttgtccgaatagcttctcgatcccaacggaggagccgagaaaggagagcagctcttcgttctggaggaatcgtcgtggtgatctggatatggcgaggcggcgcgacggggatatagggatgggggatcacacggctatgtggccacggacgacgggcgacagcgacgaaccgtggacggcggagtagtcgcggggctggggagtagacagcggcgacacacagatccgaggcggcgacggccgcgtgtgaggaagtggtggggtagagcgagcggctccggcaggtgcgcgcgcggggcggtggcggtagacggcgggcagcgcggtggcatggggacggcgggcggcgcggcggcgtggggagggcagcgtgtgcgtggctgaggtcaggcgggcggcgcggcgtggggatggcggaggttagcgttttt

SEQ ID NO: 62280 - DNA, 465 bp, Oryza sativa
  Clone ID: PAT_MRT4530_63631C.1
atggcggcggcggcgatggtgtttcttgtgttcgcgccttgccttgcacaggccgaggagcggccgacggcggcgcacccgcacgggctccccttcgagagcccgctggcgctgtcgccggacgcgtacgagttcttccaccccagcgagcgcgcccggcgcgggcacgccgccggggcggcgccggcgctgtcgccgcgggcggcgccgcgcgggcagctgagggagtccgcggcgagcgtggcgagggccgaccaggaggagggcggcgtggcgcccgccaggaaggtcggccgcggctgcgcccgggcaggcacggtggccggcgtggtcgccggcgccgctgccgtggcggcgtttgcggcgctcgcggtggcgtacgccgtggcgcggcgccgcgtgggcgtggcggcgcacggcgacgccgaggcgtgcgcgcgcgcggcgccgaagacgagcgcctag

SEQ ID NO: 62281 - DNA, 546 bp, Oryza sativa
  Clone ID: PAT_MRT4530_63632C.1
atgccaaccaaaagatctaaccaatctccacctgatccggccggcggggatcttgtcgtgcctccccgcaccgccactgagcagatcaggccaccaacgagctcgtccaaccaacagcagcgccctcgccgaacctgtggccacagctccggagggtccccgcgaagccgagcgacgtcggtggaggcgacctcggcgtcggcggcggcggcggcggcggcggcggcgggcggagcaaggcgaagggggtgcgcgcagagtggcggcggcgagctacacttcccgccggcggcgacggccgtggcgcagggggggcggcgcgtgcaggggccagcaatggcggccggcgcctctagctattcgacactggactcggcttgttgctccaacgacgccaagtcgtgtggtgacgaagctctaggcatgaggtccctgcagcaacaaggtcgggccatcggatttgaaggcatcaccggtcccctctatctccgccaacggttgtgccctataacagctcttccagcgtcgtggccgcttgctgcatga

SEQ ID NO: 62282 - DNA, 273 bp, Oryza sativa
  Clone ID: PAT_MRT4530_63633C.1
ctactaactatgacgctatactgcactcaatacagaacactccataacttgatctcttctaactatagctccagaaattacctctgctcgactttagatgattggttacaaaactaggtgaaacgatcaaatgaagtcgtcatcaactacataagtctcatccattctgctcgcaggctcaaatatgacgttgagaaagttaccaccaaaaaggaaactatcttaaagtcgaatgtccgacatgcaaaaacaatattattggccaatgcttca

SEQ ID NO: 62283 - DNA, 321 bp, Oryza sativa
  Clone ID: PAT_MRT4530_63634C.1
ttacgtgtagtagtgctcgagcagaatattgtgacgtccttttccacgatcgacgcgttctttgaacttggcgaggaagcgtgcatggtcgtcgccgacgccggcgacgcgctgcagcagcgcgcgccgctccacggcggcgagccgctggacgttcacctcccgcagctcgccgtccggcggcatggccagcagcgccgtccgtgctcggtcgtaggtcggcagcttctccagcgccgcccaccgctggtcctcctcgtcgtcctccctcgccgaagacgacgaccgcgagaacgagcagatctcaccggcatcgtccat

SEQ ID NO: 62284 - DNA, 479 bp, Oryza sativa
  Clone ID: PAT_MRT4530_63635C.1
atcgaattagccaaaagtttgttagtaccactgccttgcgagatccacgtctctgcaagatgcagatcttcgtgaagaccctgacggggaagaccatcaccctcgaggtcgagagcagcgacaccatcgacaatgtcaaggccaagatccaggacaaggaagggatcccgccggaccagcagcggctgatcttcgccgggaagcagctggaggacggccggacgctggccgactacaacatccagaaggagtcgacgctgcacctcgtgcttcgcctccgcggcggcggccgcccgggctacccgatgatcgagcccaacctcctcgccctcgcccgcagcaagatggagaagaagatgatctgccgcaagtgctacgcgcgccttccctacaaggctaccaactgtcgcaagaagaaatgcggccacaccaacgagctgaggccaaagaagaagctggtatccaagctttctgtttga

SEQ ID NO: 62285 - DNA, 210 bp, Oryza sativa
  Clone ID: PAT_MRT4530_63636C.1
cacagcaccatagccctaccagctcttttgacaggaacaaaatgctatgtggatgtagccacacagcctgacaacaccccacagatgaacaaggacgctggactgggaatctccatcaccaatacgcacaacaatcatcctatcagacttatatacagggagctatcaggaatgtcatcatggcagaagaggcagctgcacttaatttag

SEQ ID NO: 62286 - DNA, 2046 bp, Oryza sativa
  Clone ID: PAT_MRT4530_63637C.1
tcattgagatagatagcgctggatagccgatatagattttcgcctaatttgttctacttcttctatggcttgggcgtcttgagcatcggttacagggatgacttttaaagacttggtcagatcagcaacatgcttgatagccgatttgagtcttgctttctgctcttcgatagactttgggagatcggctagttttttgtgctctatgtctagctcggcgttgcattcttcaagttgtgccaagagttcaatcttgcgagccttgagccgatcaatattggatttgattgggccctcagatagttgatcaagcttggacttctcttcgtgcacaagttgccgattagcttggattgtggcttcaatgtctttgcgctcccgtcgttcagccagtctcaacttggctttctccagtttgaattggtgttgctcaaggtaaacggctggagtgaggatatcggctagctcatctgggattagagcttgaatctcatgaagccgagtcttaactgagccacaatcaactaccaagctatctagcgatgatgcttctagccgatgagaaatatcttctagaactttcttcacatcatcggataaaggggctaaggctttgcttatggtgtcttcttctctttcatcaagataatctctgatttcaaaagagaaaaaatcggctaagactggtggagctggtttagatgttgttgcagccgatttcttcttcatagcagtcttctttttttcggctgcggcctcatcaacatcatcttcaattacttcttcatccagagcttgttcaatggatggatctagagcaggcagatcatcagctggtgtggttttctttgtcttagttttcttctttggagctagggctgaaatatttacggccgaagatctggttttcctcttcttgccggcatcggctggttctctgatgagcccttgaagaagagctgaagtcttgggggcattatagccgatgacggggggagatggcccacctccgttagggatcaatcctggggcatactcaatatccttgccgctgttgctctggtgagggggagaggattctgttgttttgctcctaaaggttgctagctttatgttgtcaatgctgcctagaggaggtccttggagattgagcagccgatccatcattaaagttgatgagatttctcctcggcattggatcttatcggcaaagaataagccgattgggagttggcccattccaaattgcttggatgtttctcccttgatgaatgccgacgggaaggatgcacggagtgattgcaactgtgaagacttccctggatttttggtatctttcatgattgatgtcttcgaatctgaagtcctatgggagctcgaggtctgttgagtctccataaagaaaccacaaactcgagcatctttttgaataccctcatagaagctgcaaaaccagtctttgagcagttcggctgataactttgctccagcatcggccggtgtggatgcatattctccatatgacatacatcggcgatgagtgtgttcttctccatcatcatctgtgatcggctccagtcttgggaattctgcttctgtcacggatggccgattgacaactttcatgactaccagatttagccaggattgcagtagccaccatggtccacctgctccgactactgagccgacagctagcttagccgatgcattatttagcatttggtacaagtagccgaggaggattttgcctaaaggaaattgtcttttcgtttccaaggcttcggttacgaactgccaattggttgtaggaccgcagctggatccacaaaagagaaatttctctagccacattaacaagaaagccacatgttctcgaggggtgatcgaatcctggcccatgtatgctgctacatagcctgaccagccgcctatgctcttggtcttgaagtcgtattgattctttgtgtttaagcccatagcgttagccgatgaagtgacgtccaaacccgtaatcatgctgatatctatgagagttggagtcat

SEQ ID NO: 62287 - DNA, 159 bp, Oryza sativa
  Clone ID: PAT_MRT4530_63638C.1
atggccatcgacaaaaagacagagaacacatcgagcaatcatccaggtcattacaagcaggcgacgaggcgacgcacccacgacgtcagggacgagcagcctagcagcatagcatccggctccgcctcccccgcccccaccacggcgacagaagaatga

SEQ ID NO: 62288 - DNA, 103 bp, Oryza sativa
  Clone ID: PAT_MRT4530_63639C.1
ggacatatgcgagtactgcgcgtccgcggtggcgatgccgtccaagaaggcgctggtatcgtgtatgaggcggagcgaactccgtgagcgggacctggcctaa

SEQ ID NO: 62289 - DNA, 650 bp, Oryza sativa
  Clone ID: PAT_MRT4530_6363C.1
aacaaaaattccatgcctttaatacgataaaacagataataagttcccatacaataatttagtgaccatacaatactttgtatagataatctttctgataggaagagcattgctacagaccaaaggatgaactgccccgaaagggcatagcatgagtacaacagacccattatatataacgttaaataacaaatacataaatgaccgtcttcccattttactgccaaatgatgccttcgaaggctcatagatgaaggaagggttatattggcctcagtcctcagaagtacttttccatgaacccgagttaaatataatagaggtgaccaacatcagttaaaagaaacacatgtagtagagagaataaactttatgcaatgtaaattatgaagtaatgctcacggaatcagtgtcagctaaaaaaatgtgtggttatgtattaatgggatctaaattagagttcgtaagtactgcagcctattctctgcaacgttaaatggatacagaaattgatggggcaaggcaaaccagcaaagtgttctctcgtactgcattccagataatcaaatgtgcagtaaacatagtttacagcgatatgcaataatattaacaaccttccttttctatactcattaagcttaattgaagcc

SEQ ID NO: 62290 - DNA, 417 bp, Oryza sativa
  Clone ID: PAT_MRT4530_63640C.1
atgagtcttgtgggtgtaggggggatccaccctgctcgcacatgccctagagactacaacactgtgtccattgtcatcaccaagagccacctcaaggaagctgaatccaagctagaaggcaccaaatctaaccttgacatcaccagatttaacaacccccaccgccaccctccaccaccacatgccactctatcttgttctggcccgactctccaccgcccaccgttcactggtctgaccttgccagatccaaccatggatggcccatatttgggtggtgcaacctctaacttcctaattgtgtcgttgcccccaaccgatgcaacatcctcaagggagaaagagcacccgccctccttccggcgtcatcatttgaaccacccgacttaccgccatgggccgctagggcggcgatga

SEQ ID NO: 62291 - DNA, 295 bp, Oryza sativa
  Clone ID: PAT_MRT4530_63641C.1
tcccgtaaaaatctccacccgccgccgcctccggcgacaccgccaccgcccaccggagagatgttgctggtgagccaggccgccaatggttccgtctccgcgcggcggctgccctccaagcagcccggccgccacggcggtagcggcagcagcagcgtccccaacccgtacccgctcttcgccaccacgcgcctcctcccgcaccgtcgtcgccgccgcctcgcgctctccggcgccgacgcgcgggcggggggcccctagacgccccgggggagggccttttcggatcccccgc

SEQ ID NO: 62292 - DNA, 367 bp, Oryza sativa
  Clone ID: PAT_MRT4530_63642C.1
cagtcaccttcccaagtcccacggcggcgctcctccttcccttcccctgcgcggggaggtcggggtcgctggttggatccaagaaacgaggaagggatttcttcatctggacagtcgtgggactctgttggcgagaggggtcagagagtgagggctaatgcattagaacacttccccactgcgagactccatcataatgaaggcagaacaacagcttgcttccagtgcctcctgtcctgttcagtttctccatggccatcatcatcgacgtccgcaactgcatccaactcctccgctcctgcagtgtcgtggccggccagcagctgcaccagctccttctcaagtctggccatgttccatcatcgct

SEQ ID NO: 62293 - DNA, 123 bp, Oryza sativa
  Clone ID: PAT_MRT4530_63643C.1
atctcgcgaccgtaaagccgcaccatatcatcattggtagggcatacacacacatgcggggtgatttttactttcaatatacacagaggcattcattcaaaaatgtatgtctttaacacttat

SEQ ID NO: 62294 - DNA, 289 bp, Oryza sativa
  Clone ID: PAT_MRT4530_63644C.1
gactagaatactagatatagccaacaaaatcgcacaaaacgtatgtgaattcctaccaaccatgctagcattattatcattatcaagacatgcatgatgcatgcgtgattacaaaattagtacattgacatccattgtacatttatgccccagctgaagaatccttgaaaactggtaagacacatcatctggtcttctggttttggaaggatgactagctaggtagaaagctagcttgaggaagtccaagcgcatgaagagcctgacagacttgttcctggtgccccag

SEQ ID NO: 62295 - DNA, 1460 bp, Oryza sativa
  Clone ID: PAT_MRT4530_63645C.1
caaagttaaaaacgataacatatgaacttgtttttatttagcatatgctccctttgttgtctactttttctgtatgtaatgcgctatgacgactctaaatcccacgcgtccgccctcgcccccggcctctccccaactcggcgtcgcgccgcctcaaccgaagcaaggagcaaagcggggattcagaacgggaaggagaaggtccggttcgtccgctctcgagctcaagtgtcagttgaagtgttttgaaagtcatggcggagcatttggcttcaatatttgggactgagaaggatagggttaactgccccttttacttcaagattggggcttgccgtcatggggatcgttgctcccgtctgcacaacaggccaactgtgtcgccgacaattgtgcttgctaacatgtatcagcgccctgatatgatcacaccaggagtcgatgctcaaggccaacctattgatcctgaaaagatgcaggagcactttgaggatttctatgaggatatctatgaggagctgagcaagtttggtgaggttgagaccctcaatgtctgtgataaccttgctgaccacatgataggcaatgtgtatgtccagttcagggaggaagaacaggcagtcgctgcgcataatgcccttcaaggtcgcttctactcagggcgcccaataattgttgagtattcccctgtgactgatttccgtgaggcgacctgtaggcagtttgaggagaacagctgcaaccgtgggggctactgtaattttatgcatgtaaagcagattggcagggagctcaggaggaagctttatggggggcgatccaggaggagccatgggagaagccgcagcccaagcccacgccacaggaggggcaatcgtgaccgtgatgatttccgccgtgaacgtgatggttatcgtggtggtggtgatggttaccgtggcggcggcggtggcggtggtggtgacggttaccgcggcggtgatagttaccgtggtggtggtggtggtggacgcaggggtgggggcagcaggtatgacaggtatgatgatggaggaaggcgcaggcatggcagccccccaaggcgtgcaaggagcccagtcagggaaagcagcgaggaacgcagggcgaagattgaacagtggaaccgtgaacgggaggaaaagccttgaacgaaagcagtgatatctctatggatggccggttcatgccttcatggcaatcactatccgctggagtcgtggtgtgctgctatgttctaagtggatatttagtgtgtgtcgtttggtactcatgcttggctgagtaacccttttaaatgcaggattctggattctatttacattgtgtttcgtttgacgtgtaaaccgccgtttgtttttaaatatgcaatattggatcttttgtcagtctaaaaaaaaaaaaaaaaaaaaaaaaaaaaaaaaaaaaaaaaaaaaaaaaaa

SEQ ID NO: 62296 - DNA, 676 bp, Oryza sativa
  unsure (1)..(676): unsure at all n locations
  Clone ID: PAT_MRT4530_63646C.1
ccccatgttgtttcntttnnncccnatgggaagggtttcnaaccccgggaagggnaggngantntcntttnngtnggtgtgcctttttcctgcgaggatgactncgttgtatgagactggcggatggacgactgctgcaactccaccccaattganctgantnacaattacctgagtcaccnaaatcttgctctgagcccctgacatgattctgtgttgacattttcactgactgattatgttgtgttnaacntttgttganaaaaaaaaaaaaaaaactccagggggggcccggttcccnnttccccnatagtgngtcntattacaattcnctggcccgncgttttnccncgtcntgactggganaacccggcttcccccncttttcgccttgnngncttcccccctcccnngtggggttttnccaanaggccncccnatccccttttttttttttncntctgaatggcnaangcnnctngtncccttcatctttnttnngattcccnttnnntttntnttnntccgcccntnntnccnnnngncnnntcngccnntccctcttnnctccnnngaancacccnantngttnaatntntcccntttggannnnnattcccttttntantttnnctncnctcncgggctacaccnntnccggngatngcccccnctn

SEQ ID NO: 62297 - DNA, 1685 bp, Oryza sativa
  Clone ID: PAT_MRT4530_63647C.1
gtacttcttgttttctcctaatactaaaactacactacatattgctgtctccatttcgcgtaatacatactcttctcactccccaaaatactcgagattccccaaaaaaaagtgttaaaatcgaagaaatttaactttgcatttaggccctcctgaaggttgaaaattccaagcggcacctcttgtttacgcggcggcgggggcttcctctccagcgacctcggccgcggcggcggaggcggaggcctcgtcgggcggcgctggctcgcggtcgtagggggacagccacttggcgcgcatgtactcgggcttgcgccatggcgggaggtggaggccgcgcttcctgaggctggcgcgcgcggcgtcggcggaggcggcgacgaggaggcggaggcggtcgtccttgccgacgaacaccgcggggaggcgctgcagcagcgcgcggtaggccttggtggggcgggcgacctcgaaggcggagcggaagtcgacgtcgaccaggacgcgctcgcgcgcgccgcggtcggaggccggcgggaggagcacgtcgacgtaggcgtgctcgccggcggggtgggtgggggacttgtcccagcgggagacgcacacggcggcgtcgtgccccgccgcgcggagcgacgccgccaccaggccgaggagctcccgcctccttgccccgcccgcccggtgccgctccacgtggccgcagacgtcggcgaggaggttgcgctcccggagcgtggcgcagtgcacgagccccttgatcgtctcggcgacgtcggaggacgcggcggcgtcgtcctcgtcgtcgtcgtcgtcggagctcccgccgccatggaagcagttgcagcgccgcgcgccatggccgccagcccgctcgacagccgcgcccacgccgctcccgtcctccaagaagctgcgcaccatgccatccaggcacacggagctcggctccacctcatccttctcccccccgcccaccgccacaatccgctcggcgggggagacgcgcagcagctggcgatcgaacagccgcttcagcatcgacctcgccggcgccggggacggatcgggggcggcggcggccctcataccagcacaagaaaatggagacgagggcgcgggggagtaatcaccgggagacgcgatcctgggaggcggcgattgacggggacatggccggagacggcgggcggcggcggcggcggagggtgccgatgattcgatcggagtctgacatggcgggcggcggccaccccatccatgccaggggattgggctgcccctaccccctccgcatgacgccgcatggagtgagagaggtcggaggccggccagcgagccccggagaagtgggcaaggccgccgctgccaaagcccagggagtgggagaggtcaacggcagagagggatcacgcggtgaggacaacgtcagggacggcggagcaaactcgtgcgaggaggaggaggaggtgatgaatatgcaacgcttggatctggcctcccagggctcgcgtgaggaggaggtggtgaagatggcgagcacacgcgaggaggaggtggtgaagatggcggtgacatcggccgagaagcacatgcgcttggatccagtcttgtcggagcttgcgcgaggaggagttgaagatgctggtggtactggccggggcactcagccgatatcgtga

SEQ ID NO: 62298 - DNA, 1538 bp, Oryza sativa
  Clone ID: PAT_MRT4530_63648C.1
tgagcgattcaaacatttcaggccgaatatcaaccctgtcaacttccatgcgctgagggatggatggatttgttctacctacagatatataggtccggatcaaggcttcataggcttcagcatcaaggcgaccgagattcttcaggcattcacagaacgtctccatcccatccacatcctttgaatcctcaaagtgcttcagatatctgttcacaagcttttctggcacccaatcctgccccttcaccattttctttgcatctttccagacctgcagtgcctcattcattttagatttctccaaatagaattctgcgaatatgcaaaatgttctgtagttggaatgatcctgagccatggttgtctgacgcatagcctcagctttgtctaccatgcccttatcaaggtaagcttggatgataatatttggtattttcatgtcatagtgctcatggcttgattcccattcctgaaagatttgctgcagggtgtcaaaatcatccaactttttcagagctttaagcatcactagatagcttctatttgtgcatttcttgaatgcagactttaaagactcccagattctcttgacctcggacaagttgccggaattggcatagtgggagagaagacaatgccaagagaaaacgtcatgcttgtccagaacttcctcagctttcttaagggtgaattctgccttgtcaaactgctgcagcttattataaccgttagcaagtgtagcatacaaggaccaaggaactgaatttacctcctgcaattctttcaggaccttctcagcggactctatgtcattcatcataatgtagctttctgttagcacaaagtatgaaaacttgtttggttgtataccactttcttgcatttttacaactgtagtggggattttctctggttgatctgtcttcaggtataagcacatcaaattgttgtacaccaatatatctgaaacaatgttcatcgctttcatattttcatagagttctaggcctttctctgccatccggtgctcagcatagcagttaagcagagtggaataagtttgctttgacctgaaaatatctggaaggctcccgaagtactcttctgcagcatgtataccattcagtttgctaacaaggtcaagccgcaaagcatgatgcttgagctccaagttcactccacgagcttccatccagtccatcaactggagggcgtgcttgttctgcttgaacttgcggaacctgcggacgcagaagaggacctgctcctccgagagcgggcgcctctcgcggagccaccggccgagctcctccaccattccacccgacggcaggtgcgccgacagcctcgcgtagagcgcccacctcgcaccatccagcggtcgccgctccgggctcgcgtactggagaccgcgcgcttgtctcctcggggcctgtgactgtgggaggcgccggagcgccgccgtggccgccgcgcgcagcatcgctaggcagctaggcagttcttttggttttgcctgcagccacggggatccacta

SEQ ID NO: 62299 - DNA, 637 bp, Oryza sativa
  Clone ID: PAT_MRT4530_63649C.1
agagaaggggaaggtgggagcggaagcaatgaagcagtacctgcggtgaagtagggagaagacggcgtcggtggtgaccggtcggcgtggaaatcgtctgcggcgtgccgaaggcctgcggagtaaggagatggcgggcgacggtggcgagagagattagtgcggcggcgggatcggtagcggcgccggtgggtgggggagggaaaggagcggaagggaagaagcggtggcggggttgaggggccggtggtggcgcgagtcgtgtgtgtgggaggagacttttccgtgtgggagggaaaggagggaggagggcgaaggtggaggattgatccgatgcgaggtggaggcgtggagattggagagggcggcgggggtctggagaggaggccggtgggcatggctggtgaggaggcgacgcgacggcggggcgaggaggcgacgcagggaggagggcgaaggacgcggcgtggggaaaggagtgggcatggggaggagcgagcgcgtgatgggagaggagcgatcgcgtgatgtggaggagattgacgctattggatatggcaatcggatggttgagattatgcatgtctgtaagatgcgtctgctatgtcaggaatcaagaccaccactacggactttt

SEQ ID NO: 62300 - DNA, 483 bp, Oryza sativa
  Clone ID: PAT_MRT4530_6364C.1
aaaaaagaaaacatgcctttttccattcataaaggccacaatccgacctgaaaatttaactgaaggtttggtttaagtccaggttaaacttggggggaaacaaaaaagaagtggggcactttttaacctccggcccaaacgttaaaactttttcttcaaacaagctttaaacaagggcttttggtgggctagcaatccttggccagagggggggcccctctttaccaaggggtccagggatagaaaaacctttcatttcacccttgggattgacaatccccccagctttgttttcaaagtacatgaaaaccccgtccttggggccccacagtttgcccttgggaacaataacggcgggcatgacctttttgcggagggcgggcttcccttttttgacgggggccataaccatgtcccccacccaggctcaaaggacccggttgaccctccccttgatgcccttcacggaaatgatgtaaaggt

SEQ ID NO: 62301 - DNA, 1777 bp, Oryza sativa
  Clone ID: PAT_MRT4530_63650C.1
ccttttccccctcgcgcctccgcttccgcctcccccatccccctccctcctcttgcgcaactacccccctccgcctcctcctccccctacgactcccaaaatcccctcctccacccgcctccgcatctccgccatgtcgtcgtcggcctcctccacccctcgcgccggcggcggtggcagcggcgggagccagcacacgccgccactgcccccggcgccgcatgggaacgggcatggtggcggcggcggaggaggaggaggaggaggaggcgcgcacgtgcggctcatgtgcagcttcgggggacgcatcctgccgcgcccgggcgaccaccagctccgctacgtcggcggggagacccgcatcgtgtccgtcccgcgggcggcgacgttcgacgccctcgtcgcggcgctggccaaggtcgcccccgcgctcttcccggcgggcgggccatccccggcgctcaggtaccagctcccccaggacgacctcgacgcgctcatctccatcacctccgacgacgacgtggacaacctcatcgaggagatcgaccggttccagggcctcgccgccgcctccatcaagccgccacgcctccgcctcttcctcttcgcctcctcgcccgccgaccacgcctccgcggccgccttcggctccgtcctctccggcgccggcggcgactcctcctccgaccagtggttcgtcgacgcgctcaacgcccccgcgcctgcccccatcgagcgcggccgatccgaggcctcgtcgatcatctccgaggtccccgactacctcttcggcctcgacaccacctccgacgaacccagccctggtcccggaggagcccgccccaaggtcgacacggagatggcccacgtcgaggacgacgcgccggttctctcgcgggggacgccgcctgccccgtacgtcaccgagagcgcgccatggccggccccgccgccgccgtacatgacgcagcaggtgtactacgtccccgtgcgcccggtccactacctcgatccgtcttcgcagggcggatacatgccgggtccagtctaccacattgtcggtggcggaggaagcgaggcgcggggagatctctactccaccgggggcagtgtctccgccgccgccggcgtcggcggcgtctacggcgtcccgcaccccatgcagccgttcccgccgatgatgtacgggcacgcgccgccgcccggcgcggtggtctactcgtcggaggggaagccgccgatggaaggtggggcccacgcctcgtaggccccgcaagtggagaggagggagggagcgcagagcaccggcgcggatgagctgtttccctggaggagctggtcctgagctcttccatcctcgtgattgcatatgccttattctactaaggatttttgcattgccattgccgtgtggtgaattcttatttttattcttcttctttggatggcttatgtgggttgctgtatagatgagggaggtggaggatgggattgatattgcaattttcgtcaagtgaaaatagatttgctatagttattatatttataataatatattatataagagtaagtacatctggtgtgattaagtagtagcaagttaatgtaatatgggattcatatgttctatctggttcctacctgaggaagtcaaaattttgtgtgctgctggatgcttgatggattaaaatgtaaacaattcctgtgattaaaaacattttacaaatgagtgctgcactggaaaaagaggccactggctttgatccagagatcc

SEQ ID NO: 62302 - DNA, 232 bp, Oryza sativa
  Clone ID: PAT_MRT4530_63651C.1
atcagtccacattaaaaaccacccatatgtgtgtggcttgtgtgtgtgctgcttcttgctcagggaaggccatgtgctatctattaattaatcagctggtctcttctacgactatgcgtgtatcagcgttcaggataaaataattggggattaagcttggacatttcaaagagatgcaagaaagttagtgtggaagtcccgataaatgggaaaggatatatgctaatggggg

SEQ ID NO: 62303 - DNA, 594 bp, Oryza sativa
  Clone ID: PAT_MRT4530_63652C.1
ggatgtgggtacgcaaatgcggtgtacttccactctggtctcggtgccgccttgaatccctctccttccgctcccttcaacaagtacgtcaacgaggagtacgttgctagctttgccgacgtcgtctactccaagcccaacattgccgtcgtcgctgatggcgctggtgcgcagtccttgtccaagtgggtcgaccagttcttcaagggcgtccctgctgctgctcgcagcggacagactctcaagactgaggccaccaagtactttggtggtgagcagcgaaccagccacgcctctggcaactcggtcgtgattgctttccccggctcagacagcgctggttccaagcccgagattgaggttctggctaccctgctcggcgcccagcccaccatcaagtgggctcctggcttcagccttctgtccaaggctactgctggaacccctggcgtctccgtcgcttcagccaaccaggcttactctgatgctggtctcctgactgttcagctgactggtgccgctgcctctgttcgcaaggccgctgaggagactgtcaaggccctgaagaacattgctgccggcaccgtgagcaag

SEQ ID NO: 62304 - DNA, 1130 bp, Oryza sativa
  Clone ID: PAT_MRT4530_63653C.1
gcacgagggtaggaagaacccacgaggaaaacttacctctccgcccctcgcatgttcctccccttcatcgcgcgacagatggcgtgctcccacctggccgccgccgccgccgcggcctccccgccggccgcgcgttcaccgacggcctacagcgccgcaaccgcgagcgccttcgcgcgcctctcggcgatgccccgggtcgcgagcggcgggttggccgttaggggccgggggggtgtagccgctgttgtcgccgccgccgccggggccgccgcggcgacgcccgtggccgacatcgaggaacgccgggccaccgagaagcagcccatcattgtcatcgataactacgacagctttacctacaacctctgccagtatatgggggagcttggattgaactttgaggtatatcgcaatgatgaacttaccatagaggatgtaaagaggaagaacccaagaggaatacttatttctccagggcctggtgagccacaagattcaggtatatcattgcagactgttctggaacttggacctaccatcccaatttttggtgtctgcatgggtctgcagtgtatcggggaagcttttggaggaaagattatccgtgctccttctggtgtcatgcatggaaaaagctctccagttcgctacgatgaggagctagggaaggccttgttcaatggcttgccaaacccatttaccgctgcaagataccatagcttggtgatcgagcaggagaccttcccccatgacgctctggaagccaccgcgtggactgaagatggccttatcatggctgctcgccacaagaagtacaggcacatccagggagtccaattccacccagagagcatcatcaccccagaaggcaagaggatcattctcaacttcgtgaggttcatcgaggagctggagaagcagcgtgccggagagaagaactagtagacgctagctgttcaggcaaaagtagaaaggggcttaagccgggtagattcagggcagaaagtgaaaaagggtaggagtaataagggaaaaagagctctccttttgtcacattcgtttggttcgttgtaatatatatcctttgtggatcttggattaaaaaaaaaaaaaaaaaaaaaaaaaaa

SEQ ID NO: 62305 - DNA, 390 bp, Oryza sativa
  Clone ID: PAT_MRT4530_63654C.1
gggtgagatgatggaggctggtttggagcctgataacacgacctacacaatggtgattgatgctttctgtaggaaaggggacgtgaagacaggccttagactcctgaaggaaatgcagaataagggtagaaaaccaggagttgtgacatataatgttattatgaatggtttctgcaagctggggcagatgaagaatgcagacatgcttcttaatgcaatgattaatataggtgtatctccagatgatatcacatacaacattctcttggatgggcattgcaagcatggaaaagttacagatattgaagaactgaagagtgcaaaaggaacagtgccagatttgggtgtctatacttctatagtcggtgaaattgtcaagaagaaaacaac

SEQ ID NO: 62306 - DNA, 460 bp, Oryza sativa
  unsure (1)..(460): unsure at all n locations
  Clone ID: PAT_MRT4530_63655C.1
gaagagcttagcgacggcggcgatgagcgtaaggttggcgggtcgcgtgggcggcgctcggntggctccatcgccggcgccggnccgangggnaaaacgcnagacggaggcgccgccacgacgtggaacgcnaaggatagggcggcggctgcggcggggggctcgctgtcgtcnaggcaggcnatgagggcggcgaatncggcgnaggaggaggaggatgatcggaggaggaggaggaagagggaggaggagtcgctgcgggctttcatgttcatctccttctggggcccaaactcctnaggccacatccatttccatgtccattttcttgggcttttgcttgtaatttttggntttctttaatttcttttcttnctgcctttcctngatctccatggatcaaagacggtaatattttttccaacggaaaaagcatttaattttaaaggttttaagnttt

SEQ ID NO: 62307 - DNA, 1238 bp, Oryza sativa
  Clone ID: PAT_MRT4530_63656C.1
accgtctcgcaaccgcaactccggcgatggcgtcgtacggatcggcggcgtacggcgacggcgacggggagaagccctcggcgcaactcggccagcccctcctcccgccgcccaatcagccctactacgccttccccgcggcggcatacgcgcctccgccgccgccgccgccgccgccgccgccgccgacgctggtgttcgtcccggtcacctccccggtcctcgtccgcctccgccgcctccgcccgcgccgcgtcccctgcctccgcgcgttctccgcccgcacgctcccgctcctcctcttcctcgcgctcctcgccggcctcgccttcctcctctacccgtccgcgcccgtcgcccgcgtcgaggggctccgcctcgaccgcttccgcgtcaacccgcccccgctcccgtccgtcgatctccacctcgcgctccgcctccgcgtccgcaaccccggcctcgtcctcccgctccgataccgcgccgtgtccgccgccgtctcctaccgcggccacctcctcggctccgccgccgcgcgccccggatccggcgagctcggtgccagagggacgacgtacgccgacgccgaggtgtgggtggacgccgggagggtcgtggatgacgtcatcgacctcatcggggacctcgccgcggggtccctgccgctggagatcgtgaccgaggtggtcggcgctgtcagggtcttccgtttcgacatccctgtgaagcccatgcgaccgcccacgcgtccggtcagcccagatactcagaaaatcataagtcaggattgctattgagtgacaatgcatttgggcctctgatgtaagatgggcgtgcaattcatacctatggtttgcagctattatcaagttgcacggcctgctctatgaaactgcttgagtatgtgtatgtaaatagtttgtagcatgttattctatagacatgaataataattatacgatcccatcgaatttgaccactctctgttttaacctattccaccactaaagaatttttatagcattttataaaatgctatatctgtattggtaaatactaccttaccgaatatgtaacatagccaatatagcagccagtcatggtgtacgatttgacctaaacatgtatggtgtgattgtaactcagtaatttaagatttgcaaaatttgaactcagtaatttaagacatttcattatttgaatataaatttgaccacccatcgatgggtggttcc

SEQ ID NO: 62308 - DNA, 505 bp, Oryza sativa
  unsure (1)..(505): unsure at all n locations
  Clone ID: PAT_MRT4530_63657C.1
cggacgagggtcttccttgctccttcaattgcacttaagtacctacctttaatttgttttcattgttggttagcagcgtgacaccgtaaatttcagcataatatatatacaaactatagctattaanactatttcagcataatttcatcggtcggtcggtcggtcggtcgtttattccatgaatcaaatcaaatcgatcattgtcaaaataattactcctcatcatgtattacaagtattctggacctagctagctgctcagccagcctgccaggtcaagaatctggtgcttggccagtttaatttgcagccgtctatcacgcacggtagctgtcacgctcatagtaccaaccaacgaaccgaaccttccttgtggaattaatgcattactatatatcacaggtgacagtccatcccttttgtacccanaccgcgttagtatactggagtactaataagcaatactatgatgaatgaaatgaagagtagtagtaggtattattat

SEQ ID NO: 62309 - DNA, 376 bp, Oryza sativa
  Clone ID: PAT_MRT4530_63658C.1
ttgtgctctgagggactcataacctggctggggctaacaccggggatggctgataaaacacaggaggggcaggcgatgaaacagctgccagtacccatagcagtcagaccataaatccaggaccactttgaggaggtgtgttcggggcatagagagcagaaatagcgactaaaacactacgaagactggtgctcatgagagcacgtcgtgtcggaacaatcgatgatgaaactgtcaaaaagaagctccagaccgtggagatgccaatactgtcagttagaggctggggcttataagcgcaagcggttgctactttggatgacatatccctgctcagataagaatatgcgcgcgtggacacatgttcctggggtat

SEQ ID NO: 62310 - DNA, 243 bp, Oryza sativa
  Clone ID: PAT_MRT4530_63659C.1
ggcagcagatgtttctggtctctaccagtagtagagacagtacacagagcgctcaccctggcagcatctacgacacgcgtcaggagtacctggaatgcaagcagcagcagcaacagtcaccaaacacgcatgattccagcatgcacagcatcatgtattggagtttcaatcagactcacgacatgtgctaactccagcctcatatcagctctcagctcacacagcgaattagtatacttcctg

SEQ ID NO: 62311 - DNA, 966 bp, Oryza sativa
  Clone ID: PAT_MRT4530_6365C.1
atgaatctgattgtttcttggaaagaacaagaagctgatcagtttcccttgctgcttgttcgatgtatggtcatgtggatggatcaatgcaggagggagaagagcggagctatgggagctctgtgtggtttgggcagccacttctcgactgcctcgagttgccagaggttacccggcaaggtcgcggtgatcaccggcgcggccagcggcatcggcaaggcgacggccgccgagttcatccgcaacggcgccaaggtcatcctggccgatatacaggacgacctcggccgcgccgtcgcggccgagctgggcccggacgccgcgtacacccgctgcgacgtcaccgacgaggcgcagatcgccgcggcggtggacctcgccgtggcgcggcacggccgcctcgacatcctctacagcaacgccggcatctcgggctcctcggcgcccgcgccgctcgcgtcgctcgacctcgcggacttcgaccgcgtcatggcggccaacgcgcggtccgcggtggcggccgtcaagcacgccgcgcgcgtcatggtgccccggcgcggcggctgcgtcctctgcacggggagcaccacgggcatgctcggcgggctcgcggcgctgccgtacagcctctcgaaggcggcggtggtgggcgtggtgcggctggcggcggccgagctggcgcgctccggcgtgcgcgtgaacgccatctcgccgcacgccatcgcgacgccgctgctggtccggtcgctggcgaggatgaacccgggggtcagcgacgagcagctgaaggagatggtggagagggggatgagcgagctccatggcgcggtgctggagctggaggacgtggcgagggcggccgtctacctggcgtccgacgaggccaagttcgtcaccgggcagaaccacgtcatcgacggcgggttcacggtcgggaagccgatggacatgcgggttccacgttga

SEQ ID NO: 62312 - DNA, 408 bp, Oryza sativa
  Clone ID: PAT_MRT4530_63660C.1
ggaccaaaacagggggggcctttttttggggcttcttaaacttaaaacaaaccccccccaaagtttcacatccttgggggctttttttttttgatccccctttcctttttcattaggccctccctttagggcctcgttctccgacttttttgaaaaccctgggtgggtttgttgtttttttttaggggggaaggccccgggcttttttccctttttttttttaagggttcgggcttgctccctcgatttgcgggaagctttagcgatcccttcccctggggtgggccggaattttgggtttttccctgcaagggggctccccagggagttggccttggccttgaataaaaagtttgggcatccttcaggcctgggttttttaaaaacaacgttgggttggggaatgat

SEQ ID NO: 62313 - DNA, 429 bp, Oryza sativa
  Clone ID: PAT_MRT4530_63661C.1
aaggaaaaaatttaatccaagaaaaaaaatgtaaccccctgggaaaaagccgccccttgaatgttttacatgcaactaatcctaacattttgttcctagttagggagagttgctcaaaaagccttttgcaaacaaaatttggctcatgaaattcctacccctcaggcccgtaaaatctggttgacaaaattactgttgacctggggccgggcttgtttaaattcctgaaacaaaaacatttggagttttttcacttgagggtgtttctttttaagggcccgaagaaggttttttatcctcaaactcactacttgcagttactggaaccttttttactataaacaatttttttggttcataaggcttatcctcaaaaataaagctgtttggagccccatttgaggacagctcaaccccttttggaggggg

SEQ ID NO: 62314 - DNA, 1086 bp, Oryza sativa
  Clone ID: PAT_MRT4530_63662C.1
atggccgcatccgactccgactccgacgccgacgccgccgccgccgccgccgcctcgctgctgccggcgcccatccacctcctgccgccggacgcgctccacaacgtgctcctccgcctccccctccgcgacgccgtcgtctgccgcccggtatcgcgcctcttccacgaaaccctctcccacaacttcctcgccctcctcccctccctccgcctcctcctcctccgccacccgcgccccgaaggcggcggctgcctccacgccttcgaccccgaccgccgccactggctccgcctccccttctccgccttcctccccaaccacttcctgccccctctcggatctgcctgggcgcgccacggcaccgtcctcgctggccccggcggcgtcgtcctcgtgctcaccgagctcgccgccctctcctacaccccatccggatccggcaagtggatgaagcatcccctctcgctcccctccaagccgcggagccctatactcgcctccggcgctgccgccgtcttcgcgctttgcgatgtcggcaccccgtggcgcagccagtggaagctcttctcctgcccgctctccatgctcacaggcggctgggcccccgtcgagcgctccgcgtggggcgatgtcttcgagatcctcaagcgcccgcgcctcctcgctggtgccggcggccgccgtgtcctgatgatcggcggcctcaggtcctcgttcgccatagacgcgccatgctccacggtgctcatcctacgcctagatctggccaccatggagtgggacgaagctggccgcatgcctcccaatatgtaccgttgcttcaccggcctctgtgaggctgctgcacagggtaatgccatgcctactgctgttgctggtggcaacaacaaggtcaaggtgtttggcggtgatggcaaggtgtggtttgctggaaagcgggtgcgagggaagctggcaatgtgggaggaggatgagctaggcaacagcggtggcaagtgggactgggttgatggtgttcctgggtacagtgatggcgtataccgtggctttgtgttcgatggtgggttcactgctatgccctga

SEQ ID NO: 62315 - DNA, 1514 bp, Oryza sativa
  Clone ID: PAT_MRT4530_63663C.1
ccccaccaaactctctctcgccatggccgcatccgactccgactccgactccgactccgacgccgacgccgccgcctcgctgctgccggcgcccatccacctcctgccgccggacgcgctccacaacgtgctcctccgcctccccctccgcgacgccgtcgtctgccgcccggtatcgcgcctcttccacgaaaccctctcccacaacttcctcgccctcctcccctccctccgcctcctcctcctccgccacccgcgccccgacggcggcggctgcctccacgccttcgaccccgaccgccgccactggctccgcctccccttctccgccttcctccccaaccagtccttctcccccgtcgcctcctccccctctctcctctacctctggctcgagtccccttcgccttccccgccatccctcccctcctcctcctcctccaccgcctccaccgcccacccgcccaaatcgctcgctgtctgcaaccccttcgcggggacctacagcttcctaccccctctcggatctgcctgggcgcgccacggcaccgtcctcgctggccccggcggcgtcgtcctcgtgctcaccgagctcgccgccctctcctacaccccatccggatccggcaagtggatgaagcatcccctctcgctcccctccaagccgcggagccctatactcgcctccggcgctgccgccgtcttcgcgctttgcgatgtcggcaccccgtggcgcagccagtggaagctcttctcctgcccgctctccatgctcacaggcggctgggcccccgtcgagcgctccgcgtggggcgatgtcttcgagatcctcaagcgcccgcgcctcctcgctggtgccggcggccgccgtgttctgatgatcggcggcctcaggtcctcgttcgccatagacgcgccatgctccacggtgctcatcctacgcctagatctggccaccatggagtgggacgaagctggccgcatgcctcccaatatgtaccgttgcttcaccggcctctgtgaggctgctgcacagggtaatgccatgcctactgctgttgctggtggcaacaacaaggtcaaggtgtttggcggtgatggcaaggtgtggtttgctggaaagcgggtgcgagggaagctggcaatgtgggaggaggatgagctaggcaacagcggtggcaagtgggactgggttgatggtgttcctgggtacagtgatggcgtataccgtggctttgtgttcgatggtgggttcactgctatgccctgaagtctatggagaacacataccagtccggtgcgtgactaaatgcgctcaggttaagattttaattgattcgggacatctatccattgcatgcagggggaattgacatgtcaaagaattttatttgcattgtacttggttcgtagcatcatgagatactttcaattgctgtacttgttaaaagtgaaatgttttaaatatcttttcagggtttgttgcttcagacaataaaattcaggttactttt

SEQ ID NO: 62316 - DNA, 285 bp, Oryza sativa
  Clone ID: PAT_MRT4530_63664C.1
agctgctcctgggcacccgactgcaagtgcggcacagtgaagtcaccgaagcaacccgaaacactccgccgcccggggcgaggtcaccacccctttaattttaagtccccataaaaaccacccatatgagtgtggtttgtgtgtgtgctgattattgctgaattaaacccgtgtgtttattcgattaattaagcagctggtcgcttcggcgactatgccggttggtattccacaccggtattgaatttggtgtgattgttggaccgtacccgggtgcctattttc

SEQ ID NO: 62317 - DNA, 896 bp, Oryza sativa
  Clone ID: PAT_MRT4530_63665C.1
atgatcaagctgaggtactccaagaggctgttcaggaggagctcctccaagggcagcactgacagcagtagcagtagcagcagcagcagcgacggcgatgtcggtggccggagcggcggcggcggcagcggggagatagagtgggaggtgaggccgggagggatgctggtgcagaagagggacgggagaggcggcgtggaggtgatcaccgtcagggtggccaccgggttctcctggcacgatgtctccattggggctacctgcacttttggtgagctgaagacagtagtgtctatagtgacagggctggagcccagggagcagaggctgctgttcaggggcaaggagagagaggacagtgaccacctccacatggttggtgtgagggacaaggacaaggtgctgctccttgaagaccctgccctcaaggacatgaagctccgggccgccctcgcggcccgggctaccgtccaaagcccgtatcagccttttatccaagtctaggtctagcccagtctggtccggcccatcttatcgtgctaactgctagattaatcgtaccatcagctgatcaagtctctaaaagcttaattcctgtctggaattgacctgatgtatggtgattttttactgttgctgttaatcagcagtgagtaccagtccatgggaagggcaaaggggccctcccatgtgagagctagagtacctgccacttgttatgtctctaattgcgtgatttgtgccatttctaggtagttaatttgcgagtgcttagtgtggttgtatgtcatgcattgtgtatgtgtgctccattttctgcaagtagtagtacctctaatgtggaagggatcaaaaaaaaaaaaaaaaaaacaaaaaaaactcgagggggggcccgg

SEQ ID NO: 62318 - DNA, 1854 bp, Oryza sativa
  Clone ID: PAT_MRT4530_63666C.1
atggcgtcgcctccctctcccctcgaagccatcgcccgcctcctcgccgacctagcccgccgccgcagtcacccccctcccggaggcggccgctccggtgactccctcgccgcctccgtctcctccctcgcggccgccctcaacccccacggcggcggcgcctcctcctcctcctcgtccgggactagggttctcgacgcggtgctctccctcatgtgcttcgatccaatggaggtggatagggctcgcgtcgattgccttgtccgcaccaccgtctccgcgctctctgcgtcggtgtcgtgtcgagtggatcatatcgatggcgccgagatgctcactgtcgggagctccgtcgctccaggggattgccgtgagctggtccactcgtgcgctgccctcctggagaaactgggggatcctgatgtcgcagaccactcctatgatctcttgtatgcagttgtgaaagcggcattgttatcccctcgttacctgtgtctctttcctttgccgtactatagagaagatgaagatagtacctgtgatatggggaccatttcttcagtgttaacgaggcatccaacttatcaagtgcttcctaatgattacacgatccccctgaggggtctgggtgctgttctagaacttcaaactgcagttgtgtcatcagtattagatgtactttttgagccaatggcatggggaatatccatggaactggggcagaaacttcccttttcatatgattacttcccacaccaacatgttgacttgcttgcaatactaactgggcctctatcttgtagaaaatttgtggatctaacctcatatattgactcacaatcacatgcatctaagggatcagtaaaatacaattcttcttggtcgatgattgtgaatttccctctttggttcaattttgcaactgctttgctttttcatcgggaaggttcacacggctatttatcagaagcattatccatggaaataatttctgaatcaattcgagatgtcaatcttgctcacagggcagccatgtacctttcttgggtgttatgcccctctaatgaagatcaacgccagattttggctgggaatattttggagttatcacattcttgggccaggaacaacaaaaagggccctagccatgtccaccatactagtactgtaaatcataggaggaaactaagaataccgacagtgggggatacagagaagctacatttgtcaaccaaccctgtcagttccctgattaaagaatttgatgatcgctgtgtgaagttctgtagcaaaactgctaatagtcaagtgcaagatgaagaactatcagaccttcctatacactttaattttctgcatttatggattcctttaggaatattgctcgtgtcctctagttttgttaatgatcaggactgcgatatgcttctgcactactcaagcactggacaggttctggagtcaaatgaggtgcagagaaaaacaaaagatcatatctgtaatgatagtttttcagctagttgcaaaggttttactgaaacatgggcttcagctggtgcatctctcgtcttcaggtggcttgaccttattatcaatatgtctgcagtgatctttgaacgtgaagatatatgcgatcattttgtcagtcaactcaaaagcaagacaaacccatacttgctcaaatgtttatattcattgcttgaagtgctggatgaggcaagtcaaagagattttctggttgatcttcatgataggttgctgaactggaataagaaagggcaaagttttgatggctttgaggcatttgaagacatcatccttcgtatgaacaagaagtttcattttagaacatag

SEQ ID NO: 62319 - DNA, 1485 bp, Oryza sativa
  Clone ID: PAT_MRT4530_63667C.1
gagcgatccgggggggcgacttaatagtgcgggtcagacgcacgtaccaacaaccggacggagggcgcagcgtcataggtcggtccccgcccgctggcggcggcgtcgataggacacgtggccctactccgggcggcgaggttgagaagaagcgaggcacaaagggagttcaccggtaaggcggcatccagggtttccactctccgtgttacaccggtcaggagggggggctcccatctcgttaggctcgcttgggttccgggccccccctccgcttctgtcccgcttttcttgtttatctcaactgaacgatcctgaaaaatagccattgcccaattaaccaagcaaaatcttactactactccatagtctgatctggtgacagtatttaccagagcacgtttattcagctctagaacacatcacagcctcaccattcaacatgaaaggaactctgttactacagtctatagctgtgccaagttgttactacctgacaaacagtgcaaggccaagactcatatatgttacctaaaaattgcacactatgttcgctatagaagcttcacacatcaaaacgacaacactactctgcacggtccaccattgttgccatgatttattattcaggaaaagaagcgaacacttgagagaagtaggcaacgaaccgagctatggagatttgagatgaaaagtggaggatggcttgagttgttcacgcttcagagcgccttgagcatctcctcggcgctgctggtggtgaaggcgccgccctcctcgaggttgagcaccttgacgacgccgtcctccgccaggagcgcgtagcggcgggaccgcacgccgaggccggcgggcttgtcggagaggtcgagctcgacgcccatggcgcgggcgagctcgccgttgccgtcggagaggaggagcacctcgtcgccgacgccgaggctctccttccacgcccgcatcacgaacgcgtcgttgacggagacgcaggccacggcgtcgacccccttggcgcggagctccccggccttggcgacgaaccccgggacgtgcttctgcgtgcaggtcggggtgaacgcgccggggaccgcgaagaggaccaccttcttcccggcggtgaggtcgcgcacggtcaccgtcttcagctccccgtcgggcgagtcgaagtaggagagcgtcgcgtcggggagcttgtccccgaccgcgatggtggccgcggccggggccgaggccgacaccgccctcctcggtgcggcggagaggatgccagcgcggaggtggggcatgacggcgatgcggccgcgggaggcgagggagagggagagggagcgggagggggaggagaggaggaggcgcttgccggcggccgcggccgcggtggcggagagggaggcgagggtggaggcggcggcggccatggtggtggagggcgaagtgttcgaggaaatgcttgttcgcccgcggcccgggggtcccccgtgc

SEQ ID NO: 62320 - DNA, 459 bp, Oryza sativa
  Clone ID: PAT_MRT4530_63668C.1
cggacgcgtggggatgattactgtagccggctaggtcgttatggtggaatagcaacagttgctgaacttggcataacgagatggaattcctaaagttcttgttcaaacaaagcagcagccgtaagtacctgtggaacagccatcctctcaaggttggcagcgtagggcatgggcacatcagctccagcaatcctctcaactggcgcatcaagatattcaaagctgtcctctacaacagacatgctgcaaagaagatacagtacatatgagaacaacttgtcacagagagcgagggagagggagagcgagagagagagagagagatggaccatatttcagcgccaaccccatgttgtggaaatccttcttcaagggttaccaatctgttggttttcctaactgatgcattgatagtagctctatccaatggcctaattgaccgaagattgatcacctgat

SEQ ID NO: 62321 - DNA, 546 bp, Oryza sativa
  Clone ID: PAT_MRT4530_63669C.1
tgcctgcgcctagggttgcgacgctatcgtcggctccgtgccttagtggttgcggcgaaggatggcggcagcacatttggatagtggatgcctaggaagtttgacgaagttgaagtcgatcccgtgtgattcatggtctggttggctagttccgactatacgtcgaatgacacagtgggctaacaagttgcgtgtgacatcagctcacactgaaattgatgaagatggcacccatggaggtttgcatcaacaggcagcactaggggcaggcagtgactggtagacttccactggtcttttctttttttggttgtttctcctcctgtattgaggtgtgagtctaagtaactcttatatcacttttggctgtgtatatccttcgtaaatatagaggccggattaatgaaaatctccactggtcttttctttgtttggttgtttcttctccttattgaggtgtgagtctaagtaactcttatatcattttggctgtgtatatccttcgtaaatatagaggccggattaatgaaaaaaaaaaaaaaaaaa

SEQ ID NO: 62322 - DNA, 5379 bp, Oryza sativa
  Clone ID: PAT_MRT4530_6366C.1
atgaggggcgagcatgagggagagcgcttccgcccatccacctccaccgcggcgggcgtccactccggcatccgtcagccaccatccaaaccccaggtcggctcttggcgtgacatcattgttggcgttgggacccagggggcagtgggcgagaaggaacgggaagcggcatggattgaggtgagaagaaggaagggttcgcattcaagaggggctcatctgtctccacctaccagaccagctgcattgaagacgacgagggaggtcccccggtggttgcaaggacgctgcttcaagtgtctcggcttggggcaccagaaggctcactgcacgggtcaaatccgttgctttcgctgctggtacacgggccatcttgctagctcctgtgctgagaagggtgagcgtggtgagagggaggaaggcgaggtgcggggcgcaccgaaagagagcgttcaggggagagcgcaggtggagggcaggcgtctgccggcgcgccgacaagaaccccgccgtgcggtgcctcaggctcggcggcaggaggaaacctcgacagctgaacccggcgcgtctcgtcgtcccaaatccgaccaggcttcagcgagcgtcaaggagatggccggctttcagatctgcacagccaggccccatgagtacatggaggagttctggacgggcgagccggagctgcgtccggcgatcgggcactgcgttctgtcttggacggcgggcatggagcgcaacgaagcttggctcaaccaacacactctcatggcgtccgttctgaagacaaggccatcggtctcgtcgggggagctgcttgtggccatcgtgcagcaggccggcgtccgggaggagaacctgcgcgtcgacgtgactcacacagaggacttcctcctctccttccgcacgctgcgcgaccggaactcggtgttccgtcgctctcatgagatctacgtgcaagaagttcctgtctccttcaaactgtggagtaggcggagctgggctgacagctccgatctcaagttcttcaccaagatttcgcttgacgggctgccggctcacctgtgggaaagggagacggtgcgcaacaaggggagttggtggagattatcccggctgcagatgctagatgtctgggtcttttcgcttggttcaagaacccaaacaagcttccgcagttgcttcaggtcgaagtgccagagaagactggggcaggaggttcttggaggaaaggttcttcgagcacagctcctcctcgcgctcctcgggcacggccaacgcttctctatgacgttatccttcatgtcgaagaggtcatcgatcccactcccttgcacgctccggctacgaacgcaaccagtccgcttgctcgtccgcgaggggacggtggaggctgcgaactcggcagctgtggagctccatcatctagctcctgaggcccgcggaacctcggtcaagcagccggttgcacctgaccctttggaggcagaggtctgctcctatgggggcaagggttcgatgttggcgctgagcccggtgatagaggcggtgactggatcggcggagccgggccggatggtagcgggggcaatgatggcggcggggaccgagggcatggctccacgtccgaatgtctggttttcccctcagcagagccagggctcgccggcgcttgtggacgcatccacgccggtgttccaagatgttccactgccgctggagaacctggcgcattctccgggttcgacagtccttccctcgccgcggatcttccgctctatcagtcctttgcggctgtctgaagaggaccaggtagacgggctcatggctcaagccatgctgccaccaccggcacaagccttcgtcctcgcctcgccgggcacgatggattcacttctggtttcaccgaggttgcggagcactgcggacgcggtccgtgggtgcgcgtttcgaggctctgggcacgacccgagccctgcgtcgacgccaggccacgtcagctctgtccagactctacccccgctggccagacacctcagctttgaagatatgggtggagatccgccattaatggcgagagctgctgtcctggaagagattttcgaagcactgtcccccggcgggaacccggtcggggctcgcctgccctctccacctgcggacgggcagtcccatgctggtccttctacggctgatgggccgccctcgtctgctgataggctgtctccaccttggtcgcctgtacggtcggctctgctagttgggccggccttgggggtggcccatttcgaccgggtctatgtgtgccgcaaggagtccgttcccgctcctcaagtggttgagctggctcccagcccacagcctgctcgacgaagccctttaggagcggtgatcctgggccaggcctccccacttcggcccgtgatgagccagagccaggcttctcgggtaccagacggctcagcagtcgacgcgttcatcgtcaccatctcgaccccacctccatgctccctccttggcaccccacccgcctcagtcccggtcacaagaagtcgtcgccgcgtcgaacttccccgcgatttcacgccgtggagaagcccccggctggcgctacaaggggatggtgctcgtcgtcacaccatctccaaggtgcagcgggttaccatgaagaaattggggatcattgaggaagaagatgaggccactcaggagacggcggagcagtacatgtgcctcttcgacaatcccctgccgccgcatcacgtcgaggcgatggcggaactgctccagctggaccttgctgagccgatggatcccctgccggcagaaccgacgatggcactgttcagtgttctagtttggaatgtgagggggcttaataacactgctaagcgtgccctcgtgcaagagtctgttgtttcctctaatgcctctgtagtttgctttcaagagtctaaattagaagtggtgaacgctgtgcttatctttgagctctgtggtccgggtttcaattgtttcgaagtgctgcctgctgaacaaacaaggggaggagtgatcattgcttggaaaggcgacttgcttcagggaacactggtccataccggtcgttggtctttgattgttaatttgagttggggtgacagatcctggtctctttcctcggtgtatgggccgcaagccgacgacgagaagctcttattccttgacgagatgtcggcaatcagggatctctgtttggtggaatggataattactggggatttcaacctcatcactgcggccgcggacaagaataacttgagaatcaaccgtcgcctcatgaatgcctttcgcagcaaggtaaatgagttggaattgaaagaagtgtatttgttcgggaggcggtatacctggagcagcgagcaggcggttcccactttggtgaagctagatcggttgttcgcttcgacccagtgggaggacatgtttccggaagcgcatctccaagccttaagttcttcagggtcggaccactgcccgcagctccttacttgcggcgacagggtgcctagacagaggagattcaggttcgagtcctactggactagacttgagggttttgaggaagtggtgaaggagacttggcagatggcgaggctcagcaaatttttatctaagtggggtcaaaggcacatcagttccttcagactgcagttgcagatcgcgaacgaactcatccttcgctcgagcaactccatccgcttccaagacatccacatgccccggctgaacttggctgatttggatgctgctttcaatgaggaagcagtttgggaagccatcaagatcatgccaaatgagaaatcacccacgccagatgggttcacgggcctgttctatcagaaatgttgggagatcatcaagcaggatgtgatggcagcgttgcacaaattctgctccgggaataatcagaacttggagctgcttaacacggcaatcattactcttttgccaaagaaggaggcctcatctctcttgaaggattacaggcccattagcctcattcatagctttgccaagctagcagctaaggtgatggctttaagactcactccaaggatggcggacttggttgcttgcacacagtcggctttcatcagaggtcgctccattcatgagaattttatctttgtgaagggtctcactaagctcttccactgccgaaagaaggccatgatccttctaaagctagatatcttgaaagccttcgactcggtttcttggcccttcctgctagacttgttacagttcaggggtttcggtcccaactggagaaggatcaatcctacttctgttgtgcccaatatgtccttttacgccgacgatgcggttatcttcttcaagccagtgcatcacgaagcggcaaccattaaagcagtcttgaatctgttcggggatgccaccggtcttctctctaactttgctaaaagcgctattactcctattcgctgcacagaagaacagaggttgctggtgcaggaagtgttgggttgcagaatggaggatcttccaatcacctacctagggctgcctctttctataaggaatccaaccaaggctgagttgcaacccattatggatcgaatggctaagaaggtggcgggctggaaaccaaagttactgtctccggatgggcggttgtgcctgatcaagtcagtcctcatggcgattcctgttcatctcctctcagtggttcagctcccacgatgggtcatcaaagacattgaacgtcgctgtagggggttcttgtggaagggacaggaagagataagtggtggtcattgcttggtcgcttggcgggagatatgcatgccaatcggcaacgggggtttggggatcaaggatatcgacagttttgggaaagccttgcggctcaaatgggaattcaaacgtcaagaacaaagagacagaccatggacaatggcaaattgggaatcagagaaagatgttggagatcttttcaactccctggcaattcatatacttggggatggcagccacactgacttttgcaggggaaattggttacctcgagggggaagcatcgcaaacaattgccccacactcttcagctttgtcagcagaactaagctcatggttgcccaaggtttgatctcgcacagatgggtcagagaccttcagggttctctttccagcagagctctggctgaatacctttctctttgggatgaacttcaatcggtggctgtccaggagggtcctatgatctcttctttcttacctcaactaagtgcccttttggggaagcaatttggaagaccaaagcgccagcgagagtcagattttttctttggttggcagcaaagggtagatgtctaa

SEQ ID NO: 62323 - DNA, 715 bp, Oryza sativa
  unsure (1)..(715): unsure at all n locations
  Clone ID: PAT_MRT4530_63670C.1
ggggctctgggttgatctacctcgccgcttaagttcactatgtctgggaatgccatctggatgaggcaactggtcaagtgaggctcgaaggagatgtttctgacaaaaaggaagaaaaaactcaagagcagagcgaagcaagtggaatgccctcaccacaagaagaggaagcagccatcaagaaaaaatatggtggaatactgcccaagaggacgccacatataactaaggcaagcaaggtggaagccacaaactaaagggcctcttgaagcacttcgaccaaaacttcagcctactcaacaacatgcacgtgctcggcggactccctatgcatctgctgacaatgatgagtgtatgaatttgccccctgaggatttgatccagaatggtgatcccatcgaagacaagaacanggaagaacagtaacgagtagctgcaccctgtctatttggagcgttgccaatcctgtcctcgagccaaactgttgccttggtaaataactagagccaatgcctacacttgtggggttgagctctgcagtgtttaacttaaacgtaagacgtggtatgtctggcgtctaccacattcagctgttcagtgtctttctggcatctgtaacagctaggaatgaanacttacatatgatgctgtgataccgatgctgtagtacctgatgtgcaaagaaacaaataatgcttcaaaaaaaaaaaaaaaa

SEQ ID NO: 62324 - DNA, 576 bp, Oryza sativa
  Clone ID: PAT_MRT4530_63671C.1
atgtctctgatgaggccgcgctcctccaacgcaagctcgacgccggtggcggcgaagaaggagaagacggcgacgaggtggtgctcgcaatccgcccaagagaaggtcgtcgtcgttcgcgtgcaaggtgtcaggtttatcgtggtcgctggtgttcgaggccaagaagacgtggtagcagagtctgacaagggcacgtctcgagcagatgcaactgcggcggccgcggcggcgccgccgcctgtgtccagcaagcggctgcggtggtgggcggtggtccttgccaacattgtgttcgtcctcggcgggcagagcgtgggatgcttctcggccggatatactacgatcaggggcggcgacagcttgtggctggcgacggtggtgcagtcctgcggagcgcctctcaccgtcctgctgctgctgctgctctacttccaaatgggctcaccggcccctcccttgatcgagcccagcgagcggtggtggcggcagagctcggctggggccgggctcgacggccgcctctccccatctgccgccggctctgtcgagaagagaggagaagagaagaaataa

SEQ ID NO: 62325 - DNA, 150 bp, Oryza sativa
  Clone ID: PAT_MRT4530_63672C.1
atgccgtttgaccccgcgcccgtgagcccatcccttctcctcgaagctccctcgccccagcactgctccaagttttggagccccaagactcgcagtgcgaggatttcgaggatcaagctcaagatctcgagcaaggcaagtcacctttga

SEQ ID NO: 62326 - DNA, 351 bp, Oryza sativa
  Clone ID: PAT_MRT4530_63673C.1
atggcggcgtggtcatggactcgtagcggatgctatgttaattggggaggagcgcccataattaaagcctcgaagataggcaagcgtggcaagacgcctgatgcaacagctatagtgagcaaggaggagaaggaggctgtggaagtttggaagcggtctgacggcggtgtgaggctgcaggcttcggtcggtgtctccgatctagcgtcgtcccggcgggaggggccaaatctgcacagaggtaggtgcccagcagaccggtggctgcgaggcggttccagacttccagctagtctccccaccgtcaaagcaggccaacgaacattcatgcggctgcaattacgtgtgtaa

SEQ ID NO: 62327 - DNA, 184 bp, Oryza sativa
  Clone ID: PAT_MRT4530_63674C.1
gctccctccagcgcccgctcgcccgccagccgaacgccgacgcctgttgggccctgttgccaatgagtcctccaccgcctgttgccctccagcgcccgctcaccagagccgacgccgtcctcctcccactgtccaccctccctcctggtcaccaacaccgtcgtgttcttctgcgtcgactccg

SEQ ID NO: 62328 - DNA, 397 bp, Oryza sativa
  Clone ID: PAT_MRT4530_63675C.1
ggggggaaatggacccaggcgaccatgggggaaaataagggggggcaaaaatttacttgttaccccccccccttacacccaggaaaaaaaaaacatggtttaaacggaggaacatacatacccttttggaccaccccccccatggttgggacaagggggggtacaaacatacggccccaaatttccccatccgccgggccttccttccttatttaaaacctgggaattaataaaaaacgtgggggggggcttctttaagggaactgggggctgggggggatttttttggggccggatccaggggggggaccaagcgggttttggcgggggccaaccccggaaaaaagcccctggacggaaaaaccgaggaagggaagcttggggagcctgccttttt

SEQ ID NO: 62329 - DNA, 246 bp, Oryza sativa
  Clone ID: PAT_MRT4530_63676C.1
atggtcgccacgaaagatggttttcgtagtagtgtcggcagcgtgcacccaggattagggggtgttaaggtgggagaaggggagggggaagtcataaacttctttattgggctgcccgagcaagagggagggtgttcccagtccctcacgccgccgcaagctccccatctccccgtctccttctctctacgcgaggcagagggcgacggaattggcggcgctcaagctcgagctctcaagcgatga

SEQ ID NO: 62330 - DNA, 231 bp, Oryza sativa
  Clone ID: PAT_MRT4530_63677C.1
atgacggaggcagctctgcgtcacgcccatccgcgtgccttctacagcagcgcggtggtggacatgtgcaccggggagacagcggtgagcgcggatgatgtcgacgagaacccgaagcacaggtcggcctgctgctgcatgctacctctcgccggcgtggagttcatgatgaacatcaccgccccatacattgctgccaaattccccgcgctggctatcgcctccaactag

SEQ ID NO: 62331 - DNA, 601 bp, Oryza sativa
  Clone ID: PAT_MRT4530_63678C.1
ttttttttttttttactcattcccagcctttattcaaaatctgtgaaacaaacaaaacacgcacaaatccctgcagagactcttttttttcaacaagagattcatcggcattcatagcctgtaaactacaatttgtattttgtagtagtacaacaaactgagctttggcaacagctaattaggcgtccttctctgccacaagcttgtcgataagcacagcagcatcctccactgtctgaatcacttgcgcactcgattcgtccacggtaatctgaaatgcctcctcaaggcccatcacaatttcaaccgtgtcaagtgaatcagcaccaaggtccacgaattttgtttctccagaaacggcagtgccttcatctactgctaactgattcttaactatttcgcaaaccttatcaatagtgtcttgtttggccgaacaagacaaggcctggaagcgacttgggaccgggcgcaaccgaatggacgggaagcttgctgtttgcctggagaaagaagctgaggttggattgagcattgagcacatcacctgaacccgagacgcaggggagagaggcgatgtggcggcggtgatgggagcagccat

SEQ ID NO: 62332 - DNA, 627 bp, Oryza sativa
  Clone ID: PAT_MRT4530_63679C.1
atggcagctgtagcacgagcactactcttcgccgccatcgtctgcactgccctcgtgatggctgtcaccgccgctgcggacggcgaggcggcggcgatcgtcgtcgggttggccaagtgcggcgactgctccagcaagaacatgaaggggcaggatgctttcaagggtctccaggtggcgatcaagtgcaggaacggcgacggcgacgtgcccctcgccgccgacgacctccacggcgccgccgactgcttcgcgcagctgcacagcgcgacgagcagcacgccgtgccccgggcaggagccgtccaagatcgtgccgctgtcgtcaacaacggacaacggcgtcgataaggctaacaccttcgtggccgtcgccggcaagaggatgtactcctccacgtcgccagcggagtgcacgtcggcgttcctgtacgactacttccacaagcaccccttcttcgactatttccacaagaaaccccaaggccccgaacccaagccggatcccaagccaacgccattgccggcgaacggtggtggtggcggtgcgggaaacggtggtggcggcgcccaggggaacagtggcggagctgcgccgtctcccagctctccgccggtctaccactga

SEQ ID NO: 62333 - DNA, 185 bp, Oryza sativa
  Clone ID: PAT_MRT4530_6367C.1
atggccagcaaaccaattctgtctgtatttgcaaacaacttaatagtaaaccatctccaggctggatacaggcatgtagatacggctgctcaatatggaatagaacaggaggtcggcaaagggcttaaagctgcgatggaagctggaatcaacaggaaagatttgtttgtgacgtcaaaaatatg

SEQ ID NO: 62334 - DNA, 2197 bp, Oryza sativa
  Clone ID: PAT_MRT4530_63680C.1
atggggaggggcgacgaggcggagaaggaaggcaagcgccgccgcggccgcggccgcagcagcaggagatcccgcgacgcctcctccgaccccgaccccgactccgcctcctccccttccccatcctccgcctcctcccccagccgcagccccgaccgccgcagccgcagccgcagcagcggcagcaagcggaggaaggcctcctcctcgtcacgccggcatcgccaccaccaccacaagagcagcggccggtcccgccgctcgcgcgacgacgacgatgaacggcggcgccggcggaggcggcgggacgaggagcgcgggaggcgcggcggcgatgcgtcggagtcgtcgggatcgggctcggaggagccggatagggcggaggaggcgcgggagatcgtccgcgacatcctcggtgatttccccgccgtcgccggggagctccgtcagcttcttcaaatgatagataatggtgaaggcattgatatttctggaatttctgacaagccattggtgaagcgcctaaagaaacttttcagatcacttaaactgagagaaagctcaaatggggcttacttgttgccaccaaagagtgtacccacccttgatgttgttggatcagcattagtagctagcggtgaactggctgataatgaaaataaaaatccagcgtcaccaactagacaggaacaaccatcatccaattttgatgtgcaaaataaaaatgatagcactcctgaagagccagcgaaaaatgatgctgatgaacaaccccctaaacggagggtaattggtcctgctatgccatcacgcgagttactagctgcagctgctgaaatgacagaggctcttagatcccgggatgctgaagttgaagctgatgatggttttctcataggccccccaccgcctgccatggtcgctgaagcagcatctgcaaatgaagctgagcgatttgaagaggttactcgaatattggcggcggatgagaactcgccatatgatgttgtgggcatcaattggaagatgtcatctgataacatcaagaaaaggtactggaagttatctcttctagtgcatcctgacaaatgtcctcatccttcagctcaggaggcatttgtgaaattgaataatgctttcaaagacttacaggaccctgaaaagagaggtgtgatagatgagaagataaaaaagaaagaggagatggaacaatttgaggtcgagcttaaagcaatgcgcgaggccgcagaatggaggcggctacaaggtgtatctcttgagggtgatgatgaacttctggcagttccaaaacaggcacaggcacctaaaagagatgaatggatgaccacattgcctcctgaaagaaaacctggagtaccaatgcattcgactacgtcatttagtatgaatggtaaagaaggacgtggtgatacaagtgtctggacagatactcctcttgaaagagctcaaaaagcacaacagaactgcacattgttcatgggaggtgaaagagctcaaaaagcacaacagaactacttagaagcctacaacaaagcaaaggcaattgcagatgcagatgaagaaaagattaaaacctcagacgcttcattggtggatacatacaattcctccaagcgatcagtatctctcgtgcaaaagcatcgagaaagcaaaaaggagaaaaagaagcagaagcagcgggataaagaagaatgggaaggaaaccacccatggaagccttgggaccgtgagaaggacctgactgctgggcggcaaaatgtcaatttagatcctgagaacatggcacaaggattgtcgtcccgattttcgtccggagccgttcagaggaacttcctctgagccattttgagatgatcggctaatcacagatgaaacatcaccatgttggtcaccagtacgctggtatgtatttgctgtaaggttgcataggatgcttgttagttatgatgttaagatgatccatgttataagtgtaacgtatgttagatgggttgggttcgcatgtccatttcccagaaatgaattattgcattatcgagagagagctctagctacctatctctactgaacgactgtgcataccggttgttttgaactgtatatgaacttttccagacagtttaatggtacctggtacttaatggtaaaaaattaaggatagaaaaaaaaaaaaaaa

SEQ ID NO: 62335 - DNA, 739 bp, Oryza sativa
  Clone ID: PAT_MRT4530_63681C.1
cacagctctagcctcttgccacatagtccaaagagcaatagagttttctaggattgattcagcaatggcagctgtagcaatggcagatgtagcacgagcgctactcttcgccgccctcgtgatggctgtcaccgccgctgcggacggcgaggcggcggcgatcgtcgtcggccaggccaagtgcggcgagtgcaccaggaagaacatgaaggcgcaggatgctttcaagggtctccaggtggcgatcaagtgcaagaacagcgacggtgtgtacgagagcaaggccatcggcgacctcgacggcgacggcgccttcagcgtgcccctcgccgctgacgacctccacggcgccgccgactgcttcgcgcagctgcacagcgcggcgagcagcacgccgtgccccgggcaggagccgtccaagatcgtgccgctgtcgtcaacaacggacaacggcgtcgataaggctaacaccttcgtggccgtcgccggcaagaggatgtactcctccacgtcgccagcggagtgcacgtcggcgttcctgtacgactacttccacaagcaccccttcttcgactatttccacaagaaaccccaaggacctgaacccaagccggaccccaagccgacgccattgccggcgaacggtggtggtggcggtgcaggaaacggtgatggcggcgccgaggggaacagtggcggagctgcgccgtctcccagctctccgcctgtctaccactga

SEQ ID NO: 62336 - DNA, 665 bp, Oryza sativa
  Clone ID: PAT_MRT4530_63682C.1
cctcttgctacatagagtttgcgaggatttatcagcaatggcagctgtagcacgagcactactcttcgccgccgtcgtcgtctgcaccgccctcgtgatggctgtcaccgccgctgcggacggcgaggcggcggcgatcgtcgtcgggttggccaagtgcggtggctgctccagcaagaacatgaaggggcaggatgctttcaagggtctccaggtggcgatcaagtgcaggaacggcgacggcgagtacgagagctaggccgtcggcgacctcgacggcgacggcgccttcagcgtgcccctcgccgccgacgacctccacggcgccgccgactgcttcgcgcagctgcacagcgcggagagcagcacgccgtgccccgggcaggagccgtccaagatcgtgccgctgtcgtcaacaacggacaacggcggtgataaggctaacaccttcgtcgccgtcgccggcaagaggatgcgctactcgtcgtcggcggagtgcaactcggcgttcctgtgccccttcttcgactacttccacaagagaccccaaggccccaagccgacgccgttgccgaagccgacgccggcgaacggtggtggcgcggcgaacggtggcggagctgcggcgccgtctcccagccctccggccggcatatcacagctga

SEQ ID NO: 62337 - DNA, 1030 bp, Oryza sativa
  Clone ID: PAT_MRT4530_63683C.1
ctgcaacctcacacttgtgcttttgctagcttgtccctcctcagaaatggccatcctggcgtccatggcggcaatggcgttcttgctgctgatggaggcaatgagcgtgtcacacggccagcttcaggtcgggttctactccgactcctgccccgacgctgaggacatcgtcaccgccgccgtccaggacgccgccggctccgaccccaccatcctccccgccctcctccgcctccagttccacgactgcttcgtccgggggtgcgacgcgtcggtgctgatccggagcgcgcggaacgacgcggaggtgaacaacaacaagcaccaggggctgcgcgggcaggccgtcgtggacgcggccaaggcggagctcgaggaccagtgccccggcgtcgtctcctgcgccgacatcatcgcgctcgccgcgcgcgacgccatcgccatgacgggcgggccgtcgttcgacgtgccgacggggcggcgcgacgggctggtctccaacctccgcgacgccgacgtgcttccggacgtcgtcgattccatccaggtgctccgctccaggttcgccgccagcggcctcgacgaccgcgacctcgtcctcctcacagcggcgcacacgatcggcacgacggcgtgcttcttcgtgaaggacaggctgtacaactaccgcctccgcggcggcggcgtcgggtcggacccgtccatcccggcggcgttcctggcggagctcaaggcgcggtgcgcgccgggcgacttcaacacgcgcgtcgcgctggaccgcggcagcgagcgcgacttcgacgactccatcctccgcaacatccgctccggcctcgccgtcatcgcctctgacgccgcgctcgacgccagcaacgccacgcgcggcctcgtcacggcctacctcggcgccgcgtcgcgcaggttcgagcgggacttcgtcgccgccatggtgaagatgggcaccatcggcgcgctcaccggcgacgacggcgaggtcagggacgtgtgctcccagttcaacaccgactga

SEQ ID NO: 62338 - DNA, 2104 bp, Oryza sativa
  Clone ID: PAT_MRT4530_63684C.1
atggcgtccctcttcaaggacccgaccaagctgtccgcgtaccgggacagggggggctgcagctcctggcctcccgggcaactagggttcggcaaatcccccgcaaggagggtgaaacccttccccaaaactccccaatccccacccgaccttcttcgaaatcggaggcaaaaccctaatcgcaaacagctcgtcctcgcgcggccgccgctccgcagcaatggcgtccctcttcaaggacccgaccaagctgtccgcgtaccgggacaggcggttcaccgggacgcaggaggagtacgaggcggcgctgcaggcgtcggtgacggtgtacgtcgggaacatgtccttctacaccacggaggagcaggcctatgagctcttctcccgcgccggcgagatcaggaagatcatcatgggactcgacaagaactccaagaccccctgcggcttctgcttcatactgtactactccagggaggatgctgaagatgcggtcaaatatattagtggaacaatgcttgatgatcgcccaattcgtgttgattttgattggggctttgaagaaggcagacaatggggtcgtggacggagtggtggacaagtaagggatgagtaccgcacggactacgatcctggaagaggtggctatggtacgatggctcagaaagagctagaagcacactccttgagctgcacgctgccgtcgacgagggacagggccggcacgtcacgagccagaggctgctcctgtggctccgggagctcacgcagagcatcggaccgggtgctacgtgcagcggacacgccgccggaacgatgagcgatcgtcgcaaagagcacctgactctgagttcaagggtgacgcgattgattcggagaagaatcctaggtttcgtgagaaaggtgattctgatgaagaagacgatgattatgataagagacgccggcgctgaactgaaagaaacaattgctgataaatgcaaatgggcagttgcagtgactacactagtaaagcccgtcgagcttatgttttttaccctgttgtgtaccatatgacttatatatctgtcgtcagctcatttctatgttgcggttcatcaccacacgctcgcataggtctagcatgcgactgggaatggattttgtgtttattgacacttcagcttatgtattgacctgttatttaggttggcaactaattgattttggtcggtaacaattaccctgcgacttcgcggtgatcgagcgcttcggcctcgacgaagtgctgctgcccctacacgccgctggagcgggcgcagccgccgccacggacgacacgtcaagccggagcttggaagatcaccggatttacctcgacgcggtgcacaacatcgtccggcaagagcgctttgcccggaacaggtccctgctcatactagaggacgcaccggccgtcatcgaattcgccgagacagcgtgggtcctaccaatggctcacgggagcaaggtcgtcgtcacgagcgaatacgaccaaaccaaggcgggtctcggcgcgacggaggaggcaatcagaaccaagaagatgtccaaggaggagtactggtaccacttcaaggcgctcgcctttcgcggagcggcgaatgatccagcagggccggcgcacccagcgctggcggctacagctaaagagatcgcatccgtcctgaacgggtcattcctagggatgcatatattgatcgccctgatgcgatccgacccaagggagtgcttttggcgcgccgtactccagagcctcgtggatctctgccgctcctcgaactccaagaggatcaaggccgacatgggctacgtgcaggagttcgcgctgatcgggcggatcgctctcaagcttgtgcttccgatgcgtctcacgcttcgtagctgctccatcaccaagcaggggggcgatcctcaattaggacctgagcttaatcgtgtggcaggagggatagcttacagttgtcgcagtgatgactctgggtgcgtggatgtcatcctatgcagatcacgcatccctccctacgagatctacaagctctcctgcgtcatggaggaagaggtccatctagaacgtgcgtcctag

SEQ ID NO: 62339 - DNA, 613 bp, Oryza sativa
  Clone ID: PAT_MRT4530_63685C.1
atggcagctgtagcacgagcactagtcctcggcgccgtcgtcgtctgcgccgccctcgtgatggctgtcaccgccgctgcggacggcgaggcggcggtggcgctcgtcgtcggcttggccaagtgcggcggctgctccaggaagaacatcaaggcgcaggatgctttcaagggtctccaggtggcgatcaagtgcaagaacagcgacggcgagtacgagagcaaggccgtcggcgacctcgacggcgacggcgccttcagcgtgcccctcgccgccgacgacctccacggcgccgccggctgcttcgcgcagctgcacagcgcggcgagcagcgcgccgtgccccgggcaggagccgtccaagatcgtgccgctgccatcaacgacggacaacggcggcaataaggctaacaccttcgtcgccgtcgccggcaagaggatgcactactcgtcgtcggcggagtgcacctcggcgttcctgtgccccttcttcgactatttctacaacagaccccaaggccccaagccgacgccggcgaacggtggtggcgcggcaaacggtggcggagctgcggcgccggctcccagccctccggccggcatatcacagctga

SEQ ID NO: 62340 - DNA, 683 bp, Oryza sativa
  Clone ID: PAT_MRT4530_63686C.1
tcggggatgagtaccgcacggactacgatcctggaagaggtggctatggtaagatggttcagaaagagctagaagcacaacgtgagttagttgactatggaggtgcttttcaacctaatgcaccacctcaatatgacagaggtgacaggaagagagggtatggagattcttaccggaacgacagagattaccaacggaaacgttaccggaacgatgagcgatcgtcgcaaagagcacctgactctgagttcaagagagatgcgattgattcggagaagaatcctaggtttcgtgagaaaggtgattctgatgaagaagacgatgattatgataagagacgccggcgctgaactgaaagaaacaattgctgataaatgcaaatgggcagttgcagtgactacactagtaaagcccgtcgagcttatgttttttaccctgttgtgtaccatatgacttatatatctgtcgtcagctcatttctatgttgcggttcatcaccacacgcctgcataggtctagcatgcgactgggaatggattttgtgtttattgacacttcagcttatgtattgacctgttatttaggttggcaactaattgattttggtcggtaacaattaccttgcgaaaaaaaaaaaaaaaaaaaaaagcgccccgctcgcgatctagaaccggacgcgtggg

SEQ ID NO: 62341 - DNA, 987 bp, Oryza sativa
  Clone ID: PAT_MRT4530_63687C.1
atggggccacagctgaagatacaatttcaacatgtagcacgaacactactactcttcgccgccgtcgtctgcgccgccgtgatggcagttgccgctgctgcggacggcgaggtggcggcggtcgtcgtcggtcaggccaagtgcggcgagtgcaccaggaagaacatgatggcgcaggatgctttcaagggtctccaggtggcgatcaagtgcaagaacagcgatggcgagtacgagagcaaggccgtcggcgacctcgacggcgacggcgccttcagcgtgcccctcgccgccgacgacctccacggcgccgccgactgcttcgcgcagctgcacagcgcgacgagcagcacgccgtgccccgggcaggagccgtccaagatcgtaccgctgtcgtcaacaacggacaacggcggcgacaaggctaacaccttcgtcgtcgtcgctggcaagaggatgcactcctccacatcgccggcggagtgcacgtcggcgttcctgtacgactacttccacaagcaccccttcttcgactatttccacaagaaaccccaaggccccgaacccaagccggatcccaagccaacgccattgccggcgaacggtggtggtggcggtgcgggaaacggtggtggcggcgcccaggggaacagtggcggagctgcgccgtctcccagctctccgccggtctaccactgaatcgatcgatcatccattccatcaatccacacttggttgcgtgattaattaatttgcaggtcagcttgttcgtgaagaataaataaaagttgtgagatgtgagaggagtgtgactgtgtgtgagatcgatcggtcgatatatgtgttggagacttggagtcagtgcataagcattgcctttcaggtgaaaaataatttcagagtgctcctgtgtgtgtcgttgtctgtatttattcgcacatgtaatgcggtatgtgctctacgtaatgtaatttatttatttataag

SEQ ID NO: 62342 - DNA, 410 bp, Oryza sativa
  Clone ID: PAT_MRT4530_63688C.1
tcgcccacgcgttcgcaggacagcccgctggacgcgtgctggctggcgctctatcgggagctcaccgcacgggagaggttccagtcgaggttccgccactcggtcgcgctcggcctgaggatgcagtggtgacagcagctgctggacaggagccgcgagtgccgctgcgcctccatgcggcggatggtgaggagctactaggagagcatgccgatgatcctggagcaaggctggtcgtactggttgtccgtgtactacggcagccaggggatgccgtcgtagcagtggtactacggggaggggtcgtcctacgaggactactacggagagcagcagtggtaggcggagatgacctgcgtgaggctgacctgggcgaggcactacgccgagcatttgtcgagggatatccg

SEQ ID NO: 62343 - DNA, 258 bp, Oryza sativa
  unsure (1)..(258): unsure at all n locations
  Clone ID: PAT_MRT4530_63689C.1
cggacgtgncggagnacgctnngggtnancanctgtttnanncagccgccaccgncacttcgctataaccctaaaccagcccggcctcctcccatggcgccgaagaaggacaaggccccgccgncgtcctcgaagccgnacaagtncggcggaggcaagcagaagaagaagaagtggagcaaggggaaaaanaaggagaaggtgaacaactcggtgctgttcgacaaggccacctacgacaagcttctctccgaggtg

SEQ ID NO: 62344 - DNA, 361 bp, Oryza sativa
  Clone ID: PAT_MRT4530_6368C.1
ataaggcataccctctatccttggatataagatatatactgatatggtatacccacgcgtatacgggtgtttcttgtatatgttaaggaaatctatcacgtaacataaacggagttcacagatggaaagagtcctactcggacggaactgggtcgttaccatatcatgtggggtccaatatctccgaattctacttagagatcgactgacccgcggtataaaagggatcccccgggaggacccaaggcatcgaatctcaccgccaacacaaccaccacagcctacgaagttggagcttacaggagccaagtcgccgggtgatctagtcgaaccagctcgactacggtctcattggtatcat

SEQ ID NO: 62345 - DNA, 183 bp, Oryza sativa
  Clone ID: PAT_MRT4530_63690C.1
acatcgtctcacccacctctggagatccgatcatccatgcatggctgctattcccctgcgcctcctcgacaatggagccaatgctgtacctttcatgcgtggtagccgccacccgcgaggacgacaagccgacgccgtgtataggccgccttgatcatcgtactttttatgccaaagcagttc

SEQ ID NO: 62346 - DNA, 953 bp, Oryza sativa
  Clone ID: PAT_MRT4530_63691C.1
tttttatgagatggagggagtagtgcatggcagacagtcaaactaatagctgtaaaaatctttggtcatgtgtaaagatgcgtggtgtatagggtagctacgccgtctatatgtttgaaaattcatcactgtacttatcttttttttcttccaattgtattttgtggtgcggatcgatgtactatctttcacataagctgagcttattgcgtgctccattcgttgtagtgagtttcatgtaaaggtcaaaaatagttgtgtacgttgtaattgtatttaatttcgtaaataaacataagatctagtagttgacgtttgatatcgcgattccagtatttgtatagtatggggatcgttgatactagatgtacgcgagactgaggtaaaagagatggagacagagatttttatataggttcgggcccctgaattgtcaggtaataaccctacatcctgttggcctaagacaatattgctcttattcaccataatcacaccagtataatatgtggggtagtctatctaactgttgtcgacatgacggtctgaaggtctgactcgtagttgataacagggtagccttcctcctcgaatccgcatccggcgagatcagagacagcgctatatctctccatctcttcattccgtattccttgtcgagacccaccaaccgttctcgagtgatcgagaaagcgcagaatctgcgacggagccttgtcaacatttgtcgtactcgccttagccgatcttggtatagaaccatagagacatggagtcttcgataatgccaaatagaattttctctccctagcccccggccttgtcgtcggagaatcgttctcggaggataaggctcttggacccttgaccttttggtgcaacaagtgctatgttctcaaatggagaaagcggagcaatggcagtaccacgaattatttgaaataaagtttgcg

SEQ ID NO: 62347 - DNA, 712 bp, Oryza sativa
  Clone ID: PAT_MRT4530_63692C.1
aaaaatttaaaaattggatttatgtccacggattacaccaaccagaaaagttttttgttttggtgcggcccgtagccacctatgagatagcggacagtataaatttggcaacacttcttcccacaagatctctttcgggaaaaggataatattcaacttcgagttttcaactatatcctttatggaaatggcaaaccaactcgaggaatttctgacacaagtattcaattagttcgaacttgtttagtcttgaattgggacaaaaattcttctctcgaggaggtccgtgctttctttgttgaagtaagtacaaagggtttgattcaagatttcataagaattggcttagtgaaatcccatatttcatatataagaaaaaggaataattcgccagattcgggattgatctctgcagatcacatgaatccgttttattcgatttcgcccaagtctggcattcttcaacaatcacttagacaaaatcacggaactattcgcatgttcttaaatcgaaataaggagtcccaatctttgttaattttatcatcatctaattgttttagaatgggtccatttaatcatgtaaaacatcacaatgtgataaaccaatcaataaaaaaaaatactctaattacaattaaaaattcgtcgggccccttaggaacagctaccccaatttcaaatttttatttcgtttttgcctttactaact

SEQ ID NO: 62348 - DNA, 362 bp, Oryza sativa
  Clone ID: PAT_MRT4530_63693C.1
gtaggcgaaatctacacaagaaaaaagggggggaaaggaaaaaatttaatggagccagggggtgcacggggccaaaaaacaaacgcccacgacttggaaggggggagggggggagggaatacaaggatgccaaaaaaagcaggatacgcgactaccgggggagcgaagggacaaggggcggaactagactagaaacaaaaagaagttcgaagaggaaagggtatgggaggagaggggcgcgtggcccctcgtgaccggaaggtggccaacgtaatacgactcgagaacacgccccacgcggaggtgctgaacaaaagaaaatagaggcggccccaggccgaaggattacagaaccagggcgg

SEQ ID NO: 62349 - DNA, 180 bp, Oryza sativa
  Clone ID: PAT_MRT4530_63694C.1
aacaaaattccgacgccgctttttttctaatattcgttacaaacaaaaaattcacccaatcccattcatcaacaccgagacaacctacaaatttgtaaatatgaaaacaaaatccaccttattatcccaacttacattaacaaatggggtgcgtccttattaacactctccattttttat

SEQ ID NO: 62350 - DNA, 426 bp, Oryza sativa
  Clone ID: PAT_MRT4530_63695C.1
ctgttgtccccagcactgaaacttctatatcccaaacttgctcttaaaagcaagggccctgccctttatccagaaaaaagagagcagtgcgcatcaatatttatgttttgctggtggatgcatctggacatcattgaaaagtggtctataactacatgtgttcctactcttaatcatataattcctgatataaggtataagctgcacagtaagaagagcaaagttgacaatttgcctcgaaggaaaccagtgatatatatctgttttagaatgctttacaggaccaacaaagtcttccagaccatttggaacgagaagcctgatggaacagtgcaacgagatattaagatccagaagggctccacaatcagagaaactaaaaagcactatggcataatacactatctgacaagactaaatggttga

SEQ ID NO: 62351 - DNA, 454 bp, Oryza sativa
  Clone ID: PAT_MRT4530_63696C.1
aagctggcacgcctgcatgtgccggtacgcaatacaccggtcgacctacgctttcgttctcatacaaaatcatactaaagattttctgcttacgaataggcatgtattccaacatggcaaagtactccactttgttcctcatcatcgtatacatgctcacccgcacgtcgatcatggcggaccaccacaaagactaggtggtgtacaatctcctagagcgttgtaaaccacaactgtgctatccgatatactcactgtcacgatgccgggcagggttgaagcgccagtctgtaagccacgtctcacccagccgggcaacacatgagccattgcgtgccgactattgtcggcagctagctccgtgtaaatacatctaaccatgtggctgagcgctcaacacacttgaccagatgtatttacacggagctagctgccaccaatattgctgacccaa

SEQ ID NO: 62352 - DNA, 1461 bp, Oryza sativa
  Clone ID: PAT_MRT4530_63697C.1
atggcgccaactcccaacccacccctccccctccctccgccgtacgactccctcccccgcctcctcctccaccaccaccgccgcctccctcgccgccgcctcgtcctcgccgcgcacgcgctcgccgccgtcgccggccacctcaccgtccccgccccgccgcaccacccgcacgccctcctcatcctcgcctacgcccgccacctcgcgtcgtggccgcgcgcgcccatccacctcctcctcctcttccgctcctccctccgcctctccgtgccgcccacccgccacaccctccccctcgccgtctccgccgccgccgccgcgtcagccggacgccacctcccgctcgcgctctcgctgcacgccgtcgccgtcacccgcaacctcctcccgttcccgcacgtctccaacgcgctcatctccctctacgccaggagcgcgctcccggactccgcgcgcagggtgttcgacggaatgcgcgcccccgacgtcgtctcgcacaacgcgctggtgcacgggtacgtcaaggccgggcggctggggctcgccgtgagggtgttcgaggggatgcccgagcgggacgccgtgtcgtggggcacggtggtcgccgggtgcgccaaggccgggcggctggagaaggcggtgcggctgttcgacaggatgaggcgggaagggtaccggcccgacgacgtcgcgctcgccgccgtgctctcgtgctgcgcgcagctcggcgcgctggacaagggccaggaggtgcacgagtacgtgaggcggaccaggccccgccccaacgtgtacctgtgcacagggatcgtcgatctctacgccaagtgcgggcgcgtcgaggttgcgcgcgaggtgttcgacgcgtgcccggagaagaacgtgttcacctggaacgcgctcatcgtcgggctggcgatgcacggccatggcacggtggcgctggactacttcgaccggatgctcgtcgaagggttccggccagacgggaccacgttcctcggcgtgctgatcggctgcagccacgccggcctcgtggacacggcgaggaggatcttctacgagatgcagcacaaccatggcgttcctcgagagctgaagcactacggatgcatggctgacctccttggccgagccgggctgatcgacgaggcaatggagatgatctcgagcatgccaatggaggcggacacgtatgtctggggaggcatactcgctggctgcagaatgcacgggaacaacgtggagttcgccgaggttgctgcccggcgtttgctggagctgaaccctgacgacggtggggtgtactccgccatggctggcatctacgctgatgctggtagatgggaggatgtcgcgagggttcggagatcgatggatgaaatggttggcatgaggaatgttggtcggagttcgattgcaatggagctcaaagatggtatcaagatgctgagctga

SEQ ID NO: 62353 - DNA, 255 bp, Oryza sativa
  Clone ID: PAT_MRT4530_63698C.1
agaaaaagttatttgaaattaacgatgccatattttttcataaaaaaataagagtaaattccatcaccggtacctaaacttgtaccgttgtgtcattccggtccctaaactcgcaaatcgactgtttaggttcttaaacttgttcgactgtatcatcccgatccctaaacttgcagatcactcgtttaggtcctccaacttgttcagttgtgtcaccccggtccctaaacttgggataaaaaatgacttaaaata

SEQ ID NO: 62354 - DNA, 379 bp, Oryza sativa
  Clone ID: PAT_MRT4530_63699C.1
cccacgcatccgactttttgggcttcctctatcccgtcacggcggccgacggtcggagcgccgagtagccggctccgccgacgacgccgccggcagagaacacaccccctccccgcatggccgccgcgggcggggccgcgcagccgccgcggcagaacaagctggcgccgcatagcgagctgcgggtggaggtgcccccagacgcgcccgtccgcgtgcgcctagttgccggcacggcggaggtcttaggaaccgaactcccccccgagggctgggtccccgtgccgccccgatccaagatcgccatttgcacctggcacggcgcgacggcagagctggacggggacctcgagagccagtacacgtccaacgagacacc

SEQ ID NO: 62355 - DNA, 282 bp, Oryza sativa
  Clone ID: PAT_MRT4530_6369C.1
atgggaacgacggcgccggcggagccgtcaaggcgtcaaccgatcgagacccgtacgcacgtccaggtgcgcgcaccagaggccgacgaccagcacgcgctctatctgccaaagatcgctgtgctcctcgtcatcgtcgtcgcccctcagccgcgggtcgactgcgtcaaggatactgctccggccgtacaggttccacacccatttcagcagaacaacaagaagccgtcgggcgtgtccgtcacgggtcccagcctgcctagtgcgagaatctcggcgtga

SEQ ID NO: 62356 - DNA, 390 bp, Oryza sativa
  Clone ID: PAT_MRT4530_636C.1
gcacagcggtcgccaacgcattcgctttgcagggttataggatcaaatcatccagtccactatatccaattgctctgcggggggacgggacaacatgttgacctgttgacgaagccattacataaatcatctacgaaaaacattatatgactataatgactaactatagatcagctatattactgaggaatatcgcaagacactgagatgactcaactctatagcttctgatctattatgtagccacacaaacattaaaaacccatacattccgtagaaacatcttctatggagccacatcttactgcactacataggatatcggccttgcgccttcgctttataagatccaatcttacctactcgtacatgcaacgacatatttcttat

SEQ ID NO: 62357 - DNA, 243 bp, Oryza sativa
  Clone ID: PAT_MRT4530_63700C.1
agacagctggttgaggagagagagagaggagaagacgaggagacccgcggcttcctcctctcgtggtggtggtggtggtggtggtgtcggctcgtcttctccacctcgcactactcgcgtcgtctcgtcaccgcgcggcgcacgcaaaggcaagctcgggggcgcggtcagctcacccacgtggggaccgaccgggcggggtgcgggtcggacacgtggcgggcggcgagtgggccgttttga

SEQ ID NO: 62358 - DNA, 552 bp, Oryza sativa
  Clone ID: PAT_MRT4530_63701C.1
atggccaccgccgccgccgcgagatcgttccttcgatcgggagtcgcctcctcctcgtccatccgcggcgccgccgcgagagccgcatcccgagccgggccggctccgctcccgaggaggctgcccgccgctgctccccgtctcatcttgaggtcgccggtggagatgagcagcgtctgcttggagacgctgatgcccatgcacagcgccacggcgtcggcgctcatgacgtcgctcctcgctgcccctgcgtgcaggagctttggctggctctccgaagacggcaatgatgacgtgtgacaaactctaggtggaatgtagcagattatagtcccgtcaactcaaatctacaggtctgtgattagtgacaatggagggtgtctgagatgaagacatgctagtatttactttgtcatttctgttgcttcatgttttatcactttgtaattcgtggaattaaaacaaaaaagaaaatttatttctttggctgtaactttttacgctgtcagttaaaaattggatctcaaaaaaaaaaaaaaaaaaggggcggcc

SEQ ID NO: 62359 - DNA, 570 bp, Oryza sativa
  Clone ID: PAT_MRT4530_63702C.1
atgttcctggaggaggaagtatcgaccagcctatcaccgttcaccaccatccatccacaagccgactacagaagtacagaacgcgagatcaccccgaatcttacggtcctcgccgctgccgctgcacgtggactccgcagccgcacccgcacccgcacgtcgcgccaagcgcggcccgcgagaccgaatccgccgtaccgatcgcgcgcgctagctgctgcaccctgcccggatgcgtggtgcggaggaggagccgcggtttttgtgaacgttggatgcgttggggttttccgcgatcccaccgtgccgcgctccaccaccgtttcgccctacccagcggggaccgagccgtgctgcgccccgcggatcggagacacgggcaaccagaagcaaagcaagcgccgccgcgagggcgaggcgggcggggcggcaaaagcaagcggctcggcggcttttgcagccttgcgcgacctgcacgaatattggacactgtacgataatgttcgtgggcatgtcggccatatttcagtcaaaactgaacttgccttgtatgggtatgggggtgtttag

SEQ ID NO: 62360 - DNA, 481 bp, Oryza sativa
  Clone ID: PAT_MRT4530_63703C.1
ctccctccgccgtcgccgccgccaccgccgtcgtcgggggcgatcagatccgcaccgcacgtggaggatatctataccgccgccggaggtgttgacttcctgggacgccctccgccgggtttcccacgctctgcgcctctgcctccgtcaggcctcagggtgagtgcgctgccaaattatggttagctctactaatctttcttcactctagtctctactggtcgtcttctctactcctgtccgtgtgcttcagtcggtctcacccgcacatcgcagtgtgggctagggctagcatcatgaatcttttcttacttgcttgattagtgaagtgcattggtactgtgccagtcaaatcggagctcacccagaaccactctttaattaacaaattttcctctcatggatgattgccttccttcatttcattggacggaccaactcttggagtgtgatggtctcctgaccatacacgacgatagct

SEQ ID NO: 62361 - DNA, 357 bp, Oryza sativa
  Clone ID: PAT_MRT4530_63704C.1
atcacaagtccggcgcgatgaagcagaggtgtagtagccgaacggcacgacgacagtgtgcgggctccgggtagcggcgctccgacaggcgatctcctcgagcggctcaacgacgagtgtaaggaaaatggcaggaccgtcgaagatgattgagtagacatcaatggtgacctaagagaccgcggcgagcgtgaaggcgtcgccggccaactttgacggggtggcactcggcggacagtgtcaccagcagcttgacggggacggcgagcgtctgggcgttgccgataaggtggacgagatgcctcccggttgacgatggggctgctccatcaggatggcgtgggtggctaccggtgt

SEQ ID NO: 62362 - DNA, 1275 bp, Oryza sativa
  Clone ID: PAT_MRT4530_63705C.1
atggaaggccaagcagtcgaagacctggcggcctctgccctagccgctcggggtctggtcacggcgcctggtggcctgggcgcgccggctgatgccttggctgtggcagccaatggccatatttgtgagcttttaggtgtgatagaggaggacacaacaaatatacctgcacagggctttgattgtcgaatgtatgaacatgggcatgatagtgagcttgggcaaaataatgatggtgctgccattcctactagtgatgaggtaccgggtgagatgctcatttcatatgataagaacaacccatccatggctttaggaacaatgtacccaacaatggaggagttcaagttggcagtgcggcaatttgccattaaggaggagtttgatttaggagtagagaagtcattcgatgagcatacatgtgtgtctagcatgaggcagatagctacaactccaactctgaagtgggtagctagcaaggctgtgagtatccttagagatgatccaaatattggtgctaagagattgcaaaacaggttgcagacagatcacaagtgtgaaatttcatatgacactgtatggcggggtaaagaaagagctcttgaagaggtttatggcaaatgggaagagagtgttgagttgttgtttaggtggaaggccgagcacactggtaagccatgtcaacatgtattggcctatgtaacccgccaacggggagttaaccttgaacagtttgtgcataactactactcggtgaatagattcagggctgcttatggaagagagattgagccgatgacagtcaaaactcaatggccacaagttgacctaccatttttagttggtgcgcctcttgctaaattacctgttggaagacgaaggaaactaagaaggaagggatggatggaaggtggccacaagaaaaatggttccaaagatggtccatttaccaatgagagtgaaggtgagaagggaggtgacaatgatactgctccaacaaatggaaagggaaagaagatgatcagaggacctatgacttgccaaaaatgcggagaaaaaggccacaggcaagctagtgccaagtgcccactcaataggacagcaaaaaagagctggcagctgcagcaagttcaagagcggctagcagcttaccagccatcccaggcgagccagtgctctagccatggacaggcggcggccggccagccatcccagtcccaggctgcggctagccagccagacgaccggctagcagcgtgggagcacgccaattga

SEQ ID NO: 62363 - DNA, 1213 bp, Oryza sativa
  Clone ID: PAT_MRT4530_63706C.1
tttttttttttttttttttttttttttttaaaattaagtaattaattaattaattaatcatcttccctgcacattaacaacgttcgtacactcagctcaactcaaccgctaatcactacacctacccccttgctgcactaccaaatcttttgattttcattatgatacagctttaattaattaatcccaacaacatctgcgtccctctcccttcttctcaggcgccggcggcgtcgcgcgcctcgtcgtcggcctgcagcggctcgagcgacgcgacgatgtcccgcatgagcggcctcgccttggggttccggttcaggcagtggtacgccagcatcgccgccttgtgcaccgccctcgccggcagctcgccgcctgcgccggcggcggcggcggcggcggagaggcgggggtcgacgatggacatgaccttgcgcttgtgggtgaggagggggagcgcccagtcggcgagcgtctgctcccgcggggggcgggacttgtcgagcgacttgcggccggtgaggagctcgaggaggacgacgccgtagctgtagacgtcgctcatggccgtgaggtggccggtcatgacgtactccggcgccgcgtagccgtaggtgcccatgatccgcgtcgacacgtgcgacttgtcccccaccggcccgtccttcgccagcccgaagtccgacagcttcgcgttgaactcctcgtcgaggaggatgttggaggtcttgaagtcgcggtagatgacaggcttctcggcctcgtggaggaacgcgagccccctcgccgcgcccagcgcgatcttcatccgcgtcgcccacgacagcggcgccatcacccgggagaagaggtgggactcgacgctgccgcgtggcatgtactcgtagacgagcagccggtggtcgccctcgcagcagtatccgacgagcctcaccaggttggggtgcgacagatggcccaggaagatcacctccgccagccactcgcggtggccctggaagctgttgtcgccgtcgtggaccttgacggcgacgggctggggctcggcgccgtcgccgtcgccggcggcggaggcggcgacggcgcccttgtagacgcggccgaagcggccgccgccgatgagggagtcctggcggaagttgctggtgaccgccctgagctcctcgaaggagaaggcgacgagcgggttgcgcgccgacgagtccaaccgcat

SEQ ID NO: 62364 - DNA, 951 bp, Oryza sativa
  Clone ID: PAT_MRT4530_63707C.1
atgatagctccgcttgaccgggcgtgcctaggagaagggcgcaactgccatgtccacctcttgcttgggctccaaggcagcgccggcgctgccgctgtagtacaaggcgctctgcgccagtgcgccgctgacgaacaatgcggcggcttcggtgtggccgtcgaggagaggatggtcggcgaggaggagttggctagggatacctactccctgatgcacgagtcccagcttgtgttgacctccgctgccttccgcggccagtgctcccccgccacggcgtactgctgctgcagcaccatcgccgccaccaagtctacctcgctggcttgcccgaacgcgaaggcggtgaggaaggcggcggtgccatgcggagaggcccatgcggggcctggagtggaggtcggtggctgtgacagccctatccccatcacgcccccgtccgccttcatggcatcgatcaagttccgcaatgacaaatgcccactgatgccggccaagatgccaatcggggtactcagtttgctttttcagtctatcctctccgccggtggcaacccccatgagcttcaattcaacctctccacctcctctaagccgcagcccggtgacttctcatcctctgctccttactacccctgcccctgccttggtatggttagcgaggtctcagacagcgacgaccatgagcacgagctgaacaacaaggcattctcgtttagcagaaaagggtcgccgctggcgaagaggccggagtggaaagacagactaagcaccctgattaacaccttggtccacatcagcacccggtcgttatcacagaacttgattgatgccatgaaggctgacgagcgcgcgccaggaagagggccgcgcagtcatcgatctgcctttccgtgcggcgccaccgcctggtcaactagcagagggaaagataaggggagtggagagtga

SEQ ID NO: 62365 - DNA, 494 bp, Oryza sativa
  Clone ID: PAT_MRT4530_63708C.1
gcacgagggtccatacaggccctatgtataagattctaatgttgaatggagaaatacctagaaagtcgataatttgaaaactaagaattccactaaaaattaagattttcctatggtatctaaataaaggggtgattctaacaaaggataatctagctaagagaaggtggaagggtagcttattatgcagcttttgtatctctaaagagtcaattcaagacctcttcctagattgtgtttttgctagatacatatggactacgttgtttttcaccttcggaattagacaaccccgtaacactacttacatgtttgggaatttgttgcatggtgttgaacctagactcaaaagacaaatgtaggttggtatagcgataatttgttgggctttatggctcactaggaatgacatggtctttaacggtcacaatcgcatatctttttaacggtcacaatcgcatatcttttttgcaggtgattttcatagtaactca

SEQ ID NO: 62366 - DNA, 361 bp, Oryza sativa
  Clone ID: PAT_MRT4530_63709C.1
tggtgccgattgtcgagcctgagatcctcctcgacggtgagcatggcatctaacaggaccttcgaggtggctcagaaggtgtggtcagataccttcttgtacatggccgataacaatgtgatgttcagagggcatactacttaagccaagcatggtgacacccggcgccgagtagcaaggacagggctcacccctgagctagtatttgactacaccctaaagctgctccacataaggatccgctctgacggcctcggcatcatgttcttgtcaagtgggcagtccgatgtggaggctacacacaacctgaacgcgatgaaccaggggcccaacctgtggtacgtgtcgttcttgtacgcga

SEQ ID NO: 62367 - DNA, 414 bp, Oryza sativa
  Clone ID: PAT_MRT4530_6370C.1
atgcccaataagcccacgccgcctctccccaattccccatcgcgtcgcgcactcgcgctcggctcggtcacggcgcctccaccgcgccgcctccggttccacggcgccggcaccgcctccgccttccgcctccacagtgccgcctcggcctccaccgtgccggcgccgcctccacctccgcggctccgccttcagcctctagccctccaccgcactggcaccggcgccgcctccgctctccgccctccgccctccaccctccgtgctccgccagtccgcctccatcgcgccgcctccccggcccgtcatcctcgacctctatcgccccggcgctgcatccgccggtccgtcctcggcctccgtcgcgccgacgccgcctctgcccttcgctgtcatgccctaaaaatcaactaa

SEQ ID NO: 62368 - DNA, 196 bp, Oryza sativa
  Clone ID: PAT_MRT4530_63710C.1
ggccgccccttttttttttttttttttggtgacaatggagggccatacataaatttccatattgaaaaagctgaggcccaacaggttcagaggacggacgggacggtaaacaggacataaaaaacagcctgcagttaaagcatgctcgcattgtctaaatgcaaggaggcccaacacgaataaacggcatgacaaa

SEQ ID NO: 62369 - DNA, 359 bp, Oryza sativa
  Clone ID: PAT_MRT4530_63711C.1
gaaaaaaaatataaaaatattacccccccaatctttttggcccccccccctagttaacaaaattgaaagggcccctttaataataaaaaaagggaggggcccccaaaaaaaaatccaaattaatgtataaccctttttttttttataaaaaacaaaaaaaaaattggcggaaaaaaaaaaaaaaactgggcccgggggccttttaaacatggccagggaaaatccaaaatctctatcggaaaaaaaaaggaaaaaaaaaaaaagaccccccaaaaaaaattccccaatttaccctttttaccacccaaatgtgacctaacccgttctaccctaaaaaggcacccctgggccaaaccccc

SEQ ID NO: 62370 - DNA, 505 bp, Oryza sativa
  Clone ID: PAT_MRT4530_63712C.1
aatggtttagggacaataaggtcattttctcttcggaagggaagagatagtaacaggagacccatggtatggatgggaaaagtttctttcttgtccaacaaatactagtatctacccatgggtataaatatgtacacctggagtcattgtaaactatctcaacgattaatacaactactttcagcgcatcaccaccctctttatcgagctttttactgatcactggcggacttggtacctgacgcggggctgcatcggctttttatttccggtaaaggggtaagtcctacgttctgccggccctgacaatcgtatcggctacattggtgttgtccaaggctgcatcgttctcgactcttggattgttctggtttggttgctttgtttgtctacctatttatcatattgttgttgtgaaaacaaggcggcctaggagatctgcttaactccagtgcaagttcaaggctagcctcgagtgtgtcaagggcgtgccagctgatttgat

SEQ ID NO: 62371 - DNA, 429 bp, Oryza sativa
  Clone ID: PAT_MRT4530_63713C.1
attattttggtgattggaaaatactggatgatgtagcgttttgttggattttctgacaaccatatatgcaaatccttatcttttcatgttattgaactttatccttatcttttcatattgaactttactggaactccagcatggaggaaatcgatctagcgtacagggaagctgcaaatggtgtctcatccacaagacctgttatagaaatgacgattccttctgtgttggataagaccatctccccacctggtatgccaatttcttgttcccagcattgcagttgcataccacgtgtggcgtctgatttgtataaactataattgcgccctacaggtcatatattcaagattaattttccccaccccccaaaaaatccaagtttaaatttggatatgtggctgggaaacctcaccttcttcgtatgct

SEQ ID NO: 62372 - DNA, 165 bp, Oryza sativa
  Clone ID: PAT_MRT4530_63714C.1
atggccgagcatctcctcatcgcggcccgatcgatacaggatggaggctgctatgagaagcccttctttggcccaggaaaatttgcagccaccatgacaacacaggattacgacaacctgaagctgaactacagtgaaaccgaactacagtgctctggcggatga

SEQ ID NO: 62373 - DNA, 1209 bp, Oryza sativa
  Clone ID: PAT_MRT4530_63715C.1
ggacatcgaacaaacaggaccattcactcatttcaatagttaacctcgcaaacgctactcgatcattattccttaattattccaacttgttgtaactaacggcgaggaaaaagaagaagaactggctgaggatgacggccggcatgcggctagctgcgatcgatatatgtatatggccggctagacggtggggtagaatggtgagacggcgaggccgcacgtgccatgcggctgcacgacgtccttctccagcaggatgtagccctgctgcccccacgtctttccccacgagttcttggcgacccagtacttcttccccgacgcgccgtcctggcagtaacccaccagcgtcaccgcgtggtttgacgacgccccgcacggccccgggaacaccccggacttgtagaactggaacgccggcccgctcgcgtcgatgtacaccgtcaccggctgcctcgccaccgccgtcgccagctgccgctcgtcattgggcggcacggcgcggtacccgccgatgcgcgccgcgtggttgaacagcatgtcgtccacgcggcacttcccctggaacccctcgtaccggtagtcgctctccgccgtgatgccgcccttggacgccaccagctcgaacgcccggtccgtgtgcccgccgccgcacccgttgctgttggtgtcgcagtccaccagctcctgctccgacagcggcgtcagctgccccgtcctgatcttcgtcagcccctcgatcgccgccaccgccgcgaacgcccagcaagacccgcaggcgccttggtccttgacgccggtgacggcgcccctgaacctccagtcgatgcagcagggcgtccagatggggtcgacggggcggggcgcctccttggggtgcggcggcttggcgccggtgtaggtggcgacgaactcgtcgttggtgaggtcggcgaactggttgatccccacggcggagtcgtaggtgacctgcggcttgtagccgcggatgaagtggacgttgtcgcggaagatgccgaagcggtgctccttctcgccgtggcacttgtacgtcttgccgaacttggccatccactcctcgaacatctgcatcgtcacgccgtcgtcgctgccgttgttgtagtacgcgcccgcccccattgcctgcaaagccatcaacgtgcacacaaccaagaggacggcactagccattggacgcgaaggcgccat

SEQ ID NO: 62374 - DNA, 541 bp, Oryza sativa
  Clone ID: PAT_MRT4530_63716C.1
cccgggctgcaggaattcggcacgagggttagtcagattggtgatgaggctttttcttaaattgaggctagtcaattgtcgctcttacactgattaaactagtcctttattctaatcatgcccaggatgaaccaaacaagattaccctctatataaatgtatcaatgctctgtattaacgtatccttgagatgtcaaaaagtaaatagatagatatatataaaaagtattcaaatatgaatgtcagatctatgaattgtaagtcagtctctgtttctatgtttggtctttatccttgttcatattcagagaaagacttacagagaccagaaaatttcaaagatgtggaacaatgcttatggagcattcttaaaactcaacacaactctttgaagaaaaatattatataaaagcaatctgcagaagtgtgtgttatcaggtcaaacttataggaatgactctgcattcttattgatatgcttaagtttcattaaatatgttaaataaattttgaagaattcaaactggagtgaacaacacat

SEQ ID NO: 62375 - DNA, 780 bp, Oryza sativa
  Clone ID: PAT_MRT4530_63717C.1
ttcctctcttcttcctccctttctcctcctcgccacctaacgtcgtcgacgctcgccggcggcgaggtgtgatatctgaccgatcatcgatggggcctcagcaagaccggtcggcggccaagccgtacgcgaacggcagcacggcggcggcggcggcggcggggaggaaggagaacaacaaggtggtgcggtacagggagtgccagcgcaaccacgccgccagcatcggcggccacgccgtcgacggctgccgcgagttcatggcgtcgggcgccgatggcaccgccgccgcgctcctctgcgccgcctgcggctgccaccagagcttccacaggcgagaggtggaggccgccgccgccgaatgcgactgctcctccgacacctcctccggcaccggccgccggtgatcgccgtggatttgattcggcctcgtcgtgcgagtagatcagcatcatcagtaggtaaggtggtattggcgatttggcattcaaaggattcggtggatgaatgaatctgattgtgtatgaaccgattaaaaagttctcttcctttttttctttcatattttgatttttggtgaatcgatggtgtgtaatgtaacataatatatgttaaaaagcatacgcataagaagcgttcatgtaactgctgtgtccatgtacagattatattcagatgaacatcttaattatattctctgtgtccatgtacagattatattcagatgaacatcttaattatattctgtaaaataattgtgcttttcaaaaaaaaaaaaaa

SEQ ID NO: 62376 - DNA, 149 bp, Oryza sativa
  Clone ID: PAT_MRT4530_63718C.1
ccgcaacaaaggggaacccggtctaaataattaattcgaaggtaattgcccaaattgcttcgcattacacggccgcgaatacatatattatttatcggtatcttttaaattctgatataatttataatttttcttacttctagatctac

SEQ ID NO: 62377 - DNA, 414 bp, Oryza sativa
  Clone ID: PAT_MRT4530_63719C.1
atggtgtctaggaaggaatggtcgctgccccacctcgggcctgatcccccctcgggggagggctacgtggcgcctgggagcagccttctccctctagtctcggccagggagtggccgccgccctacctcggacccgacccccctcgggggagggccacgtggcattggggggcaacctcctccgtccaatctctgggagggagtggccgccgccctacctcgggcccgactcacctcggggagggccacgcggcattgggggacagccggcctcctccaactagtgtttgggaaggagtggccgccaccttacctcaggcctcactcctcttgggggagggccacgtggcattgggggacagcctcctccctctaaacatgatactccgggcccatatctcacacacacactga

SEQ ID NO: 62378 - DNA, 279 bp, Oryza sativa
  Clone ID: PAT_MRT4530_6371C.1
atgcccggttcccacgcactcctcccctcctcggcggtagcgggcgtcggcaggcggcagcggcagctggagggaaggaggcatgcagtggcgcacgaggggggaggcagcggcgctctcccctcccagatccggcggtggcgggctcgggaggggccgttcgtgggcgggagcggcgccggggggctaaggtggcgaccaaaagcataccccagtgactcgatccaaagtgctatccccgattatctcaagcgatcaaaacccgttactcatgcttag

SEQ ID NO: 62379 - DNA, 294 bp, Oryza sativa
  Clone ID: PAT_MRT4530_63720C.1
atggtggtggtgttggtgttggcggcgccctcagaattgacgaggctggtggtggtggcgcggctgcggctggggctgggcgttgcgctgaggtggccagggggcctcggcgtgccacgccgcacctctcgggctttcggggtgtgctaccccgaggccctcgcccggccaccacgtggcagggagagcgggcggggcgaaagacgctgctccgcgcctttaatgcgcggcgccccaaccgtcccacgccgcattcaatacggcgtggggggacgtgcggcgccgctcgattaa

SEQ ID NO: 62380 - DNA, 320 bp, Oryza sativa
  Clone ID: PAT_MRT4530_63721C.1
cctcatccctgccgccgtctcctcgcctccgccgagaactcgcggctgcccttgccagctcacttcctccaccggcggctcccccctcgcggcgcccatcgcccccatcgccgccgcacggccacgcctcgcgtcgtcatagtcgtcttcctcgatcaatccgctccgctccgtcttccttcgatccataggattcgatagcaattggcgaagatgctgggcggattgtacggcgacctcccgccgccgtcgtcctccgccgacgatgacaagccctccgccgccggctggtccagcgccgcagttgggccgccccccca

SEQ ID NO: 62381 - DNA, 180 bp, Oryza sativa
  Clone ID: PAT_MRT4530_63722C.1
atggcgatgcagtcttccaggaaagcagaagggaagaactccgaggctccgagctccgtagcaggacctgtgatggcatggctcgaatgtggtatccgaatcggaattgtagcatatgcagcagttgtcctcttcattactggcagtgctgaaaccttgctcttcattgccatccgctga

SEQ ID NO: 62382 - DNA, 495 bp, Oryza sativa
  Clone ID: PAT_MRT4530_63723C.1
atgggcagccggggaggggttaatataggcgcggggaggggtggtcggcctgatggcgatgggacggcgtggcgcgcggagagcgaggcgacggtgacgcgcggcgacgcgacaacgcggggcttggagcggcgacgcgacgggcgggaaggtgatcgagaaacgcctacacttggtcctcgaccagtagatcgtagcgatctctcaccacctaaaaattcgtctttaggtgatcgagatacacctacacctggtcctcgaccagtagatcgtagagatcttttactatctaaaaattcatcttcaggtgatcgagatacgtctacacctgatcctcgaccagtagatcgtagcgatctctcaccacctaaattttcatcttcaagtgatcgagatatgcctacacctggtcctcaaccagtcggttacaacaatctctcgacatctaacgtgacaatcaacattgtcgtgatagcaacaatcaagaccgactag

SEQ ID NO: 62383 - DNA, 282 bp, Oryza sativa
  Clone ID: PAT_MRT4530_63724C.1
atggcgcgcatcttggcatcttgcatcggatatgtccatctctgtctcgtcttcttgctcccaagtggagtgcagaatcgatccacctgtgacatattgaatagatcactggaggaaaataataaggatcttcgaacaactattctgacaatcaaatatacgactcagagatacgaaagcgctatctctgatctcgccgggcacggattcgaggtggaaggctaccctgttgtcgactacgagtcagaccttcagaccgccatgtcgacaatagttagatag

SEQ ID NO: 62384 - DNA, 705 bp, Oryza sativa
  Clone ID: PAT_MRT4530_63725C.1
gaaacacagcttgcaccttataggagaaatatgcaagaccttctgtgtgactctggtatgataccctatccagagcccttccagagtatgtaccagaaacgacggttaggtaccctgggtattgagtggcgacctccctccgtgaattttgctgtcggtcccacttacaatgcaaccactggtgaatatcaaatcatcccagttattgatccagataggtgggaaccacttccagagataacagacttcattgagcttgaaccagaaaatgaggttatttcagatgatactgattctgagtacgatggcctggatgagcattctagtgaaggggaacatgaggctttgaatggtgattcatctggtgcttcgtactcaagtggagaaattgatggggataaccttactgatagcgctctccgcagatcgagaagaaaaaagaaaaaatcagatgggggtgtggttacttcatctggtcgtcgagttaagaaaagaaattttgacgagcgtgatgtgcctcaagtgtcaaggccacataaaagcaggaagtctaggaatgatcgttcaagcaaaaggaaaaaatcccccaaatctaagggattgcggcctcagagacgtgcgctcgcaatgccctcagttttctctcaaaaattggagcttcaacagaagaggatgaagatgactctgagagcagtttctcagaca

SEQ ID NO: 62385 - DNA, 321 bp, Oryza sativa
  Clone ID: PAT_MRT4530_63726C.1
gkacaactggwactttgctatgacaccatgaacargtatagtmcywcgyggasmtcatstyttcttactttwttcctwcwggtaaacaggaagttgcatmtmctgctkgrrgcctgggvrwccawtsyacvatttgctaaccgkthcggcwtcawtkthadkcaraatatttmcgtkccattyawtttcmmaccaattctaaawtgkttcccaggctwaawaacaataatcggtatctccaaraacctcscagggkgggggscccysytaccccaattcgsgcctawawgtgagwkcgtrtttwcmcactcccctgggscc

SEQ ID NO: 62386 - DNA, 715 bp, Oryza sativa
  unsure (1)..(715): unsure at all n locations
  Clone ID: PAT_MRT4530_63727C.1
ccacgcgtccggagctcgtcgccggcgatcgccgcggcgtcggcggcagtggtggcgctggccgtcgccaaccgcgtgctgtacaagctcgcgctcgtgccgctcaagcagtacccgttcttcctcgcccagctcaccaccttcgggtacgtcgccgtgtacttctcgatactctacgcgaggtaccgcgcgggggtggtgacgggggacatgctggcgctgccgaagcgccggttggccgccatcggcttgctggaggccctcgggcttgcggccggcatgtctgcaggagctatgcttcctgggcctgctattcctatactgtcccagtcattcctggtgtggcagcttatcttctctgcgctgctgttgggaagaacgtattcaatgaggcaaatcattggttgtttccttgttgcttctggtgtgattcttgctgttgcaagtggagcgaatgagggtcaatttctgtctgaagtcaagtttatttggctagcactgatggttgcatcatcagcatttcaagcaggtgcttcaattctgaaggaatctgttttcattgatggtgcaaagcgtcttaaggggaggcgcccagatatcttttgtgtntaattcgtttgggtcaggatttcaggctctctttgtctttcttcttctcccacttctttctaattntgagggaataaaagnttgctgagctttctgcttatttaaa

SEQ ID NO: 62387 - DNA, 2689 bp, Oryza sativa
  unsure (1)..(2689): unsure at all n locations
  Clone ID: PAT_MRT4530_63728C.1
gnnnnnnngaattgtatacgactcactatagggcgaattgggtaccgggccccccctcgagtttttttttttttttttttataaagtttaattgattgaatcgacagtgcggtatctcataaaatcaacataaaaagtaaaatgaaggaaaaaagtcttccacgatctgataccaaaaagaatgttaacctatagcttattatcctaaacaaaccaacctattgagcaactatccaggacgtggtcaattcactgatttttctcagcaagtggcctggacagtgagcacaccagagacacaaccagcattggcaaacgcatcggtgacaagcaccgtgcacgactccttcccaacgcacgcggccgcaaatgcgtcataagccaccttcgactcgcacccgccgtcgtaggatccgcaccggccacgtgccacaccgaagctagccacatcaacactcgaaatggtcctgccatgcgcgccacacgacagcgtgacagtgtcaccaacctcggcagacgcacacacggaaccctccaccacggtgcggaccgccacctccgacgggtcgccgccggcttcctcgaagaggatgagtgtgttgggctcccctttgttgaggaaggagcgtggcacatggtagagctgttgcgagggttctccgcaacccgtgaggcacttttgggcttcaacctctgccttgaacacgccacggtagtcgcagtggtggcagccgggcatgtctgctgcaacgtacgatggccagtagcgtccgaggctgtttccattcacccatgccacacccttgtttagcccatggaggtccaccaccacagagtcttcgccggcaggggcttggaacgtggtcttgtaccaggtgaagggcctgttgataggaatggtgctgttatggctgcgccatttgttgcctggcttgtcaagatagatcttcctgtactcaccagccaaaccagccttgtaagaccaggagttgttggagagatcaatcgcagaaccactgctgtcaataagtttaactgggcctccaacaattccagcaggaagcagctcaaatgagccaccatagttcggtgacttgagttggaaggtaaaattctcattgggagaatattgttgaccgacaagctttccattcacaaatgcgtagagttcatggccagttgtgttcacgtatagcacgtagctcccctcccccttgtgttcaaggcttgttctataccacaaataatcgctctggtcggttgtcgtcacgatctgctccaaaagctcattctttctaaagttgcccttttcatcggtcatgaagggcctcaagttctctggcatccatgaccatttgaagtgctctgtttgctgctccaccatgcttgtcttgtttaccatcacagtcgtctgcgtcttgatctttgcgctattaaaggcaacagtcttgcaattcggtaagatgctaacagaccaagcaggcaagaagtgagtggttccatcaagagtaacattgacatccctatcatcaaaccggttgttgatgaaacaagcagaggtggcatttaaggtgtacttggtgaccgtgacattatcaccgtaattggtgtcaatgtaatctccatggagaagaatcttctccatagacatgagcacagagtggagctccttcaagtggccatatttaggctgcctaagattaccatactcatccaagggagcatcataatcatagcttgttgtaatatatgggcctcctgcagtgcggccaaagttggtaccaccatggtacatgtagtagttctgtagtgaaccacgcatctggaagaacatcgcaactgcaaaagcaatgtcttcagtaggcctacgaaattcgggctgatcccaatctctgtaccagccagtccagttctctgtccacattttagggatgcttgtcctgtttgaaaaccactcatggcaatagaatccattacaggtgttgaccacattcggtggcacatcattgtcttgctggcacatgatccatgggaccccaacattctgcttatttgccatgtccgcacaccagtggatgtattcgtgcgcagactggatattttccggttgcaacatggtataaccatactcattctcaatctgagcaaggatgattgggcctccttgccccgcgaacatgtttgcatccttcatcttcttaactataagtgtagtgaaggcctccattccattctcaaaaggcttgttatgcagcctaaactttattccagggatatcacgcaaccaaacgggaagacctccgtagttccattcaccacagatgtatgggccgatacgaagaatagcgtacattccggcgttttggatctccttgaagaacctaacgacatcgtagttcccctcaaagttgaactcacgacggcgcggctcatggccattccagaacacatatgtctcgatagcattgaggccgccttccttggccttcttgatcaaatcgggccacatctcgggggtgctcctggggtagtgaatggagccagagatgacgatgcggcgctcgccgtcgaggatgaggctccggccgtcgtaggagacgatgctgcagccgacgccggcgaccgccgccgcgaggacgaccagcatcaccgccaggcaggcgcccaagctgcacattgcctttgccat

SEQ ID NO: 62388 - DNA, 1190 bp, Oryza sativa
  Clone ID: PAT_MRT4530_63729C.1
cacgaggaagcaacccacgcgccgccgctcaccgccgccgccggcgccgccgtgccgtacgccgtggtattccgttcccgattccgtcttctaggcctcgtgcatggatgagctcgtcgccggcgatcgccgcggcgtcggcggcagtggtggcgctggccgtcgccaaccgcgtgctgtacaagctcgcgctcgtgccgctcaagcagtacccgttcttcctcgcccagctcaccaccttcgggtacgtcgccgtgtacttctcgatactctacgcgaggtaccgcgcgggggtggtgacgggggacatgctggcgctgccgaagcgccggttggccgccatcggcttgctggaggccctcgggcttgcggccggcatgtctgcaggagctatgcttcctgggcctgctattcctatactgtcccagtgtaatactatttatggattctgcaaaactatttatttgaaccaccctaagtcattcctggtgtggcagcttatcttctctgcgctgctgttgggaagaacgtattcaatgaggcaaatcattggttgtttccttgttgcttctggtgtgattcttgctgttgcaagtggagcgaatgagggtcaatttctgtctgaagtcaagtttatttggctagcactgatggttgcatcatcagcatttcaagcaggtgcttcaattctgaaggaatctgttttcattgatggtgcaaagcgtcttaaggggaggcgcccagatatctttgtggttaattcgtttgggtcaggatttcaggctctctttgtctttcttcttctcccacttctttctaatttgaagggaataaagtttgctgagcttcctgcttatttaaatggtggtgctgagtgcttcctaaatgtcgatgatagtctgattgattgtggaggagctccatttctaccattgctgtttatattggtgaatatggccttcaatatcgcattgctcaatttggtgaagctgtcatctgcgctggttgcttcgcttactgctacttcagcagtgccaatatcaatctacatactttcacttccgttgccctacatccctcatggcgcagagttaagttcatctttcatcctaggcggtgtggtattgctgatggggctgattatatataaccttccgcaatcatcgaagaaacaatccaagattgagtga

SEQ ID NO: 62389 - DNA, 229 bp, Oryza sativa
  unsure (1)..(229): unsure at all n locations
  Clone ID: PAT_MRT4530_6372C.1
agcttaaatctgttcttaatgtacagaatgcatgaacatatcgtttgtgagaaatactcaaatcaaatgcatgcattggatttgtgctgcgagataggggaccaaacgaatgattagatttgtttttggttttgttcatgttgatttgtaacaaaagaatcaagaatgtggtgtggggtaaagctagctccatgtgcataagttttcttctgtcttagctccttgtatn

SEQ ID NO: 62390 - DNA, 189 bp, Oryza sativa
  Clone ID: PAT_MRT4530_63730C.1
atggctggagcgggacaaggcgtcggggcctcgtggagcaggacggcgatgtcgatggtggtgaggctaagagcgcgaggaggcgtggcgtggggcctgagtgacgctgatgacagagaaagatgggcagcctacgaggggagagtggagcagtgtaggaagttggaacaagataaatggtcacgctaa

SEQ ID NO: 62391 - DNA, 766 bp, Oryza sativa
  Clone ID: PAT_MRT4530_63731C.1
gcaagattgaagaataacaaaaggagttttaccaagccagggaaaatgcagaaggaacaataggagagaaagaatgtatctgaagcaaactagcttagaaacaccaaatatgactcaaggtccccaagaggggctaggggtgctcctaggcgagggaaatggaagcactggatttaatcagctagagacatgaacatggaccattatgcggaaacatgagttcacttgctttctgtagtgccacatcaggggcctcctgttttcactcaaaaaagatgtgatgacccagagctgcatttctttcaaccaatcaagctttcggcgcaagttccatggtttaagtatgccaacagacccatctgattcgtcctgagtcatgctccctgtctcagggtcttctttctaaagcaccatctcaaggtttctttggctctaaaagattggatccagttgagttggagggggacatgaagctttggtgctgttaagtttttggtgtaatcatggcctacacgtcctcctctttctgctgccaccctgacttccacaggggccttcttgtgctgctcccttagcacagggtggaagtggttctccacctaacacttttttccttagaaaatctgtgtatgattgctatgaacagctctaattctttcatgcagttgttgactggttgtaaattctgaccttagtgctccttgctgtaacctttgctcatccagctccaagtaaaaatagcttggtatggtatgactaggatttt

SEQ ID NO: 62392 - DNA, 238 bp, Oryza sativa
  unsure (1)..(238): unsure at all n locations
  Clone ID: PAT_MRT4530_63732C.1
acgtcnacggcgaaagtngggcccggcggggcgacaggtggggtgggtgagtgcgtgcgtagtggggttggtggtggcgttggttgggcgtggttggtgaggcgtcnagtcgtcggtgtccaananattcgttggtgccttctctttgttttcgagtcttttagtttgttggaatcggattcccggtactgaacctgctttttctgccaaaaaaaaaaaaaaaaaaaaaaaaaaaaaa

SEQ ID NO: 62393 - DNA, 750 bp, Oryza sativa
  Clone ID: PAT_MRT4530_63733C.1
atgatgcctacggaagaaggaaactttggctggatggctgcacgtcgacatgggaatctcccgtatttttgtctgaactttgctcggcgacaaaaattcagtacaaaagtaggcgctcacaatacacccacactcatccttataaatacacatgcgtactcctaccgttacaagcatcttcggaagattgggttagcatatcctgatattgcattgatgaaaccatcacgaacgtctcgctatcgacaggtacgcttaagtgcgttgcaggcaatgtaccagacgtccttggaaagccgctgctccccggaatttatcgtactagaagccagcattcatagcgtacgtttgatccagtctacaggccgttgccagtttccttctgatatctcatccaccactatgctaagggaggaaacaaatgatggaaaccttgacgaagttttcatcataggcgatgaatatgataatgaacgacaacatcaatcaccacatggaaaagttatgttcaattctcttggtagtggtagctttgctccaactaagctgatgaactcttcagtccggctgcgacgcgagcagacagatctgagatactctctctcggctcgatttctgacagcccactgttcctgctacagcatgtatgcattgcatttgcatcgcaacgcatttgagagagagagagatgatgatggactcacacagattcagtttgtgggcgcaagaactgagctcacctcgagacac

SEQ ID NO: 62394 - DNA, 249 bp, Oryza sativa
  Clone ID: PAT_MRT4530_63734C.1
atgcctccgccccaggcgcccccgcgcgcggcctgcgtctccacttccaagggctcttgccggctgcccctgtcggcggcgggcggttgccctcgccgttcccctcgaccggcggcgatttgtggcgaagaagctcctgtccagcgttgtaggacctgcaacacctccttcattgaaggtcttgataatggctttgctcctgtgcaaattagtcctagcttgaacactaattgcacctcctgcaagtag

SEQ ID NO: 62395 - DNA, 428 bp, Oryza sativa
  Clone ID: PAT_MRT4530_63735C.1
cggctcctaaggtggcggcagcggggtgcctcccccaagtagcggcggtggcggcggctgctgctgcttctcccggtgacggcggctcctccccaagcatcggcggtggctgctgcttctctcgacggcaacggctcctcccccaagcagtggtggcaggtgcttcgtcttccggcggcgacggatcctccctcaagcagcggcggtggctgcttcgtctcccgatggcggcggcttctccctcaagcagcggtgacgactgctacttctcccagcgatggcgactgctcctcccggcggtggctgctacttctctcggcgacggcggctgcctcttccccacaacgaacggccaccattcctccccatccccttcaccaatcctcctctatgtgcaatcaattatagccagctatagctgctcttag

SEQ ID NO: 62396 - DNA, 262 bp, Oryza sativa
  Clone ID: PAT_MRT4530_63736C.1
actgtccatccatggtggtggtcagacaaccccagcacacaagaaatctgccatttgcccagtccaccgctgggttgcagtttttgatgaagagattgacttgacctgagcaccctttcgattgtaaatagcagtttttgtattgctgttggttgagtgattgggcattcatccaatacatatcttggcttcttggttggactccagtaaccgtggtcgcgtgccctcatttgcttgttcgctcatcgacgtattttttctt

SEQ ID NO: 62397 - DNA, 409 bp, Oryza sativa
  Clone ID: PAT_MRT4530_63737C.1
ttctttatatttttctcttttatcctttttttttttttttgggtttatattttttactttccttcttttttttccttcatgggccaacccacaaggggaaataaatccaaaattattacgcccccaaaaacatttggaacctctaaactccccaaacaaatccgggttttaaaggtcccccaccaaaaacttcaatcccgaatgaaaaaaaagacctttggcaccccataaaaagaaggcccaaacccccctaattttaattcccacccccccaacagatttgaacggcctgactttaagggcccaaaaacaaaatgggattaatatttttggggaaaaccccctctttaaaggttttttatttctcaacaaaaccccaatttaaaaaggttggggggggccctcggtt

SEQ ID NO: 62398 - DNA, 579 bp, Oryza sativa
  Clone ID: PAT_MRT4530_63738C.1
atgttagccgccctcttctcttcttccttttcttctcttcctagatggggatggccggcggcgggctgctggatccacgcgccggtggtgcctgccccctcagtcgctgccactcccgaggcgggagccgcctccacctccgcctctgcctccacctccacctccttctcacccggcgccgcggtgaagagagtgattggtagccactatgggttccttggcctcaccaacgcctccctcaacggcaacgccaccaacaggttcgtgggcgtggagctggatgcagtgaagcagcgcgtctgcgtcgcggcgagcttgtcatcgccgtcgcagacgccgttgtcggaccctagggccgacgacccgccctcgatgaacgccacggagtcgctcaaaaaccagcattgcgtgccccaccttgaactcggcgaactcatccgtccatgccgcgtccccggcgctggccttcgacgtcaacaacatccgatccactactgccgtcaccactgtggaagctctgcctcggccgcctctcccgcatctgccgctggtgacgtcctgagaagagaagcaagttga

SEQ ID NO: 62399 - DNA, 398 bp, Oryza sativa
  Clone ID: PAT_MRT4530_63739C.1
tggtgggaaatataaattggaactgaaatttttatttttattttgttttttttattgtactggagtttaacaaggattaagacagagttgtttaaaggataaaggttcaaaacaaaaaaaggggggccggggcatttgcaaacacaaatataaaatggaaaacaagggaaaaaacaaggccaagccttaaggagagagcaaatagctaaacagagggggtatgaagaaaaccgttgtaccggaacatgggggagctaccacaggctaagggggcacccccaaaaaaaaataggagaggtaatgggggggaaaaaaataaggtggttcatctaaaaaggggggataccgggggacgggggctccccaggcagggggagggcaaaaaacggttttttcct

SEQ ID NO: 62400 - DNA, 3777 bp, Oryza sativa
  Clone ID: PAT_MRT4530_6373C.1
atggaggagctcttcatgcaggtcttcgagcgccgggactgggtgaaggcgcaggtgcaggagcaggtggtgtcctactccgagtccctcgcctgcgccatcctcgccgccggccgccgcccgccgccgtggctcctcccggcactcgactccgtccccgcgcgcggaaataatacaaaaatgtcatctatagatcttgctcatatgagaaatgaaaacagtctgcatcatgctcagtctcaaacctatcaacgggtcaagccaaaaacacatgaatttggtggttgcaaaccaggtggcttgcatattgtaaattatgccggagaaattgatcagtcacagatatgtgtgtctgagtctgttgtccaggagtttaacatcgcacattcactaaatgaaggacttccttctaccagtcctgttgaagtaccgcactctgtcatgagttcgctgcttcaagaggatacatcgcaacctgttgaatctaatttacaaggaatacctcattctgtctccagtccattgcctgaacagataacaatgggtgtttccgaaactgactctcttacagggatgacttgtatggctagccaacttcctgaaaatgtttccttgctgtctcttaaatctattgctcttgaaggacctgattctgtgttcactccactgtctcaaaaggaaatagcggatgcgggtgatactgtttctcttatggagccgattgctaaaacagaatctgttgcagggctgatttctatggctagcccacagtttgacaatgatcgattgcaaactaatttgctggaaggacctgattcagtgccaacttcactgtctcaagcagatgcaagacatactgctgaaactgattctgttgaaatcctggaccaagaagaagatactgatacacctagagaatacagttttcctgataagagagttgatgaaaacttgaagattcttgaacatcagagctcagaatgtcatgtgcggtctcctccatgtgatggatcttctcttcgacctgattatctggccaatgctatttgtgaagctccaaaaatgttgtcaacgccacaggagaatatgctgggtgacgaacagcagggctcagaatgtcatgtgctgtctcctccatgtgatggatcttctctgcaacctgattatctggccagtactgtttgtgaagctccaaaaatgttgtcaacgctacaggaaaaatgttttgaagctcagagtgaagcttatgatgtttatgttagaaatgacatgaatggatctgtgataccagaaaggtttagtacagaatcagcagagaaactcttaagaagccatgacgggacagaatgtaagatattttcttttgatattgccatggaaatagattccgattcatgtgaaacagtgagcgataagcaagccctggctacgcaaccttctgctcagcaccttttacatagttctagatgtggggagattacatcaaagaaatcagatgctcaaagcaacaatagtcaccagggaagatcagttgcagatgtaatccaagtacaagggaattcatcttttgaagggatagagattaactgccaatcagatcatgccctgtacagcttgtgtagcacaatgagtacatctatggattgtcaacctgacattcttgacaagatggaaaatagagcagacatgtcagggaagccacaacatccagttcaccacttagatcgcctgggatctagtgagtgcatttcgcttgatttagaacgaaggatcgttacaagtaactggaagagttccgtgtcatataaagttcataccagtgtagattcttcctctcaaagaactatgtctagcctatcagatatcatccactttaattcactgaggatgaaatctttgtccagtagcagcagtagtctaagtggtaatgtagcaactgttccccaagattctttacctaactgctctgatatcttatcagatggtgatggagagtacacaaggaagacaaacaactgctctgtatatcctggtgcagatgtaaaatatgtggcagtagacgaccagatattgaatcatacggattatgtttcatctgggtgtgaagtgttgaatccagaaaatcatcccagctccactccaccaagtacatttccaagctatgcttcttcagatcagcaaagtcagcaagcctgtgcttcaaactgttccaacaaagaacttggcgagaaatgtattcatgatgatcctggacagcctgtctcagatggtcatattccattgcaaaatggtgataattgtgctgacttcgatgaaaccgttgaagtgcaccaaagctgtggcattcctattccagctaacagtccaaccatcaaagaaagggtacttgaggcatatcgtgattccacaaagtgggtcaacctgagctccaatctctcctcgaagtgtaagattaacagtaagataacatccccgctgaggagtaagtatgaatcattgacagctaggtttgagaaacttttgggcccagcctccctcgtggaggtggaacctaaatggcattatccaagttatgacaccaaaatgatgggggtttttggtaatcaagaggattgtgaaattcctttgacaccatcatttggaaagtatagcctgcagaagccatcaggagtctgttatacttccaactgtacaggttccataacagatcttgcttgcttccaaattgatgaagatagcagtacttcagaagcttccagaaaatatatggatgtagggaggctagatttgccaaccactacagcttccagtagggagtctgatcatcaagcacacctcataattgatcaagccatgcaaaacccaaaggagaaccgtgctccttcaattaggaaagaagttaaagtgacacagtccctccatgacagagaaagcaagggaagaattctgggtaatcaaaatgaaattcacaaaagtgaagtaaatcttgacaaaggatggaaacctagtaatattgtcactagcatgacatcatttataccacttgtaaaacaaaagcaacggcctacaacagtatgtgtgaaaagagatgttagagtaaaggcgctcgaggtggctgaagctgtaaagcgtcgtgaacagaagaaacaaaatgagcgtgagatgcgcaaagcagctgctgaactagagcgcgagagagtaaagcaagagagggagcaaaaacttaaacagatggagcagaagaagaaaacggatgctagaaagaggcagtgggaagatgatggaaggaaggaaaaggagaagaaaaagaaattcattgaagaaccacgtaaacagcaaaaacagctgggagaaagaatgcatgctgggaacagtcgggaagatgctagtcagaaggatcctgatgacacagaaatcaggaagaatactgtcagagtagtgataaaccaattattatctgatgaaaagacagaatcttttcctatattagtaacatctggaagcaacaatgtaaaagctgtggttgcagatgggaattctggaagttctggtcatcagattcatggaagattatctgatgatgccgataagtcctatgaaatgtctccttatgaagattctgatgaagaggatggtggtgacttggagcacaaagagaaagtaaggcgcagacagaaacatattccaccatggactcgggttaaccttactggagaggagtggttaccacaccctgtggtgataagtctggtaactaaggaaagaaatcttggatga

SEQ ID NO: 62401 - DNA, 422 bp, Oryza sativa
  unsure (1)..(422): unsure at all n locations
  Clone ID: PAT_MRT4530_63740C.1
ttgttgcgcagatcatgtactgggcaaccaccccttgctcagaaagaggtactgcgatgttttccaggttttgagagaaaatcaagaagaacatctgacgaaatcagatggcctgcatgattcggtagagtggatatgaagtttctgtctgacagaaagatagccaagttttacagttttattacatcatacatattttgttctcgaaggggggcccggtacccaattcgccctatagtgaagtcgtattacaattcactggccgtcgttttacaacgtcgtgactgggaaaaccctgngcgttacccaacttaatcgccttgcagcacatccccctttccgccagctggcgttnatanccaaanangcccgcacccgatcgcccttccccacagtttgcgcancctgtaatggcgaatggc

SEQ ID NO: 62402 - DNA, 723 bp, Oryza sativa
  Clone ID: PAT_MRT4530_63741C.1
atgcagcagccaagcgttagcctcgccccaaacaccagctgccacccgcagcacgccggatcagcagctgggtcgtcacgccgtagccatggccacctcggcgtgctgctgcacgtcgaccactcggatggccgccgtgcaggggctctctacgccgccacgaacctccgttcccttgaagctatacctgccaccggcccgaccctccgttcccttgaagaagctatagccgccccgaacctcctttcccatgaagctgttatctccgccaacaacacctaccaggacgccaaaccaagggcgcgaaagttcttcgagttggagatgaccgtccaggactgcgatctggaccagtacggcgttgtcaacaacaccgtctatccttcttacatcgaacgagcacgagaggagttgatatcaggccttggaatgagcagaacctcgatagcgtgcacaggcaacgcgatggcactcaccgagctcaacattaagtacttcacccctctaaagcgaggcgagaagtttgttgttaggttgtcacttggacggatcaagggagcacggatttatgccgaacaatacatcgagaggctgccggatcgcaagctcgttgtggaatcgacggccaccatcatctgcctcaacagaaagcaccgtccgactcgcgtgtggccggagctgtcctccaagctgctggactacttctcgtcccaggaagactag

SEQ ID NO: 62403 - DNA, 259 bp, Oryza sativa
  unsure (1)..(259): unsure at all n locations
  Clone ID: PAT_MRT4530_63742C.1
agagaaagcaatggcatncctgagcaagcgcggcggcggcggcggcgagggggagggcatcctggcctccttctcccggtcttcggtggcggcgcatgggcgcgaggcggcgaccatggcgaagaagctgctgcggacacggggaaggcggcctggatcgcggggaccaacttnctcgtcctcgtcgtcccgctcatcatcctgatagaccgcgagcagcaagtcaacgacttcgagttccagaagcangcgttctttg

SEQ ID NO: 62404 - DNA, 369 bp, Oryza sativa
  Clone ID: PAT_MRT4530_63743C.1
atgctctcgccgggtgtcagggatcgtcttgtttggcattggaagagtgacaagcgctactcggtgcgtttggcataccagacgttcttctatggccaacacacctttgcctgtgatgatcttatctggcatgcgaatggtcttgctaaatgtaagtccttcctctggtttgcatttcagcaacattgctggatgaccaatctcctccaaaagcgtggcatcgatagccactcagtctaccccttttgcgctcaggagcttgagacggggaaccacatcctccttggctacgtgttcgctcagcaagtctggctccgtgtgctgtcgctttctgattggtctaccctctctcctcctcatggcaactag

SEQ ID NO: 62405 - DNA, 355 bp, Oryza sativa
  Clone ID: PAT_MRT4530_63744C.1
ctgacccttgggtgcttatttgtttctctgctcaaccaatgtatcttgtaaagtggtggaggccttttaaagatggccaaacataaacaaatgttaaattgatgatgcagtattatcaatattggcttgccttcttccaagaaagtctatttcttaattactcttgttttctcttgaattcatttttattaatgtgcttgcttaataaactactactatgtataattgttttattttctcttttcgctctttttaaagatttttactatttctttctttttctattttttcttattcttttcattgttatcttaccttttttacctctttttttgtctcttttttatactttctc

SEQ ID NO: 62406 - DNA, 285 bp, Oryza sativa
  Clone ID: PAT_MRT4530_63745C.1
atgtgccatcctgggctgccgcctctgccgccggggtgcgaggtcaagcggcggagggcgccgccggtggcgcgagtgggttccccgccgcccgtgccgcggcgggagcagcctcatcaggctcagccgcaccactactgcgtgtgctcgcccacggcgcaccgcgggtcgttccgctgccgctggcaccgccgcggctacgagtggggcgctggccgccgcaggagcgtggcgccggcgtctccttgtgcatcaattgctcgtgtgtttgtacagagtgtatag

SEQ ID NO: 62407 - DNA, 378 bp, Oryza sativa
  Clone ID: PAT_MRT4530_63746C.1
gatctataacggtcgtcctttttttctcttgttggtacaaacatcattcattcatactgtccaaatctttcaataccactataactggtgtacataaagaatctcatcagaagagcagctcaactgctcaataagcaggttcagagctaaatatcgatggtttacaaattccctttccagcttatacacataaggatctcatcaaatacttctgagctgctatctaaacgatgtcaaaggccagctgaggtaaaagcttgagatattaagtatcatgaagtctatgctcaaaatcctgtataagatctatcaactacataatactagcccacttgggcgcacaccaacctgcctatgtttttttagcacattggtcga

SEQ ID NO: 62408 - DNA, 274 bp, Oryza sativa
  Clone ID: PAT_MRT4530_63747C.1
ctttgttttttttttttctttttttttgagtttagactttttttcttggaatatctttacaaaacagacacccgcatcattatatttgaggatacagggacagggagcttatcggacctgacatgaaaagctaagcaccttccatctcgaaatttattcgaggatagggcacagcgagcatatctgacctgacatgataatctacgtaccttcctatgggaatcgtttccggaagccacagccaacaccggggctgctcgggatccgccagaca

SEQ ID NO: 62409 - DNA, 377 bp, Oryza sativa
  Clone ID: PAT_MRT4530_63748C.1
aaaacttaaaaattaaaatctccctcacataaaaacatcccatgccttaattcttgattacaccatttattttttcaagtttcaaataaaaaaaacatttttggccctaaaaataaagggaatcctcaattccccccctttttccccccgaaaaaaaaacattacaatttcttttttatttttttatttcacaacagcagccccggtcttaaaaccttttttttaattaaatcccccttataatcaacctgtggtaaattgcacccaatgccacccccactaatggccccacccaaaaaatccaatttttttttcagccatttccctttttttaaaataatgcaccccccaattttctttttttttacacccttttt

SEQ ID NO: 62410 - DNA, 780 bp, Oryza sativa
  unsure (1)..(780): unsure at all n locations
  Clone ID: PAT_MRT4530_63749C.1
gnnntcnncnnnnnnntttttngggggttgnaggggaatttccngggaangaaacttcctcccgccgcttctttccggggggaaaggggnggggattntccccttgccgcccaagaaaccgcccgccgaaaancccccaagnccggggggggcgttcngtccagggggaaacccccgttgggtttccggnggcccnaaaccggcgnttccttcttaaccttccgggggcccgcttcttcccggggggaananccggcccgaaaacttnccctccacccggggggaantttccccggggcgaaaataacggggttggggaacacccgcgggggggcttctcccncccgaaccccgggaaaaacgtttcctcccaaanaaacccgggggaancttgggaangttgattcccacttccccgggttggggcgaatgcttgggggcgccgcctccnggtttgctttctttccccgggatcttcctccgccccgngaaaccggngttccaaatttccgggcaaaaggccnttgtttgtttccatnggcggggcnccccnnnattntttccaaccaaangggcggggggtccnnactnaccctccnggnnaccccnaaacccttgaatccacgcggcaaaaaannattccttccncccnttcttggggcnngttgccanngtttggttgcttccttnggggcnncccnntccgaangggggttnccccccnttccgccccgggnnnggggcccncttccngnnntaaaggttcnttccnaaancccc

SEQ ID NO: 62411 - DNA, 525 bp, Oryza sativa
  Clone ID: PAT_MRT4530_6374C.1
atggcacaacaaggggcgccggcgccgacaggcgggccgaacgcgtcagcgggtcaaggaggcaggcacacggtggacacggcccaccgtggccgaggcggcaccgtggaccgagaccacgggtggtccacgggcagcacccaaaagttggcaacggagggagggggctggctcgccggccgacccgaccaggcggcggcggctcccggccggacactcgccgctgatggcggcacgtcgtggcgccggacacgggaggcagaggggaaaaggaaaggaggagggaggcctcaccgtgcgccgggtggcgaggggcgacgagtgcggcggcgagctcctcgggacgacggcgggacggcgctcccgctgcggctccacgggcgggaagcggcggacggagactgggatgacctggggagggcggagaggactccggcggtggatggcgagggcgatggggtggccgaggtgcggcaccagacggagaagccgacggaggtaatggcgaccgacgacagcggctag

SEQ ID NO: 62412 - DNA, 362 bp, Oryza sativa
  Clone ID: PAT_MRT4530_63750C.1
ttcttttgtgttgtttttttttttttttttttacagcctaatacgcccacttgttattcaaacctatgacgaacatgattcattacattgatgctttgccacatcccattgcagagtttttggacctcaacagttcccttagaaattgcctcccaagtcagttccaggtgttgggctgcctaagcgaaccttgtttttgaccatttccaaacagggatatggtttttggccttctggggacccggttttacaatatttaaccatgggggctgcccatcttgcatggcccagggttgggttacatggcgggtcaaatttattttttacagcgggtttatatttaacagggggtgctaaaccta

SEQ ID NO: 62413 - DNA, 2226 bp, Oryza sativa
  Clone ID: PAT_MRT4530_63751C.1
ttgaagtcaaatgcgctcgtctaacgtgcatttgtcccaaatggcatattgacactaacagaattgagccacacgcaagaattacacaaaagaaaagcttttatctgaaatagaatttctatttctcatccgcatggatagtacttgggctgtccacttccacgaatgaacatatgacatgtgaagagaaaacatgagcatcggttttagactaattccccttcataaatattacatcataaaatacacaaaaagagatatatggtacaggaatcagtcaaagctctgtaacagataatgcagctcaattagcagtgaaagaatcgaatcagctggttggctaaatgtcacattcctacaacaaatctgaaagaaaaataatacactcaaagtaggagataaatatatacccacaggcagtgggattcttcagccaacgatgaacaatgaaagaatattatctaagctcgaccatgttcgtgtgacctgccaatccatcgttgacctgcaacgatctcggatcatcgtttcgatacatcgcatgtacaaggagcccacaggccaactcaaggctgaagcatggtcagtggaagtggccgttgccgttatgcttggcagagtcgaccagtccatatccgttgtgaccattatgcctagtggattcagaaaatccatttgtgcagtggccattctgcttgggagagccaattgatccgtacgagtggtgtccgttctgcttggtggagtcaagtgacccgtatccataagggttcttgctagcccagttccattgatccctacacatttcatcgatgccaaatttcgctttccagttgagttccttctctgctttagcaggtaatgaaaatagaatctccgcatcaccagggcgtcttgggccaataatcagaggaattttcttcccagaagccttctcaaatgccttgactatctccagcacagaggtacctttaccagttccaaggttgtatgcttcacaccctatgctggagctctcaaagagtttctgcaatgccgcaatatgtccatcagcaaggtcaaccacatggatgtaatctcggaccccggtaccatctctggttgcataatcatttcctagtattgtcagagctggcctcctgccaacagcaacttgctgaacataaggcataagattgttgggaatgccacatggatcttccccaaggtatccgctaggatgagccccaactggattgaagtacctaagtagaataatcttccattcaggatctgtacggtagatatcacggcaaatatcttcaacaacaagctttgttttgccatatggattgtttggagtgagaggaaactcttctgtgcagggtgagttcttcggtgatccataaactgcagctgatgatgagaacaccaacttcttacatccatgggcagacataacttccagaagatttactgttccattaacattgttgtcgtaataaagcaatggcttctgcacactttcgcccacagcttttagcccagcaaagtgaactacagcatcgaatcttgttgaagcaaaaaccttttccagtgctcccttgtcacggaggtcaacttcctgacacatgacgcccacagcttttagcccagcaaagtgaactacagcatcgaatcttgttgaagcaaaaaccttttccagtgctcccttgtcacggaggtcaaccttgtggaaggcgaggttccgggagtggtcgccggcgagggcggcgacgcggcggacggcgagctcggaggagttgttgaggttgtcgacgacgacggcgcggaatccggcgaggaggagctgcagcacggcgtggctgccgatgtaccccgccccgcccgtcaccagcaccgtcctcaccccgcccggcaccgtcttctccaccgccatctctctctctctctcacacacacacctccctctccctccccttcctctctctctctctctctctctcgctcgttcgctcgctcgctcgcgcccctcccctcccccaagaccagaagcaccaccacccgcgagagcacgcgcggcggatctgggggctcggaggaggatgcggaggaggtggaggaggaggaggacgcgtggagagcggagcggaggaggaggccgcgaagcttctctttgggcatgtggggaggagaagcctcgggccggggcctccgccgattcctgcagcccggggatccactagt

SEQ ID NO: 62414 - DNA, 423 bp, Oryza sativa
  Clone ID: PAT_MRT4530_63752C.1
atgcaagtacggggtagcaggagtatttgcaaaactcaagacgggcaagtggcaacaaggaaaaccattgtgcttgtgccatcatctaccaccaccttgttggccatcgtggaaagcatgcacacacaaggaagcaaaagcaaggggaggacggaggacggacgacgcgatgcatcatcactatgccccggtttgtccgggcgtggtatggagcacgggaaagagggtgaggacaggacgagaatccatccaggctgtgcaggggataagcttgggcgcacagtggccgcgtgccagccgtggcaggggagagggagagaaggtttgcccgagataaaaaggcttggatggtacggaaggcgtcccgtcgctgcacggagttggggcccgtcagacgtgaccgctctgacctctgagctctga

SEQ ID NO: 62415 - DNA, 428 bp, Oryza sativa
  Clone ID: PAT_MRT4530_63753C.1
tttttttttttttttttttttttttttttttttttaggttaaatcaaatttatgggtttattatttagatgtttttttttttgcaccctaaatctttttggtaaggaaataaaaaggtgttggtatttacttttttttatttatttcaaaaacaacaaggttcaattaaataaaaagggcccaacattaagggcaggggggggtataaaaaactggggagcccaaaacccaaccggggtagaaaaaaaacgcgtacaaaggaggggagaaaaatttaccctcaaaagggaagaaaaacacataacagccgggcaccaccacaaaaagagggggggggaaaaaaaacaagaacgcccattttatcccaaaaatggttaaaaaacacgctaatctcgtcattttaaaccccacccaccgggaaggggggg

SEQ ID NO: 62416 - DNA, 370 bp, Oryza sativa
  Clone ID: PAT_MRT4530_63754C.1
agagagtacatagcggggcttatttatctgtcccttatcgaagaaaggacacttatgatgaaagacacaacagaccttgggaaaaaacactgatgatacccccacgaatttcagtgtaacaccctgttgttaaccaatttgacagaggcggcttatgcgaaagtaccataaccgcaacaattagggagatacagagccaccttcatacagaagggcccctaatattatctattctgaatctccttgagaacttctgcaaacctccagtaatatggactacaaatgtcttctggtgctttaccgcaagaaaagaacctggggctggccaccactagttgttgtggaggaggtgcgggtggaaccacctgaa

SEQ ID NO: 62417 - DNA, 166 bp, Oryza sativa
  Clone ID: PAT_MRT4530_63755C.1
cggcacgaggactctccgtcttctccacccagcacagcatcccaccctttcctcccctccgatccagagctctccgtccgcttcccgcgctcgtgtcgcgcttctcctctccagcgtcgcgccgcgccattggcgtatccgtatccttgcaacgcgggcgccgcgc

SEQ ID NO: 62418 - DNA, 1014 bp, Oryza sativa
  Clone ID: PAT_MRT4530_63756C.1
ccgcggagatgagtttgtcgcttctgcaaggctactcctccgccgaggaagacgacccagccgccgccggcgccggcgctggcgagctgagcgactccggcgactcctccgctgaggacgccggatcagacggcgaggaggcttccgctgctccgaggccagccgcgaagccccgcccccgcccaaaccctagccgcggggatgctggcggcggcggcggggacggctcattgctgccctcagcactggatgccttcgcggagatatcgggcccgccggagttcctgaacaatagagtcgccgagcccgaggaggccgtggaggcgctcggagtgctcgaccgccgcggcaagggcgggaggggaagtgacagcaagcagccgcctcctggtgccgttgtggtcgcaaaacctcaattggttgcaattcgtgaacgagttagcagtggaacaaatggtgccaaccctccagtttctactgaaggaaagagaataataggtgcggcaaatcctggtccagaagatgctgctgatcttctaagaatgtgcctccaatgtggtataccaaagacctattcacacgcacgaggtatggtgtgtcctgtttgcaacgatagaccagagcaggcaagagagccagaaaagaagaaaggatcgaccgtcaaagacaaggagaagatcaaaaggatgagggggcaatcatcacacgcttcgtggaagagtgaaactgagatggccctgcggcaacaatttgactgattactaactagtgccacctcctatacttggtgtcatgtgttatgtacactgcgaatacttatgtaatcctatcttcatcaaaatcccgtagaactgcctccaagagtcatagtcggttcccgattgtgtttgctgtattttcagttttccaccatgaatatggatttgctcgataagctgagaaatggttccttgcaaaattccgtcgaagccaaagtttgagccaattgtatgatcatttaaaaaaaaaaaaaaa

SEQ ID NO: 62419 - DNA, 216 bp, Oryza sativa
  unsure (1)..(216): unsure at all n locations
  Clone ID: PAT_MRT4530_63757C.1
natctcaggggcaatgcacacggcggtcccgcgggtttcagggcagcgccctgaaagtttcacagggtacatagatttcatctatgattcgccatgtgaaacctttacgggctggacattggactatccgatgaacacaatcacgctcggccttggaaccatgcaagtattagatcatagatcgttaccactcgacgcgctgcgcagcgaaacaag

SEQ ID NO: 62420 - DNA, 430 bp, Oryza sativa
  unsure (1)..(430): unsure at all n locations
  Clone ID: PAT_MRT4530_63758C.1
ggtaaatccattttctaactttccccttccttcccccctccgagattagccaccaccaccacctcccataccggccggagctaagccctaaccatcgccgttccggcctcctccctcactccctctcccgaccaccaccctccccggatgcgcgtcgctcgggaacatgtttcaccgccgacgttgccgtcccccgtcaactagaacaccggcgcccttctctccctccactcggctcccaggaagaaacagaagagaagaaacgaaggaagaagaaaggcgaaaagaaganaaagataaaagacttgacgggtggggccccttctacagttaacccttttcttaattttcttaattttaatttcaaaaatcccaaaacntttaggaagcccaatattctttttaaaanttattaaaccccaattnccag

SEQ ID NO: 62421 - DNA, 315 bp, Oryza sativa
  Clone ID: PAT_MRT4530_63759C.1
atggcaaggtacccagatctagcggtcattgagctcgagacagcgccctcacgtcaccccaacacccgtaccagtggcaatatccgcttccccttccccatccccttccccttctctacctcctccctacccctcaccgcctccggcgaacaccgcgccacggtgccagtggcctgcacggaggatcttatttcgtcatacgtatttgcaaagctattgacggctgaagcactgccgtgctgccccttcctcgagctcgagcaccagcaacttcagcgctaccatcatgtgcttgaactcgagcttgagaactag

SEQ ID NO: 62422 - DNA, 3011 bp, Oryza sativa
  Clone ID: PAT_MRT4530_6375C.1
atgtcgtatcgtatagattctcataccaacgtacccaaataccctattcagctggtctacgggtatcacccgtcgacagtggcgtgccaggtagggggacttggtgctcaaggttctgccgacatgacttcaaaacgtttcgacaacaatgtcaacatcaatactgctccaggagttccgaccatgacatcgctgatgtggactcaagtcggatcaattgtctttccgatctatactgtcgtaccgatctcatcgaacccaatctctgtcgggaacgagaacggagcagtcgtgacttcgagaaacgaccccccaacgatgattcctcccgcggcaaaattcaagaaatcagaatcaggcgccgacaaggatagctacgcagaaatcgagcacttggtgtcacattcataagacatccaagcactctctgtcggattgctcggtggtacgtcatgtggcggctgaactcaaggcatgcaaagagtgcggaattcaacatgcttcaccaaccgatatcacctggtgtccgatacataaatcaaagaagcatgatctctcaagctgcaaagtctttctcggtacggtcaagcctcagcgacctcagatccgacaaccacgagctcaacctcgatgtgttgcagaggaacgggacacagagacaacacccgatcggtttgtgggattcgttgatgtcgacccccacgaaccctcggttctacacttctggcagaccaggaatcttctccgagttcaccgcgagatgtgaacgtgatcgagggagctgaagacagcgcgacgattcacggcgacaatggtgcccgatacacaagactaacacggcacttgcaagacaattggcggtcgagaagagaaagcgagtacgagtagtcgaggcacctgctgatgcgagtaccccgaattccgacttcgcgttctcagagtttgacctccacgtcacgcacatcttcggcggttctatgtcgtactcctcaaaaagagagtacaaaaagatagaacgcgaagtttgctctacatcacaaggaattaccgccaagattaagtggtcgcagcacaagatcgagttcttggaggcggaccacccgaagactacaactatcccaggaagatatctgatcgtggttgaacccactgtacggaacatcaaggtcgcaaggcgcgcgcgagtccaccggccgtgggcacgatcccctccacgtcctccaccccttccccctcttctcccctccaaaaccagcgccaaaccgccccacttcacccacgtcgccggagcccaccccatcgtcggttgtcgcctctactgggctcgatcccgccttcccgagcctataaaagggatccccgggctctcctcttccgtttccccctcctccccgagctccccgcgctctctcccgctctccccacgtgagcccaagcgccgccgcttgccggcgaccctccagtcgcctctgtcgctgctgccgccgtccccgcgccgcgccgtttgcgccgccggcttcaccgcgcgttgccgcaccccgtccaccgctccccttccccaaaccatttgcctccaccgcgctcaccgcaccccaccgcaccttggcctccgctctatttcccttctccatagatggaaccacctccccaccgcaagcccgaggttgccgctgcttttgccgcctccggccaacaatcatcgccgccctagccgctgtcgtcggtcgccattacctccgtcggcttctccgtctggtgccgcacctcggccaccccatcgccctcgccatccaccgccggagtcctctccttcccgttgagatgagctactccccatgtcgccggcctccggcctttttttttccgccgcctcgcgcctcctccttttcccctaatccttccaccgccctccccaggtcatcccagtctccgtccgccgcttcccgcccgtggagccgcagcgggagcgccgtcccgccgtcgtcccgaggagctcgccgccgcactcgtcgcccctcgccacccggcgcacggtgaggcctccctcctcctttccttttcccctctgcctcccgtgtccggcgccacgacgtgccgccatcagcggcgagtgtccggccgggagccgccgccgcctggtcggagaccaaggctcagaccccagttgagttttgcctgtggagtggagctgaagccccgttaggatcacctttttccgctgctgtcgtttcttttcggtgcgaggactaagagcctcttctgtaagtattttacgctttatttacgtttggaactgtatattacttgtcgttttgtgtaccctggctggtcctggatagggatttaatacacaaaatagtatggaaatttgggctaaatttctgggcgtgacacactatcaggtcaacctttccacgggatcactccagaatcatcgtccaagccactgggcaaaatcacgctacctgtcactttcggacaggccgataacttccaaacatagcaggtcaccttcgatgtcgccgagttcgacacggcgtacaacgccatcttaggaaggactgcgctcacgaagttcatggcggcatcccactacgcgtatcaattgctcaagatgctaggaccaaaagggaaaatcactattcaaagaaatgcaaagctagcagcacaatgcgacaagcggagccttgacatggtcgagcaaactcccaacctacccaccacagctgtgccacctacgaaaccgtccgacatgccgggggtccccagggagatgattgagtacaaactcatggtgcgacccgacgccaagccagttaagcaaaaactgcggagattaacacctgatcggaaacaagctataagagaagagcttgacagacttctcaaagctggcttcatcagagaagttctccatccagagtggctcgccaacccagtcatggtttccgtgatgttgggcaaggggatctttagagtcgactgcaggcagcaagttggcacgggcctgc

SEQ ID NO: 62423 - DNA, 4425 bp, Oryza sativa
  Clone ID: PAT_MRT4530_63760C.1
atggacacacacaactacgagacctctaaacagaagtgggccttggtctgggcatccggcccggccgcctcgcacacactcgcggcttcggcgcctgccctgccgcaacccgcaagccggcaatccttccttccttcctccaccgctagatggcctagatttccccccgttctcgggccattgcctcgcggtgcgacgagccaccgggaatccgggatctccgccgttcggggaccgagggggagaataggggagaacggagaaggtctgcgggctcaaactcctacccaggcagatgacgctccatggagtcatggcgcatttgagattttactgtatttggtttcttactatgctatttccgacttgtttaatttgatagtgagggccatagactataatgaaaaacaacaaaataatgaggaccagatcatggtccggctagaatatcttagtagtccttttaatgagaagaaaaatctctacatccccatctgttcttatgccctgcttctattaattcacttgttcacagctgcaccagtgttgttcatggcggaggtggtgttggctggcttacgtttggcagcaacaccaatctgtgtgaagctcctctgtaatgcttcgacgtgccttggcgtggacatgacgcgtgagctccatgaactggagaccatcatcataccacagttcgagctggtgattgaagcagctgagaaaggaaaccacagagccaagctggacagatggctccgggagctcaaacaagccttctacaatgctgaggaccttctggacgagcatgagtacaacatccttaagtgcaaagcgaaacacaaggattctctagtgaaagattccacccaggttcatgactcttccatcagcaatattttgaagcagcctatgcgtgctgtgtccagtaggatgtccaatctgcgcccagagaacagaaagatactttgccagttgaatgaactgaagaccatgctggagaaagccaaggagttccgtgagctgattcacttacctgctggtaatagtcttgagggtcccagtgtaccaacaattgttgttcctgtagtgacatcgctattgccgccaagagtatttggtcgcaacatggatcgcgatcgcataatacatcttcttactaagccaatggctactgtttctagctcagtcggctactctggtttggccattgttgcacatggaggagcaggaaaatccaccttagcacaatgtgtttacaatgacaagagggtacaagaacattttgacgtcaggatatgggtctgcatctcacgcaaacttgatgttcatcgccatacacgtgagattatcgagtcagcaacaaatggagagtgccctcgtgtggacaatcttgatactctccagtgcagattgaaggacataatgcaaaaatcagagaaattcctgcttgtgttggatgacgtctggtttgatgaatccgtcaatgagagggaatgggaccagttgcttgatcctcttgtttctcagcaggaggggagcagagttttggtgacttctagacgagatgtacttccagctgctcttcactgtaaggatgttgttcatttggaaaacatggaagatgccgagttcttggctctattcaaataccatgctttctctggaacagaaatcagaaatccacagttgcatgcacggctagaagaggtcgcagagaagattgctaaaaggttaggacaatcgcctttagcagcaaggacagtaggctcccagctgagcaggaataaggatattgccatatggaaaagtgctctaaatattgaaaacttaagtgagcccatgaaagctctgttgtggagttataataaattagattcacgtctgcagagatgttttctgtactgcagcttatttccaaaaggtcacaagtataaaattgatgagatggttgacctttgggtggcagaggggctagttgattcacgcaaccagggggataagagaattgaagatattggcagggattacttcaatgagatggtgtcaggatctttctttcaaccagtttctgaaagatatatgggtacatggtacattatgcatgatctgcttcatgatttggcagagtcactgactaaagaagactgcttcagattagaagatgatggggtgaaagagataccagccactgttcgacatctatctatttgtgttgacagtatgaaattccataagcaaaagatctgcaagctacgttatttacgcactgttatctgcattgaccctctcatggatgacggagatgatatttttaatcagctattgaagaatctgaagaagctacgtgtactacatttgtcgttttacaacagtagcagcttgcctgaatgtattggtgagctgaagcaccttcgatatttgagtatcatcagcacattgatttctgaactgccaagatcattgtgtactcttttccacttggagctacttcatttgaatgacaaggtcaagaatttgccggacagactctgtaatttaagaaagttacgacgtcttgaagcatatgatgacagaaacagaatgtataaattgtatagagcagctctccctcaaattccttacataggcaagctatctttgctgcaagatattgatggattttgcgtgcaaaagcagaagggatatgagttgcgacaactgagggacatgaacaagctcggtggtaatttgcgtgtcgttaatcttgaaaatgtaactggaaaggatgaagcctcagagtcgaagttgcatcagaaaactcatcttagaggtttgcatctctcctggaatgatgtggatgacatggatgtttcacatttggagattctagaaggtttgaggccgccatctcaattggaggaccttacaatcgaaggttacaaatccaccatgtacccaagctggttacttgatggatcctattttgagaatctagagtcttttacgcttgctaattgctgtgtgataggaagcctaccacccaataccgagatctttaggcactgtatgacacttacccttgagaatgtcccgaatatgaagacactaccttttcttccagaaggtctcacaagcctatcaattgaggggtgcccactgcttgtgttcactactaataacgatgaactggaacaccatgattatagggagagcatcacgagggcaaacaacctggaaacacaacttgttttgatatgggaagcgaattccgattcagatattaggagcacattgtcgtccgaacactcatccatgaagaagttgacggaattgatggatactgatatgtcgggaaatcttcaaaccattgaaagcgctttagaaatagagagagatgaagccttggttaaagaagatatcatcaaagtatggctctgttgccacgaggagaggatgagattcatttattcaaggaaggctgggttgccgttggttctaccatctggactatgcgtactctctctttcctcctgtagtattacagatggagctttagctatttgccttggtgggcttacttcacttagaaatttgttcttaacagagattatgactttaactacgcttccaccggaagaggtcttccaacatttgggcaatcttagatacttggtcattcgttcctgctggtgtctcagatcattcgggggcttgcgatctgctacctctctttcagaaataagattattttcctgtccttctttacagttggcacgtggcgcagaatttatgcaaatgtcccttgagaagctatgtgtatacaactgtgtgctttcagctgacttcttctgcggtgactggccacatctggatgatattcgcttatctgggtgcagaagctcggcgtccttgcatgttggtgatcttacctccctcgaatcattctcactatatcatttgccagatttatgcgcgctggaaggtttgtcttccctgcagcttcaccacgtgcatttgatagatgttccaaagcttactaccgagagcatctcacagttccgcgtccagcgttcgctctatattagcagttccgttatgctcaaccacatgctctccgctgaaggtttcgttgttccagggtttctctctcttgaaagctgcaaggagccatccgtttcattcgaagaatctgcaaacttcacatccgtcaagtgcctgaggttatgtaattgtgaaatgaggtcaccaccaggaaatatgaagtgcctatccagtctaacgaaactcgatatctatgactgccccaacatatcatctctaccagatctgccgtcctccctccagcatatatgtatatggggttgtgagctcttgaaggagagctgcagggcacctgatggagaaagctggccaaagattgcgcatatccgctggaaggaattcagatga

SEQ ID NO: 62424 - DNA, 459 bp, Oryza sativa
  Clone ID: PAT_MRT4530_63761C.1
gaaattaaactgatttattacttgttccatggaaaccaaaacactcggtgacccggcgaaaccgtttatgttaaaaaacaaaaacagaagccattgaccgaggcctagctcgccgttacaagacaggtgcacggagaaccagaacaccagcagagccatgcagtcgacacatcacaaggaaccggatgggttgcctttacaagggcggcaggatgcgcttggagacccctaggcctctacttggggctcaatgggtactctgactgatgtctctttgcggtcttcagcttgatgcggtggaccctcactaccttggtgcaaagattgatccttctgtctcgtgttcttgtaaatgcggcccttcctgatactggacaatcaaagagcgggtgtctaaaacggtctgggcttccaaaaccactggatcaatagctgtggttttgggggttgggaaagagg

SEQ ID NO: 62425 - DNA, 465 bp, Oryza sativa
  Clone ID: PAT_MRT4530_63762C.1
tttttgttttttttttttttttttttttttttttttttttttttttttttttttttggggggacccctttttttattccttcgttggggctcactaataaccaccacacgcacactcactcactcgctaactcactccctttttttttttttaacgcacacacaaggcacgtacatccatacacaacatcacgactttgttgttgccacggggggggcgtcctgcgcagaagcagcctaaaaaggggggggggccttttcccccgggctcacaaacaagcgaaaatgggatcgactaaaatcggcccagtggaggttccacccctttgagcccggatcctccaactttcccaaggcccttgggctaaatggctgggactgggccaccacatttgcccccgccccggactccagaaaccgggccttttccggggccccacggaaggccagagccgccttgaaaacc

SEQ ID NO: 62426 - DNA, 870 bp, Oryza sativa
  Clone ID: PAT_MRT4530_63763C.1
ggagagttcttggttggcttttcctcgacggagggagtagatgcaaacatcggcacaagccgcacgcagattgcatcagatctcagaaggcgccgacgattctagggtttttcccgcgccgtcgcgggtctctccccgtctcatcctccggcctcctccgccagttgccgtcctgatccacgccgccggcctcctccgccctcgccgcattctgggacgaggagtcctcctccccctgacgcctagtatcccgccgccggcagccgccctgctcctctcgccagatcccggccttctcccctgcagcaaagtgctagaatgggtcggaaggctggtgcgctgtacataaacccaaagaagtttggtggtggtgctaaaccctgcatgattgagatggtgtccttcctcaactgcttagctttgaacaagcagaatgatgacaagtgtgtcaggcagaaggatctcttggttgcttgtactcaggctcagaaagggaggccaaagaatgcaacgaagaccatcaattaccatcttcagcggcttgcgcgagacaagggcttgtagcttcccaaccatacggaatcatttcttcatcatgtctattgccttgtccagtctgcaagactcaaggcgttattttcttccaagtagccttgacgaaatgagtagtagggaaatggctagcatagaaataatttttacatgccagactgggaatatcaggacaatatcaatatgattgtcttattaaattgttattatttataaggcggtatacctccattttggttgatgtgtttgactgctgcatcatttgcatctctgcctataaattctgcagttctaacccaaaaaaaaaaaaaaaaaaaa

SEQ ID NO: 62427 - DNA, 347 bp, Oryza sativa
  Clone ID: PAT_MRT4530_63764C.1
agttctcgtgtgttttgcaatgaacttgtgaccttggacccccgcatctaatccctcctctgggtgagctcacatcgaaaacgcatacggccaagattaacatcgggatcaatggattccgggggatccggaggattgcggccagggcggtcctgcacagcgacgacctagagcccgtcgtccccaactacccatatgtcaccagaggagtacgagacatacaagcgccattgtgaccctggacgccgtcagcgaaaccatcgagacgttgaagaaaatgactccatcaccctcttataggtgaaagcgaaggaaccggaggccgctacggtcaaccctgtgagatc

SEQ ID NO: 62428 - DNA, 115 bp, Oryza sativa
  Clone ID: PAT_MRT4530_63765C.1
aggtcagggaaaaggcttacggggtggcacatgtactgtgatggggacagcacatggtgaaaaacgtgacagatgcaaacttcagaatatgagacggatagagatgtgccactag

SEQ ID NO: 62429 - DNA, 287 bp, Oryza sativa
  Clone ID: PAT_MRT4530_63766C.1
gaattcagtctacagatgcggtaaagcgtggatgttggatttgctagctttgttcataagacgataaggaagaaaaggttctattcaagtctgctaggaaggaattcaatttcgcttggcaagacgactgtggtgatatgagagaaggtggagcactgttgcaggtggagtcaagaggaggaagttacagggatagcagagtctcttgttacggtgagcctggtggaggcttattggggtagctcggtgtgagcggcgaaaaaggatcaactcaagtcttggtacat

SEQ ID NO: 62430 - DNA, 189 bp, Oryza sativa
  Clone ID: PAT_MRT4530_63767C.1
atgattgctgcacctccaaccccttaccatatcgccaaaacgaaagcagttgagggttatcgttatcgagcttaccacactggcccgatcaagcagctccgacttcacaacaaccaacaaatgctcgactgcgtcagcaagataaccacctctccatgggaccagggtttgcactttcgattgtggtga

SEQ ID NO: 62431 - DNA, 203 bp, Oryza sativa
  Clone ID: PAT_MRT4530_63768C.1
gcacgaggccacgaaggagactcttttctgcaagtgatgaacaatagagagacagaggaagagacccagtagagttgagagtgatgattaaattagttgctgaatcgtatcacaattagtatattgccgccatgttctctctttttttcccccaagtgcagagagaagtagtagtacactgtacacgatcacatgacatgaat

SEQ ID NO: 62432 - DNA, 328 bp, Oryza sativa
  Clone ID: PAT_MRT4530_63769C.1
gggggcccactaaaaatcattcattcattcatttgatcaaagcaaaccagacgagctttttttttgcgatcaaaaacacaaaggggcaaccccccagttaacacaaactagatagttccccacaaaactaacgattataaccatcggatgatgatgatgggagctcgattagatagatagaaaacttggccaagagggccccaccggttaattcctccagttcccgtcggagttgccccccccgcggttgcccaaacccccgccgtagccgccgacaccacgggcgccaccggaaccaccgccaccggcgtaaccccccgacccctgg

SEQ ID NO: 62433 - DNA, 291 bp, Oryza sativa
  Clone ID: PAT_MRT4530_6376C.1
atggccacagatatcacaagttgtaattacagtcttaaagatagagaaagagtaataaaaagggttaaaagatcagcggccttgatgggcaatggccctccggtgtcccccctcgcctgagtaggtaacaggccgagaagaggtatacctcggggatacgatgatcctggggctgtcatggcgccgctggtggctatagcagccttgaagaacatggggccagcaatgataagttcttggatggagagaagggcaggaacaatgaggtgtaatcccatggcagttggatga

SEQ ID NO: 62434 - DNA, 448 bp, Oryza sativa
  Clone ID: PAT_MRT4530_63770C.1
atggcggcgttttcgagcatcattttccctctcgaggacattgtcatgtcatccccttttcctctagtgggactgccgggtgaaaacccactcttggttctctttgagaccttgacggatagcggcggccagtccttcgttgctcctctccctggagatgtcgtcttggcaatcctcttcacaaacaaaccaggctcaacatcaacaacattctcgatcgtcctctccactgtcgtcaccctccagccacacctgctagatctggccatcaaggagaagaggaggcacactaagaatgacaagggtgatgattggtctttcatctggaactctgacaagtacacaaccaagagtcagcagtgctggcagtatttgggaattgtgtggaactctggtctcaatttctttcagatggtggttttggcccacattcagttcaaccagaagg

SEQ ID NO: 62435 - DNA, 1013 bp, Oryza sativa
  Clone ID: PAT_MRT4530_63771C.1
tttttttttttttttttttttaaatcaaacaaaccaacatacaatctcattaaactcgtaaccacatttcacacgacaaaggacctaccatgcaacatcaaaaacaccatataattaagaagactagaacaacaacaaacattgggcctaaacaaattaattcgacgacatatatgagatgagaggcactcatgcaagtgcagcatgcccctgcttattcccttctttaccaagcaggcaaaacaagctaattaccatgatcaaggctactacgaaaccgaaggattcgatggatgaatcgaatcgcggcaagaacgagctagccgcaggtggggatgcaggacttggagcacttggcggagcacttggtgtgcgccgacatggtgcaggtcttgccgcacatgagcctcttcttgtggcactcctccttggtcacgcagctcttcgacttctccgcctccttgccgccgccgccgcctccctccttgccgtgctcgttgccgccgccgccgccgctcttgtcgtccccctgcgtcgcgatgaggcggcccgccgtcttcgtcttcgcctcctgccgctccagcgccaccggcatcgccgcggcgcccgcgtcgccgccgccgtccttcttctgatcctcggccgccgacgccaccctcacgccggccgcggcagcttggcccgccgcgatggtggtggcggcggccaactcctcctccacattgtgcagcagctggtgggcgtcggtgtcggtgtcggcgtcggagtctgccaggaggatccgctcgttgtgcgtcgcctcctcgtgcgcgggctcctccgccgccgtggtggcggcgctggccgtgacgacggcgagcatgaggaggagcactgacactaccgcgaagctggagctgcaggagcgagacgacgacatggctgcctttattgactacgtttccttcttcgcgccttgggtggtgtggctgcgagaagctggggttgctgctcctatccgggtttatagctag

SEQ ID NO: 62436 - DNA, 461 bp, Oryza sativa
  unsure (1)..(461): unsure at all n locations
  Clone ID: PAT_MRT4530_63772C.1
cgcgcaattaccctcactaagggaacaaaagctggagctccaccgggngcggccgccctttttttttttttttttttgaccaaaatttcattttctttttctctcccctcgtcattaaaaaaaaggtttaaagacagaattacaagctaattaatcatcagtggatcgagaattaattaagggatcacaatggctgcaccccgctatttcggagtagctagctccagtgcactcactcatgcatgcaggcatgcatatacatgtcccttgccatgtcctatctaacaatttacacatttcgacaaaatgctcacggtcgatttggattgtgtcactgacattaattggttcatgcatccacgcatgcgttactctcaaggaaatatgaaagtatcatccgtaatcagggttccaaactaaggatagatacctttcagtttcgccgtctcactgcttcataa

SEQ ID NO: 62437 - DNA, 912 bp, Oryza sativa
  Clone ID: PAT_MRT4530_63773C.1
atgcagcacggcccacccgagttcaacgctctccctaatagaaaagatgctaatctacggactcgtgtggtaaggtcgcttatgataggcatcaccgacattcgctacttcaccgactcaacgatgtactccaccgaggacttcctcacgccatctctcaactgctatgtcaccaatgcctacatccgcattgacaaagtgactgcagtggcatccatagattcttcaatatatccgtcatataagaaatctgcttgtaaaattctaacgagtgctggagggacactcctccctcctctccccacgctcctctctcctcctctccctacacacagcgacgacgttggcgatggagacggcgacagcgttggcgcggtagaggaaccaacagcggcgtccctgctttccctcccctccatctctcagatccgtatgggaggaagccagaggtggtggcgcggcagagggagcggcgagggtgtcttcccctcccctccctctcttagatccggatgggaggcctgcagtggtggagcgtcagaaggagcggcggcgggatgggaggagtccgacggcggtggtgcggcggcggcgtccctgccttcccctcccctccctctctcagatctggatgggaggcctgtggcggtcacgcgtcagtgggagcggccgtgggatgggaggagtccaacggcggtgtccgtgccttcccctccccttcctctctcagatccggatgggaagggcagcggtggtgcatcagagggagcggcggcgggatgggaggagacggcggcgtgtggcttcgatgagaatagctcgtccacggtggcttcggcaacctccaatgtcactagcaatgacgatagacaacgtagatgtttgcatgctgaaaatgcagtgagaagttga

SEQ ID NO: 62438 - DNA, 336 bp, Oryza sativa
  Clone ID: PAT_MRT4530_63774C.1
atgcacacgcagcacgccggtcgtttccggccggtgaccatcaaaccatgcgaatggtgtggacgcatattcgttggtgcatctgcatacgtacgcatgcatgcctattcttctggagattatatatccaagctagacgacgacctgcagccggccggccggtgcaaacgtactcctgcgtacgagagatggtttgtagtctctgtcatcgagcccatggtcccttgcatcgctcatccatcggaaaagcaaaaaggaaaatgcgtcggtcgcttgagcatcgcgctcgtcctcccgccggcgtcgcgtgtggatcgggagtcctcccaacgacgg

SEQ ID NO: 62439 - DNA, 2424 bp, Oryza sativa
  Clone ID: PAT_MRT4530_63775C.1
atggagccagctagccaggtaggtacaggagcttggaagatgctgacctgcacacgatccaaaggaaggaatagatacttccaacatggggaggcgtcgccatttctgtctccggtacgaggcggcggcggagtcgccatttctgtctgcgaggaggaggcggcggcggcggcggcgcccgggctcggcaggggccacctgctcgacggaatgtcccggaggaccaccaccgcgcggtgggtgccgcgtgaccggccggagccggcggggaggtctggtaccggcgcgccgggtcgtgcatcccacgcgctcggccaaatgcctcggaggaggaccaccaccaccaccgcgcggtgggtgccgcgacaagggcagaagggggagcccggtggctcaggccacgccgccgcccccgtcgaccgactcagcgccctcccggacacgctcctgcaccacgtcatgtcgttcctcaaggcgtgggaggtggtgcgcacctgcgtgctctcccgccgctggcgcgacctctgggcctccgcgccgtgcgtcgacatccgcctgcggggctccggccgcgacggcgccccaccggaggacttcggcaggttcgtgtaccgcctgttgctggcgcgggaggtgtcggcccctgtggatacgctccggctacggtcgagcaacggggaagaatatgccgagacctatgacaatgatgatgtcaatatctggatatgttctgcaatcaaacgcaatgttcgagtcattcaccttaatgggcatcgcaaggatgaactggtgctggagcacactgcttttgtctctcaccacctcaagatcttgaagctgtcgcacatcaaacttgatggcaagatcctcaagcagctctcttctcagtgcacttctctggaagacctggagcttaacaactgtccagttaatggtggtgagattctgtctgtctcgctgaagaaactgacgatggtcaagtgctcgatcactatggacctctcgatctgtgctccaaaccttgagttgctatgctgcatcaccccatattatcatgttcccttgttcgaaaacctgagctcactggttgccgccactatcatgcttgatgactctttcttacgccgtgatgaattcctctatgaggttgaagaggaaaccagtgatgatgaggatgacaataagactacatcagatcattgtgatagtaaaatggatgctgatagtgatgcctatgatgatgatgacaacgatgacatcctatatgatgaatatctgaacagccgtcatggtaatttggttgatgattacaattatggctctgatattgacagcgatgacgatctacatgaatatagtcagatagcacatgaatgtagaggtggacggtatggctactgccatgacagcaaacggcgtgaggcagccggcggcggcgggatggaggtcgggcgcgggccggcgggatggaggccggtcgccggcggcctcaccctcccctcccccagatccggccggaggggaagcggcgggatgggtggctggccggcggcgggatgggaggccggccattttggtaagcgtgtatccgaaaaactaataggtgaagttgagaacatcgagtacagaacacagaagggtgctgtctactttttggtggaggggaatgcccatccaccggaagaagcaagcctcggactgaggtcgcagctcaaagcctcggaccactccgccgccgcgccggcgatctcctccggccacccgctcgacggaatgtcccggagaaacaccaccgggtggccggtgcctcgtggcggggcggagccgacggggaagccagggcccagcgcgccggtccgtgccgcccacgcgttcggccaaatgcctcggaggaggaccaccaccaccgcgcggtgggtgcggcgccaccaagtgcacaaggggaagccccgcggcgccgccaccgtcgaccgactcagcgccctcccggacgcgctcctgcaccacgtcatgtcgttcctcaaggcgtgggaggtggtgcgcacctgcgtgctctcgcgccgctggcgccacacctgggcctccgcgccgtgcgttgacatccgcgctccgagctctcgccgcgagcggggtcccggccgcgacagcgacccgccggaggacttcggcaggttcgtgtaccgcctgttgctggcgcgggaggtttccgcaccggttgacacgctccggctgcggtcgagcaacggggaggaatatgccgagatgtatgacaatgatgatgtcaacatgtggatctcttctgcgatcaaacgcaatgctcgagtcattcaccttaacgggcaccgcgaggacgacgacctggtgttggagcacactgcctttgtctctcaacgcctcaagatcttgaagctgtcgaacagctag

SEQ ID NO: 62440 - DNA, 300 bp, Oryza sativa
  Clone ID: PAT_MRT4530_63776C.1
atggagctggaggctgtggttgtttttccatggacactcctgtcgtgccccgctgttctcactgttgttgcgcgattgcctcgtcagatgtctccagtggtgaggcgcactacacaacccttcctaaggaaccggtctgaaaagttgagccgcacgttcttgctatggagcttgaaggtctcacggtcgtacgccatggcagcgtcctcggcggtgttgaaggtgtcgcgtgtggtaaagcttctgcggtggtggcaggaccgggagcagctttgtcgctctaacggtggcggcacatga

SEQ ID NO: 62441 - DNA, 811 bp, Oryza sativa
  unsure (1)..(811): unsure at all n locations
  Clone ID: PAT_MRT4530_63777C.1
nnntnnnnagtgttagaaaggacaattcaaatctttattatttgcagaaacagaaggatatgtaactatttacagaaatgttatataggagctaacattgcttaggatcattcatagatgcaggaatctacaatacaatcgtgcaaggacacattttggtagcttgtacacgttatgcaacgggaactagacatcgcttgctagtagacagtagcagctagtaacccatggagttgcagattaacagcattgctgatgatgtggatcatggccaaaaagatttttatcaaccggcggccgcttttttttttttttttttatcacaatacacacaaatatgatagtcctactactaactgtaataaaacagtatgagcaaatactctaggagtatttcaaatgtcaaacggtaaaaatttcactcaggccgagtttagatccaaactttttcttcaaactttcaatttttctatcacatcaaaacttttctacacacacaaactttcaacttttccgtcacatcgttccaatttcaaccaaacttccaattttgacgtgaactaaacacaccctcactccaaagatccaaggggacagacaaaacacaaaagtgcaacagcatcagcagcagtagaagtagaagtagaagaagaagataaccactgcaacagttgatcacctttctaccactagcagtaaaatctttgcaaaattccatccatttcttcatctaatcaagctgctgctacctccatagccatacctttcttcttcctccttttgcttttctttctctctttctttctttctt

SEQ ID NO: 62442 - DNA, 1101 bp, Oryza sativa
  Clone ID: PAT_MRT4530_63778C.1
atggcgcggcggggctgcgccgattctctggccgtcacggtcgtggaggcaagtggaggaagccgaggaggatgcaggcggcgtggtggtagggtgctcggcgccggcggcgtccactacctcaccgaggagcagcatgcatgtggctacatgtccgatgcggagcgccatcccggcggtggcttcgtcgttgactccgatgacgaggcaagtggcggcgtaccgaactccgatctgccccttggcagcgggtttgtccttgactccgaggatgaggtttgtggcggcgatcctgagtcggagctgcctcctgagggcacctttgtccctgactccgagggtgaggactgcgtcatccctgactccgaggaggaggcatgtggcggtggcctcgactccgagctacctcccgacagctgcgtcgtccctgattccgaggaggaggcgtgtggcgacgaccctgactccgagctgcctcccgacggctgtgtcgtccctgattccgaggaggaggcgtgtggtggtgaccccgactcccagctgcctcccgacagctgcgtcgtccctgattccgaggaggaggcgtgtggcggcgaccccgactccgagctgcctcccgacggctacgtcgtccctgattccgaggaggaggcgtgtggcggcgaccacgactccgagctgcctcccgacggctgcgtcatccctgactcaaaggacgaggcatgtggcagcgaccacgattctgagctgcctcccgatggtgtagctgctggagatgagggcgtcgacgaatttgctgaaattcgcgaaagaaactgcctccatgttgagatcaaaaggatgcaagttgagatcaagaaaaccttcatgttcctggccatcaactccaagaaggttatctccaaggataacagcagctcttccatcttcttccatatcagcttctccattgagatcagcggcgcggcggggcggaggcctcgcggcagcgcgccggcgggcggaggcctgggcagcctcgcggcggcgggcgatgtggcggggccacggcaggccgggcggcctcgtgacgggcggcgcgccagcggccgggcagtttga

SEQ ID NO: 62443 - DNA, 1392 bp, Oryza sativa
  Clone ID: PAT_MRT4530_63779C.1
atggcgcggcggggctgcgccgattctccggccgtcacggtcatggaggtaactgctcggcggggtagatgggctgtacgcaagcagagggctgtggaaatagatgccgactcacaacaggcaagtggaggaagccgaggaggatgcaggcggcgtggtggtagggtgctcggtgccggcggcgtccactacctcaccgaggagcagcatgcatgtggctatatgtccgatgcggagcgccatcccggcggtggcttcatcgttgactccgacgacgaggcaagtggaggtgtaccgaactccgatctgccccttggcagcgggtttgtccttgactccaaggacgagatttgtggcggtgaccctgagtcggagctgcctcccgagggcacctttgtccctgactccgagggtgaggagtacggtgtcgtccccaactccgagctgcctcccggcggcggctttgtccctgacttcgaggacgagacgtgtggtggtgaccccgactccccgctgcctcccaacggctgcgtcgtccttgactccgaggaggaggcatgtggcggcgaccccgactccgagctgcctcccgacggctgcgtcgtccctgattccgaggaggaggaggcgtgtggcggcgaccctgactccgagctgcctcccgacggctgtgtcgtccctgattccgaggatgaggcgtgtggcggcgaccctgactcccagctggctcccgacggttgcgtcgtccctgattccgaggaggaggcatgtggcggcgaccccgactccaagctgcctcctgacggctgcgtcgtccctgattccgaggaggaggcgtgtggcggcgaccctgactccgagctgcctcccgacggctgtgtcgtccctgattccgaggatgaggcgtgtggcggcgaccccgactctgagctgcctcctgacggctgcgtcatccctgactcagaggacgaggcgtgtggcggcgaccacgactccgagctgcctcccgacagtgtagctgctggagatgagggcgtcgacgaatttgctgaaatttgtgaaagaaactgcctccatgttgagatcaaaaggatgcaagttgagatcaagaaaacctccatgttcctggccatcaactccaagaaggttatctccaaggataacagcagctcttccatcttcttccatatcagcttgtccattgagatcagggggttaaaagtgtcagtcggccagatccggcggtggtggggccgggcacggcgggaggcctccacaaaggtgcaatgggttgcctccctacacggcgtgacaggcggcctccccacagccggcgcggtgggcggcctctcctccgtggcaggtggccttgatggtggtgcggtggggtag

SEQ ID NO: 62444 - DNA, 141 bp, Oryza sativa
  Clone ID: PAT_MRT4530_6377C.1
ggaaaaaaaggccaggcccttaaagtttgaaaaatcaaaacatgacaaatcccgatcaaaagctgcaaaaaggggatgatgacccgaaacctggatggatgctgcccaaaggccgggttcgcgtctttgcccgtttccacc

SEQ ID NO: 62445 - DNA, 158 bp, Oryza sativa
  unsure (1)..(158): unsure at all n locations
  Clone ID: PAT_MRT4530_63780C.1
agcgtcatccgggcgtgttcttcgggggggaggtgtggccttctacgcttcctcacgcccatatacaagatgaccgcggttacgagagactagactcagttgccaggccacagagcactgatctgatccgtgcctncatggtgaagggaacagctggt

SEQ ID NO: 62446 - DNA, 202 bp, Oryza sativa
  unsure (1)..(202): unsure at all n locations
  Clone ID: PAT_MRT4530_63781C.1
aaatttgaaagacaantttttttttatttanaacacccaaagtttcacaagncacaaatgatgatatctgagcttgtttttaacttccgaaccactacactgtaaaactcatnacaagcacgcaagggtggtaatggtactgggtgcaccatagtacctagggtagtaccatatctagatggcacgttaaagccacaggctg

SEQ ID NO: 62447 - DNA, 2165 bp, Oryza sativa
  Clone ID: PAT_MRT4530_63783C.1
acgagggcaccaaatggcaaagaaggcccaattcccaaccaccgccacctccctcctcctcgtcaagcattcaggctctcctatcccaaaatgctttgctttccaagcaagcacactccctctctgctttggagattagctctcgtttctcttagtagcagcagctggtgtggcagcatctcatctcatgatctctgattcttcacggctgctgctctcttcccatctcatctcacatttcccagggccacgaaagaactgggttgtactgaagtccaagcagagccacctaccttctcttgcttctctcatctcttgccacaattattggaccggaaattcatgaagatcctctgccggtgctagaacatggcagtctgggtatggcctgagcagtaaagatttgttcatctttgtttattgggatttcttctttgtcaccttcatccctttagactctcccctttagacctctagtgttgctgctgtgcttgtgtatccatggcggcaatggcctcttctccccctacaacaccaaatctcggttcgcagcctacatgggtgccctatgagccaaccagggattgctcccagggcctctgcagcatgtactgcccgcagtggtgctacttcatcttcccgccaccgccgccggccttcgacatcaccggctccagctccgacgactcctccggcccaaccttctcgccgctcgtcatcgccatcatcggggtgctcgcgagcgccttcctcctcgtcagctactacaccatcatatccaagtactgcggcaccttcagctccctccggaacagactccttggctccagcgctcaccgcggcagcggcggcggcgccgacggcggagacaattccaggagccaggagccgtggagcgtcgcgctgtcggacgggatggacgagacgctgatcaacaagatcacagtgtgcaagtacaggcgcggcgacggcttcgtggacagcacggactgctccgtctgcctcggcgagttccgcgaaggcgagagcctccggctgctgcccaagtgcagccacgccttccacgtcccgtgcatcgacacctggctcaagtcccactccaactgcccgctctgccgctgcaacatcgcgttcgtcaccgtcgggatggtctcgccggagccggaggcccgcgttccacgggaggataggagagacaaccacgagctggtcctgacaattgacaacccggagcatgtgcgcgaggagccacagaacgtggtgaccggtgtcgccgtcggcaacggcggccgcaaccacgaggcgaaggatggtccggggaggtcggaagatgcaaatggcacagctgagatcagagaagacggcgccttgatgccgcccacaagggcgccgtcgtcgttgtcagacacgcaccgtgaaggccggatgtccattgccgatgtcctgcaggcgagcctggaagacgagctgatggtggccagggagagcggcctcctggcaggctcttcggggtcctcaagacggtgtcacggggagcacagcaaggacggcggcggccgcagtggccgggcattgccggacggcgcgaatatgaagagattggcgccggccgggagatcatgcttcagcagcaggagtggcagaggaaaggactccgttcttccaatgtgaggcaaccaaggtggttcttttgacagggaaacatgacaagaaacttttgtgtgttcttccgtgtggagatcaaatgatcaatgtgccggctgcatctgcgatgcgcgtatggggatttcatcctgttttgatcacttcccgtgatgcccacatgctgaagaaatccttctcctgcaatgcatggtgagtggtgagatctcctacatgtttctactagataactgtatagggtttgagaagttttcctttttctttctttcttccatgttgccacccctctctatacaattgggatctgctccagagcagcctctctggattagtgagttaggcattactagatcaaagactctccaagtgagaagtgtgacactttcagttctttttccacctccaaaaaaaaaaaaatttgcctctgccgccgcccccgccccggtgtcattgtggcacaatttggggattgaatgagaaccgtggccaattcagcttgatcc

SEQ ID NO: 62448 - DNA, 903 bp, Oryza sativa
  Clone ID: PAT_MRT4530_63784C.1
atggcgcacctgagcaacctattcctcacgccaggggacttcattagggtgaccctctatcgccaatgctcttcattctcgctatggagcccttccactagattatcaaagcgactgaaagtgcttccattcttgcttcggttgaggccagatgcgccagagcttagcactctcctcaagattctaaatctctttgcacaagtgtcaggtctccatacaaatattggcaagatagaaatttatctcataagagacattggccttgcaactggatatgcggactttgcacctgcgcgttcgaggacaccaatgatctgttttgtgaatgcaacttcatcagagagacatattgccaatactgtaggaccaacagctggtgggattatgaatgcaacatgtgggaatgtacctgaattaatcattgcactgttcgctctgcataagaataagatggaaattctcaagtggtcactgttaggttccatcttatcaaatttgttacttgttcttggttcatcactcctctttggagggatcgttaatatcggcaaggagcgtccactagataagagacaagcagatgtaagcataggccttctgttgttgggtgttctttgtcatattgctaccctagtgtctaaatacacaagtagcaccggagatagcataaactcaagctcagttatgcaattatcaagatcatgcgctatagtaatgctaattgcttactttggaagcctcatgttccagttgaaaactcatcgtcaaatatttgagcttgaagagggggatgaaacccccgggaaaaagtcccgtacagggattttcccctgcaccaaccaatccccttccaccaccaggggaatcactcctgttagggaaattttccctgctaccatttga

SEQ ID NO: 62449 - DNA, 1060 bp, Oryza sativa
  Clone ID: PAT_MRT4530_63785C.1
gcacgaggcgggcgatccccggcgagcgtgagatcgaagcaagctgctacacagatctcacgacatggccgaggcggcgtcggcggcggcggcggcgacgacggagcaggcgaatgggagcagcggcggcgagcagaagacgcggcactcggaggtcggccacaagagcctcctcaagagcgacgatctctaccagtacatcctggagacgagcgtgtacccgcgcgagcacgagtgcatgaaggagctccgcgaggtcaccgccaaccacccatggaacctgatgacgacgtcggcggacgaggggcaattcctgaacctgctgctgaagctcatcggcgccaagaagaccatggagatcggcgtctacaccggctactccctcctcgccaccgccctcgccatccccgacgacggcacgatcttggcgatggacatcaaccgggagaactacgagctggggctcccgtcgatcgagaaggcgggagtggcgcacaagatcgacttccgggagggacccgcgctgccggtgctggaccagctggtggaggaggagggcaaccatgggtcgttcgacttcgtgttcgtcgacgccgacaaggacaactacctcaactaccacgagcggctgatgaagctggtcaaggtcggcggcctcgtcggctacgacaacacgctctggaacggctccgtcgtgctccccgccgacgcccccatgcgcaagtacatccgctactaccgcgacttcgtgctcgagctcaacaaggccctcgccgccgaccaccgcgtcgagatctgccagctccccgtcggcgacggcatcaccctctgccgccgcgtcaagtgagcccgccgccgccgcgagtgcgactccggccgatgcccaagaactagtcattttaaatttataaattataactaaattgtataatttttgccttttttttttaatttgcaagctactggaaaatgttatttaatatatgtataaatgtcgagacaataatattattgcattataaattgacctggtttttgttaagcttttaaaaaaaaaaaa

SEQ ID NO: 62450 - DNA, 402 bp, Oryza sativa
  Clone ID: PAT_MRT4530_63786C.1
agagaaagagagaaagggaccaaaagcagagctcaagtagtagtagtagagagagaaaattcagttgatctctctctctctctctatctctctctttctctcactagatctgtgtggcttgctttgctgttgccgttgttttgctttgccttgccttgcttgccgttgctggctgtgtcagtgtgccacccactcgctcacttgctcgctgtcttgctcttcgtctttcctcctctcgctgtagcagctagcaatgccacggcgtcgggcggaggcggaggcattgcaatgcggccgccggtgaagaagaagcttagcgccgcacaggcgagcgagctgtgccttcttcttggttgagactgattggtcgggatgttcaagtcggcgcggtggcgcggcggc

SEQ ID NO: 62451 - DNA, 434 bp, Oryza sativa
  Clone ID: PAT_MRT4530_63787C.1
ttttgtttttggtatattctggagatttatttattaatttttttcggtttcatagcatttgttgttttagggagaaaaaaaggcggagcgccttattgggaaagaattaaggacagagaggaagagaatagtgagggtttttctaccccaaaaggtgggagtttataggggcgggggacaaacaagagcgcgccagctagggagctttctgtttcggggtggcttttagaactattaaaccaaggcctcgcaaagggccaagagattaattccgggaagggtgaacttatgggagaattgttcggaaaggaaaaaccacggtaccccaaaaggggggggcatttgaaatagcatggtggactttatacttttcaagagggagaatggggctaggtggctcacctaagttatgggctacagaagctttaaggaca

SEQ ID NO: 62452 - DNA, 561 bp, Oryza sativa
  Clone ID: PAT_MRT4530_63788C.1
atggatcccgacgcggtgaagtcgacgctctccaacctggccttcggcaacgtcatggccgccgccgcccgcgactaccagaaggaaattgtagctaaagagaaagcccaagcagcaagtgcaagccatgatgaagttgatcttgacgaattattggatgacccagagcttgagaagttgcatgcggagagaattgctgctctcaagaaagaggtcgagaagcgtgaagtgctaaaaaggcaaggtcatggtgaatatagggagataactgaaggggacttcctaggagagaatgctccgttctttgtcacgaaactgggaatcaaaacattgccctgtgtgatactgttcaagaagggcattgctgctgatcggttaattgggtttcaagacctcggcagcaaagatgatttttcaacaagagcattggaaaatatactcaagatgaaaggtataattgacgaaaagaagaaggatgaggatgatgaagatgatgaaacctatatgtcaatgaacaggagggtcagatcttcaaccgctcaagattctgattctgattga

SEQ ID NO: 62453 - DNA, 279 bp, Oryza sativa
  Clone ID: PAT_MRT4530_63789C.1
atgccgccggggaaggagcagcagcgcacgtcgcggagaatcggccacagcagcaacgcgtcgtcatcgtcgcagaaatcaattcgggggacacaaattcacgttccagattgctatattcacaagccagtctaccaggagcttctgcacggagatcaacttcgttttacgcacccagagtgtttcgcgtttctgctagggtttgacaaattgtaccagcagattcaggattttatttttaaggcgagtttgaagtttgatctactgcttctggattga

SEQ ID NO: 62454 - DNA, 577 bp, Oryza sativa
  Clone ID: PAT_MRT4530_6378C.1
aacctctgcagagggggtacactttacccacacgacgttactagccttggtcacccagcccgcatttccaaagccgacacagggttgccatatgccaatgagaggggtcccagaccaacaacatgttaggtcccagacaatactgtgccaggaagtctaggggtcctccccggcaccaccccggtgaatccacttgtctcttggcatcaaggcttccctggcctagctagttactcaaccaagagtgtcccattccatccatgtggtcgcacttgttatatgctcggatgtccaagggaatcggtccttagaagcgaccgcacaagcattccccccagattttaagtttgaaggcaaccgtcgatactcacacagtgtgtctgaattccgaggcgcaaccaggtggttacaagggaaacatgtggcttgccttgctcagggtcttgatcttcacgaatcttcaagaaatctgcttcacgaaaaatatccggtaaccacaactaggcgcaaacagtcaaaaacctaaacaatgaccaaataaaatatcctatttaggctaatttatagtgccactaga

SEQ ID NO: 62455 - DNA, 1780 bp, Oryza sativa
  Clone ID: PAT_MRT4530_63790C.1
gcacaatcgtgcgaggctcgcctaaaaaaaaaaggaaagaaaaaagaaaaccgtgcggcgccgctcgtccgcccgccgctagcgccgacgtcacctctctcggccactggtgctccggtgcgagctgctctgcgcggcgccgccacctgaatcggatcggaggggaggagatctcggccgagcagaagcggcggcggcggtgctcgcggaggagggagtagcagcagcagcagcatcgcaaagagggggaggaacagccatggatcccgacgcggtgaagtcgacgctctccaacctggccttcggcaacgtcatggccgccgccgcccgcgactaccagaaggtccggtgcgagctgctctgcgcggcgccaaattgtagctaaagagaaagcccaagcagcaagtgcaagccatgatgaagttgatcttgacgaattattggatgacccagagcttgagaagttgcatgcggagagaattgctgctctcaagaaagaggtcgagaagcgtgaagtgctaaaaaggcaaggtcatggtgaatatagggagataactgaaggggacttcctaggagaggtcactggcagtgaaaaagtcatctgccatttctaccttgatgctcgtccgacgttggtcctgtattgtactgttcacgaaggacattgctgttgatcggttaatggggtttcaagacctcgcagccaaaatgatttttcaacaagagcattggaaaatatactcaagatgaaaggtataattgacgaaaagaagaaggatgaggatgatgaagatgatgaaacctatatgtcaatgaacaggagggtcagatcttcaaccgctcaagattctgattctgattgagtatgaagtgttccactcccctgtaacatcaagtttcttttgtactctagttctcaaaatatctctgtgtttgtgtaatatgtattccgaatattatcaacctggttaggaaatgagtgacttgaaaatgtactgcctagttagctgcatttcattcatactggcaagtaggcgtatgtgttatcagttggtatgctttacccataacagtatctacaaaggagtttctactagctcctacgttggtcatcatgctgccaaattactggagtaaactagtgtttcagctagaatgcttgattggtgactagtaccatctgtaaccaattcactgtgaaccattacagttgcagttgatcaattggatttagttctctcaaaaaaaaaaaaaaatgttttatgattgaccctgatgataattcatggacacctatctaaatgtttcctaggatcatggataagcatttgaaggcccttgcaccaatctatttgggaactaaattcatcaagcttgatgctgaaaatgctccgttctttgtcacgaaactgggaatcaaaacattgccctgtgtgatactgttcaagaagggcattgctgctgatcggttaattgggtttcaagacctcggcagcaaagatgatttttcaacaagagcattggaaaatatactcaagatgaaaggtataattgacgaaaagaagaaggatgaggatgatgaagatgatgaaacctatatgtcaatgaacaggagggtcagatcttcaaccgctcaagattctgattctgattgagtatgaagtgttccactcccctgtaacatcaagtttcttttgtactctagttctcaaaatatctctgtgtttgtgtaatatgtattccgaagtattatcaacctggttaggaaatgagtgacttg

SEQ ID NO: 62456 - DNA, 827 bp, Oryza sativa
  unsure (1)..(827): unsure at all n locations
  Clone ID: PAT_MRT4530_63791C.1
ttttttttttttagcntttanaaagttatctnaagatataaacaatttatccacatacatttttccatttaatttcggtgtaaccttcttaagnccatatcctacccaaaacttatatttgggatggtacatgaagtggtctgctttttttttttttttttagcagaatccagttgcttcatagtaataaattgcttttccatttttcacttcatggtattggccatattactaaggtctacactagttctacagtcaaggtaaagttacaagaattacttgtcagtaactaaaagtaatatcagcgcaacatcgcaaaaagaaaaggtactaaacatgtcgctcgcaaactacaacttactgaaaagatcctccatgtgttaactgtgaactgtaaccaaaaacacctttacatgattaattgagccatatccatgctacctgaaccaccatctcatgccagcatttatcgggtcatgaagaaaaggagtgtagcgatggatatagggattaactgtacggccaattttaagccagatagctctgtgataaccggcagtgaaaggagagtgatacatgagcttcagtaactgccagtacatgaacgtttgcataggattgcgttgtcgcgagaacagagacaaaatcaaaagaaatcccaacaaaatctccgcatttgaactcaggaatttgactgcagttgtgtttgtctcaacccatgtgcaaggtttctccagatatgtcctgtatagagaggaattagtaaaatggcgccgtagaaatctggccacatgttcaagtgcccagcaaatcactggtaccaaaac

SEQ ID NO: 62457 - DNA, 504 bp, Oryza sativa
  Clone ID: PAT_MRT4530_63792C.1
acaacacggcctgaagaaacaatacaaacatggtgggtggagtagagggcccatatgaacatgcataaaaacaccaaaacggaatatgaccattaagccgagactaacctatactggtgaggacatcaccgagagcacatgggacaacgtgaagaacaaaacacacaatgagggctcaagaccggggctgaaagggcaaccccgaaactggagcaaaaaagctagccggagaggccaccaaaggcctgcacaggcaacaagggctcggagggaacaacggtttgaaggcccacgggcatgcaagaggacctaacggtagagaagggccagacgaacgggcatagatgcatagccttgagcgcaaggaggattagaacctgcacagccacggactacaaacccgccgccgaggctgcagatggagccctttcaacgtagaagctgtcccttatcgggacgcaaccaaacctccacagcgccgagatgaggcaaccatggatgaca

SEQ ID NO: 62458 - DNA, 417 bp, Oryza sativa
  Clone ID: PAT_MRT4530_63793C.1
atgttgagattccctcctattgttcagcacctagggtataggcacattggtcaagtacagcagcatgacaggagatgggcagcggagcgaggcagcggagacaacgtcgacgatggcgacagggactgcggcagcggcagatggggaggacgtcggctccggccgcggccgatggggaagaggccggccgcggcggtggggaagaaggaggaggtggcggcggcggcggtggagaagaagcaggatccggcggcggcgtctccggcgaggatgcggcggagcggcgacagagctcctgcgaggatgtggcttcagtacacatggggaggaggaggagaagcgagcgaagtctgcgcgcgtggaggagcgaagtcttcgcatcctgcggtgggaacgaaatcgtgcggtggtgaatga

SEQ ID NO: 62459 - DNA, 486 bp, Oryza sativa
  Clone ID: PAT_MRT4530_63794C.1
atgttgagattccctcctgttgttcagcacctagggtataggcacattggccaagtacagcagcatgacaggagatgggcagcggagcgtggcagcagagacaacgtcgacgatggcgacagggactgtggcagcgtcggatggggaggacgtcggctccggctgcggccgatggggaagaggccggccgcggcggtggggaagaaggaggaggcggcggcggcggcggatggggctgaggtcggctccggccgcggcggtggagaagaagcaggatccggcggcggcgtctccggcgaggatgcggcggagcggcgacagaggtcctgcgaggatgtggcttcagtacacatggggaggaggaggagaagcgagcgaagtctgcgcgcgtggaggagcgaagtcttcgcatcctgcggtgggaaacgaaatcgtgcggtggtgaatgaaatcgcgcggatggacagtagggattcatcccagtaa

SEQ ID NO: 62460 - DNA, 1803 bp, Oryza sativa
  Clone ID: PAT_MRT4530_63795C.1
gggccccccctcgagttttttttttttttttttttttttttttctgctgaatgaatttattccagcttcggaacttccaaggctgtttgcaacaatccatcagaaatcttacattttgccagacaaccttcgttgtccggacaaattacacttctgatgaatgtatttgtttccagcttccaagactatttgtgacaaatgtaaaacccagtatcagcatgggtaacaaacacattggaaactaactaacaccaagatgctacagagctacatttacatttacatataaaccagaggaaccccaggacctgttggcagcaactaacaggtcctcatttaggctgtaatctttgtactcagccaaagcaccttggatcttcagagagcttgaatgatcatatttccaactttcaagttccaacttccaaggctatttacttcgggtaaccaatgtatatccagtataacttttccccttcggctgcatggacatttaaaattagcttaggtcaagatgccaaaagctaaatttacaataaccaggaacccatgatttgcttggcttcaaattgcattcaaaggtaggagtatgctccatatctactttggatatattatatgccttggtcaggcaatgtcaccaaatcaatcaccaagtgatcgcatcccttcataaatcacaccaggacgaaggtcatccagagtatcggcgattctgtagcctgaatactccctgaggagtgtccaaccacgccgcgagagaaagtctcggaagtcctcttcagtgtagaatgtcttgtcttctgtccggacctcatcattttcgaacatatatagtttgatggtcattccggtatcgagatgaagggtgtatgttccaaccggcatatccctgtctaaggaacggacaacctcatcctcatcttcaagccaaaaggcccgtcttgttcttagaccaaatgccgatttgatggcttctttaattgcgtctgcagtaccatcaatgcctattcttttagtgtaatcaccccacttgactaaaatgactctcccaccaaaagtaacctgattatctccaccattggtagaggtgtctctccagttccatggatttacaccattggttgcaactgcatcagctgttaatgcaagtggatgactatcaggttctagtcgatcttcgacacttagcaatgatctaccacttgcttcaacagggccgaacggaatgctagcatcttcaaaacccttgtcgaactgcaggtaggagtcgatcttggaggtgaccgtggggctcttgacggcgccactccccacggcggcgccgccaccgcccgtcggcttcccgcggcgcttgagcaggtcgtcgatctccttgtagcacgccatcttggcggggcaattcccgccgccggtgcccgcgccgccgccgcccacgccaccaccgcccccgccccgcgcgtggctgcgcgccttcttgaactccttgaggaggttcctccacttgtcggtgcacatggtcggggagcggtcgaacccttgctcccgcatcctggccgagatggcctcccagaggtgcttattggacttggaggtgttgaagtgggagtccatctcccggcgcagcgcgatgaggcagagggtctcgtcctggacccacgtctccgcgcgcttcttggggccgccgccgccgcccgacgccgccgcgcgggaggaggagtcgtggccgccgtcctcgccgctgctctccgggaggagcagcggcggggtgggctgctgcggcgacggcccggagaggagcat

SEQ ID NO: 62461 - DNA, 971 bp, Oryza sativa
  Clone ID: PAT_MRT4530_63796C.1
ggcgtggctgcggcaagacgaggaggaagaagtagaagagaaagaagaggaggaggaggaggccgatgacgaggtgcagatgtaccgggcggcccggtgccgcgcgccgggcgacgtggacgcgctcaagtgcgcgctgttcgccaagatgaggcgcgcggagtggggcggcgcgctggggttcgcgcggcggctgcgggaggcggagcccggcgaggtggagtggcggctcatggaggcgctgctgcacgagctcaaaggcgacctcgccgaggccgagcgcctcttcaacgaggtcctcgccgagaagccactcctcgtcagggcactccatggacttgctctgtgtatgcataaaagatcagaaggacctactgtttttgagatgctggagaaagctttgcaacttgcaatttctggggaaagggttccagaagagcgcaacattaagcttttgattgctcagatgcatgttgtcaagggccagttggatgtttgcatcagagaaactgcaaaatcttatcaatgaggatcctcgagatttccgacctcatctttgccagggcatcgtttacgcacttttagacaaaaaggaagaagcagatgagctgtttgatacatatagaagtcttgttccagatgaatttccagaccaagaagttttattagtgatgttatacaagcagccagagtggggtccaaggaccggctacaaaaggattttggatctgaatttttatctaagaagtgactaatcaggatttttctacacctgaacggctaatagtttttgtagtggtaggtagctgcatattgatgtgcacacaagtgcaaaaatgttacaagtgaattgaaataaatagtgagaaatggaaggagatgtgtatctcctaccaccaattttctcctaacattgaaataaaatagagataaatggagatgtgtttctcccattaaaaaaaaaaaaaaaa

SEQ ID NO: 62462 - DNA, 114 bp, Oryza sativa
  Clone ID: PAT_MRT4530_63797C.1
atggcgacgtcagccagtgcaccggcgaggaacagtggacggccagagggttcgggatactggacaccgctccggctttacgacgcgtcggacgccgacgagtgcctagcctag

SEQ ID NO: 62463 - DNA, 650 bp, Oryza sativa
  Clone ID: PAT_MRT4530_63798C.1
cttcgggtccggcgtgcccgcacgcgcgggcgcctccggactcgcgctcgcacgggccccgcccccccgtccgcgtctcctcctccgcgccgccgtcacggtgaccggatcggaaggagaactgtgtcgcctctcccccgcccgggcggccggccccaggctcgccgtcgccggcgtcgagctaggcagagcttatagttggttcttgatttctcccgttgctgggaaggagatgaacctgcaacatctgcatgaacagctcagagcactagattagcagaagattaattagttagctgatcagtagttgtagcactagcttagctagttcaatcaaaaggctctgtgcttgtctgatctgtccattccagtcactgatgctgctgctgttcaatcaaggctcgatgtgtaattagcagcagcagataagcagattagttagctgattaattgtagtggcagcagctagttcaatcaaggctcgatttatgtgattatgtctctctgacctgttcatgccagccactgatgctgctgctgttgaattgcttgcccagcttgatccaacctcactgtcaaaagtggagaaatgaaacaaactgtgaacatgtactgtgttcatctatcagcaacatctcttaattttgagc

SEQ ID NO: 62464 - DNA, 1698 bp, Oryza sativa
  Clone ID: PAT_MRT4530_63799C.1
atggcgtctcgtgctcctcctcttctcctcctgctgatcgtgctctctctcgtcgtcttagcagcattgctcgccgccgccgccgccgatgcatccgcagtggccggaggcggcaggagctcgccgtcgacgacgacgttcgtgctcgccggggagcggacgcggcggaaggatcctctcgatgggctgaggctctactccggcgggtggaacatcagcgacgagcactactgggcctcggtcgggttcacggtggcgccggtgttcgccgcggccgcgatctggttcgtcgtgttcggcgtctcgctcttcctcgccggctgctgcttctgctgctgccccggcagcagccgcggcggcggcggctcgtactcctgcacggcgctggtcgtctcccttgtcctcctcctcgccttcaccgccgccgccgccgtggggtgcggcgtgctgtacgacgggcaggggcggttcgacgggagcacggcggcgacggtggagtacgtggcggggaagtccggcgacgcggtggcgagcctgaggggattcgcgagctccatggaggcggccaaggcggccggcgtggggcccgtgtcgctgccggccagcgtcaaggggagcatcgacggcgtcgtgcgcaagatgagctccgccgccgacgagctcgcggcgcgcatggcgagcaacgccgccaagatccgagacgccttggagacaataaggaagattttgattgttgttgctgccacgatgttgatcctagctgttcttgggctcggttggtgtttcttgggtggattctggttgcagcaacgcttttgctctgtggcaccttccttctgctacacaagtgtagaagttgttatattgtgggataaattttttgagggctgctacaaaacagggtcctgttgcaacggaatagacatattaactattctcttgcacgagtatcacagcgtggtgggtgacacctgcgccgccatgggcgagtgggtgcagcgcccgcaggcgcgcacggcgctcgacgacatcctcccctgcgtcgacacggcggcggccgcggacgcgctggcgcggagcaaggacgtgacgcaccacctcgtcaccgtcctcaacggcgtcatcgccaacgtctccaacgccgccgccgccggcctcccgccgccgctctactacaaccagtccggcccgccggtgccgctgctgtgcagccccggcgaacgctgcgaccccggcgaggtcgacctcgccgccgcgccgcgcgcgtggcgcgaacgcgtgtgccgcaccacccgcgccgcggcggcggcgccggaggtgtgcgccaccgtcgggcgcctcacgccggcgatgtacgcgcagatggtggcggcggcgagcgcgtgcgacgcgctgtcgcggtacgggccggtgctcgccgacatggcggactgcgcgttcgtccggcgcgcgttccgggtggtcggcgacgagcactgcccggggctcggcaggcacagcgcggaggtgtaccggggcttgctcgccgtcgccgtcgccgcgctggcgtcggtggtgctgtgggtggcgcactcgagggagaggcggcggcggcgcgacgccgtggagctcagggcggcggcgtcgccgtacacggtgcatcactctcatttggaggaaggagcgctcttgaagagccccagaatgatgtacagatag

SEQ ID NO: 62465 - DNA, 2079 bp, Oryza sativa
  Clone ID: PAT_MRT4530_6379C.1
atgacggccgggtccaccgccagcggcagagcctcaaatcctggagaagccacgctacacatctcggctgcagctgcaggtggaggcgatggaaagcaaaccatcgatttcggcaaggtgcttgtccggatccaggagtcgctcgtagtgttgaatcgggctcaggttgagacacaagctgccatcgtcaagctggatctaggcatgaacaactggaggccacaagtggaggaggccgtgcaggagctgcgagaggaggtcggcgaacttcgtcagcaagttgatctcctcggcaaggcggtgcaaacttctacggcggcatcttcccctcgagttccgttgacggatgaggaaaggaaggcgtcgctgcttcccacgcccgcttcgccgacgaaggagacgactgcagcgggaggagcagagaagtgggccaatggccaccgcgcaccacaaaatttccggggaagggcatcgggggtggtcacatccctggtcctgactccgatcaagagtacgtacgatgccaccccctctcatcttaattttgctgggaattgggagagtggtgagggaaattttgggacgcaattttgggaaaagtccttcaatcatcgaatgcctaagttggattttccgatttttgatggttcggacccacaggattggcgtatgaaatgcgagcattattttgatgtttgcgatacatctccaaatccgtggttaggcacagttcaggagtattatgagaaatttgatgaattagccaatcagctcttggtttatgacctagcggctaatgatagatatttcactcataagttcaccaatgggttaagaaaagagattcggggtgcagttatacttcatcggcctcgcgacctcgagactgcttttgttcttgcttcattacaagaagaggagatggctaagagtccgactgatttcaagcgttatgatggtggtgcacctactcgagctcaggtcaaaagagcttatcctttgccgttgccaccaccccgaccatctggtagtattgaagctaaatctgatggagtcaaggctgtaccatcccctgacaaaatggctactcttcgtgcttaccgcaaggctcaaggattgtgttatatctgtgcaaagaaatggtctcacaatcataaatgtgctaattctgtgcaactgcatgcggttcaggaggtgtttgcccatttgcaggatccccaggacagtgtttcagctgatatcttagatgtcgagagccctgcacggtcagaattaatggttgtctctttacttgcattacaaggggtggaatctgtgggaactatgcgaattctgggctatgttcaaggttttgaggtgctgattttggtcgattcgggtagttcggtcagcttcattagtagcaaattggctactggattatcaggactgcattctcttccaactccactgaaagtgcaggtggctagtggtggtgtcttacactgtgattcgattgtgactcaatgtgaatggttcacgcagggatacacttttcgcactgacttgcgtgtgcttcccttgaccagttttgatatgatcttaggcattgattggttagctacccatagtccaatgacagttgattggtgtaacagagttctaactatcagtgctcacaggcagtccatcactctgtgtggaatcaaaccagcagtaaatacttgtgctttagccactcctagacagatgcaagcatttggagatcgtcatgcagtggcccatctagtgcaactgtgtgaattgtcaacaccagttacagtcgagcaaattcctgaagtggtccagaaggtattgcaagattatgcaactgtcttcgataagcctactggtttgcctccttcgcgaccatatgatcacaccattcccttgattcatggtgctcaaccagtgaatgtgcgaccatataggtacacacctgctcagaaggatgagattgaatctcaagttcaggatattctcactaagggaataattcggcctagtgccagtccattctcttctccagtgcttttagtcaagaagaaggatgggtcgtag

SEQ ID NO: 62466 - DNA, 506 bp, Oryza sativa
  Clone ID: PAT_MRT4530_637C.1
gttgttttttttttttttttttttttttttttttttttttttttttttttttttttttttttttttttttaacagccttttcttttttcaacatgtaaaaaaacaaatgttcccacaaaccatggttagtaaaaacaatgaacaggggggggagcggggggaccaaccaccccccagcccaccgaccagtggcccaaccccccatagccggaccccaaccttccggacaaccagctgtaccaaaactaagtctaattatagccaggcgtattaacggtgagaactgtttagggggtaaaattgtcctccgctaacaatgccacaaaccaaaagagcccaaaaccataaagcctaaagcctgagctgccaaacaagagagcccccaaacataaagggcactgccctaactgccaacttgccaaccgacaaaccttaattgccagatccattaatgactcgtgcaacaatgaaaaagaggcgccacggggataggcctccagaccagt

SEQ ID NO: 62467 - DNA, 198 bp, Oryza sativa
  Clone ID: PAT_MRT4530_63800C.1
atggcgcacattcgcaggttgcaaaaaggaaatcaatcagatcaagtatcactgtatcagttggactccacgctgccagccgcggcggcgcagcgcgcgacggccggcatgcaacagcgcggatgcatgttcacatcggcgacggcgacgcatgagagcgacccactcggcggcggcgcaagtgggataactgactga

SEQ ID NO: 62468 - DNA, 218 bp, Oryza sativa
  Clone ID: PAT_MRT4530_63801C.1
acttttacatcgatacacgcagtgcatccttgcggggacgggttgattacattggtgtggcagagataatggctgctgttcatactagcgcatggattgggcatgatttacatagcgagaaaacggtgactgaaagaatgcgcgcccagactccactttgtgaagttgaccacgattatggctccaatgttgagagaaaaaaagtgcgagggcttata

SEQ ID NO: 62469 - DNA, 1007 bp, Oryza sativa
  Clone ID: PAT_MRT4530_63802C.1
ttttttttttttcgtcggtaaaaaaagttaatagagaccttaatcgagaatttgtaaagtttactatataaaatgaggaatgatggtgaatatttcttctgaatctacatgtacaaagaatacacaaaagtaaatcatagttcatcataaataggaggagcaggagcaggagcagcaggtgctgggacaggcaacatgtgggcccatgggattggttgaccccacatgagcaatttgattgctctcttcagtgtaccatccatttgaaatttgagcaagacaagaagcttcactcttttacttttgccttttaagatgaagagcgaaagattggtggaagatacttacctatcaagaacatcttgccgttgcattgtagatagcaaaccacgagtacgcatcagcaaagagcggtgtccttgatattcaccttcagccttacgaagaacacttgttgattcatcaaatgttgccaaggtatttgcacttctttccacttcctggaccatcaactggcgagatcggcggaggctctcggttatactttctgcagccgatgtcatcccagcctttgtctgtagattacgcctgcggatggtagattcttctccaccccctagaagaagctccctctcttcttgagcagcttttttaatgtttgcatttgcttgtaagttagcatttctcagcctcatgcgcagcttctgatactgttccttccatgactgcagggttgcttggccagactgtacttcttcaaaagtgggtagctgctctgccagaggatcaagtctgcactgtagtgaattgagcaattgcagtgcatcctgtgcagaaccgtttaacctaggaagtgaacttgcttcctctgtcccctttcccatcttcccacatgattcaattgcagcaatgcacccttcaagctgtgcaacagcttgattccattcctcctttaggttctcaacagcttgagtcaccttatccatcctaatatctgaatggaccat

SEQ ID NO: 62470 - DNA, 409 bp, Oryza sativa
  unsure (1)..(409): unsure at all n locations
  Clone ID: PAT_MRT4530_63803C.1
gngggacnggnccccccntctgtggctgcccacggtgcctnggacngncnntgtgaacnggtngggtgctgtgtngcngaacatgcacntcaangttcagntangtccntccntccgtccattccgttgtgtangtggatgnntggcnatgtctgacgcctgactgcantggacggcngncgcaaggntaggcntccctgggatcctccacctgaggggacngggctcgcgcgncgactctactcctccnnctnctccctcctcttcgacgacacccanggagnangttcaatggagagctgttcacaagttcgcgtaggagaccatctgcccgnacgncnncgncaatcgacngctccaaccatttccccaaggacnncaaaccttcttggnagntcatngcnttttn

SEQ ID NO: 62471 - DNA, 223 bp, Oryza sativa
  Clone ID: PAT_MRT4530_63804C.1
cagttaagtgcaaactatttaactccgagactatgacacaaagcgtatgataaaaaccatgttaagctacgtaaatatagtctccacatgaacacacacatgttacattattacatgatctacaaatgcaacaatcctacatgcacttacaaactaaaaatttacttgcacaagatcggaccatatacacctgcctgtaaatacactaccaagataacctact

SEQ ID NO: 62472 - DNA, 998 bp, Oryza sativa
  Clone ID: PAT_MRT4530_63805C.1
gcacgagggtacaggcaagtctgaaaactaaataagggtaaaaccgtcttttctcctctagttaacaccatcaagtgtataaaactaatggacagtgctacataggggggggaaattttgagggtgcatagatagagaacttttgaaggttgggtgctagacgatagaagaacaactttttttttatgctacatagggaattttctctacaatatatcagttcgcgaggggtacggcgacggagatagtggcaggcccgctcattggaggacagcacctcaccatcgtcagagctcatcgctgctgcccagctcctcctactctctaggtcagcccaaacggatgatcatcggctctgggttctctattcggaggcaaatgctggccaacattcaaagattcatctgctcgatttggagtacgaaaccacctcgccatcacaggcatactgcctgccatgtggacttcgattataaatctacctcgccatcgcgcccatactgttcggtgtggtgtcgatgctcctgttgagaagtagcgcaattggttggttgcttacttaggcttaatattgggttaatgtagatatgaccctatggccttttattgtctttattttaaaatatatatatatattctgaaatacaggaagtatattttgtcccaaactaaatacatcacagtaacagcatggttgccttttttcttagattattttttcttcaactcaacattagggaactacctgtgggtattaaaattttacactaataattaaataagtcaacttataaagcgattcatataaggatgtaatctaactcaatttatttaaagattgttttgtgttgctcaaacctacaattatgatgcattaataattttgtacaagatcatcggcttcatgatatacacttatgtaagacttgtacatatcaatgtagtttttaagacatttatgaactgggttttgaaacaatcatgttttcaaattatca

SEQ ID NO: 62473 - DNA, 258 bp, Oryza sativa
  Clone ID: PAT_MRT4530_63806C.1
atggcgcgcctcgcgatgaccgtgcggcgcgcgatgcagggacagagggcggtgggtgacacgatggcacactcgtctaggagtggcgaccagcgcgaaggtggagtagcggccggcacggcttgcggcgaccgtgcggcgcgttgtgggcggccggcgcgcgacgcgggggcgcactcgtgcaggagcggcggagtgacgggccaccgcgaaggtggagtagcggacgacgcggctcgcggcaaccgtgcggcgtga

SEQ ID NO: 62474 - DNA, 207 bp, Oryza sativa
  Clone ID: PAT_MRT4530_63807C.1
ttaaataggcgaggtaaaggaggaagagtaggaggaggaatccagcgggtcgggtctcgtgtatcgcgccgcctcgcttccttccggccgcggctcgtcacgcttctcggcctcctccgggaggtgcgtgtgctgctgctccactgctcttcttctctgcttggattcatgtcctgttcgtgtggactctgccttcgcttctcccat

SEQ ID NO: 62475 - DNA, 2965 bp, Oryza sativa
  Clone ID: PAT_MRT4530_63808C.1
atgcgccgcccgcggagccgcggcgcggcgaagcagacgcgcctccgggaggccgacgagatccggttactcgaggcctggatcgacgccggcaagcccgcccggggcaccaggccgcctcccctctccaagtcctcctcctcgcccgccgacaccgccgccgccaagcggggagccaagggggccggaggggtccccagcaaggcggccggcgagcacccggagtacggcgcctgcgcgcggttcgacgagctgccgctgtcgaataagaccaaggacgggctgcggaaggccgggtacacggagatgagcgagatccagcgcgccgcgctgccccacgcgctctgcggccgcgacgtgctcggcgccgccaagaccggctccggcaagacccttgccttcgtcatcccggtcttgatgagtgccgccacccttaaccttggttcctccttggaacaagaagaagccagtgagtgcatccactgcttagccgaggttgtgtcgaagttccccgtgaagccctttgcagctgcaactctctgccaggtctgtttgatgaatgtgcaatggcagaaaaggggctttccattgcctcccagggcctactttgatcctgccatcttagccacagccatcttagtcttagggcggaggacccactttggagccggcagtgcagtgagaaagtggataggtactgaggaaagtaccgacttgatcaaggtttctcttccaggctttacaaagagtgcaacatcatcagcatacatagaaactctgcagtggagcggtcccgacggcagagaggataacagtatttgtttcatattgactggcaagctcaaattattttccaaggctttagagaagctgtacagagagagatggggtcccgaggatggtgtgggttgcattgttctttctcccaataaggatttagctgggcaaatttttaatgttttccagaaggtagggaagcttcatggcttcagtgctgcttgtattgttggtaatcgcaaaggtcttgatgaagagaaggcagtcataaacaacatgaatatcttagtatgcacgcctgggcggttacttcaacacatgggcgagaccacaaactttgattgctcacagatccagattttggtgattgatgaggcagatcaagttcttgataaaaatttccaagagcaagttgacaatgttgtttctcagcttcccaaagttagacaaacattgctgttctctgccacacaaacaaaatcagttaaggaccttgcaagggttagcctgaaggatcctgaatatataagtgtgcatgaggaggctacaacagctactcctgatacccttgagcagtatgccatgattgtgcctcttgaacagaagctaaatatgctctggagtttcatcaaacgtcatctaaagtcaagaatactagtattcttatccagtgtcaagcaggtaaaatttgtgtatgaagttttcaagaagctccgtcctggtatttctttgagatgcatgcatggacggatgaaatacgaagtacagcaggccatagtagcagagttcaaagagggacactcggttctattctcaactgatatatttgctagaggattggatatagaggatgttgattgggtcgtacaagttgattgcccagaaaacattgctctgtacatccacagagttggccgtacagctcgttataacaagagaggaaaagctcttatcttcctttgtccagaggaagagaaaatgcttgaaaaattgaaggcagctgaaagtaaaatacctatacatattaaaaagccaaacacagaacaactgcagcagatatctcagaatatagcgtcagtgctggtgcaatatcccaatttgcagcaactgggtaaaagggcttttgtcacctatctgaagtcagtgtacctccagagcgacaaagaggtgtttgatctgagcaggttctctatggagaattttgccgcatatgctgcttctcttggtcttcctgttaccccaaagattcgttttgttagccacaaaaagaatgtgccaaagaaatatatgggggatattgatgtgaaacggatgaaaagaagttccaaacctgaagttatagaaattaatccacaggccaaaagtaacttaattgaggatgatggagattatgatatcctttatcccaaggagcagcaaacagatgtaaatatggctgatggtcttgatgatgtcctttatcccaaggtgtccactgcagatacaaataatgaaccagagaaagtcacacagttgggaaataagtccgtgaaaaagaagaagctgaagataaacgtgcataggccattgggcacaagggtcaaatttgacgatgaaggccacactatccctccttttgcatccatagctgaagaagtgggctcaggagatgtaattgacaaggataaaatttcccagaggtacgcagagatgttgagagagatgcaggagcatgacaaggaggacaagctcgaacacaagaggatcttgcgcgagaagaagctacagaagaagctgaagctcaagcgcaagaggaatgaggaaatggacgcagggtcagagaacagtggctcggagtcggacagagaccagaggactgcctccaagggtaagaagaggtacttcaacagcgatgacgaagaaggcagcaaagatgcggcgaaggatggggatgttctcgctcaacaggaggcgttggccctgaagcttttgagtaaaatgcatagttaatttaatggttttgtaccgcgtgatgttaatgtaggcagctctctgcaaccggagagtgaaattttgatcagggctagtctagtttcccgggagttgatttttgcataggatctggaaatgtatcagtttttggtcttttagtttttcgttcagaatttttgtttgaatacttgttgttcctttattattttcttacttt

SEQ ID NO: 62476 - DNA, 205 bp, Oryza sativa
  Clone ID: PAT_MRT4530_63809C.1
tctaaaaaaaaaaaaaaaaaaaaaaaaaaaaaaaaaaaaaaaaaatgacttcctgtaataattaacaataataacctaactaggggctgctcgttaagagagctccagttgacttccccggggtggctggcgtaaaggccttttttaacggcctttaatgtgaatacactggcctgccttttccaacaccgaacatggaaaaacc

SEQ ID NO: 62477 - DNA, 1407 bp, Oryza sativa
  Clone ID: PAT_MRT4530_6380C.1
atgaagtcacgtcatggagcagcaaaaagggcccccgaaaaaaagccaggcatttttcagcttgatgatattcctgagaatgctgtgttcatgatacaccagctgttatctctgagagatgctgcacgtgccagtctcctaactcgaaagtggctacgtgtttggagattctaccctaatttagagttcactacaaaggcattgggtctgaagaaacgaattcacaaagtacagaggagggcaaagtttgtcagttgtgttaatactgtcatacgacaccatgctggaactggggtgaagtcattcatcatcaagaaaaacctcaataatcagaagtacacccattatcttgaccgttggatgtacttcgcagtcagttcaggtgccaaggaactgactcttgacttacgtccacaaaggtttattcattaccgtaatatccaatacaacttcccatcatctaattttgctacccccatgcctacctccgtagaacatctgaagctcttgttttgctatttgaggccttcaccaacattttttggcttgagtaacctgaaaacacttgagttgagctttgtacgtataactaaagaagatttggagagcttgttaagctatacattttccttacaagagttgaagttaagtcagtgtccaaacatagatcacttgaggatccctgatgtgccatctaagctcaactaccttgatattgatttatgctggataagagcactggaaatacacattcaaaatctagttatctttaattaccatggaagtgttcgctttagaatcatacaaggagaaggatctttgtttaaagaggcacggtttcagttctcgtgtggggacgctatagagtatgctatcacagaaatggctccagctttgccaaatcttgaaacactgtttctgattggattttctaagatggttattccaaccagagatccaagacataggttccattgcctgaagcacttacagctgaaaatgataatgctctcaaagaaatacaataacctctgccttgtttcttttcttgatgctgcgccatttttggaatcacttattgtgcatgtatgcaacggatcactttattatcctggaaagaaaacagacttgagaaggctcgagaaacgtgaaccgcataaaaacctcaaatttgcgaagatgaccgggtttgatggagaacgatcaagcattgagcttgcactgcacatcctggagagctcaactaaccttgagtgcctcattctggatcctagaaaatataaatccgagtggaaatatatttatgaagagaacttgcgcgatgttcagtggagagtacataatttcactatttcggaatacattgcagaggcagttccttcacatgttaaattattgttttcatga

SEQ ID NO: 62478 - DNA, 1927 bp, Oryza sativa
  Clone ID: PAT_MRT4530_63810C.1
atggataccttcttttctgcagttcttggtgatcttctcggcaggtccatatccttcatagttgacagttactaccagcagcatcagggtgtggaggagaatctacagaagttacaccatgtgctgctgcggatccaagccatcgttgaggaggcgtcaagtaggcacatcacaaatcaagctatgctgctgcaacttacgatgctgagcaatatgatgtacagaggctactacttccttgataatttcaggtaccgaatcgttcgaccgcatgctcaagatgagctgggtgatcgctctcttggcatgtcccctttcagtccatttaagcggttgtgcttctccactagaacacggaaaattgtatctgaagttttggagagaaaagagctgcagaagatgcttggtcacctggaaaccattgtttctgacatgcaggagtttgttgtgtttctaagcagctaccctcgtatgggtcgccagccttactgcagctacttgttgctagaaaagtgcatgtttggccgccaagcagaacaagagagggtaatcaacttcttgctaaaaccatgccgccctggtgcagaaggctgtgatgtgcttccgataattggcccaggcagggttgggaagagcactctcgtagagcatgtctgtcgcgatgaaagggtacgtaaatacttctctacaattgttttctacagcccagatggtattgggggtgaataccatgcgcttcttacagacaccgttgtaatcaaacatcaaaatccttcatcgactgaacaatcattgcttgtcattgaactttccaatgatatggatgatgaaacatggagaaggatactgcacagattgagaaaccacataacacctgtgagtaagatcataataacaagtcgatcaaagaacatagcaacttttggaacaacaggagcacttcaactagattttctcccaaaagaagcattttggtacttcttcaagacaattgcattcgggagctcaaatcctgaagaggagccgaaactagcagccgtatgtatggagatcgccgtcctgatgaatggatcgttcattggagcacacgtcattggtggaatactcaggtcaaatcttagtgctcaattctggtacacctttcttgaatactatagatatttcacaggctggtatatccacctccaaggtgaacatcagagcgacatgtttaagaaaagaagtggacttacttacatttggtcgtataaaaattggtctgctgtgacggcgacattccatctttatcaaataagttctgcgaatctgaatgatctgcccgtgatacgaacaagcgaacttcttactagagatattaagcttgaagggaaatttgatgccctagaatggcgatctagtgtacctccttactacagctacatggtgcatcacgagcgccgggcacgaccggctacgtcaggagctcggcggggtggtactccgacttcctcaacggcggcgagctccggccggtgaaacccttcgtcgcattatgaatcgggaagatattaatccggagacgtagactagaagatgagcaacttactactctctccgtcccaaaaaagccaatcctctcccagtacaacgattttgaattatactaggaggggtcacatttttaggttgggttttttttttaaaaaaagtatgcagttaatattttttttctttttactatatacgaaagtggaaggttccaaccctccacgcaatagccaaaaataataaaagcgacatcgtcttctagaaggaggccagagaatgtgtatggatgtaaatggaaaaatcggacagaatcacgaacagaggagatcagaaacacctggaattcagaaaaaatggtgagagttggcgaccaatttgagttgctgtactcctttgtgcc

SEQ ID NO: 62479 - DNA, 1543 bp, Oryza sativa
  Clone ID: PAT_MRT4530_63811C.1
ctacttcaaggtttctctgaaagacagcacgcccaaggacctcattgccccagaagcatcctcaacacccggagcgaagagtacctggcccacgccgagctgctccccgcacgcgcgcagcacgtgcggtcgtcttcctcccccagccggcctcctctctctctctccccggaaacctagcgccgttcctcccctaaatccacgcgaatcaatgcccttctttccaaattgattggggggaattaatccccattgaatcctcttcaattccccccaatttcccccttgaatcgtgcccccaatcgccgggaacgcccgcgccaactccggccaacttccatggccgccggccgccttttccgccgccgttccgaccttccccgtggccggctccctctcctctcctataaaatggaaccccctcgatctgttctccagttttagccccctcccgcgttctcccgtggcctcaccacctctccccgccgccctcatctctctcccacgccgccggccgcctccagccgcctgtgccacctcgcccgtgcaccgtccggccgtgccgtcgcctctcccggcgtcgcagtggcttccccttccccggcttgccctccgtttcccgcggagacccccggagctacgttcccgccgtcgcccttctctttccttcgcgccggctgcctccagccgcctctccctcctcgcccgagcgccgtccggctgcgccgtcacctctcccggcgtcgcagctgcctcctcttccccggcttcgcctccgtttcgcggggaaatcaccagagaagcgtcctcgccgacgactagtggtgtcgccaccactccaccgtctccagccatccctgccgcctcgcctgagcgccggccgacgtcgctgccacctctgtcggtgctgtagcgccatcctcttctccggcccggctgcggcgtcgcccgaagttcgccggaacgccgccgccgcgccaaccacccattcctcctcgtcggctcgtcgccccgctgcaccaccaccttcaccaacatcgcagcggcgtgttccacgccgtcccctcctccgcgcagccgctgctggctgccatcgtcgcttcctcgtcaccgttcgtcctcgccgatcgacgtcccatcggtcgcctggctcatcgtctcgcggcgccgcctccgtcatcgtcatcgcagcggcgtgttccacgtcgtccccgtctccgtgcagccactgctggctgtccctcgtcgccccctcgccggccccggtcgtcgtcgtcctcgtcctctcgtcgttcccgatcgtcgtggcgttcgtccctccgtcaagccgttctcgttcgtcgtcctcgcttccgcgtcgtcaagcctcgtgccggccgtgtctcgccttcgttcaaggatcgccgccgaagtcgttccctcgccgtccgcctccgccgcgcccctttcgtcgttccggaggttccagaagcgtggttcgcggtcgtcgccaaaggttcggaaggccgttctctctgagcaaggcaagtcacatcatccttga

SEQ ID NO: 62480 - DNA, 1652 bp, Oryza sativa
  Clone ID: PAT_MRT4530_63812C.1
gcgaacagtagcacgcacccccaccacctccatctctctccctctccctcggctcgatctcctcctcctccatcgtgtccaaaccaaagccaaaccccgtctcgtctcgcctcgcctcgcctcgccctgcgcgagaggtagaaataggaagggaaacaggagcagcgcgtgccgcctgggcctcctcccgctccccctccccaaccgccgaacccttcacattatcggtgcgcgcgcgcgcgagagggggggcgccctgccgcgggagttcgccgtggtggtgcggacggcgagggggctctgttgggttgtcggcgatggcgatccggggcccggaggcgtcgtctttcttccccctcacgctcgtcttctccgtcggcttcttctgcgcccgcttcttcctcgaccgcctcgtctacaagccactggcagcttactgtttcagtagcaaggcttctaagctgatgaatgatgaggtcaggcaagcaaagattgtcaagttctctgagtcgatttggaagctgacatactatggttctgttcaagcatgggtcctcttgataataaagcaggaaccctggtcgttagatacaatgcaatacttcgagggctggccaaatcaatacatgacgtcctcattgatgcttttctacatgtgccagtgtggattttatatctacagcatttttgctctcgttgcctgggagacccgcagaaaagattttgctgtgatgatgtctcatcatgttgtaacatctattctgatcggatatgcatatctgactggattttttcggattgggacaattattctggctttgcatgatgcgagtgatgtgtttcttgagaccgccaaactgtgcaaatacacagaaaaggagctcggggctagcttgttttttggcctttttgctctctcctggcttctgttacgactgatttacttcccattttggataatcaaaacatcaagctatcagtccatcatatctttgaggaagctggagaaattcccaacaacattgtattacattttcaacacaatgctcctcactttacttgtgttccatatttactggtggaaactcatatgcttaatgataatgaaacaattgaacaataaaggacaggttggagaggatgttcgatcagattctgaggatgaagagtgatggagcgattctttgacaactgtgatgtgtgccatttcattgctgatacttttctgtgcctgcttttggtactaaattgttttggtcttggcaagcttggagcatagataagaaagatttgcctctgtatattgccctgtggtatcagaaatggctagaccaagaacagagcaggttctatacataacgggtatagctagcaacttacttgaagatcccttcataatttttggtccgtctttctttgttattagaaaaaggcatgagaggtcgttttctgtagcttctcccaatgcttacagacccctctgtacaatgtttttgtatactttgactgtgagtaggtttagttctaattcatgggaataaattgattttttctaccaggagtaattctggctagcatctcaatgatgtcatgtggtgtgaagagtttcatgcagctgcaaacattttctttggacagcattgggttttctc

SEQ ID NO: 62481 - DNA, 953 bp, Oryza sativa
  Clone ID: PAT_MRT4530_63813C.1
atggggcccacgcgccagcctcctcccgcgctctcccgtggccgccccgcctctccccgccttctccttctctctctccggcgccggccggcctccagccgcacctcccgcctcgcccgtgcaccgtccggctgcaccgtcacctctcccggcgtcgcagctgcctcctcttccccagcttcgcctccgtttcatggggaaatcaccggagacgcgtcctcgccgacgactagtggtgtcgccaccactccaccgtctccagccatccctgccgcctcgcctgagcgccggccgacgtcgctgccacctctgtcggtgctgcagcgccatcctcttctccggcccggctgcggcgtcgcccgaactgctgccggctgccctcatcgcctcctcgccggccccggtcgtcgtcgtcgtcgtcctctcgtcgttcccggtcgtcgtggcgttcgtccctccgtcaagccgttctcgtccgtcgtccacgtccgtcaagtgtgccgctacagccccgtcgtcgtctttgtcctcgcctccgcgtcatcaagccttgtgccggccgcgtctcgccttcgtccaaggatcgccgccgaagtcgttccctcgccgtccgtctccgcctcgcccattcgtcgttgtcgttcccacgcctcgtcgcgtggtgccgccgccctccgcgcggccacgccaccgactgccggccccgcccggccacccgcagaccctccgcccggcgctcctcaatctgctcctcgatctgttctagaagagaagtttttggagagcgcaaggcgcaacttctcactattcatcaacatctgcttcatcttcatcaacatgtcgactggtggaggcgtcaacggtggacatgtcggcagcggtactgaaggaggcgagaacgacaacaccaacgtaggcaacaacaatacttcatcctcaggagcgttctctag

SEQ ID NO: 62482 - DNA, 978 bp, Oryza sativa
  Clone ID: PAT_MRT4530_63814C.1
caaaccaacacgaaaaccacagcccagcaccccgcattcaaagtcaccctccccatcctcctccgcagccgccgtcgtcacgaccgccggccaccgcaggatggcagccgggtcgggcgtggcggcgctttggccacgcgccctcaccgccaccccgcagccacggccacgggcgacggcgacggaggcggcggagagggggatacgcccggggacgaggcgcgggcatgagacggcggcggccacagccacggccatggggtgcatatgcgcggcggtcgaggcggtggtgggttccggccggtcacggcatggtacggccgcgcggcgccgtgccgtggtctgccgctgctgcgcgcggtggggcggggaagagtccggctcaggtgcagggaacccataaccgacgagcccttgagcgacctccaagatcaaaggctggtggcacaagttgatttcctcttcgccccttcctcctccatctcctcgagccttgtcaaggtctcgtatgctgacgccctcgtcaagctcccacgccaccatcaggctcctcactgccatgcttgtgacctccaccttgtcatacatctggaggttgcgtagagctctcctcgttgtgctgccagtagactcctcaagctcccgtgttaccaaccaccgtttgccgtcaggcgggtttggttcggtctgaggaggcccagccgctctcctcttggcaggctgggcgctgggctgtaggcaatcacgggcctcctggctactagctgttccctgccgcgcggggcgtcgtcgcccttcggcctttcttttcgggtgcccgtcgtcggtccaaacgccgccaccgacgccggagataccgcgcaacgctaaacgctgagcgtcagcgatgttggagttgatacgggtggaggacccagtcgcccagtggtcgtgatgaccactcctgcacgtgatggcgaaggcaaatccagtaggcat

SEQ ID NO: 62483 - DNA, 104 bp, Oryza sativa
  Clone ID: PAT_MRT4530_63815C.1
gctctactgtcgtccgctcaggacatcagcgcgcacccaagaagctgctaggcgcgacaatctacagctcagatgcaatcagatccattgcctctacctacatc

SEQ ID NO: 62484 - DNA, 351 bp, Oryza sativa
  Clone ID: PAT_MRT4530_63816C.1
tcttcctcccactcttcctcccactcttcctcccactcttcctcccactcttcctcgggcgcgggtttcatctagggggggggcgtcctatacagctctttccatagcttcagctgcttcatctacatttacatccattctatgggtaggtacaacttcttcttaactttataataattaatatacccatcttaccattatccttatctatccattcacaatcatctatcattaattctatttttatcttttccatatacctctatttatactacaatttctatatacatccatccattgttaaatattctatattcatgatgttacacattaatttatttcgatcttatt

SEQ ID NO: 62485 - DNA, 612 bp, Oryza sativa
  Clone ID: PAT_MRT4530_63817C.1
tgtatttcttgtatgcaaaacttgtttatgtagtttaccttgtttatataaattatcttgtttatgtatgcaaatctgcattttcatatatatatatatatgtgtatatatatatatatgtatatatatatgtgtgtgtgtgtgtgtgtgtgtgtgtgtgtgtgttgtgtgtgtgttgtgtgtgtgtgtgtgtgtgtatatatatatatatacatatgtatatatatatatatatatgtatatatatatgtatgtatgtatgtatgtatgtatgtatgtatgtatgtatgtatgtatgtatgtatgtatgtatgtatgtatgtatgtatgtatgtatgtatgtattatcatactctattcaatggtagatttaatggaactaatttgatatttcatatggtgcttgtgtgtgtgtgtgtgtggttgtgcacctttgggggagtgaagctaagtggcatggcatattgggttgcatatgcatgcatgcatgcttgctagttagtggcctgctgatccttagtcctgtgtgctctgtgcatccaatgtttgtgcatgcatatgcttctatcctggtttctggttttgcacctaacatgtattccttacactaat

SEQ ID NO: 62486 - DNA, 174 bp, Oryza sativa
  Clone ID: PAT_MRT4530_63818C.1
atggcctccaacgatgatcgtgctgttaacctaggtggaggaagattggaggaagagaacttgttgggtactaagaccagggagatggataaaatcaatattcctagcaggacggaaggtgatgaatggacaattttaataactgtaataacgaaggaacatccctataactag

SEQ ID NO: 62487 - DNA, 573 bp, Oryza sativa
  Clone ID: PAT_MRT4530_63819C.1
atgaaaatgcccccaagaagaagtaccatcaccacctgggtcaggcggctatagcgtcgcagtgccaaagtggaggagatggaagcaagcttgattgagaggggtatcgaaccggtcaccgctaaatggccggatcgatcgaagttctggtactatgctcacggtggaacgcttaaccccgttgttgtctccctggtgttcaccgatcaaatacgtgaggctgccagtcgactaacggacgcagtggaagcgtcttctcagggaacgttccgacctgacagagagaagcacgagctgtcactcgccctgcagattcccgagcatccaggtcgaacacgaggaaaaggcgtggttccttcaaatattggattcaagaagcacatccacatgtacagaagtcgtatgaggagcaagatagataccgaggcaaagattgcagatcttgattatagggtatcgagctacgagctcagcatgcaagaggaggtggcaaggaaagtggatgaacgcatggccgcacatcggtgccacgatccccagccgtacattcctcatgtaataatcagcccctga

SEQ ID NO: 62488 - DNA, 297 bp, Oryza sativa
  Clone ID: PAT_MRT4530_6381C.1
cggacgcgtgcgaaccaacccaaccgccgtcgcatccgcctcggtagaacgatggtcgtttttttgctgcaccagaccatcagcttgcgcggcagggtccctcgcagggaggagcgcggccgtcgcgtctgccactccggaggccacatcaccatgcgccttaccgtaaagagcgcggcccaagagcattttgtatggacctgaccgtcccaagtacctggccccgttcttggagcagacgccatcgcacctgacatgagagctcacgggagactacaggtgggacacggtggggct

SEQ ID NO: 62489 - DNA, 137 bp, Oryza sativa
  Clone ID: PAT_MRT4530_63820C.1
gggcaactgtaacttgtgatgagatcagtcaagagcaagtagaattgccaaggagcacatgcaccttaggagagatgctctcccttcaggatgtgaagaatgataatttcatcaatgagttaccttctgtttctacc

SEQ ID NO: 62490 - DNA, 2264 bp, Oryza sativa
  Clone ID: PAT_MRT4530_63821C.1
gtgcaaaaaatacttcactgaataatttcggtaatctcagagaaccaaaaggagacaaaagaaatcaatgatgataaaagaaaatgagcatacatggacacttcatatcagactcgggaaagataaaatcataagaaaactttgtatagatgacattcaaagcaaggccataaacctgagctttttggaaattggataccattgatctatgcagtctggaccactctttaacatcaaaagtctggtaagataccactgatctaggaagctttaaacacccattaacatcaaaatatcttgaaggagcctgtttactggggtggcaggctgctgctgacaccacccaaccctgctttctgccccagttctgagagttgctgaataaactccaccccattaagaatttcagttgctccatatatgacttgcttggtagtctgtgaacgttgcgttagctctgtcaagctcctgtattcaatgtaatttccaccaccaatcatgaaaacaatggcctctctgaagggtcctctgaactgtccagcagttcctgatttaggggcccgtggatcaaatagtaagtagttgtcaacttcaggatttggtttcccctccatcaaagcttctacagcccttgtagcggccagctgctttccatctgataacaaattcctcacacctgtcatggcactaatggagtgcccataaagcttttctgcccaatcaactatgttaaccttgcttgcggtgtttgatgcaccagcgaactgggaattcagtgactttattctctttacatactgaaacgcggacatgtccacttctgactcacgcagagcggcctcaacctgctctaagtcagatggcactggtgtctcgaaggaaagcaggtaggtcacagccagtcggagcttatcctccttggtgccgttccctctcagcaggttcatcaacttggtccggtccaaggtgccatccacgagcatactattctcacactcgaaatatccatccagagacctccccttgatatggccaagcagcgccgttgcaatattcgtgtgcttgtcaatcatcttcttccgttccgtcaattctgggagcgagttcacagcattcatgagatgcctggtgttgccaatgagatcggtgccatcaaactcaacaccatccctgccaccacctgtgcgctggttcacctcatccacatcctgcttgtacttggcaagctgggcctcaatttcctctgccactttggggaattgcaaccagctgtttgccacccagaacggatcagtgtcatccaaatcatacttctctggcaacttcaatttgttcgacttcaggccgagcacgtcgtggaccaacgggcggtagctccaatcatgctggatccccaccgaaagctcgaaattcctatcaaacaggcacaggagtggccgctggaaggatgcaactgctgtggacgcggcctcagtgaagagattgggcttggcgatgaggtgatcgcggaggcgggcgtcaagcgcggcggcgaccatctccgccggcccgccgccagcgcacctgatgacgggcacggcgccgagcgtggcaacgacgcagaagaggccgagcgcgatggcgtcgacgagcgcggtgatgtcggcctcggcggcggcggggtcgttgagcgcgacgtacgccctgggctgggcgagggagaagagcccctcctcgaggcagacgaagtcgaggtactggtcggcgacgcgggcgacgcggtgcgcggagcgggaggcggcggtggcggaggcgaggcgctcgaggagggcccgcgggacgcaggtggagaagttgaggtggaaggaggcgtagaggcccgcggcggcgtcggcggcgacgcggtcgacgttggcggcggtggggcggagcaggtagacggcgggggcgtcggggacctgctgcctcgccttgtcgatgttgaggtggagcgtgacgccgtgcctccggagctccccgacgcggagcaccggcgcgaggagcgcgacgcagggggagtccatcaccaggatcttgtacgcctcctcctcctccgccgaccccacccctccgccgaccccgtccggcgagccctgcagctgctggttcagatgcagcatcctcacgatcgaatcgagctgcttcttgcggagggtgagcgccatggcggcgggcggtggtggtccggcgatcgccgtcgccgatcagatctgcaaggggaggggaggtcggtgcccacgcgtcca

SEQ ID NO: 62491 - DNA, 556 bp, Oryza sativa
  Clone ID: PAT_MRT4530_63822C.1
attctatattcacctacactcagtttcagtcttggtacaaacatcattgaccaagtccttgttactgcggccaccgagatcaaggtccatcacttgtcagatcaaaatatcccctacaatcacccaaaatgtgcgactgggaagaattcctctttgcttgcaaccactcaactctccgcctcaaatcgtactgccactttgctcgtaacgaccccaaccatcaatgtttcggtgtcaaagtgcttcgcaagtcctggcggcagtgcgttccctgtgagaactgcgcaattgcttggcgggcgagggagatacagacgcaacaaaactgccaggatgctcaatctatgcattagggggcaagacacggaaagatctgccatcctgagtggcagcaatgtttggtggggaaagggttggtcaacgattgtggtgcactgctccaatatttctcttttttctggctccgaagttttcaaatgcactctgtttgtatcccggtttatctcttattttatatatataggtagctagaaatcagaactgaagttgtcttgcg

SEQ ID NO: 62492 - DNA, 1090 bp, Oryza sativa
  Clone ID: PAT_MRT4530_63824C.1
ccggccggggccgcaaaacccttctcccgccgccgccatcgccgccatcgccgccgccatggacccctcgcagccgtccgggagctccgccgacgcctcggcgtcctcctcctcctcctcctcctcctccgccgtggagaatctcgccgcggggatggcggccatgagcctccaggatcggttcgagttgctgcgggggatcggcgaggagtgcatccaggaggacgagctcatgaacctgctgcagaagaagcccgtccccatctgctacgacggtttcgagccctccggccgcatgcacattgctcagggcattgtgaagacaatcaatgttaacaagatggtcagagctggatgcaaagtgaaaatttggatagcagactggtttgctcagctaaacaacaagatggggggtgatataaaaaaaatacagactgtgggacgctacatgattgagatttggagagcggctggtatgaatcttgatggtgtggaattcttgtggtcctcagaggaaatcaataagcgtgcaaatgaatattggccacttgtaatggacattgctcgtaaaaataatgtcaaaagaataatgagatgttgtcagattatgggtcggaatgattcggatgagttgactgctgcccagatcttctatccttgcatgcagtgtgctgatatatttttcttaaaggcagacatttgccagttgggcatggaccaaaggaaggctcaggtaaatttgaagataaaacaagcattttgccctcccaacattgttgatggcaatccatgcttggagtacatcaagtacattgttttcccttggtttgaaacgtttgaggtggttcggaaggaagaaaatggcggtaacaagacatttgccaacatgaatgaactcatcgctgattatgagagtggtgctttgcatcctgctgatgttaaaccagctcttgcaaaagcgataaaccaaatattgcagcctatccgtgaccacttcaaaaacaacagtgaagcaaaagttctgctcaacactgttaagaattacaaagtaaaaacggaggatactagttcaagccctcaagcatcttaa

SEQ ID NO: 62493 - DNA, 228 bp, Oryza sativa
  Clone ID: PAT_MRT4530_63825C.1
ggtacgcgaccgcccacgcgccccgactccagcggctctttaccacaacctccccggatcgatcccacggaaagaacagggaacagagggatgagagggctgcgcccgaagcatagtaccgcagatgcgaaggcggccttcacagggccaccgacgaccgctcccacgaggccgactgatccacctacgcgagagaacctcgactacaagaaacaccaaacgacaagg

SEQ ID NO: 62494 - DNA, 122 bp, Oryza sativa
  Clone ID: PAT_MRT4530_63827C.1
gggaattgatggttcatggggcaaaatatcgaaatggcagacaaaacaaaccatggagcagaacagaaccctattccacagtatgcaagagctcaattctggagctactacagagatgggta

SEQ ID NO: 62495 - DNA, 1298 bp, Oryza sativa
  Clone ID: PAT_MRT4530_63828C.1
caaagggggaaatcgtgaccagaccctccgcataggcctcccctaaccatccacaccacgctaaggtttcacccccacccctcaaaaggcagtgggcgggacaactggacaccccggtcgacccaactccatcacgcccatcctcgccactggtgcctaggaaagggtcgagctatacttcagatcaagcaggtacccactcccgcttgtgaccagggctgacgtcagtggatgcgggggcgccagcaggcgggccccgcatgtcagcggcatgaggcggctggtccaccgtggaccgggaccacgcggcggcccgaggccgatcggacgccgtgattggcggcagggctcggctcggctcggcacaaagccggttggctggccatggggagaggcggcagcgagcggtcgccggcgacggcaagcggcggcgagggaggcagcggcgaccggcgcggaagcggcggcgcacggcccatgcggctgtgcggcggcagcgggaggaaggagaggaaaggggaaaagaggaggcggggggcctcaccggggtttcgctagcgcgggaagagaggttagagggggagaaagagtccacggtgagcagggatgccggccgaagacggggaaatggaagagctcaccggctcgcgagggagatggggttccggtgggttttcggcaacgtgaggcagtggccgagatgacccacgcggcggtgaagctagcggcggcggcggctttagcggtggtggtgcgcggctggaggcggcggcaagcggcggcgctagcggcgagcgacgcgggctcggtaggaggcacgggagagggtggcgagagcggaaagggggagaggaggctcgggggaaggattttataggcacgggagaggcggacgtggccggggatggcccctatgtggccggagacgtgggagagtggagagagagagaggattcaaaattgaatccgccccttgcgagcgcgcacgcgagagcgggagaggtggaggagtggggcggcgatgtgggcgcgaggtgcgggcggagtgggggcgcggataaggcgggacacgacagcggcgtggggaggtggggcgccggcgtgggcggcggttgctgcggggcgcgggtggctggaggttggggacgacctaacagttgggccccacctatcagcgtcccaaagaggagagaaggggcgcgggccggcccaagaaggagaggggcgcgcgcgggcgacggggtggactgggccgacggcccaagaagtgggaaaaaagggaaaataaaaagaagaaa

SEQ ID NO: 62496 - DNA, 304 bp, Oryza sativa
  Clone ID: PAT_MRT4530_63829C.1
atgggccgtgcgccgccgcttccgcgccggtcgccgctgcctccctcgccgccgcttgccgtcgccggcgaccgctcgctgccgcctctccccatggccagccaaccggctttgtgccgagccgagccgagccctgccgccaatcacggcgtccgatcggcctcgggccgatccggaccgtcggtcccgtggaccgacggtggaccacccgcgtggtcccggtccacggtggaccagccgcctcatgccgctgacatgcggggcccgcctgctggcgcccccgcatccactgacgtcagccctg

SEQ ID NO: 62497 - DNA, 1227 bp, Oryza sativa
  Clone ID: PAT_MRT4530_6382C.1
atgagcctcccgcggcggtttctgaatctgatcgtggagaacggggcggatcctggcatcagatcacttagctgcatcgacttgacacgctacccactctttcacccaccgttaccaacggcaacaacaatggaagcgtgcagcagcagcagcattatttcgcagcaacaacagactgctgatgccttcaatacgaagaacaaacatgcggatggggcagcgtttatggtgcaggagaagttccagcttcccgacccaatcttcagcttcaaagctcaagcggctgatcctgattacgggtggaatatcgactgcttcccgcttgcagatcgcaaggttgtctgcgtggaccagtctggccgcgcattcctcttcgacgccgacacagaccaggtggtgacaatgccaagcctcaacaaacccaagtggaggcccttctccctcttcgtccccggcacggacaacgacggcggcgatggtgaaggcaacagtctctacatcatggagaaaagccccaaatcagaggcggggtgtagcgcgcggtgcatcgatcagttcgaggcctttgtctaccgcaagcccacggtgacagcgtcgttcatgtcgtggtactgccagctgctcccgccaccgccatacgtccgcgattacgcctacagccagagacgccatcgaatcacatcctatgccgtggttgccggcgatgacgacggttcgtggcgcatcctcgtatcggctgaggacgcaggaacctactgtctggacgtggccagcaacatgtggagtcgagtgggcgagtggacgctacccttcttgggcaaggtcgagtatgttcccgagctcaagctctggtttggcctctctgccgaggaccagctgttggctgctgctgatctgtcagccatggattcccagccagagctagttagcagttggaaggaacttgaacaaaacagggtatggcaggtaacacaggatcctcaacttgttaacctgggctcaggcaggttctgcatcgcaaggttcattgaaaaactggagttgggtggcgattttgacaataaattgacttggcaggattttgtaatcttgaccggtgtggaggttagtgaacctttcgacctgcctgccgaagcaccaaggaaccagagaaccagcatggagcagagcaaagagaggataagcaaagcgaagcgaagtgagccggagcagggcaacgatgggtga

SEQ ID NO: 62498 - DNA, 506 bp, Oryza sativa
  Clone ID: PAT_MRT4530_63830C.1
cggcacgaggcgatcagcagcagcagcagcttgcacactcgagttttttttttttttttttacttgtagttcgagtaattagggtattgtaataaggaataataatatattgacatgtggttagaggagtgcatggcaggcgggcagcaagggatcctttgtgaatgaaactcatggtgtgaactcaatattgggcataaatgtaattcttgatgagttgaggaatcctgtttttagctttgttaagtctagcaaaggctaccgaaaaatactatcttcaactcacaaaaaggtttgctgatggttcacctacaggcgcaggcagacaaccaaggattgccggctggcagatcaaccagtgcttttaattgaaacaacacagctcgaaactaagggtaggtttatatcttattatcagttcgcatcacatatccagcacaaattggcccagcaatgccatagctcaaagaaactaagcacaacatttggctttgtagcctagcatg

SEQ ID NO: 62499 - DNA, 392 bp, Oryza sativa
  unsure (1)..(392): unsure at all n locations
  Clone ID: PAT_MRT4530_63831C.1
ggcttnannacactggcccccccnctgtggcngcccacngtgcctggttgtgtgtgtgncctgtggcantggnggaccagctcatctccacggcagaccactgacactgctgccgggcaactacgtgcgccccgaggcgagcgcccgcgcctcgccgacgtgctctccgacgnctccatccccgtcgtcgacctcgncaaccccgaccgcgtcaagntcgtctcccaggtcgncgncgnctgtcgctcccacggcttcttccaggtgctcaaccantggggtgccantggagctgacacttgtcggtgctgncggtgncgcacganttcttccgntttntcgtcggagtgagaagggncaaagntctactncgacgaccnggncaagaagat

SEQ ID NO: 62500 - DNA, 1668 bp, Oryza sativa
  Clone ID: PAT_MRT4530_63832C.1
atgtcctcctcgcaatctctcctcctcctcgcggcccctctctccccacccacccttccccgcctcgttccccctcctcccacctccgctccccgcctcccccgcctcgccgccaacctctcccgcccgccacccctcgcgatctcctctcctggctgtgatggcggtggtggtggcggaggaggaggaggaggaggtgggtggtggaggcaaggggggagtggccctcctgaccccggcgacgggtggtggcggtggctccagtcgctccaccccgagctcctcctcctcttcgtgctcctccactcgggcgccttcgccgccatcccggccgcgctcgccgaggccatcggcggtagcggcggcagggagggagcgagcgtctgggaggtgaggggcggtgcgcgcacgctgctcgtgccggacccgaccgggacctcctacgtcgtcgcgggagacgggaggcggaagcaggcggagggggaggatgcggagaaggccggtgccggccgtgccgagctggctgcgctgcggcgccagctggagctgtcgtggcggcggtgcgccacggtcgccgttcagctgctgctcccggatgggtaccctgacagcgtgagcagcgactacctgcagtactcgctgtggcgcggcgtgcagggcatcgccagccagatcagtggcgtgctctcgacgcaggcattgttgtatgcggttggattggggaaaggcgctatacctaccgcggcagcggtgaattgggtgctgaaggatgggttggggtacctgagcaagatattgctatcgaaattcggccggcatttcgatgttaacccaaaggggtggcgattgttcgccgatcttctggagaacacggcttatgggctggagattttaactccggtctttcctcacctgtttgttccaattggggctgccgctggagctggtcgatcagcagctgctttgatacaggctgccaccaggagttgtttctatgctggatttgctgtgcaaaggaactttgctgaggtcattgcaaagggtgaggcacaaggaatggtcagcaaattcctggggataatgctagggatagcattagctaatcgcattggctcttctgtatcattagctcttatttcatttgctggagttactgcagttcacatgtattgcaacctcaagtcttatcaatcgattcagctgaggacactgaatccttatcgtgcaagtttggtgttcagtgagtatctattgagtggacaagttccttcagtcaaagaggttaacgacgaggaaccccttttcctgaatctatctattggtacttcacgtaaactcttaaaaggatttggtctccttgatcctgcgctgaaggcatggagtgcaggcagggactggaggtggactggtggagggtggaggtacgggcggcagagtgcgggcaccggctggcccaccacctgggagccacagggcaggggcggcggcgtctggctgggcgctgccgccgttgaggaagggggtgggtgggaggtgatgtgccatcgtgtcggggtcggggagggggccagggtgccatgccaaggaggagattgggaaggagagctggagagctacctcagcgccaaccgcttcggcgctgaggtgcccaacctcagcgccaagtaa

SEQ ID NO: 62501 - DNA, 185 bp, Oryza sativa
  Clone ID: PAT_MRT4530_63833C.1
cagcacgagagattgtacgacacctcacgcgacccaatggagaccccgactctgaccaccctgctcaagccgccgttgcccaccgttcccctcgcccgcccctccctcccgcaagtcaacctttccaccgcgctcaacgcgttcgtaccccgccctttagagatccagctacgtacgcgtcatcc

SEQ ID NO: 62502 - DNA, 196 bp, Oryza sativa
  unsure (1)..(196): unsure at all n locations
  Clone ID: PAT_MRT4530_63834C.1
gggttcgaccttcgangggggggccccgggacccaatttcgnccttatantgnagtcgnantaacgccgccgcttcattggnccggtcgnttttaaaancgntcggtgaattggggaaaanccttggncgntnnccnaattnaatcncnttgaagaaaatcccccntttcnccagttgggcggtaatagcgnaaaa

SEQ ID NO: 62503 - DNA, 2471 bp, Oryza sativa
  Clone ID: PAT_MRT4530_63835C.1
acacctactctctctttttttttttttttttttttttttctgatgtattacatcattaacattaattcttagttccaaaaatcatcaaattacaaggaaaaaagagagggagaaaaacaaggaggtgcacttctcatgaacaattcaggaatacagtaacacaatggtatctgcagattttgtttggtgagcaaaaaccttttgtcttgccttcaagaaacaaaaaacaaaaacaaaaatccagacagctacatcagtatcgtatatgtattgcaccgcttggtcacagattccacaaacacttgcagctcctccattccatgaaaaaaaaaagaacagtgaacagctgagaccaccttttgcacaacaatagttctaaacagctccatggcaccggtacaaaaaaatcacacggtgaagataatgtgttgcagctaaggtttgtctgatctgtttctctcatctgccttcagccggcacctagttaaggtttcttcgcgatgctcttcaggcacacctttcaagatgacttctatgtcagccttgtgcttccttcgcagcacgttgagctcctcttgctgctgagctagcaaattcactaacctctcgctaacatctgcttcaatatgctcatcatcaaaagactgaggactggtgctgacagaagctactccagatttcctgtcaatcatagatgggtttggcaagtccacagaagtgccaagattgctgactgtgtcatcagtgtcattcttcttcaatatcccattaggcatattaccaccaatatgtggttcgactgcggagtgagacatttcaatgtttcttctgggcgagtccgaccaatacttatgtccggagggaaggtgttcttggacaaaaccattatgtgtagcattaggctcattacgcaactcagaagtttcatcatctgcttctgaactgtcggtctcagaatgagctctttcatctccttggttttcaaccgattcttctaatgcccaatcaggaatatgagcccgtatttctgcatctatcatttctgcaatcgctgtaacatcctggtcagtgagatctagctgcacgaccatctcagttgcaacactaatggaagtgtctgcttcaatgtcaaatgggaaatggatgttttgagcatgacctgttgaatcagcaattctcagtttcaaaaatatcgtattcagatctttcatctgactctcgactgtaattattcgaccagcggctgcttgtggatccatggtgctgtgtatgtacctatcacttgggtgttcttctgcaaaactacctgtgtgctcccgaattgccatagatgatgcatctctgtcatatttgtaacccatgcttgagtttgaactgccagcaccatctgatgccttcgtatttgactgcaatggatagaatattttttcaccatcatctcggagaaatgggtccatcaatagctcttgtgctgatagtctttgtgaagctttagcgatgcacttctcgataaaaaatctaacctcaggatcttcaatcttagccagagaactaggcttttcacctttcttgtatatctgcgctgcattggaacattcacaatatgggtactcaaatgtaacaagctccaataaacacatcccaaatgcatagatgtctacaagctcattgtattcttcatcatagagttctggagccataaattccggtgtgccaatgatactgtgagctgagcgtgcattatctaggatggttgctaatccaaggtctccaatctttacttcaccctggtttccgttcacaaatatgttgtcacatttaagatctctatgaattactggtggatcatgactgtggaggtagacaaggccactcaagatttgccttgaccatttctttaatgctctaacatctaccttcttgtgcttaatacggtactggcgcagtgtccctgatgtgaagacttctgtgatgaaatttatgttgttgtttttcttgtcgagccaagaattgtagaacttgattatattcttatgcttgagggtcttcagcaaccggacttctgatctaagtctctccaagtcatcattattccgaagtatatcacccactttgatctggttccaagcaacttccagaccttccagttgatcaaaagccttatagaccgtcttgaaggcgcccttgccgaggacctccgtgtaccttccgtagcgggcggtggggtcaacctcggcgaactccggctcggtgtcgaggaggtccagctcaggcggcggcgtgggcggcatctcgatctcgatctcgccgaggagggggtcgccggcggcgtggcggtggcgggtggttaattgggatcacaggggtctcgctctcctcgcctcgcaaaggcctcccttttttctctgctcgacctcgaaagcgaccttttttcccaaacgccaacttcttccatttcaccggacgcgtgg

SEQ ID NO: 62504 - DNA, 150 bp, Oryza sativa
  Clone ID: PAT_MRT4530_63836C.1
atggcagccggccggctagaggttgaagaagacccgacatgtgggccccacatgtcggtctcctggcgtgacaatgctgggacccacctgagggcaagcggctggcttgcttccggcctaaggcatggtcggcggcttgacccgggttga

SEQ ID NO: 62505 - DNA, 375 bp, Oryza sativa
  Clone ID: PAT_MRT4530_63837C.1
atggcccagatcggcaaggaggccgatcggacggcgcggagagcagccgccaggctcggctcggcttcaaagccggctggccagccatggcgagcggcggcggcgcgcgcggtcaccggcggcggacagcgcgaaaggcggcggcacatggcgcgaagggcagtggcgcggatcggcgctaggagggagtggaaggggaaaagacggggagggggcgcctcaccgtgggattcggctggcgtgggggaagacgaccgcggacggtggcggcaagcggcagacggcaaagcgcgcgggatggacgagacggccctcgacctcgcgagtccaacgacggcgacggagcggctcgacggtggccctagcagcagctag

SEQ ID NO: 62506 - DNA, 627 bp, Oryza sativa
  Clone ID: PAT_MRT4530_63838C.1
tcagtcttcatatgacgtggcgcttacgtggtatttgatccggaaaaacaataaaacccgtgggacccacatatcaatttcacacacaaaataataaaaaaaattgtaagacccacgtgagccccacatgtcatcctctttctccactcttatctctatactcttcgtcctccagttctgcgcgcggatcgagtcggctcgacggcggcacgtcgctgcagcggcgccgacagcatcctcatcaacgccggcgccgacagcaccgaggagttggacgccatccactccgacaaggccaaggcgctccaccacacctaccgcatcggcgagctcatcaccaccggcgcaaggaggagctctcccgcgatgtccggccgcctcttccgcttcgcgctgccgcgtcctccgaccaggtgatcggcctccccgccggcaagcacatcttcgtctggacttgtgctccccgtgggcgcctacatcgacgtcaaggggccactcggccacgtcgagtacaccggccgcggcgagttcgtcatcaacggcaagccacggaactcgcgggcgccggccgcgggaggagaggagccgcgggcggaggtcgaggggggcgacaatggcggcctccat

SEQ ID NO: 62507 - DNA, 275 bp, Oryza sativa
  Clone ID: PAT_MRT4530_63839C.1
gcaccatctccccgccgccgccgccgcgagctgatccaatggcgccgacgtcgaagctgtcgcagggcatcaagaaggcgtcgaggtcgcacacgtaccaccggcgcgggctgtgggccatcaaggacaagcacggcggagccttccccaaggccgagaagcccgccgacgcaggcggcggcgacgggcccaaattctaccccggcgacgacgttaagccccggcagcccagcacccggaagcccaagcctaccaaacttaggtcgtccatcacg

SEQ ID NO: 62508 - DNA, 855 bp, Oryza sativa
  Clone ID: PAT_MRT4530_6383C.1
atggccccaaagaaagaacagccagtgaaggagccccctgcatcagatgaattcgatctcgtgctgaatgatttgcctgaaagctacaagaagctcatggaggacgccattccaacaagattagaacagataatcatacaggaagctccgtccaatagcaaaggcaaaaagctcttctccaaggttgctgagagactctacacgcccaaaggtgggacttttctggtgaagttgaagccgaccaagagcagtccagatgaggaaatcgtaacactcctgttccgatggaaagacctctactttgaggcctttcatgctaaaggaaaatggtataggatgagcgacgctgaagagagtctgcctccgcgttctcaactgcactactccaagaaggagaaggaaggggtatttaatatgaacaatattagcacaagttataatgatgtaggtggccataacattgaagtaggcagaagggcattcaagaattgtcaccaatccctactcatggcagaagagttggtcagacagaagcgcctgaaggaagaacttgggtcaggcccattgagtctgccggtcgtgaccatctcagaatccatccgcttcccgctcttgcagcgatgggttttaggcactttctctgcacctcctacagctaagtctgagaagaaggttcctaagaaattttcctgtgagttcaacgaatggggcaagtactctcgtgctttgttcacacaggagcttccagttggctgtgaactaacttttgctcagattgctgaaaaactgcgggtactcaagtacagagcggcatgggtgcctcaaccagcacagaagcatgtcaaggacgtgtaa

SEQ ID NO: 62509 - DNA, 1296 bp, Oryza sativa
  Clone ID: PAT_MRT4530_63840C.1
atgaagaatgttgtcatcaccaagtcctcgccggagctcgtcggcctgtcgaccaagccggcgccgccgccgcccggtgacatcagcctctcctccttcgacgaggctcttgctttcgccgccttcacgtcattccacatcttcaccaatggcatcgttgagccggccatggcgatcaagagggcactgtcccaagctctggtctactactaccccatcgccggccgagctaatttcgccgccggcgaacggaggctccgcatctcctgcaccggcgagggcgtgggcttcgtcgccgccacggccagctgcgctctcgacgacgtcaagctgttcgacccgccgttcgcggcggtgttgaaggagctcgccgtggactatccggcggagggatgcggcgaggatgatccgctgctgctcatgcaggtgacggagttcgcctgcggcgggttcgtcgtcggcgtgacgtggaaccacgtcgtcgccgacggcttggggatcgcccagttcctgcaggccgtcggcgacctcgcgcgcgggctgccccggccgtcggtgttcccggtgagctgcggcgatggctccctcccggcgctgccgccgctggtcgccgccatcgagaagacgatgctgagcctggagaccaagcggttcgcgtacctcgacatcaccatcccgtcgaccatgatcgaacgcgtcaaggcggagtacgccgccgccgccggcaacgtggactccggcgagccgtgcaccgtgttcgaggcggtcaccgccgcgctgtggcggagccgcacgcgcgcggtcatctcctccgacgaccccgacgcgcccgcgccgctcgtcttcgcggccaacgcgcgcaagcacgtcggcgccaaggagggctactacggcaactgcgtcacctcgcaggtggccgtgccgacgagcgacgaggtggcgaacggcgacctcaagcacgtcgtcaggctgatccggcgagccaaggaggagataccgttgcagttcaagaacgccggcggcggtggcatgaacgggaaacgcgtcaagcagctggccggcgtgctgttcgggtacagcgcgttctacgtggcgagctggcggaacatcgggttcgaggcgccggacttcggcggcgggcgggcggcgcgggtgatgtgccacttcgagccgacgggcgtgccgagctgcgtggcgtgcctgccgcgcgacggcggcggcgccagcgttctgtcgctctgcgtcagggacgagcacgtcgacgcgttcctcgcagaattggcaactctcggctga

SEQ ID NO: 62510 - DNA, 163 bp, Oryza sativa
  Clone ID: PAT_MRT4530_63841C.1
gaaataattacttataattgctacatttgaataattactggggcaaacaataccttgtgggagtaccttatacacttattattgttaataatactagatctggcatttgtctctttcaatgccttaaccaggatgtaaacagcatcagatggcatgatctgca

SEQ ID NO: 62511 - DNA, 327 bp, Oryza sativa
  Clone ID: PAT_MRT4530_63842C.1
atgaccagttgtggtgaattggcacgagtctgggccgctatcaggagtggcggggacccggtggccaacgatgggatgcagaagtcaacgatgatgtggaaggagtcgaaggtcggaggcgaggctaggagatggagcttgggctcccgcaacaaagatggaagggagtggcgtgggtggtgtgccgtgtcctccctctcgagcggcgcaagcatcgacggtgtcattgagctcgaagatgcgacgacgactatggatctcgagcttgaggttgcaggcgcagcagacggtgtgggcctcatcgagctcacgggggaacgggggtag

SEQ ID NO: 62512 - DNA, 330 bp, Oryza sativa
  Clone ID: PAT_MRT4530_63843C.1
cacgcattggttaaaggtggcatggcatgtttctaagcaaaaggaatcgtgccgaagctcaccagagagcgagagggagatagatggcgttggcaatcggagatgaggaagaagaaaggaatcttccaacctagaccactttgttccgattccgtgcgggttcttggtcaccgtggggtagtgaagacaatggcgagacggtttggccggattcagactgtggtgaccgggcgacgtctgcaactccatgagggtgagaagaggagagtggatgttggccagctaaatacagcggctgcgatggtttggtggacccagctgataggttga

SEQ ID NO: 62513 - DNA, 2691 bp, Oryza sativa
  Clone ID: PAT_MRT4530_63844C.1
atggagtcctcgcccgcgacgccatggactccggcacaaggaaaggacgtactgccccaccagagtggctttgatgatttgatgaactccgaaattaatccgatcgttgccgtggacggtgaacctgtagtcgctgttgattctgcctacgttgaggccaccgccatggatcatgccgtcatcaccgttgaggccgtcgacgccggagttgtagcccaccttgaacaaccaagcacaccacagccaacatcttctccaagtatagcagaaagttgcaaagaacatttgaagcctatggttggaatgatatttgatacactcacagatgtggagaaattttacaaatcgtatgcacatgaagctggtttctctgttcgtgttggtcagcacaagaagcaaaatgaggaaatattattcaagcggtattactgttcaagggaagggtacataaaggagagagtaaaagatgttagtgatgaatccggaaaaaaaaaaagaaagacaccatatatgatggaaaccagatgtggctgtgaagcacatattgttgtcaagcttggcagtgataagaagtatcgaatatcttcaatgattggggagcacagccatggttttgtgtcaccagataagaggcacttgctaagatccaaccgtactgttagtgagagggcaaagagtactttgttcagttgtcataaggctagcattggcacgtcccaggcatttcgacttctccaagtcagtgacggtggatttcagaatgttgggtgcacactgaggaatttgcagaactattaccatgacctgaggtgcaaaatcaaggatgctgatgcacaaatgtttgtgggacaacttgagcgaaagaaggaagtaaaccctgccttcttttatgagtttatggtggataaacaaggacgacttgttcgtgtcttttgggcagatgccatttgcaggaaaaactatagtgtttttggtgatgtgctttcggtagattcaacatatagcactaaccaatataatatgaagtttgtgccatttactggagtcaatcaccacttgcaaagtgttttccttggggcatcattcttggctgatgaaaagattgagtcatttgtatggttgtttcaaacctttcttaaggctacgggtggagtagcacctcgtctaatcataacagatgaagatgcgagcatgaaggctgctattgctcagattctaccaaatacagttcatagactttgcatgtggcatatcatggaaaaggtacctgagaaggtcgggccctccataagagaggatggtgagttctgggatagattacacaagtgtgtttggggatccgaggattcagatgattttgagtctgaatggaattctatcatggcaaaatatgggctcattggaaatgaatggttttccacaaagtttgatattcgacaatcatggattctggcatactttatggacatacctctagcgggaatccttagtactacatcacgatcggagagcgcaaattctttttttaaccgtttcattcatcgaaaattgacctttgttgagttttggctaaggtttgacacagctttggagtgccaacgccaagaggagttgaaagccgacaatataagtcttcacaccaatccaaaattgatgacaccatgggacatggagaagcaatgtagtggcatatatacacatgaagtttttagtaagtttcaggaacaactcatagttgcaagagaccattgcattattcaagggatttcgaagtccggagatatgaaaattgtcaccatcagtagcctatttgaaaaagaacgagtggttcagatgaataagtcaaacatgtttggtacatgctcgtgtaaattatatgagtcctatggcatcccatgccgtcatatcatacaagtgcttagaggcgagaagcaaaatgagataccatcgatttatattatgaagagatgggagaaaatatgtaaacgttttgatcagatctttaatttcacagagaaatgttctttgatgacgaagaactctgaacaagggatggagtttttatattctagtttatccgaccttgtagaacctctccaaaagatcattcctgctgctatagttaacaaacaagatgagtttgaatcattccttggtagcaaaattccagatgaagtcgagatacatccaccaaatatcaagtccaaagggccatgcaaaagaattaagaagagcaaggagaagaaggcaccaagaaaacgcaagtgtggaaaatgcaagcaaagccttttgttcaggcattacagtcccagacgaggatgccttttgttcaggcacaattgccatcactcaatttctgatccagtactaactgaagtcatggcaggactgcccttgggtgcctgctgcacatgtgtcacgttgcctctcactgctcatggagtcctagtaatcgttggcagtgaagccccttctcaatttttgccggtgatgcgtagcttccagttaagtgctgctgccgacgatgcgccacgctgctgcccgtggctccagccataccctacagaactgggaagtgacgccaccatcgaggacatctccctggcggccgccagcaaggccacctctgacgaccaccgcatggctggcgaagcccaacgcggggctcatgaggcggcgcggcggatctga

SEQ ID NO: 62514 - DNA, 261 bp, Oryza sativa
  Clone ID: PAT_MRT4530_63845C.1
atgatccatcacgtgtcgccacgtgagacagcaaatgagcaaaccccactgccttcgtccaggcgcgccccgcgctacggccacacggacacggggggacagcacaaggtcgggccaactaacgcccacaccgcgcaaagtcagtggccactgacacgccgatgcaatccaggtgggcccagcgaggagaaaagaacggtgccacgtggacgcgagaccgcatatgtttgcgccggacaagtggggcccatcgcacagtga

SEQ ID NO: 62515 - DNA, 375 bp, Oryza sativa
  Clone ID: PAT_MRT4530_63846C.1
atgccgatggagggcatcggcgccggcgcagcaagacggacgacgagaggcggcgtagggagctcgtccctcgcatcccggtcgacggtcggccggtggagggtgccgtcggggctcggcgagcaagaccgtcggcgtgaagacgatgaacgggagctcgtgcccccggccaccacgcgtcgcctgcaaactcaccatgcctcctcctctcggaaatttcggatccgtgctatggccggggacggcgagcgcggtgcggtgatgccgtacttcgtgcccgtatcaagactcctcgcgccgcagtgcccccagcggaagaagctcgcggtggcgagaagggcggatcgtgatgtattctctgcgatagacctgtag

SEQ ID NO: 62516 - DNA, 239 bp, Oryza sativa
  Clone ID: PAT_MRT4530_63847C.1
gagcggattatttcggatgtcggaaatagtgcggaatcagttcgaaaaagattaaatttatcggatattacatagagtgattacatgtgttgataaattcgaattatccggcaaacggccaatcggataatccgatagaaatgtcggataatctgcatccaccggattttagagataccatatcctcatccgcatccgcattatactatcctcatccgcattcatatccgccggatttc

SEQ ID NO: 62517 - DNA, 321 bp, Oryza sativa
  Clone ID: PAT_MRT4530_63848C.1
atgacctcacatcccaacatcgccaaggctcgacctctcctaccccaggcacctctccgtctcgcgaaagtgccgccttgggcctacctcgccaccttctactctatcccaagacaatgcaacgccgggctcgccccgtcacctcctacttcatcccacgacaacgctgtgttgggcccgtcccaccacctcttcggcggattggacgaagcgtcactaccttcactccccctcgcgcctgccgacgaggacaacatagatggggtggagatgcccaatcgtggcggtggcctcgagttgagccccatgcaccgcgactag

SEQ ID NO: 62518 - DNA, 285 bp, Oryza sativa
  Clone ID: PAT_MRT4530_63849C.1
ccagcatccaatccgaggggtttcttttccacatattttttccaacatttcccaggaaggggttctccccaagggggccattaacccaatacacctttttgcaaaaaccaggaagcctttctggtaacaaagaggggttatgtcccctgcctccagggggaacccggaaggcatacccaacccttacagcctgccaggacctttgataggaaaaagcttaaaccgggaaacaggaagaaggggcccggcatatatccttgggctgcaaaccctaacacaattcct

SEQ ID NO: 62519 - DNA, 170 bp, Oryza sativa
  Clone ID: PAT_MRT4530_6384C.1
ggtggcggatccaaaaacagccggcgcttgatttagaaattttaaagtcctactcgttttacccgaggggaacacttctctacggatactggttctccagacgcctatacaagatgcaggttaaaaacgagaacaaccgagaggtttctcctatagggtccctagcataa

SEQ ID NO: 62520 - DNA, 1596 bp, Oryza sativa
  Clone ID: PAT_MRT4530_63850C.1
atggagttgtcggtgatatggggtatggcagacagggaggagtatatactactgctacacaaagtcacaaaactacaccgaataaatcaaattatttcttcagtagcagcagcagcaaacagctcatcaggtgttggtgatacctatgttccgggcaccgatgcggccgtcggccaccgacacggcgactccaccggctgcagccggtgtccggcaccggcgatcgccgcttccatccaatccaactatctcccagtcctcctcaccccacaccatccactcaacaacagcaaaaatcttttttcaatttcctcaatgagatcagcacagcaggctcaaccaaagaaacaattatcagcaatgatccaacaaccatacagttcagaaaagggggtaaccagatccatgatacagaccagtggaaatatgaaccggcacaatgaaaccacagcacttccttctgaatatctgatatcttcaggctacttctcaggagctctgagtgaaggaatgatgtcatggttactacttcaaaacaatacatagcaattatatgccatacaatgtactgtccagtctccactatacagctactatacatgtgaagtgaatgagctcgcacatcactgtagtatctacatgtttcaattgctctactctgatcgtatacacttcaaatcttgggtaatagcttcaagtgtgaagctgtgtctcagtttctctgttctgatcatatacactacatcttgggtactagcttcatcataaagttgtatcgcactccttttgctatcttaggttctggccacttagcatcttctggtacatggatgcatttgtatcctagatttttgtacagacgcagcgcagcaatgttgtttacatcacaatgtaatgccatggatcggcaaccccaactctttgctcgctcctctgcttctgcaacaagcattttagcgattcctttacgacgttcttcctttcggactgcaacatttgctatatatgcaatacctgttcttctctgcttgagaggccctcttctgggaagatagtctgccaccgtgtctactgtaagaatgccagctatggaggccttactgagaccgtgtttttcttggaagtcagcatctcttaaatctccacattcaatgctgatacttctactaagcgaattactgttaacggcgacaaggcaagttctcatgcagccaggtggaaccgaaaaaccggataggagggcaatgtaacgatcaatacgtagaacaaggtccagtggaaaagtgtaatctggaaagaacgagctgcaatgagtatcagctacttcccagcaatcctctagccgcgcatctcgaaccaggatgtctgggctcaaagatggcaacaattcaaccgccgggctggcacagcaaactcctgaaaacaaagtagacattctcatgggcacatgccaaccatgtgaatcgaatcgccggtggaaacggaaaaatcgcagccgcttcgtgctcaacgtgcccaaggaggatttggagtcgttcgagcggatcctgttcttgctggagcaggcgcactggttctacgaggacaactccgtcg

SEQ ID NO: 62521 - DNA, 1596 bp, Oryza sativa
  Clone ID: PAT_MRT4530_63851C.1
atggccgcgccgcccctccccctcgtcctcgccgccgccgccatagcctccctcgtcattctcgtcctcgtcgtcttcgcctgccggcgatggcggcgcgcggtggtagcggcggcgccgcagccgccgccgcgggcggcggcggatgtcgtcgccgcatctccggtccgcagccagaatgaggatttaaataagcctctccttgaaattctggatgatcactctagccagagtaacacttttcctggaaatgttgttggagaatcttcaaaagttcaaacaagcaggagtgatacttcaccaagaagtcatggaataagtgattctggcaggacttatcctgctgattcctgcactccgcaaggaagcaacctagacgtagaggtcattgctggcccatctcacggaataagttgttcccgacagtcaactagtcctacaatcccgataactcttggaagggtccccccaagtgatttggtgttgaaggactctgaggtgtcagggaaacatgctcgaataaattggaatgcaaagacattgaaatgggaaattgtggacatgggcagcttgaatgggacatttgtgaactctcgggcagttcaccatccaaatgttgggtccaggcactggggtgagccagctgaactagcagatggtgacattataactctaggaacttcatcaaaactatctgtccagatctcactgcaaaatcagcgagtccctgctgggattggtatggcatctgatccaatggtgggccgtcgaagtggaaagaagcttgcaatggaggatataagcttttgccagtgccctctgcagggtgttgaacagtttggactctttggaatttttgatggacatggtggtgatggagctgccagagctgtcagcaagatttttccagaaaatgtggcaactcttttgtctcaccatgagacaaaagaaaaggttctttcatactctgatgcttctgacgttcttagatatgcttttactatgacagaagctgcaatcgatcatgagtatgaggggtgcacagcaacagtcctgctgatttggtttgatcaaaagaaagactgttttgcccaatgtgctaatctaggtgattcagcttgtgttatgagtgtcaatggaaagatgattgaaatgactgaagatcatcgagtagctagtgtaactgaacgagctaggatagcaagagctggacaggccctgaaagctggcgaagtccggattaatggacttaatctcgccaggatgttcggagataagtttctaaaagagcaagattcacgcttcagctcagaaccatatgtgagccaagctgttcacattacaaaagcatgcacagcttttgcagttattgctagcgatgggctctgggatgttattagtactaaaagggcagttcagcttgttgttgagggtagggagagaaacagtggtgatagtgcctcggcggacaaagtcaggcttcagaagcctccagttgtttccctgacagaaatggaatactgtggaatctgccaagggctagaatctagtggtgtaactctgaaattctctgtcctaatccagcaagatgcatga

SEQ ID NO: 62522 - DNA, 3585 bp, Oryza sativa
  Clone ID: PAT_MRT4530_63852C.1
atggcgatggatttggacgagccgctcgacgcggagaagggcgaggcggcgctgcggcggctgcgcgacgccgacccggccctctacctctccccctccgccgacctcgccgccgccgcccgtgaggcctccaagcacctctacgcctcgctcgtccccttctcccccgcgcagccgcccccgctctccaacctcctcgcaggccccgccttcgacgccgagcagatttggtcccagattgagctgctctcccgccccctcatcccccacctgcgccgccagctccgccgcctcgagaagcaacccccgtctcagccgccgcctcgtacggaatcgaagtccgctgatgccgaagagaagtcagaggaggaggacgaggaggatggtgaaggtgacgaagaattggaggagttggacgatgtagatgatgaagaggagtcagaggaggaggaagaggaagaggaagaagacaaagaaggattggaggataaagcagggaatcaagtggaggacgagttcttcaagataaaggatctcgataagttcatggtaaagggggaggaggcggaatatggtgggggtgccaagcaagggaagaagaagaagaaaacagagaactggatggaagaagatagtgatgaggaggaagaggaggaccttgatgaggatgaggacaatgaggatgaagaagatgacgatgaacacttggacttggaagactttgacgatgaagaagaagaagaagagggtgcagttggagatataatgtataaggatttttttgaggaagctgatgaccaaaaagtaaggaagaaaggtggctccaagaaagttcaattcaaggatgaaccagatgaaccagaagttgatgacaaaaatgatgatggaaatgttagtcaagatgaacagggtttgtcaactcacgagaaggcgcgcctgaagatgcatgctaaaatagaggaaatggagaaagctaatcttgaacctagtatgtggaccatgcagggagaggttaatgcttccagcagacccaaaaacagtgctctagaagtggaccttgattttgagcacaatgtaagacctgccccagtaatcactgaggaagtcactgcttctcttgaagagatgataaagaaaagaataatagagggtcattttgacgatgttgaaaagccttctcccttgcaatttaaatccccaaaggaacaaaaggatctggacgaaagtaagagcaagaagggtcttgctgaactatatgaggacgattatgcgcaaaaggctggccttgcacctgcaccactttctatttcagatgaacttaagaacgaggcaaagaccttatttaagagaatatgcttgaggttggatgcactatctcatttccactttgctccaaagccggtcattgaagatatgtctatacaagcaaatgtaccagctctagcaatggaggagattgcacctgtagctgtttcagatgctgcaatgcttgctcctgaagaaatttttgaaggaaaaggtgatgttaaagaagaagcagaacttacacaagctgagcgcagaagaagaagagctaacaagaaaaggagatatgcagagttggccgtagagcaatgttgtgctgtactactactggagactggactggccgtcgccattctagcaaatgtcatttgtaacaacgatacactggagtatgcacagtggtgtaccgtgaaccagcaaggacgtgcgaatgcacactcacctccatctcctattctcctcctccttgttgaaggagttcgtgtgcctctaccaagaacaataagaagccttgcattggtagccatgatcacggtggtggacctgtaccacgtcctgacggcggtggtgccgttgtacgtggcgatgacgctggcgtacgcctccgtccggtggtggcgcatcttctccccggaccagtgctccggcatcaaccgcttcgtcgcgctcttcgccgtcccgctcctctccttccacttcatctccaccaacaaccccttcgccatgaacctccgcttcctcgccgccgacacgctccagaagctcatcgtcctcgccctcctcgcgctctggtgccgcctctccgcgcgcgggtccctcgactggctcatcaccctcttctccctctccaccctccccaacaccctcgtcatgggcatcccgctgctcaaggggatgtacgccgccgccggcgccgcagccggcgccgactccggcagcctcatggtgcagatcgtcgtgctccagtgcatcatctggtacacgctcatgctgttcctcttcgagtaccgtggcgcgcggcttcttgtcatggagcagttcccggacaccgccgcctccatcgtctccttccgggtggattccgacgtcgtctcgctcgccggcggcggtggtggagccgcggagctgcaggcggaggcggaggtcggggacgatggcaagatgcgagtcaccgtgcgcaagtcgacgagctcgcgctccgaggcggcgtgctcgcacgggacgcagtcacactcgcagtccatgcagccgcgcgtctccaacctctccggcgtcgagatttactcgctgcagtcgtcgcggaacccgacgccgcggggctccagcttcaaccacgccgagttcttcaacatcgtcggcaacggcaagcacggcgacgaggagaagggcgccgccggtggcgggggccactcgccgcagccggtggtggggaagaggaaggacctgcacatgttcgtgtggagctcaagcgcctcgccggtgtcggagcgcgccgccgccgccgccgctgccggcgcggtgcacgtcttcggcggtggtggcgccgaccacggcgacgccaaaggtgctcaggcctatgatgagtacagcttcgggaacaagaatgagaaggacgggccgacactgtcgaagctggggtccaactcgacggcgcagctccggccaaaggacgacggcgaggggagggcggcagcgatgccgccggcgagcgtgatgacgaggctcatactgatcatggtctggaggaagctgatcaggaacccaaacacttactccagcctcctcggtgtcatctggtccctcgtctcctacaggtggggaattgagatgccggctatcatcgcccggtcgatttcgatcctttcagatgcagggctcggaatggccatgttcagcctaggattgttcatggcattgcagccacggatcattgcctgtgggaactcccttgcttcgtatgccatggccgtcaggttcctcgttggtcctgccgtcatggctgcggcctccatcgccgtcggacttcgcggggtgcttctgcacattgccattgttcagcgtgatattcgggatgctgatagctctccccatcacattggtctactacatactgctggggctctgaagagctctccaagtctcaactcaactgtgcaagaacttgatgttactgacagtttgattaggatttatggtcagcttagtgatgctaggtggacaattatccgagaacttttgggttcaagtgacggccagccacggtttctgattgaagattag

SEQ ID NO: 62523 - DNA, 4202 bp, Oryza sativa
  Clone ID: PAT_MRT4530_63853C.1
atggcgatggatttggacgagccgctcgacgcggagaagggcgaggcggcgctgcggcggctgcgcgacgccgacccggccctctacctctccccctccgccgacctcgccgccgccgcccgtgaggcctccaagcacctctacgcctcgctcgtccccttctcccccgcgcagccgcccccgctctccaacctcctcgcaggccccgccttcgacgccgagcagatttggtcccagattgagctgctctcccgccctctcatcccccacctgcgccgccagctccgccgcctcgagcagcaacccccgtctcagccgccgcctcgtacggaatcgaagtccgctgatgccgaagagaagtcagaggaggaggaggatggtgaaggtgacgaagaattggaggagttggacgatgtagatgatgaagaggaatcagaggaggaggaaaaggaagaattaggattggagggtgaagcagggaatgaagtggaggacgagttcttcaagataaaggatctcgataagttcatggtaaagggggaggaggcggaatatggtgggggtgccaagcaagggaagaagaagaagaaaacagagaactggatggaagaagatagtgattcggaggacgaggagtatcttgatgaggatgaagaagatgacgatgagcacttggatgaagcggatgaccaaaaagtaaggaagaaaggtggctccaagaaagttcaattcaaggatgaaccagataaaccagaagttgatgacaaaaatgatgatggaaatgatgaacagggtttgtcaactcacgagaaggcgcgcctgaagatgcatgctaaaatagaggaaatggagaaagctaatcttgaacctataatcactgaggaagtcactgcttctcttgaagagatgataaagaaaagaataatagagggtcattttgacgatgttgaaaagccttctcccttgcaatttaaatccccaaaggaacaaaaggatctggatgaaagtaagagcaagaagggtcttgctgaactatatgaggatgattatgcgcaaaaagctggccttgcacctgcaccactttctatttcagatgaacttaagaacgaggcaaagaccttatttaagagaatatgcttgaagttggatgcactatctcatttccactttgctccaaagccggtcattgaagatatgtctatacaagcaaatgtaccagctctagcaatggaggagattgcacctgtagctgtttcagatgctgcaatgcttgctcctgaagaaatttttgaaggaaaaggtgatgttaaagaagaagcagaacttacacaagctgagcgcaaaagaagaagagctaacaagaaaaggagatatgcagccatgatcacggtggtggacctgtaccacgtcctgacggcggtggtgccgctgtacgtggcgatgacgctggcgtacgcctccgtccggtggtggcgcatcttctccccggaccagtgctccggcatcaaccgcttcgtcgcgctcttcgccgtcccgctcctctccttccacttcatctccaccaacaaccccttcgccatgaacctccgcttcctcgccgccgacacgctccagaagctcatcgtcctcgccctcctcgccctctggtgccgcctctccgcgcgcgggtcactcgactggctcatcaccctcttctccctctccaccctccccaacaccctcgtcatgggcatcccgctgctcaaggggatgtacgccgccgccgccgacgtcgactccggcagcctcatggtgcagatcgtcgtgctccagtgcatcatctggtacacgctcatgctgttcctcttcgagtaccgcggcgcgcggcttcttgtcatggagcagttcccggacaccgccgcctccatcgtctccttccgggtggattccgacgtcgtctcgctcgccggcggcggtggtggagccgcggagctgcaggcggaggcggaggtcggggacgatggcaggatgcgggtcaccgtgcgcaagtcgacgagctcgcgctccgaggcggcgtgctcgcacgggacgcagtcacactcgcagtccatgcaggcgcgcgtctccaacctctccggcgtcgagatttactcgctgcagtcgtcgcggaacccgacgccgcgtggctccagcttcaaccacgccgagttcttcaacatcgtcggcaacggcaagcagggcgacgaggagaagggcgccgccggtggcgggggccactcgccgcagccggtggtggggaagaggaaggacctgcacatgttcgtgtggagctcaagcgcctcgccggtgtcggagcgcgccgccgcagcagcagctggcgcggtgcacgtcttcggcggtggtggcgccgaccacggcgacgccaaaggagctcaggcctatgatgagtacagtttcgggaacaagaacgagaaggacgggccgacgctgtccaagctggggtccaactcgacggcgcagctccggccaaaggacgacggcgaggggatggcggcggcgatgccgccggcgagcgtgatgacgaggctcatcctgatcatggtttggaggaagctgatcaggaaccccaacacttactccagcctccttggtgtcatctggtccctcgtctcctacaggtgggggattgagatgccagccatcatcgcccggtcgatttcgatcctgtcagatgcagggcttggaatggccatgttcagcctaggattgttcatggcattgcagccacggatcattgcctgtgggaactcccttgcttcgtatgccatggccgtcaggttcctcgtgggtccggccgtcatggctgccgcctccatcgccgtcggacttcgcggggtgcttctgcacattgccattgttcaggccgctcttcctcaaggaatcgtgccctttgtgtttgccaaggagtacaatgttcatcctaacattctgagcacagccgtgatattcgggatgctgattgctctccccatcacattggtctactacatactgctggggctctgaagagctctccaagtctcaactcaactgtgcaagaacttgatgttactgacagtttgattaggatttatggtctgttttagttgctcagattttgtttggatgataggtcagcttagtgatgctaggtggacaattatccgagaacttttgggttcaagtgacggccagccacggtttctgattgaagattaggaacatagacatcacattagtgatcccccccatccaatttgtaagacattgagaaggtctgtttcaaattactgacaatgtagtaagacattgaacagtgcttatttagcattccaataactgatggtaatgcgcttacttaaggagctaaaagacaaacttggtacactgtttcaaagtcaggactctttattttttcttttcttttctgtatttcttaaagtagaatttggaagaaggggaattggaagggagtcaaacgagtcaagggaaggacagaatggtagctagcttagctaggacaatggtgagtcacaaaagagcaccaaaagcaagtacaagtacaaagcttggggggacacaggatccagttcaggtcacagaaacggttcggttttgggaggggattgtgggagttttggttggctgcgctgcgctgacccttgtaaaacggacgccgattctgacaagagatcgaccttgttttgttcgtgtcgtggtattgctgactactactttggaatgattaatctcctactactaattactccggaaacgcttacattatgaacaagtagtcagccatttttactgttcagcattacctcctgacccaaggatccattcatgatgagtattgtgcaaatggcaacgcagcattgacagacatggaggcagagagcaggctaggaaaggtagggtgaagggttgggctccaatgcttttgatcacaggatctgtactctggtggcacaacagacagacagctgttccaggtcaaagaccctgacgtaacccatctcccgtcccacaagaaaaggcgagcgaacgtattggaatgtgggatgggtaaaagaaatcttttgtttcttgttacactagtcgtagtagtagtgtagtaatgcaattttacaatatcattttttacactatagagtatcaatggagtgcatgtattcagaggc

SEQ ID NO: 62524 - DNA, 689 bp, Oryza sativa
  Clone ID: PAT_MRT4530_63854C.1
tttttttttttttttttttttttagggctcaaaatgaacacacattaatgctgaaaatagtatagaggggaacagaatatttgctattatacgacaaaatgtagagtgggttggttgctattggatgatcaatatcaaagaacgtgatagtacaaaaccaaccaatcctactattctactattaccacacatcacaatatttgtaggcaaagcttgtattataaaacacatagatttggttgctctgaaggatggagatatataggaacacaaaattgggttaaacccactgaacctttagtcatacagagacttagcagattggacccttgacttcttgcttttggctttcaggaccttctcctcagccttttcattttttgaaatggccctggcaacagctttcattttcctcacgttttgagaccttttaatttgcactccctttttaattttcttgttaatcgaagtgagcgcaaccgatactgaagacgtctgcttcccctccgacgtatccatgggttctggtgcgcccacggcggtggaggccgccggggcgccctcggaggtgtccatggcagcgaccccgccgccgccgcacttcttgctcttcttgttccggttcttcgccatggctagtcctagggtttggaggctccgccccccgtgctcggcacgaggcctcgtgc

SEQ ID NO: 62525 - DNA, 309 bp, Oryza sativa
  Clone ID: PAT_MRT4530_63855C.1
gcaaataccttatttaagagaatatgcttgaagttggatgcactatctcatttccactttgctccaaagccggtcattgaagatatgtctatacaagcaaatgtaccagctctagcaatggaggagattgcacctgtagctgtttcagatgctgcaatgcttgctcctgaagaaatttttgaaggaaaaggtgatgttaaagaagaagcagaacttacacaagctgagcgcagaagaagaagagctaacaagaaaaggagatatgcaggatcgcataaggagaggccagccaagatgcagaaagattaa

SEQ ID NO: 62526 - DNA, 639 bp, Oryza sativa
  Clone ID: PAT_MRT4530_63856C.1
ttagtcatacagagacttagcagattggacccttgacttcttgcttttggctttcaggaccttctcctcagccttttcattttttgaaatggccctggcaacagctttcattttcctcacgttttgagaccttttaatttgcactccctttttaattttcataatgaataattcttccttccttttttgcgaaaccataccgttagcatgcagcatcggcaacttgacttttcttctcaattttacagcagcttttacttcaacccatttatcccagaaaagatgacacgtcttgggcaatgcttgtctactggacacaaagaactgagctgtttgttttgggtctaagcgtttcaggacaggtatgtcttctgtttttttgttaatcgaagtgagcgcaaccgatactgaagacgtctgcttcccctccgacgtatccatggctgcaatcacaaggaaagataagtgggacacccagaaaccactgaaaactctaggaaaaggaagaaacggaagggcaagattacgttctggtgcgcccacggcggtggaggccgccggggcgccctcggaggtgtccatggcagcgaccccgccgccgccgcacttcttgctcttcttgttccggttcttcgccat

SEQ ID NO: 62527 - DNA, 727 bp, Oryza sativa
  Clone ID: PAT_MRT4530_63857C.1
atctgtatctccgcccccccccccccctctcctcaacctctcttgtgcttgcttctccattgcagctcacctccatctcctattctcctcctccttgttgaaggagttcgtgtgcctctaccaagaacaataagaagccttgcattggtagccatgatcacggtggtggacctgtaccacgtcctgacggcggtggtgccgttgtacgtggcgatgacgctggcgtacgcctccgtccggtggtggcgcatcttctccccggaccagtgctccggcatcaaccgcttcgtcgcgctcttcgccgtcccgctcctctccttccacttcatctccaccaacaaccccttcgccatgaacctccgcttcctcgccgccgacacgctccagaagctcatcgtcctcgccctcctcgcgctctggtgccgcctctccgcgcgcgggtccctcgactggctcatcaccctcttctccctctccaccctccccaacaccctcgtcatgggcatcccgctgctcaaggggatgtacgccgccgccggcgccgcagccggcgccgactccggcagcctcatggtgcagatcgtcgtgctccagtgcatcatctggtacacgctcatgctgttcctcttcgagtaccgtggcgcgcggcttcttgtcatggagcagttcccggacaccgacgactccatcgtctgcttgcgggtggattacgacgtctactcgctcg

SEQ ID NO: 62528 - DNA, 570 bp, Oryza sativa
  Clone ID: PAT_MRT4530_63858C.1
gatgccttgaaaatttgggatccctttcatcagagaattgttaattgttgttgaggaaaattgcaggaatccctctaaacttgaagtacagtgccgaacaagtcccttgaactttaaagtaaatttgaaaatgtataaaatcaacaataaggttcaattagatctcaataagtgtttgcttagctaaaagtttggtggtataccttaactttcttccttctgttgaaagtatataccaacaattatttttccttatgtccccgcaaaagaaaaaaaaacaatttcttccttctgtttactttttgattttttttccgagaaaaaagtactttgttatcctatttcattggcaaaaccaggattagagcactagcctggccaaattttcttttttttcttaagaaaaagataatggtttgtcaatttactgtatttatacatttaaatgcatggcattttgctaccataattttagctgtcatccacggtattcgtgtggttgcaaagcagaggcctcattgattgcccaagagcttatttatgaacttattagcgattaaaaaaatattg

SEQ ID NO: 62529 - DNA, 576 bp, Oryza sativa
  unsure (1)..(576): unsure at all n locations
  Clone ID: PAT_MRT4530_63859C.1
ggctcgaggaggaagaggaagagaaacgaagagcaaaggcctcgcacactccacncagaaagagaaaacccaccagacggggcncggggggcatctggaaacccagaaccgcacccccccagacaaggcttacattctcactctcgccccaccatcgaggggaccgacttcaaagccactcgccaactcacgcgcgtcttgctccatcatcgccacgctctcaactggaggattcctgaaggaaacctctgtccaacagtgccaaacaggagcaattacactcataggctgcaacaccttctctcatctgacatcattccaaacaccacctcaagagaaggcaagttcaggggattcgacagtggaaccggagccagccgcacttacccccttcttggagcttctcttcatggaaggaagcctgtaggatcagatgcgactaatgtcgcaattgagtgggcggagagaaatgttaacaggaacccacacaattctcaaccgactgaaaccagaaaggttcaagacaatgcaagtgatccctgcgtggaagccgaagaggcggcgaaaggtgacaac

SEQ ID NO: 62530 - DNA, 403 bp, Oryza sativa
  Clone ID: PAT_MRT4530_6385C.1
aaaaaaaaaaaaaaaaaaaaaaaaaaaaaaaaaaaaaaaaaaaaaaaaaaaaaaaaaaaaaaaggaaaaaaaaaaaaaaaaaaaaaaaaaaaaaaaaaaaaaaaaaaaaaaaaaaaataaaaaaaaaaaaaaaaaaaaaaaaaaaaaaaaaaaaaaaaaaagggggggcccttttaatttatccacattttccaccccgttcttccctctgaaattattcttttttgtggccccaaaataaaataaaggggcccgtttttttaaaccttctaaacagtaaaaccctgtttttcaccaatttattttcctttaaaatatatcccccttatcgaaatttttttatatttaaataaccccccacctttttccccttccctaaatttgtacactcttattttttttt

SEQ ID NO: 62531 - DNA, 12922 bp, Oryza sativa
  Clone ID: PAT_MRT4530_63860C.1
atggcctcatcccaacaagttgagcttgaggctgcaaagcttcttcagaaactcattcaagagtcaaaggatgaacctgctaaattagcaacaaaactttatgtgatatgccaacatatgaaactaagtggaaaagagcagtcactgccatatcaggtcatatcaagggccatggagactgttgtaagccaacatggaatagatatggatgcgttgcgatcatcgagaatcccattagctggtggtccacaagcaggagattctagtggtgctatgcctaaggataaggagatcattggcagtcaacctcccatggttggtactgatgcatcccaaagtagtgcgcatgctggattatggaattttccatcaggttcagcagatatggcacgtcacagtgcatctatttcaggcagggtcccagcaggaccaaataggagcgatgttgcaggagctgatattcatcaaggctccatgtcacagaagagtggaagatcctctggaatggaaagccctgccagtctgcaaatagaggatactagatctatgaattcacatgattctttgaagtcagatgaaaaaacaagcaaaaaatcatcttctaagagaaaaagagtggatccaaaagcagcaggggacttgcattctgaagacaactcaaaatcagatgccatgtctaccggacaaaatattagaaagggaaaacagcctggcaaagctggtactcagggtcaactttccaggacagtcgaacacgatccatcacatacattacaagttggtaatgctcaggtgccaccgttacccagtggtgcacctttctttagggctcaccaggaaggaccatcagcttcttctgcaaggactatagacaagactaaaccatcaaatccattcacaatggcacaaatttcaaattttgctgaaggactagcttctggcaacattcctgctgagttgcagaaaagtatattgggaggagcaaatctacttaatgctagttttggctggaaccagaatgcacaaggtccagttatgaagaatactcaagggtctgttcccaacctaatgagacctggtgttaatgtcgaagggaaagttaacttaggatcacaaggaacttttaattctatgtctgcatcacaaatggattaccccacagttcctccttatgtgtcttcttcctttggaggtggtccacagtatcttgacaaagggaaagacttgacttcaggcaatactggcagtgaactaaattcttctaaagctggagctcagctggggatcatgcatatgcattttgacacacaaatgcggtataactttcagggcagtccaatgcaagaaaggcacggaattgtcagagcacctcagagagctggttcatctcaaatgtctcaaacctctcccagcattccattcaaagagcagcagttgaagcagctcagagcgcagtgcttagtatttcttgcatttagaaataatctgcagccccggaaggtacatcttgaaattgctttaggtgttggtccccctgcttcagaaggtggcagtgcaggtcagagaggtagtgagagcagaatggctgatggttctggaaaggaaaatggaaacagccaggaaaaccctgctatttttggtaggcaaagtgatatttctagacttcaatcaacatctacaggcagtgttgcggatgttgattccgcatcaaaggacccagaaattgttaaaaagaagatcaagatagctgaacatgagaaatcatttgaagcagaaaatatccagcaaaccgttcctatacagggaactgattctgaaatgcattctcaagaaacgatatctcccatgccatctgggcaactgcattactttcagggagatacaagaaaaactacccctgagatctacaaggctgatgcagaaaatttgaataggaacttaggctgggtaggaggccagggaccatctcctttgggtggtaataggcatactagtatggaagttggcctcttggccaaagatgaagtgtccaaagaaccatttgcagttttgaggcctcatcatatgcctgttgatggtagcaaccacaatttatctggaaaggatcaaactcctgagacagctggcaatgaaattgataatggtagccacatgggagagatgatatttgagcgatctgcagatgaaggagacgaagatctttctgagcaagatgatttaccattatctcctccgaagtacacaatgactgataaatggattttggatcatcagaagagaagatatgaagaaaacaaaaggaaggcattagagttacagaaggcacacaggagaatttcagcatcctatgagaagctaaaggaaaatgttagttcatcggaggatctttctgcaaaaacaaagagtgtcattgaattgaaaaagcttcaacttctccaacttcaacgtcgtgtgcgcagtgaatttttgcaggactttttcaagcctaatactactgatttggaccgcataaaatcagtaaagaaacatagacatggacgtcgtgttaaacagcttgaaaaaattgaacagaaaatgaaggaagaaaggcaaaagagaattcgtgagagacagaaggaattctttgctgatatagaggcccacagagagaaactggaggatagcttcaaggttaagagagaacgcttgaagggtttcaatcggtacgtaaaagagttccacaagaggaaagagcgaattcatagagagaagttagacaggatccagcgggagaagatcaacctgcttaagaataatgatgttgaaggatatcttaggatggttcaggatgcaaaatctgatcgtgttaagcaacttctgcgagagactgagaaatatctacagaagcttggtgccaaactacagggttccaaatcgatggatggccgtgtttcatatgcttctgatagcacagcaaatgatattgaagatgagagctaccagccgcagcattatctagaaagcaatgaaaaatactatcaattggcccacaggtaccagatgaacggcttgcgttggctggtttcattgtacaataataatttaaatggaattttagctgatgaaatgggtcttggcaaaacagtgcaagtaatctctttgttatgctacctcatggaaacaaaaaatgaccgggggccattccttgtggttgtaccatcttctgttcttcctggatgggaatcggagctcaacttctgggcacctagtataaataaaattgcctatgctggccctccagaagaaaggcgcaaactattcaaagagatgattgtacatcagaaattcaatgttcttttgacaacgtacgagtacttaatgaacaagcatgataggccaaaactaagcaaaatacagtggcattacataattatcgatgaaggacaccgtataaagaatgcatcttgtaagcttaatgctgatttgaagcattatcggagctctcacaggctattgttgacaggaacacctctgcagaacaatcttgaggagctatgggcacttttgaattttctgttgcctaatatatttaactcatcagaagacttctctcagtggtttaacaaaccatttgaaagtaatggtgatagctcaaccgaggaggttgaaaatgaattgccggagaagattgaaagacttgtaagatgttggccatctgcttatcagaaacttctaataaaaagggtggaggaaaaccttggtggaattggagcagttaagattgagggttatttacctagacactacctgccatcaattctgaggctctgtggaaaacttgagatgttggatagattgctgcccaaactcaaagccactggccatagagttctgcttttctctacaatgacaagattgcttgatgtaatggaggattatcttgtatggaagaagtataaatacctccgattggatggtcacacttctggccaggagagaggagctcttatcgacaaatttaataatcctaattctcaagctttcatttttctgcttagtatccgagcaggaggtgttggtgttaatctccaagcagccgatactgtcatcatatttgacactgattggaatcctcaggttgatctgcaagcacaagctagagctcacagaattggtcagaagaaggaagttcttgttttacgtttagaaacagtccaaacagtggaggagcaagtcagggcttcagcagagcataaattaggtgttgctaatcagagtattacagctggattttttgacaacaacacaagtgctgaagatcggagagagtatcttgaatcactgctacgtgggggtaagaaggaggaagcagctccagtgttagatgatgatgctctcaacgatcttcttgctcggagcgaagatgagattgatatatttgaatctattgacaagcaaaggagagaggaagaaatgatatatgagtcatcaaatataaaaagtgtgaaggttgtaaggaggaagggtgagcttgggggtcttgacacacaacattatggaaggggcaaacgtgctcgtgaggttcgctcttatgaggaccaatggactgaagaagaatttgaaaagctttgtcaggttgattcccccgattcacctcaacctggtggtatatcaagggatgcagatgtccctaaagtggttaagttggaagtacctccagagagttcaaaagaaccagagcaagccaaaaaagagccagcttcttctgttggagactccccgcctgctaaacggcgacgaggtcgacccagaaggtctgatgcttccttatctcctgttacagctccaccaaatactggcaaacaagaggcaggaactataattgatggcagttcttctgcaccaactactaccattcattcggttgctccagatgttaccattgattctactgcactatctgctacgggcaatccagatgttggtactgagattaagggtactacaccagatggtaccatcaaaccagtaatttgtactgacaataagggtaccgcatcaattgctgttttggaagggtctaatgcaaaggaggttggtataccagcacacagtgttcatgaacctgtatccagttcagcacctcatccaccaacccctgctacatctagaggtagaaagacccaggcaggagaaacacctcgcaggcgaggccgaaaaccaaagtctcttgctgctagtgcaggagatgttattctaagtcctgtggttgcagttggtagtggagaagcatatgcgagttctgtggtttcatcatatcctcaagggaatgtgtcctcatcacatgcaaatgctatggcaggtttgcagaaggatacaatcatatataaacctgctgcattattgccagaaggagttaaaggcactctaaccccatctggaggagataaagatgaaatggttaagacacctctggcagaagacatatatgctggaactgtaactacctcaggaaatgccaactcacagctgccaatgatagctcataatgaaaatgctggattggttcaagggggcactgatcaaaacttgtccgtagctacacctaccatacctgtggtttcagaagggtcaacaaaaatatcagaggttgtggttgcggataaacctgctgagaagcaaggtgctcgtcgccgcagaaagaaaacatctggtactggtagtgaggacactggggtgagcactaggcaaagagcagctagcaggagattgtacggtattggtaccgctgatattgcaggtactgacatgagcacaggggagaaaataggaatagtgaaggaaatagatggtagttgtcaagatacttctaagggattaccaaatattatctctccatcatatgagaaatctggatatgactctcaaccaagtacgccgatagctgttcctattaacgaggctgcacttcctagtggattcagcgaagcccatgctactcattctgaactacatcctgccagagaatccattagttctgttggccatgagaaactagcaggtgcgcacttggaagcacctccatctgtttcattccaggctccagtgcagcatgagacacggaaggattatgtgggagtacattctgaagtcgcgactactcatccggaaacaattactacccactcatcagtgaatcctgttattgatcataaactagcaaatgtccaatttgaatcacatgcttcacttcatacttcgggcaaggatatcaccacaatgccatccgaggtcgatagtggtgctccgagcaaggcaccaggtaggaggaggaaaggttcagctcgggaaccccgcaccagaagtaattctgcaacagctgcatctgaacgtcgtgctcgacttgctggatcaaagcagccagatgatattaaaatggcagagatgtcaggaaaccccagcactgcagtctgctcttctacacagcaacaggaagacaacactttgaaagctgcgcatgctactggttctgttggtgaagaacagaacaatgctgagaatcgtgtgcgtgaagtgtcaatgccagcaggcatattggaggcaaagttagagctgactaaacaaactgaccaggcaggtcataattcagagcaggaacaagagatggtttcggcagcaaaatcagcatctgcaaatgatgaggagcataaggtgcatgaagtacatcaaataattgctgatcacaatgcacttccatctagtgcacagtacactcttcaggataaaattgatagcagtgcggatgcgggcctggtcccttgtgacaaaattgctagtgtggttattgcagtagatgaccaagaccctagcaatgcctcagataaggatgctcctgcctccacagaagatgatggaaatggtctgcaaagtgaatgtgttcatgttgatttggttctggctaagcaagataatacgaaagttgaagatacgcaaaagtcgaatcaaccagcagaacaaggggaaagcttggagatgactgggtctaaatttagatcggagacgagactggaaaaaacagaagaaaccgtggataagagtggtggtgacaatctaccaactattgagaaaaatgatgattctcccatagaaaggtcatctccttcagcagacaaaattgcccaagtagcatatgggggtgaagcaggaactgaaacaactacggtggaggccgtttctgctatgaattctgatggcttacaggatgttcgcaatgccttgtccacccatggcttatcaaccaatgatattactgttgcttcggaagaacacagggatcctgagagtcatttgtctggtgaagtgtcaatgtcaggtggatcctcagagctcaagttagaatcgctaaaccaatcagaatctgcttgccagtctggtgaagtaactctggaagatacacatgccaccttggacattcagattcctgcattgattgaatcagaagaaaaaaagtcacctggaggcgatgtgcatggtagtgaagaacaacacatgcatgaagtacttcataatactgttgatggctctatctctccatccaatagggagcaggacaagctgcaagttcatattgatactaacactgacgtagacattcctagttctgacaaggaccattctactgatattgttttagcaggttgccaagccccttgcgatgcctcaggtaaggataagctgtccacctgtgatgcctcaggtaaggatatggctgcccctacagacgatgatctcaattgtctgcaaagtgaagatactgtcattcctgtggctgatgctaaggacgagactatgctagtcaaagctattcagaatgacgaaatgtctatgggctcttctcatggcttacctgctaccatacaatcaactgattcagatcgtcttgcagaagaaggggagagtgcagaaattactggctctaaattttcatgcgggatggaacaggagaaaatggaagagcccttggataagagtgtcactgacaatcaaaccagcagtcagataaatgatggttcaaacaacatggattcacaaaaagtggatagttctttgcaagcagccgatggtggtgatcttttggtaagtagaggaaccagtgttgaaaccaccactgctattaatactgatgcgtcagatgaaagtatcagtgtgtccactcagtccgtcaaagaggctagcacagtagaaattggtgcatctactaatgacatagctcctgcttgtgaattaagaaaggattttgagtctcatgtatctggttgtgtgtcaaagccagtaggattgtcggaactcaggttagaagagctgagccaaacaaagtctgtttcgcagtctattgtagcaaatgctgaagaaacaagtaccaggtctgacattgaaactcctgcaatggatgcatcagaaagtaaatcacctgaaagcgatgtgcatgagttgagtgaaagggtggagttcatgggaccaacgccaagtgcaaatgagaagagtaatgaacttcatagtcaagaactagtgaagatgatttcagctgcagaaacagcatcaacagaaggtcatcgcgaaaaagacacgtgtgaagtagatcataagattgattgcactatattttcaccaattggggatcaggacacacgaaacagaattgatggtgacacagattgtggtgtgccctcttgtcaaagaaatgcagcttttgactctgaaaatgaagtctctgctgagattaatttaacaggcagccaagcaccttgtgatgcccccaataaggccactcctgctcccacagaagatgatcacaatggtcaggaaagcgaagatactgtgattggtgctgagcaaggcactgttgaagttgaagctatgcagattgatggtatctccaaaagctattccagtgattcccatgccactttacaatcaagtgactcaaatcagctagtgaacagtgactcaaaatttgaatcatcaaagaaacatgacaaaacagatgaaacttccaatgaaagtagaggtgacaatccaacccacagttgtacaaacgatgattcccatgataagaatttagtaggatgttctccttcagaagacttaaatgaggacaattctgcccagttagctgatggtgatgatttagtgggaagtaaggatactactgctgcacacgccagtggcttaaaggagcttacctctggcaattatgttgcctcatcttctagccatgttgttcaagatgtaacatccatctcgaaaatggagtctgtgcaggctggtagtgaggaaatctatcatggctactctgatgaaaccatccattctgctagaatcaaaccagtggttggtactgaaattacggaaaatgcttctgttgcttctgcaccagttattaccatccaaccagatattgaaactgaagctggtgttactgcgtctttgactgttttggaagggtctatagcagaggaagttgatacacaagtagaaagtggccatgatctggtcactagtacagcccctctttcaccagctcctttacccggtgagagtcatgcgtgcactgatgtatcatgtcctgtggctgtggaggtatcagagacaaagctagagtcagcaaaccacacagctagccagttaggtgcagcttgtacagaaacaccaaatgccttgttgaacactctgatccctgcgttacctgaatcggaggaaacaaaactttctggaagtgatacagatggaaagaccattatggcagagcttgcatcttccagtgatgaacatgataaggtgcatgaagtaggtaatgaaactggtgatgataataaacttccatctagtgtggcagaagatgcagtgcaaggtgaaattgatggcagtgctgacatggacagtcaaataattgctggtagttccgaagcagaaatcaacaattctactgtggctactatagctgacagccaaataccttttgatccctcagataaggacactcttgcagaagatggcaatggtctgcaacgtgaaggtactactgtggatgtgactggttctaaggaagatgatatggaagctgaagagaagcagatggatgatagtcatttgcccgctgctttacaatcaactgagtcaagccagcccacagaacatgctgcccccacacaagatgatggcaatggtctgcaatgtgaaggtactactgttgatgtgtctggttctaaggaagatattatggaagttgaggagaagctgattgatgatatttccggaagcccttctagtcatttgcctgttgctttaaaatcaactgagtcaaatcagcctgcagaacatgctgtccccgcagaagatgatggcgatggtctgcaaagcgaaggtaccgctgttgatgtggttgattccaagaaagatgatatggaagttgaagaaaagcagattgatatctctagaggctcatctagctttctgcctggcgctttagaatcagctgaattaaatcaacctgcagaacatactgcccccacagaagatcatggcaattgtctccaaagtgaaggtactgctgttgatgtgccttgttccaaggaagataatatggaagttgaagaccagtttgacggtatttctagaggcccatctagcttttctcctgacactctagaatcagctgagttaaatcaagctgcagaacatgctgcccccacagaagatgatggcaatggtccgcaaagtgaaggcacttctgttgatgtggctggttctaaggaggacaatatagaagtcgaagagaagattgatgatatctctagaggctcgtctagtcatttgcctgatgttttacagtcgactccaaatcagcgtgcagagcaagagtgtttagataatagtgatgacgtgaacacatctgttgtttcctcccatgccccattaagtggccccaaatttacatgtgtgaaagaacttgaaaaggcagatgagaccttggaaacgagtgatgcccaagtagcagatgaagtctgtttacagacaaatgatggtgctcacaatatggcttcaggaagttgttccactttagaagacaaaaacgaggacagttctgcccaaatagctgattgtgaagatttattgctaaggaaaggaactactgttgatgaccttgatggctgtgtcgaaggtcacagtggcttgtccacccattccaatgatgaagtgcgcaacctggtagaaattgtcaagggtatgaatgatactactgctggcagtgaagtgcatgtggatcctgaaagtcatgtatctgatgaagtgtcaatgccagttgcaccatcagagctcaaggtagaattgaagaaccaatcagaacctgcctgtcagtttggggcagtgatcgtcgaggaatcaaatgtcagcttgggcattcagactcctgcattagctgaatcagaagaaatgacatcaggaggtttcatgcacggtaaagaagtttgtgcttcagaacaaacgaatataggtgcggctgcagaacctgcatctacaaaagatgatcatgatatgcatgaagttgataaagagattgttcattgtacaatatcttcccccataggggatcaggaaaatctgcaaggtaacattgatggcaagatggacgttggcctggcggcttgccagacagagtcagattttgtgagtggaaatgaccattctagggagactgatttagcaggcagccaggcaccttatgatgcctcggataaggaagatactgctgctgatttgattggtcctaagcaagccactctcgagatcgaaaaaatgcagattgatggtattcctgaaggtccttctagcgtgcctgctgttttgcagttaactgactcaaatcagccagcagaacaagagagattagagaatagtgactctaaatttgcatcaacaaaggaccagggcagagtggatggaacttccaatttgagtggaggtgataatgcaaagtgtagtcttaccaatgatgattctcaaactgtgaatctagtaggatattcaccatcagaagactcgaatgatgatgattctgtccaagcagctgatagtgatggcgttctgggaaataaagaaggtactgatgatgttatctctgctgcatgtaccgatgatgtatccatgctgaagactgaatcaatagatcgtcatggttctgacgaagttgatcattccactgccccgtctgctgccatcaaacaagagagtggtactgaagttacgtgtgacgcttctgttcctgtttctgaaagctctatatcaaaggaaatcggtacatcgcctgagtgtgatgatgatcaagtggctacagcagcacctcatccaccaacgccattatctgatgctactgatgtatctgctgatgtgcaaatcccagcaggaatatcggaggcaaagctagagcagccgaacgaaacgactagcccgtcgggtgctgctactgaagaaaataatactgtcgtgagcactcagattccaacattagctgaatcagaagatagaacacccgccgatactgctattcaaggtactgaggttgacagcgctgagccagcatctgtaagtgatgacgaaaacaaggttacagcagctgatgatagtgcactcccgtctactgggccagaggatacagcggacgataaaattgatagcagcgctgatgctagtgagaagtaggttatgacagactgagtatgtaaatgatctctctcaaacctagttgtaaatgttactgctgaactgatacagcccaactactatagtgccttagttataattattattgcatcttttgctaatattatgttaaaaaaaaaaaaaaaaaaaaaaaaaaaaaccacgtgcccccctcgtgccgaat

SEQ ID NO: 62532 - DNA, 1966 bp, Oryza sativa
  unsure (1)..(1966): unsure at all n locations
  Clone ID: PAT_MRT4530_63861C.1
aggggtaggtgaacccggaaattgattaaacggttttgtgcagggggggaaccaggggggcgtggccaattttcgattccccggcgctcggcgtccatctgcatcgggcgacgtgtggggcacaccacccccctccctcctcccagatctgggagggaggggggaggggagccaccaccgccgccccacgccgccggacgccgcgcgccgccccgccgccttccgcgctgtagccgccgtgggagaggccgtccgtggggaggagagggaggggaggagaggggagagggagggggtgggttgggcggcggcgtcgtgggctcggggcgcgtgaggccgtgggctggagggtggaggcagcgaggcggcgcaacgggtgacggtcgagcgtcgatggcggcaccgcgatgggcagcaggcgggcgggacgcagggcgctcaccggcggcgaatctccctatgagctaggtcaacgggcggcgctacggcgcgatgcgccgatgcggagatgggcgacgccgcaatgggcgacgttcgaccgtcgacggcggcatggcgcgacgggcgatgggcgggcgcgcggggtgccgggcggtcgccggcggcgagtcaccgggcggcggccgggagtcgatcacgcgcgatcctgtaatgtcctcccaaatcgagcgacgacagcacggaggaccgcggcgacgacggcgtggaggcggtccccggcgacgatggtgcggaggagggccccggcgacgacggcttgcggtccacggcgacgacggcgtgggggcggtccccggcgacgacggcgtggaggcggtccccggagacgaccgtgcggaggaggccgcggcgacgacggcgcagaggacggccccggcgacgacggcgcggaggcggtccccggagacgacggcgcggaggaggccgcggcgacgacggcgcggaggacggccccggcgacgacggcgcggaggcggtccccggcgacgacggcgcggaggacggccccggcgacgacggcgcggaggcggtccccggagacgacggcgcggaggaggccgcggcgacgacggcgcggaggacggccccggcgacgacggcgcggaggatgcccgcggcgacgacggagctggaggcgtggatcgaccgctcgcggagctggaggcgcggctgggccggttcgacccgcggctgcagtgcgcgctttaagggctaggggaagaagagagcggagcgccggggcggcaaggcggcgttgagcggagcagcggcggcgaggcgaggggaggagggagtggaggcggtgcggttgaggagcggcgccgtggtagaccggtgggggtggggatcgcttcagatggactggggggcggaggacagcccggcgcggtcgcggccgggtctgacggggttcggcggaacgggaggcgggcgtgggcgtagccgccgccggcgaggacgctcgcggggaggtcggggagggggcatagctgctgccgaggacagccgtggaggcggacgcgggcatagccgctaccggcgaggacggtcgcgagcgaggccgccgccgccgccgacgaggacgctcccggggaggtcgcggagggggcgggcctcccccctccctcctcccagatctgggagggaggggggaggggagccaccaccgccgccccacgccgccggacgccgcgcgccgccccgccgccttccgcgctgtagccgccgtgggagaggccggccgtggggaggagaggggaggggaggagaggggagaggagggggntgggtttttnngacttcnttttnttnttctttgtttgntctggggtctgtttcctcctctggtttagttttcgccggccggacctctggctcggggcccgcttgtcatgctctccggcggaatctaccattctcgggggcggggccgggcctcctcggttagggggtccggtttcctcct

SEQ ID NO: 62533 - DNA, 226 bp, Oryza sativa
  Clone ID: PAT_MRT4530_63862C.1
cggctaggattacacagagcccgagagctaactgtgcggcgtgctgtggaggtcgatggaatagtgaagctccgaccgctatacgcatcgaggcgtggggtgccaggagcagcacttcgaccttgggtttggtttatgccgggctttacaaccaacggttcgacgtcggggatagaaaaccgtgaacgtccccatggaaggcgcaaagttccaaccggcggctttt

SEQ ID NO: 62534 - DNA, 204 bp, Oryza sativa
  Clone ID: PAT_MRT4530_63863C.1
atgacgcatgcctggtgttgtgatgaagacaaggaagaggcggctccagatctggtggaggccgccatcatcatgtcgccggggagtgagaaggcgcccgccgtcgctggggagtggcgagacgaggagaaactagggttttcgccgacagccgggagggatggggttttgtccatcagacgtcagtgcccggctgtccgatag

SEQ ID NO: 62535 - DNA, 318 bp, Oryza sativa
  Clone ID: PAT_MRT4530_63864C.1
atgaagtccgacctggagagcctgatagagaataccctcgccgagctccacctccttttagtccacactccccgccaccggcttcgggttccttctcggcctcgggctctcttcctgcaagaacctttgcgtgccgcctcagaccccaagcggtgcgcagcccccgccccaaaatccgtcgtcaccgcccgtcggccacctcaccgcgtcatgggtactcgacaaggccacctacgacccgctgccgccgccggtgaccttacctcctacatgcccctcagcgtttacaccctcgccgacctccgcgccctcggctag

SEQ ID NO: 62536 - DNA, 454 bp, Oryza sativa
  Clone ID: PAT_MRT4530_63865C.1
cacctaaaacaccccccggtttatttccaaaactttaaaaaaaaacccttaagggtttggaccataaaattaaattaaattaatttgggttgcccccctttttggggggttttttttttttgggtttttgtttttcggccaaacccacggggggtaaaatcgggccccccccccccaaaaaaaataattttgttttaattttttggggaaaaaaggagggggcccccaatggggcgggcgaaaatttgccaaaggggggggcccctaaaaatcttgggaaaaaaagggggacccccaaaagaaggggctaaaaaacaaaatttttgttcttcatggggggggtaaaaaggaaaaggtccgggtcccccatatgggacccaaggggaaaccccgggttccaccagggggcccttggcccccaggggaccccccaccctttgaaaaaagggaaaaa

SEQ ID NO: 62537 - DNA, 291 bp, Oryza sativa
  Clone ID: PAT_MRT4530_63866C.1
ctacgacatggacgctgtgacgacagaacagcatctactcatctggccggagaacctgaggaagtaacttttgtcattgtcactatcgtcgtactcaaacattgcaacctcgttgagttttgggcctcctatattacccttcggtgccacacatgttgctctccctgagcttaagtaggcaggtggcctccacacccaggcacagaggcccccaccgcaggtggtgtcgccggtgaccacgccttcatcgggcagcagcatgctgaggaagcgcttccgcaccaagtccat

SEQ ID NO: 62538 - DNA, 345 bp, Oryza sativa
  Clone ID: PAT_MRT4530_63867C.1
atggcggaaaagtgcgaggcggtggtggtgtacgcggcaaccaaggtcacgctcacgcacgaaatggaggaaaagacgaggcgcgatggtttttttttctggtggtgggttggtgacggcagcaacgaggcggtggtgtggtggtggcggcgacaggcggcagcggctggctgtgtgggccgtgcagattcgatcaaatcaactggcacgctcatacatccaaaggcgagttttggacctgcactggagttaagcagatctcccaggcctcgtgttttctatcaacacacggacgaagcctactcgtcggagaagccaccatctgacgcatactcaaactctggg

SEQ ID NO: 62539 - DNA, 333 bp, Oryza sativa
  Clone ID: PAT_MRT4530_63868C.1
atggtgatgggcagtgatggtggacttggtggcttgttgacaagctcagtgagctggattaagggggcaacgagaaggagagctcctaggggctttagatgtggagtggtcgaggtcatcgtcgatgtcttctctgtctaccctaacggtgatgtcgacgttggaaagcttggtcgctcttctttcctctctgctcttgttctctggccatcagagtttgaggagacactagggtgtgggtgtgggcatggggtatggggaccacaccacgtcgcaggggcacgacctcctcatcgcagctttgacccattgttccacgcgtgtgtgacgtga

SEQ ID NO: 62540 - DNA, 365 bp, Oryza sativa
  Clone ID: PAT_MRT4530_63869C.1
atggcctcctccacggggtggtggtggtggcacagacccggcgggcggcgcggcggccatcccgcacggcgaggcgacgcggcggccgctgccgccgacgacgaggaggagaaggcgccggccgggagtggtgccgccattgccgctgctcgaccactcctcccctcctctccacgctcgcgcatagagatggcaatggtgaattcaccgtcgggggtcaccgccgcgtccccgtcaccgcggtttaaaaatttcaccatccccgcccccgtcaaccacgacgggggcgccgcgcctgactgcgcgtggacggaggctcccggcggcgcgtggacggaggctcctgccgacggcggctcccgacg

SEQ ID NO: 62541 - DNA, 936 bp, Oryza sativa
  Clone ID: PAT_MRT4530_6386C.1
atggggatcgggtgcgggcgccgcggctgtgggcgcgcgtgtgtgggttcgcaaggggaggatggtgatgagttgagcagtgatgccattgttggtgatgtggtgatgtatcgagtcgagcgtgtcgacggggaaaagaaggtgcccacgcccgcgcccgtcggccctaaccctaaccccaacccaagcccacccgccggccccattcgcctcgcactcgccctcgcctcacgccgcccgatcccccagcgcgcacgcgcgcgcgccgagacgacggccgcggcggcgacggcgacggggatggcgccgctcgcagatcccgccgccgagggcttccgcatccccttcctccccagcgacagcgacctcctcgactgcctcctccgccccaagatcgcctccggccgcgtcgacccccgcttcgcgccgctcgtgcacgacgtcgccgacgcgttcgccctccccccggcccagctggcggccgcgcacgcgcccgcgcccggcgccggcggcgccgaggcgtggtacttattcagcgtgcgcccccgcgcccgcgcccgcgcccgcgccggatccaagagggcggcgtcgcgcgcggtcggcggcggcggcggcaagcggtggtgctcgatgggcgccaagaaggcggtggagggaggcgggtactgccagaggttcaggtacaaggagaggacggcggcgggcgtcgtggcgccccgatggatgatggtggagtacggcgtcgcccaggaacacgacggcgagggcgtcgcccaggaacacggcggcgagggcgtcgccgagctcgtgctctgcaagatcttccgctcccccgagccttcccgtcgctcggagtcggggtcgccgtcctccagctcgtcggcctccgcctccccgtcctgctccggcggccgcaagaggaaggccgccgaatag

SEQ ID NO: 62542 - DNA, 651 bp, Oryza sativa
  Clone ID: PAT_MRT4530_63870C.1
atggagtcgccgcatctggagccggacaaagaattatcactggagcccaaaaacattcaagcagcaaagggggagcctaaaaactctgaagcagcaagggagcagcccaaaaactctgaagcagcacgtgtgatagctaaagtggtggcgaggtacgtatgtggcatggcctccatgttgccattcgagagggaaccaccagctgcggatggcaacaagaagctgtgctacatctgtggagacgacgacggcagccatgaagaattaagctgccccttcaactacatgtactaccacatgtctgatgaagatgcctctgaaggcaccacctgcgaggggagttgctccgcggggaagcaccccatggccgtcgtctccggctccggccgccatcgcgagttcttgcggtgcgtcgtccgggtgaacaacttcccgaccaagctccggccatgggacctctcctggctctgcaagccgtttgggccacttaggatgtaccatttggtgatgcgtaatagcaagttctccaggggctttggctacgccatcttctcgagtcgacagcatgcggagagtgccatcgatcagctcaatggcaggatcatccatggacgcaagctgcgcgtcgactgggcttatccttgcatctag

SEQ ID NO: 62543 - DNA, 619 bp, Oryza sativa
  Clone ID: PAT_MRT4530_63871C.1
atgaaaggcctggagtttgacttatatgctccaaacagaggggatgcgaacggcagcccagtaccagtcaaggtggaagttcaacttaacagtctccaccaaaaccctgttgaggtggggatcggaatgccacacgcgcgcgcgttgggccgggacgagggcgtgggcgtgggcatgggcgtgggcgaggcgaggcccactaacccacgttcccacgattccctccgcaacagcgcgtccacgttctttctcctgatagataaggaggccgcgagtccgatccagtttcattgcttctttcccggtgtttttggggagtgcctcccgcacgactgctcatcgccatgtctggagttgccgccgccgccgctgctggaggagatggcggaggtggtgcgccgccgacaggagctggatccggagccggagctggtgcgccaggaggcctactgcgctgttggaggtgtggacagcttccaaggtgactgggagaagttgtacgacaaggtgaataacgcagcttacacatgcaatgccgactcggacgggttcaagatagatgccagtactgctaccggtgacagccccgtcttcacggcgaccatcaaaatccatttca

SEQ ID NO: 62544 - DNA, 2805 bp, Oryza sativa
  Clone ID: PAT_MRT4530_63872C.1
actagtggatccccgggctgcaggattcggcacgaggatcatcaacgaaaaaaggaatttagcacacacatgaagcaaccccaagagatttacatatactcctccctaatctatctgatgtaacttaacatgctattatttgtttgtccacatcacataacagcaccaagcatgaaagaacttcatcactattacacgacaaagcttgaaaactctcaactcactcgttagctaactagggataccagaggttgtgttcggctggaatcaaaagccaactccggtggcattgaggggcctatgccggtccttccagaagcaggcatcgggcgccagccgtgccgaggatcgcatcggctcggatttgcagcgcttcagaacaaacggtgcatatgttgcagcgccagtaaccagtggcagctctatcttgaacttctgctccgcagcttctttgagtggtgatttctgcacaaccggaggtggcatagacaccaagtttgctgatgcaggcgctacactctcttctgtgttcttagcatcactggttccttcagcattgtctgtatccttgagctcctccgctggagcggcattgcaaccagccttttgttggcggcggttgcggcggttctggccctggtaagacttccagtggacgaagtccgtgctgcagacccatgtctccttggagacctccatagagagcttaggctcatacatcatcaagaggaggcaatctggcaattcaccacttttctttcttctctgcttctgttcttcgaccacatcttgtgcctcaacacctccgacttctaccttctcacccttctcatcaacttgtgtctcttgtgttgttccttcttcctgtccatccaatgttgcttcttcctttccgtcgtcatgagattcaagagtttcctctgcactgtttggggcagcatgaacagcgcaatctttttccgactctggctcagatgaaattttctggccctttctggatcccatcagcaccttaggctctgcaacaagatgttcctgctcaatagagaagctccatctgcggccatccctgtcgatggagaaactagctctccttgagtccttcaagctcgagaagcttgaccgacgtgcttctgtctcggctgagaagctgtgccgccgcccaaccctgtcactgcccgatgaggccctactactgctacctacccgtctgcggctgctcaaccgtcgcagtttcctgtcctccttcagtgctgtcgatggggagcagcaattgcttgacctcctgcccttcatctcttgctcctctttctcaggtcctggaacagaaacttcttcctgagcttccgccacagtctccaccatctccagcaacggcaattggatatccctccctgtagcttctcctgacaaagctacctccaaaactgagtccttccgaacaattggtgcttcctctggctcaatcttctcttcatcctctctgcagtcaccgtactcgctcgcttcttcaccaagatctccgcattcagaggtctccactgcttccgtctccagtggatctacttgtcctgcttcacaaccatcatgtagggaaccatcacactcacggcatccagcttctttagtggaaaccgctgaatcacgagcttgctctttgcattccttatctgtgtcagcaccatcttcgtcttcctcatcctcttcctcctcttcgtcgtcgtcgttttcgttttcatccttgacattgtcaacctgactgacatttgccgctgcaggggagccccagaagcgagtggctaatgcagccatacgaacagggtccgacctgcagcgcatcagcagcagcgcgtttcgcggcgggatgcagacgctgaccctcccttcctcctccttcccaaccaccaagatctcgtccttcttctccacttccacctccccgactaccaccgtgctctcctcctcctccacgtcccacccttgcatcacgagaccgacctctgaagcctttacatcctcggccggcacgacggctgctcccttgccgatctcatcgtcttcctcctcctggatcgccaagaggcacctggccacggcggctccgcagagccagctcccgctggcaggcgggcgccgacgcttcttgtcggcggcagagagagagccgcgctcgccggcgccggcggcgcgagacggcgagcagagcgaccggccaccgcaggagccgaatgtcttgagcgcctcgcagatgttgactgggatctggtacacccagccctggttcttccccgcaggaccgtcccggtcgtctccggcgcggcggaagctggcctccgcgctaccgccgccgccgacacccccgcgcctggaccgcgagcgcagcgcggcggcggaggcgtgcttgggcttgcgctttcctcccttgacgcggacctggccgatgcaggtgaccttgggcgacgagggctcggctggctcgaacccgccccggccgcggcggccgccggaggaccccgaggggaacatgggggactgcccacctttcaggctcccgctgttgcggaggcgacggctgagggaggggtggagcggcggaaccggcgcgctgtcggcgccagcaacggcaccggctccgccgccggtgcggccggggctgagaagcttggaggagctggaagggcgcagggtggcgggcgcgccagaggatgcggaggcggtggaggggcgggaggtgaagcagatgaagagctcagtgccaccgccgccgccgccgccgccccggtccgagtgcttcttgcggcgcat

SEQ ID NO: 62545 - DNA, 279 bp, Oryza sativa
  Clone ID: PAT_MRT4530_63873C.1
atgaacgttagtaaaccagcggatgatcaacaacatggaagcagcaccggcaaacacactacggcagcagcgacgacggatcgttgggccgtgacgatggctgtctggcatggcccggttatgccctcgcggtactactgcttgtgttgggccatgtgggctggtatgggccatggaccagtacccttcttccgccttcaagcctttcatgcttgtgatgcttggatgcgggcttattttctgctccctttcacaccgtcgaggcccaagatgctatga

SEQ ID NO: 62546 - DNA, 291 bp, Oryza sativa
  unsure (1)..(291): unsure at all n locations
  Clone ID: PAT_MRT4530_63874C.1
gcagttgcagcagcagcagtgtcttcttgcagagaaagaaggaaggaacacgaaggaagnaaggcgncgacgtcgagatggtggtgctggtggtcgccacgacgtccgacgccgcgtcggccactccgnccgccncgttcctcnncatgcccggntngacccccggcccctccatcccggacggcgtggagagcttcgcgaacggcgcgggagtgcggctgctgcggcacggcgcggnatcntggaggaggacgacctngacctgcggtgggaggccgccacggggnagcg

SEQ ID NO: 62547 - DNA, 615 bp, Oryza sativa
  Clone ID: PAT_MRT4530_63875C.1
atgcggttgggccgttggggtagtgttgcgggtagcgcagcgtggccagttcgcggtcgacggcggcatggtgaggatggcgtgacgtggtggtcgcatgtggcgcgcgtcggctcggagacaggagctgcaaggacggacggcgaggtaggcggggacaaacgtggcgtcaccagcgtcgttgtctgcgcacgccggtacggcgactcagggcagggcgtggccggcatcagcgggagaagttgtggggtggttggcaacggcgacagggcgggcaggcggatgatgccagcagctctccgtgtactggcgatgttgcggcgttcggaccagtggatctatgatggcggcggcgtgcggtacctttggcgatattctgtcgagcagttggcgggcgtgcagcttggggaggccaagtctggctgggccagctgggctgcggcccgggtggagaaggaggaggggaaggctagaggccgcgggagagagaagaagggaggcacaacgagctttcccagtaggctcagcccaacagaaggggatgggaagggagatggttgggccggctgggattggcgcaaaaggaggggaaacagacttagtgctaggatttga

SEQ ID NO: 62548 - DNA, 614 bp, Oryza sativa
  Clone ID: PAT_MRT4530_63876C.1
cgcgtcgtcggcggggcagccgctccgcctcctcgggatggagttcgaggacggcaccgtcctcgccgcgctcaccggggtcaccgtcatcgcgctgctcttcaccaacgtcggctggaacgtcatcggctcggtcatgatcggcgccgccctcgtcgccgcgcacgccacgctccgctccaccgacgacctcttcttgaccgagcaggaggccgccggcgacggcctggtggccgccggcatgagcgccgccggaccaatcttgcccacctacgttcgcatcgcttgatctactcggcttgggggaaatgccaaaatccatccatttctacttgttactgttcttggtctgaatcactaaagattcgatctggtggacaggagaagattgaaggcagattagtgcctatgccccatttgctccgttggcttttcactgtgcaaactttgttgcagcttgaatgtttgatggtgcctcatatgccactgttcacacttttgctagttcacctgaatggtggtctggtttatcacctgtgtcttgagaacggctgaatttctgaaccctggttaaggaagaaagaacttttttttggtcatttttctcaattttt

SEQ ID NO: 62549 - DNA, 285 bp, Oryza sativa
  Clone ID: PAT_MRT4530_63877C.1
atggcggggaaaggggaaaggaggccgcgacgcgatggaaacaaagaatattttattcggggaggcggacgccgatggccgacgcgtggacgagctaccgctctcggctcgccgccgctagtgcccaggaagccaaacgccgccgccaagctccccttcgtctcccgcgccgcctccggccccatcttgctaaaaccgagaaatctgctcttctccttcagctccggcgacgccttcttctccaactctggagaccccgccgaaggcattggaactagggtttag

SEQ ID NO: 62550 - DNA, 405 bp, Oryza sativa
  unsure (1)..(405): unsure at all n locations
  Clone ID: PAT_MRT4530_63878C.1
cctnaaaanggttcaaaaaacgtncaccttagggctcaaattttaacagtcttgcccaggcttgacttcaaagccccaagaaactccatcggaatggcccttcttcttcctccggcacatcttaaaatcctggccttggcgcacacggaggcagtgggagcagcgcagatgatgggggatggcagatccctagataggtccatccgctcgtggcccccttcgagcaatggaggcgatcttgccgcatgtagggtggggctggtgttcagaactgcgcaacggcgggtagattgaccgcatgcatcttcattcagtcgtgccctagtaatcgttaagactaaatgaagatgtgcttagtcttaatgttccttctattatgtactgtgatgccctcctatgatgtaa

SEQ ID NO: 62551 - DNA, 708 bp, Oryza sativa
  Clone ID: PAT_MRT4530_63879C.1
atggcaagtttccccttaaaatacttgggcctcccgctagttcttggaagattgcggaagacgaacttgcaacctgtttttgacaaaatcttaggaaaggtcgcaagttggagggggaaaaacatgggagcagctggaagagctacgctagtcaagtctgtgctctcagcgcagccaatctacctcctgactgccttgaaggtgacgaaagaatccctggagcaacttgataagcagagacgtcgttttctctgggctggcacaggcgatatcaccggaggaaaatgcaagataaccgtcggtgatgggaatatgacacgcttctgggattccgcttggattgatgggcgcaggccaaaagatcttatgccgttggtctacgcgatctccaaaaataggaaaaagtccctacaccaagggaaagaggacgacgcatgggtgcatgacctgatctttgacgcaggctcaaccatcacagtcaatctagtggaacagctggtccgcttgtgggaagcggttcagaatgtgcagttagtcagtgaagagccggatcagattgtttggaaattcacaggcaatggccattatacagcctcttcggcatatcatgcacagtgcttgggggcgccaagtacaaacctcaactctttgatttggaaagcatgggccccggggaaatgcaaattccatgcctggctcatcatctag

SEQ ID NO: 62552 - DNA, 464 bp, Oryza sativa
  Clone ID: PAT_MRT4530_6387C.1
gttctttggactgtgccatgaagaccttcaagagcggtggcccattcaagttctacactggcttccctgtgtactgtgtcaggattgctccccatgtgatgatgacatggatattcttgaatcaaatccagaagttcgagaagcagattggaatataaggtcttcagttggaggttaatatgcggagttatcatttgctcgagtggagataataacgttccagctgcttacactatcggtagttggttttggtagacaaaagtttaaaccaagttatcctagcttaaatgttgccgtggtggtactattgtgtcttttacaataatcgaatcatttgttgtaactggggcgatttttttggggtggacatactttatttttgttggctgggactcagccatgaggggggatacttcctgcttgcgccattgaattaaatgggaccatattttatacagatttcc

SEQ ID NO: 62553 - DNA, 420 bp, Oryza sativa
  Clone ID: PAT_MRT4530_63880C.1
ttttgtttttttttttttggaacccaaaacatactgaagttaataaattgatttaagttggttttaaagagactattggcggttagaaactggtgggagaaactgcctggagagtggacgatacaatcagtgctttggtgagaaagaataggaaaaattgacaacggaggaagcaaccacatgtgcgccacacaggtttcttgggtcacacgcggggaatgtgaaacttgaaacggagaagcgcgtaattgaatgcaggccatacattggtaagaaggatacctggttccataggatctgattgggcagatagaaaagacggtcgactcttttactttctgggaggacattatctaatgcttatggtgggggaaaaactgagaatagtgacattaggaaggtttgacagtatgctattgc

SEQ ID NO: 62554 - DNA, 1200 bp, Oryza sativa
  Clone ID: PAT_MRT4530_63881C.1
atgtatgcggacgatgttgtcatcttcattgatcccacccgagacgatgtcacggcctttgcggacatcttacaccgtttcggtacagctactgggctcgttaccaacctccagaaatcccaagttgcggcaatcagatgtgataacatagatctgacagacgtgctacagggtgtcccagcaatgatggcaagtttccccttaaaatacttgggcctcccactagttcttggaggattgcggaagatggacttgcaacttgtttttgacaaaatctcaggaaaggcgatatcactgggggaaaatgcaaggtcaattggacaaagacgtgcttgccgactagccagggaggcttggggagtcctgaacctaaaaaaattcacaagggccttcagactgcgatggctttggcacgaatggaaagatccgaacaagccgtgggtgggtttggacacgccttgtgatgaaatcgacaaagacctcttcgctgcctcaacaaagataaccgtcggtgatgggaatatgacatgcttctgggattccgcttggattgatgggcgcaggccaaaagatcttatgccattggtctacgcaatctccaaaaataggaaaaagtccctacgccaagggaaagaggacgacgcatgggtgcatgacctaatctttgacgcaagctcaaccatcacagtcaacctagtggaacagctggtccgcttgtgggaagcggtccgaaatgtgcagttagtcagtgaagagccggatcagattgtttggaaattcacaggcaatggccattatacagcctcttcggcctatcatgcacaatgcttgggggcgccaagtacaaacctcaactctttgatttggaaagcatgggccctggggaaatgcaaatttcatgcctggctcatcatccagaatagagtctggacgtccgaccgacttgcaataagaggttggcagaacaacggccattgccccctctgtcgttgcgaagctaagacgggattgcatcctgtcgccacatgcagatacacaaagagaatatggcaccacgttgccggatgggtgggatatcatcaattggagccgtcccagtgggaggaagcccggtcagtccgccaatggtgggaaagcctagcaaatactcccaacatcccaaaaaagggccttcggtccctcatcctactagtagtctga

SEQ ID NO: 62555 - DNA, 1954 bp, Oryza sativa
  Clone ID: PAT_MRT4530_63882C.1
tattcacttatacacggagtttaattagtttattgccttctacaatggataggatcttcgcccgtttcttttgcttcctactgattgcggcagtaagccatgcagctgatctgtcccccgagcaatactggcgatccatcctccctaacaccccaatgccaagctccatctcccaacttcttaactacccttacttgcctgctgttagattacctcgccgtacggatgctggtcagcgcaactacaaatcatcagtttcacatgtggctgaacgatctcaccgtgtagatgatggccaacgcaactacaagttatcagctttacctgccactaatgaactacctcaccgtacggatgctggtcaacgcaactacaagtcatcagtttcacctgtggctgaactacctcaccgtgtagatgatggccaacgcaactacaagttatcagctttacctgccactaatgaactacctcaccgtacggatgctggtcaacgcaactacaagtcatcagtttcacctatggctgaactatctcaccgtgtagatgatggtcaacgcaactacaagttatcagctttacctgccactaatgaactacctcaccatacggatgctggtcaacgcaactacaagtcatcagtttcacctgtggctgaactacctcaccgtgtagatgatggccaacgcaactacaagttatcagctttacctgccactaatgaactacctcaccgtatagatgctggtcaacgcaactacaagtcatcagtttcacctatggctgaactacctcaccgtgcagatgatggtcaacgcaactacaagttatcagtttcacctgctgctgaactacctcaccgtgtagatgatggtcaacgcaattacaagttatcagttttacctgccactgaactagttcactatacagatggtcaacgcaattacaagtcatcagttttggagacgccagaacttctcaaagaccccgacatggcgctcttcttccttgagaagaatcttcaacaaggtaaaaaaattaataacgccctccacttcgccaacttgttggccactacgaactccaagttcctgccacgaggcaaggcggactccatcccgttctcctctaaagaactacccgagatcctggaccggttcggggtgcggccgggctccgacgacgcggctgagatgagtgctacgctgcaggactgcgagctgccggcgaataagggagagaagaaggcctgcgccacgtcgctggagtctatagtcgacttcgtcacatccagctttggggccagtgacgtcgacgccgcctccaccgttgtgctcagtaaggcggtggagtcttcttcgctggcgcaggactacacggtgagcggcgtgaggcgaatggccggaaccggccagctcatcgcttgccatccggagtcgtacccgtacgctgtgttcatgtgccacctcacagaggcgacgacgagggcgtacaaggcctcattggtcggcaaagatggtactgcggtggaggcggtcgccgtgtgccacaccgacacgtcggactggaacccagagcacgctgccttccatgtgctcggcgtcaagcctgggactgtgcctgtctgccacttcatgcagcctgacgctgtcgtctggacccgcaggggctgatgtatgtatgtatgccatatagtacctacttcatcgtactgtactgcgtacgcatgctgccagctgctttgcataccttgctgctggagatatataattaatatccagcacttatatactcgtcacttctatcgtgtgtcgaaggttatatacttgtagcatttggggatgcagtacgtacgtgtgtctgtaataagtttcgtgatatgttgcttcatccatatggaccatatgtaccaccaatcccagtgatatataataatataatatcgttgtctagt

SEQ ID NO: 62556 - DNA, 1880 bp, Oryza sativa
  Clone ID: PAT_MRT4530_63883C.1
ggatcttcgcccgtttcttttgcttcctactgattgcggcagtaagccatgcagctgatctgtcccccgagcaatactggcgatccatcctccctaacaccccaatgccaagctccatctcccaacttcttaactacccttacttgcctgctgttagattacctcgccgtacggatgctggtcagcgcaactacaaatcatcagtttcacatgtggctgaacgatctcaccgtgtagatgatggccaacgcaactacaagttatcagctttacctgccactaatgaactacctcaccgtacggatgctggtcaacgcaactacaagtcatcagtttcacctgtggctgaactacctcaccgtgtagatgatggccaacgcaactacaagttatcagctttacctgccactaatgaactacctcaccgtacggatgctggtcaacgcaactacaagtcatcagtttcacctatggctgaactatctcaccgtgtagatgatggtcaacgcaactacaagttatcagctttacctgccactaatgaactacctcaccatacggatgctggtcaacgcaactacaagtcatcagtttcacctgtggctgaactacctcaccgtgtagatgatggtcaacgcaactacaagttatcagctttacctgccactaatgaactacctcaccgtacggatgctggtcaacgcaactacaagtcatcagtttcacctgtggctgaactacctcaccgtgtagatgatggtcaacgcaactacaagttatcagctttacctgccactaatgaactacctcaccgtacggatgctggtcaacgcaactacaagtcatcagtttcacctgtggctgaactacctcaccgtgtagatgatggccaacgcaactacaagttatcagctttacctgccactaatgaactacctcaccgtatagatgctggtcaacgcaactacaagtcatcagtttcacctatggctgaactacctcaccgtgcagatgatggtcaacgcaactacaagttatcagtttcacctgctgctgaactacctcaccgtgtagatgatggtcaacgcaattacaagttatcagttttacctgccactgaactagttcactatacagatggtcaacgcaattacaagtcatcagttttggagacgccagaacttctcaaagaccccgacatggcgctcttcttccttgagaagaatcttcaacaaggtaaaaaaattaataacgccctccacttcgccaacttgttggccactacgaactccaagttcctgccacgaggcaaggcggactccatcccgttctcctctaaagaactacccgagatcctggaccggttcggggtgcggccgggctccgacgacgcggctgagatgagtgctacgctgcaggactgcgagctgccggcgaataagggagagaagaaggcctgcgccacgtcgctggagtctatagtcgacttcgtcacatccagctttggggccagtgacgtcgacgccgcctccaccgttgtgctcagtaaggcggtggagtcttcttcgctggcgcaggactacacggtgagcggcgtgaggcgaatggccggaaccggccagctcatcgcttgccatccggagtcgtacccgtacgctgtgttcatgtgccacctcacagaggcgacgacgagggcgtacaaggcctcattggtcggcaaagatggtactgcggtggaggcggtcgccgtgtgccacaccgacacgtcggactggaacccagagcacgctgccttccatgtgctcggcgtcaagcctgggactgtgcctgtctgccacttcatgcagcctgacgctgtcgtctggacccgcaggggctga

SEQ ID NO: 62557 - DNA, 1706 bp, Oryza sativa
  Clone ID: PAT_MRT4530_63884C.1
gattgcttaagaaatctggcatggcgccaccggcaccggccgctctcctcctcccctccaaccattcctatcgcccgctcctgcctcgcccaatcctgcaccacgccaccggcttcgcctgcgcctcggcctcgccctcgccgccccctcgccttcgccttcgccttcggcatgccgccccgctccgtgccgccgccctgccggccatcgccatcgcccccggcgaccactggggcaactgggccttcctcctctccgccgccgccttcggcacctggtcggaggagtccacgtcgtggggcgccgcgctcagcggctcgctcgtcagcatcatggccggcctggccgccacggccacgggtctcgtcacggccggcgcgccggcgcaagacgccgtcatggactacctgctgccggccaccgtcccgctcctgcttctcggcgccgacctccgccgcgtcgtcagcaccaccggcgacctcctcaaggccttcctcatcggatcagttgcaactacaattggcacaacgatagcccttctgttggttcctatgaaatcactgggtcaagatagctggaagatcgccgctgcgctcatgggcagctacattggtggagcggtgaattacgtcgcaatctctgaagcacttggcgtttctccgtcagtgctagcagccggtgtggctgcagacaacatcatctctgcactctacttcatgaccctcttctcgctggcagccaagataccagctgaacctaaaactgctcaagagggtagtaacggcggcgagtctgagggcggaaggcggatgtcggtgctccatggcggcgcggcggtggcgctgtcgttcgtgatctgcaaggccgggtcggccatctccagccagctgggaatccagggcggcaccctgccgtgcgtgacggcgctggtggtggcgctggcgacggcgttcccgcggctgctggggaagctggcgccgtccggcgagaccatcgcgctgatcctgatgcaggtgttcttcacggtggtgggcgccaacggcaacctggtggacgcggtgaccaaggcgcccagcgtgttcgcgttcgcgctggtgcaagtgaccatccacctaggcatcgtgctcgccgcagggaagctgatggggttcgagcggaagccgctgctgatcgcgtccaacgccaacgtgggcgggccgacgacggcggcggccatggcgacggccaaggggtggagctcgctgatcgtgccgggcatcctggtgggcatgttcgggatctccattgccacgtttgttggcatcggggggacagaaggcacaggtggtggtggtagttggcaatggcagggtgcaagcgtggacgaagctgggggcgtcgaggaggtagggcgtaaagcggagctcggcgaagaggaggtgcttgtgggtggggtttttgatgctgcgagcgacgaagttgaggtggaggtagaagaggcctctgaagcggatggagcaggcggcgatgggaggcgggtcaggcagcagcttgctgtcctccactgggtcgaacaccaagtagtcgtcatcaactccttggctcttgcaatggcggcgccatcgtggcgagttgtaatgggcgagggcttcttggatgtactccgcacggcgctcttgctccgtcattggcgttcggtgctcggtgcaggaccccatcacaagtag

SEQ ID NO: 62558 - DNA, 807 bp, Oryza sativa
  unsure (1)..(807): unsure at all n locations
  Clone ID: PAT_MRT4530_63885C.1
ccggccgggatccttcgtagtgcaattcacttatacacggagtttaattagtttattgccttctacaatggataggatcttcgcccgtttcttttgcttcctactgattgcggcagtaagccatgcagctgatctgtcccccgagcaatactggcgatccatcctccctaacaccccaatgccaagctccatctcccaacttcttaactacccttacttgcctgctgttagattacctcgccgtacggatgctggtcagcgcaactacaaatcatcagtttcacatgtggctgaacgatctcaccgtgtagatgatggccaacgcaactacaagttatcagctttacctgccactaatgaactacctcaccgtacggatgctggtcaacgcaactacaagtcatcagtttcacctgtggctgaactaccccaccgtgtagatgatggccaacgcaactacaagttatcagctttacctgccactaatgaactacctcaccgtatagatgctggtcaacgcaactacaagtcatcagtttcacctatggctgaactacctcaccgtgcagatgatggtcaacgcaactacaagttatcagtttcacctgctgctgaactacctcaccgtgtagatgatggtcaacgcaattacaagttatcagttttacctgccactgaactagttcactatacagatggtcaacgcaattacaagtcatcagttttggagacgccagaacttctcanagaccccgacatggcgctcttcttccttgagaagatctttcacaaagtaaaaaattataa

SEQ ID NO: 62559 - DNA, 571 bp, Oryza sativa
  Clone ID: PAT_MRT4530_63886C.1
gaagaggaattggacggatgtattcacagtaagggaaaaaaactattgcctaagaggtcagcttcgttcgcaagaaaatattgagacgtcagtttgacaactgtgacacaaagaagtacgtaaaactgtgacatcatgagctcaaaaacctcctttgcagctttggttcctcctaattaatgaagccaaaacatggatgtcactacaaattactgcatcctcaatcaccaagccatcaacctatggaagcaaaacctcacatatcacctgactattcattgcttgtcattgcttttggtatttcaataccaagaaatcaaatttgatgattgaagaccagtctctctcaatgtagcagttaccttatccaccgagcagtggttgtcaggtataaactttgttgtcatgaatttttccttagtagttccagagggaacatgaacttgattgatgccaatgcttgtgatgagttcattcacccatgcgaccagtaataactccacaaggtattctcgatgcattatgaaattacgtttcactggagctacttcagcattggtgagggtcgccg

SEQ ID NO: 62560 - DNA, 1202 bp, Oryza sativa
  Clone ID: PAT_MRT4530_63887C.1
atgctgtctttgcactttgcatgggcttttgcactctacggcccagggggcgggcggcgacggggcgccaacagcagccgccgacaccgtgctcgcctgccaccgctgcgttcgcccaccgacacggcgctgtctttcgtgatctgcaaggccgggttggccatctccaatcagctgggaatccagggcggcaccctgccgtgcgtgacggcgctggtggtcgtgctagcgacggcgctcccgcgggtgctggggaagctggcgccgtccggcggcgagaccatcgcgttgatcctgatgcaggtgttcttcctggtggtgggcgccaacggcaacctggtggacgcggtgaccaaggcgcccagcgtgttcgcgttcgcgctggtgcaggtgaccgtccacctcggcatcgtgctcgccgccgggaagctgatgggtttcgagaggaagccgctgctcatcgcgtccaaacgaaggcgggggcgatggcgacgaccaagacgtggggtggagcttgctgatcgtacctgggatcctggtgggcatgttcgggatctccattgccacttttcttggcatcgggttcggcatgtttgtgcccaggaggatctgcggcgcctcgagtcgaggttctgaaccgaaaaatcaagctcgtccttgtgctgctggtttccacaatggaaattggttgggtgcagtaaacggatagggggacagaaggcacagtcgtcgacatcgtaggtggtggtagttagctgcagggtgcaagcgtggacgaagctgggggcgtcgaggaggtagggcgtaaagcggagctcggcgaagaggacgcccgcgccttcccaagttcccattgacgatgggggcgaggtcgacggcgattggggcgacagagttgccgctctccccgtcgtgccgctctcctcgaaggcggccgcagcgccgccggagtacgagatgtcgtcgatgaaggagtggctccttctcccgtgtgctcgcgcttgacttcctccgaccccgccggtgagctcgaggccgtcgagctcccctcctccctcgaggtgctccaggagcggctcgacttcgtcctcctcctcggcctctccaccaacgacctctcctcctactgctcctcctcgcctgctccctccgcaagaacgcctccgtcgccgtcgacctcgcccccattgattgatctccat

SEQ ID NO: 62561 - DNA, 576 bp, Oryza sativa
  Clone ID: PAT_MRT4530_63888C.1
atggtagaggggggcgccgttttggacgaccccaagcggccaccgtacctggaggagcaggagcaagcacgccggcaactacttgtgatggggtcctgcaccgagcaccgaacgccaatgacggagcaagagcgccgtgcggagtacatccaagaagccctcgcccattacaactcgccacgatggcgccgccattgcaagagccaaggagttgatgacgactacttggtgttcgacccagtggaggacagcaagctgctgcctgacccgcctcccatcgccgcctgctccatccgcttcagaggcctcttctacctccacctcaacttcgtcgctcgcagcatcaaaaaccccacccacaagcacctcctcttcgccgagctccgctttacgccctacctcctcgacgcccccagcttcgtccacgcttgcaccctgccattgccaactaccaccaccacctgtgccttctgtccccctgcccgtttactgcacccaaccaattttcctcactgtggaaatcagcagcacaaggacgagcttgatttttcggttcagaaccttaatttgttgtaa

SEQ ID NO: 62562 - DNA, 2520 bp, Oryza sativa
  Clone ID: PAT_MRT4530_63889C.1
atgccctttggtatgatgaacaaagtcacgggtaaggcgatcacaaatgaagtgggagagtttatacaaatggaagctgaagaagatggtacggcggtgggacagttcttacatatcaaaatcaggttagatatccgaaaacctcttatgagaggagtgactctgtgtgtaggggagggaaagaaggaaatttggtgtccactggtgtatgagtttctcccggatttttgctatacttgtgggatcattgggcatactgacaaagtgtgtggtgtgaagctgaaggagggggaagagcagcagttcagtaaaaaacttcggttcatacctgagaagaagaagtgggaggatggacataatgtagggtcgaggggaagcaaaggtttttatcagtgtaaagtggaggatggtagtagcatgggaagtgatggcccgtcctggagaaaggagaaatctgtgagtaaggacggaggagatgcgaagagagtggatgaggaagaagaccttggtttcgaaggggacatgtttacatggcggaatcacagccatacagaagaaggatacatcagggaacgtttgggcagggctgtggcgaatcaggagtggcgaatgagattcccaacaaccagggtagtcaatggggacccgaggcattcagatgacaggctggtgatcatcacaacctgtggggggagaaaggaggacaatcgaagggaaagaaggagaagaaacaagattgggcgtttgaagaatgatgagggtgtgtgggtagaaaatgaagaggagaagagggggatgatagcacagtactttaagactttgtttagttcaaatagggggaataactctgatcaactgctggatgtggtggagaggaaagtgacagaggacatgaatgagttactaacaagtgcatacataagtgaagaaataaaagaggccttagattctatcggggatttaaaggccccaggcccggatgggatgccggcagtgttctataagaacttttgggacttgatgggggagaaaatcacctcagaggttcaggaaatcctaaacggaggacaaataccacaagagtggaacgagacaacaattgtcttaatcccaaaggttaaaacctttgaattaattaaagacctacggcccattagtgtgtgtaatgtgctgtataagatagtctctaaggtgctagcaaatagattgaagaagattctgcctgaagttatatcgcagtcacaaagtgcttttttcccaggccgactaatttctgataacatcttagtggcatatgaattgacacattatatgaggcagaaaagaaatggggagaccggctatgcggcactgaaattagacatgagcaaggcttatgatagagtggagtggggtttcttaaaggatatgatgctgaaattgggttttaatcaggaatggacacaattaatcatgaagtgtatcacatttgtcacatatagaatccgagtgaatggggagctaatagaagttatccagccggaaaggggattgcagcagcgggatccactgtccccatatcttttcctgctctgtgctgaaggtttctcagctctaataagaaaggcggaagaagaagggagtttacagggagtacggtgcagcgggaatgggagagacaaggacgatgaaggggagatgcaggctcatcaaacggagtttgtgaagcatgttttgcgggagattaatatggaatctttgagagctgagcttgaagaacgggtgtcaggaagagaagtgatggagagaatctgggcccaatgtactagaaatggaacgattgcgattatccttctctggctctggtggggtgagcgaaatagagttagagaaggggagcagagaagaacagcagctgaattggccttcatggcgacaacgcaaacagaagagtttctgaagatacaccaaaaagaaaaaaagcagaaactgggagcccctggcaaatggagtaaaccagatatgggagttatgaagataaactcggatggtgcttttgatccaaataacagaaagggaggatggggattcattatcagagatcatcttggaatggtaatcaaggcaggagcagggagaacgcacgttcttctagatgcgttccatgcggaagttctcgcttgtgcagctgggatcaaagcagcaaatgaatgcgggctgcagagagtggaggcagagacagactcactgatgctgaaaatggcgatggaagacaacagctatgctctttcagctttaggtggcataatatgcgagatgaagaattttgttaacacaaattttaggtctttctctgttaagtactgcccaaggggttgtaataaagtggcgcatgccttagcagcgctgggttgtaatgatcatctgcaaaacactctgagttgggatgatgttccctcggaggtggcggagttggtgaccagtgatatcactgagtctataagttactggaaaatgttttccatgtcaaaaaaaatataa

SEQ ID NO: 62563 - DNA, 1818 bp, Oryza sativa
  Clone ID: PAT_MRT4530_6388C.1
atggtctggagaaccttgcttggcatgcgcttatgtttcgttgttgatgatcaacgaatgattaaattcatggtggatgaaaagaatctcttcccgcgcgccggcgcgcccaccctcctcaccgtcgcgcgggggctcgccgccgccgacgacccggtcccctccgcgtccaccgtgctcgccttcctccgccgccttccccacgacgcctcgccgcacctcttcccccacctcgtcgccgccctctcccgctcccgggggggcgggggcgggggcgggggccccctcctcgcgctccgcctcttcctcgccccgctccacccggccgccgtcacccaccactccttcaactccgcgctcctccgcttcccgctcccgccgcacctcctcccgcccttcttctcccgctccctccgacgcttccccggccgcctcgcgcccacgctgctctccttcaacctcctcctcaagtgcgtctgctcctctctcgtcccgagggatcccggccgctacctcgacgtcgcgctgcggatcctccacgagatcatcccggggtgggatctcgcgccggataagttcacctactcgacggtggtgtccgcgctcgccgatgcgggccgggtggatgacgcggtggcgctggtgcacgagatggtggcggatggggtggttgcggccgaggcgtttaaccccgttctgagggcgatgctgcgcgccggggatgtcaagggagcagccaagctgtttgggtttatgcagctgaaggggtgcgtgccgaccaccgcgacatacaatgtgctggtgcatggtctgctggtgtgcgggagggccggggcggcaatgggggtgatgagaaggatggagagggagggggtggtgccaggggtgatgacgtacggggcagtggtggatggactggtgagatgcgggagagtgaaggatgcgtggaaggtcgcggaggagatggagaggaacggtcttgcatggaatgaatttgtgtactcaactgtcataacaggattttgcaagtctggggaaattgactgtgcgttgaaggtgtgggaggcgatggtggcaagtccggtaaggccaaatgttgttttatattcagcaatgattggtggccttgccaattttgggaagatgacggaggctgaattcatattgatcaatggactctgcaatgtagggagattgaaggatgctatgatggtctggaagcacatgcttgaccgtggctgtgcacctgacacaattgcttatacttcaatgatcaagggcttatgtgtttccggaatggtggatggtggtcttcgattattttatgacatgctggcaagtggtcatgctgatccagatgtcatcagttataatgtcctgctggatgggctgctcctggccaaggacctcccacgggcaatggacttgctgaacaggatgcttgaccaggggtgtgatccagacacggtgacatgcaatattttcttgagggagtttggagctggagagaggaaggggagggagttcttggaaggcctggttgtgaggctatgcgacagaagaaggaatatggcagctggagaggttttaatggtaatgctggctaagtacattgtgccagaggctcccatttgggagatggtggagttgcactttggcagtatgggttttatcatattctggatttcatcctacaagagtatagctatggcttctccagcattcttggtttcagagataactatacagtgtctctttttcattgacatgggtcttcatacatttgtttttggataccagagacatgggtcttcatga

SEQ ID NO: 62564 - DNA, 526 bp, Oryza sativa
  Clone ID: PAT_MRT4530_63890C.1
ggagagagagaactagtttcgagttttttttttttttttttgttgcatatgcggcgagtatgtttgcatcattgaaactcgtacttccatcgttccaatggagcaattgaacaataactgaagacaagaagagcatgtatctgtctatctgaatgaacatctcgaatgtttctcacctgtacagtcgatgcagatatgctgctatctgaagttctcaagttcaaatggtagtttgtgttgtcttttgatccccaatctgtgaggcgaaggatttctggagctgctgctgcagcagtgctctgaactggcgtgctgaagccaggctctcgtccagttttgccttcttggccatgagatcagacttcctggcttctgcagcagtaatctcagcgttgttcaagtacatcacgccgccgtgatgctcttgcagcgttgatttcagttgagataccaaatccctcaggctctgcacttcgtcgcgcgccgctgcctcgaaccaccccgacatcgcctggaactcctccat

SEQ ID NO: 62565 - DNA, 162 bp, Oryza sativa
  Clone ID: PAT_MRT4530_63891C.1
atgcattctaattcatcctgctcttcttctcttaatacactattttcgaatccagaggaatgggacccccagtatccagaaagtcgttcacggcacctcctcctggcgcaccagctccggatccagctcctgtcggcggcggcgcaccacctccgccaatag

SEQ ID NO: 62566 - DNA, 145 bp, Oryza sativa
  Clone ID: PAT_MRT4530_63892C.1
gcgccgcatctcagccgctatccgcgtgggcattccgccgagcacctgtcgcgcatggcgatggtttcacaccacctcgcccagccgtccacgcgcgcggttctcttcttgcgccccacctacccgtttttcagtcattaccact

SEQ ID NO: 62567 - DNA, 909 bp, Oryza sativa
  Clone ID: PAT_MRT4530_63893C.1
atgtctctcggcatcaaggctcccccgcttagcaatttactcagccaggggtccatcccgcgtggtcccaagtgggacccgcttgtcaacgactcggctcaccgtgagcgagcctcgcggctcaccgtggaccacgcacacggggagggcagaggggagcggcggaccggggtcggctcgacccggtcgcggccgaggtggcaccgaaatggcgtgttcgtggcagccacgtgggccggcgagaggaagacgaaggcgccagccgcgaatggacggtgggcggcggcggtttctccgggacgccgtgcgacgacgaggggcgacggggtgtacaccggaatgacaaggggggacgagagggagcgggccaacggcttggattcgtcggaggatgctcaacggcggcgaattgcggtggcggcaaccggcggcgtgaaaagggggaaacggcgacgaggtcacgaggggctgattcccggcggagagaaaagggaaaaaggaggagagaaagggggcttgcccccttgccactttggggaaaaggaggagggagagagggcgacgcggcagagggaggaggagctctgcctctgtcccttggaggctagcgcgcggagtggcggggtcgggttgatgacgacggcgatgacggccgggcggtgtggagcggagcagcgacacgggcggcaggcgcggcagaggctgacggcggcggcgaccaggcggtcggccaccacggcgtgcgcgcgcgggaagcaacgggcggcgcggctcaggcacgcgtgctggctcgcggggccgagcggctgcgcggctgtcagcgcagcgaccattggcggcggcggcggcggtgcccatgacccaaccctcaccgtgcgccgcttagcattggccagtgtggtggcgtaa

SEQ ID NO: 62568 - DNA, 217 bp, Oryza sativa
  unsure (1)..(217): unsure at all n locations
  Clone ID: PAT_MRT4530_63894C.1
gctacgcnntcngnncnangcngtnntttgaccctatttttctagatcttcaggaagtggcgatccggcggcggaaccngtagcattgaccgcngacgggcggagttctttatgncgaccaccaccaccntggntaagggagtatcctaggtggcggcaactacggctngatcngnaggcttcttcactgcttcagncagncntctaactccggcgt

SEQ ID NO: 62569 - DNA, 966 bp, Oryza sativa
  Clone ID: PAT_MRT4530_63895C.1
atgacaaccgacggccgattcgcgtcgtcactgactcgatttgcactattgtcgatcctcaattcatggcgtcgccagccctcgaattgcgccgccgacggtcgtctcgagctgtccgcccaagtcgcaccgtggccggcccccgaacttgtctatcgccgccctgagacgcgttgtggctggcccccaagctcgtcctttgccgcctcgattcgcgcctttggtgagccctgcttcgtgctgcggccggcctccgagctcgtcccgccaccacctcgattcacgcctccgtcgccggccgtcgcgaggtcgtccgctaccggccacccattcatgccgccactagctcatgtgcgggagaacaagcgaacgagagagaagatgcagaggaggaagaaaagaaaggaaatagggattgacagctattctttctacaacatctctctcacgcgcgctgctgcaactaagtcaacgacgagctccggcgtggcatgggtgtggatgacggaggacgcggtcaccggcgacgagctccgacgcggccgcccccgacgagcccccggcatcgcggactctggcgacgagcttcagcgtggccatcgcggactccggcgacgagcttccgcgtggcgtgaggcacggacggcggaggacgtggccgcggcgacgagcccggcgtggggagcgacgacggaggatgcggccgacaacgacgtggtcgccggattgttgcctggagctccagcaccgccatcgccatccacggcgccgccgttaacgcccacctccggctccatccgcgtggccagccggcgcgccctccgccagcgccccaactctatcacgggccctctccagtcgccgccttcgtcgttggccgtcgatcccgctgcgaatccaggccttcatcctatccatctgccgcttcggggagcaaagagacaagacggggtgcaaagagcttgt

SEQ ID NO: 62570 - DNA, 739 bp, Oryza sativa
  unsure (1)..(739): unsure at all n locations
  Clone ID: PAT_MRT4530_63896C.1
aacatacaacaatgcataataagtattctcctgcactttaatgtgtaaagagcagtgcatagtcaaaatctttcactgccaatgtacaaaatgcatacatgactcatggccaagcaggcctttatatgttactgcaacctaaaagatgatacatcaatataagaactgggctataaaatgaccaccttatataaaaactaaataaattgataattgcatctttcatgtacatatacttgcatagcttaacaattcagacatactgtagatttctcctgcttcgtggaagaacacggatatatcattgtaatatctggaaatccagatgcccaccaattcctgacaaagcataaaggtaaaaataaatctatttgtttgggttaattaaattcaagatgtgtcaaaattgacttaagagtcaatataacagatcattaacactggtcatatgtaaattgagatattgaggtatatttgaaatgggattttttttcataaaaaagtatttgtagctatggttaggaaatactgtagaatcagactgcaagtggtagagatgaaccatgtgctgattttgaacaccacctacaacaaaaagaagcaatccatgaaaattggtcaactaagataatgtccgcaatagaaggtcaaaatgaccacataagacatcataataaagattggataggatctatgtgttagtataaagcanaatgagttaactaaaaagttcgcatgt

SEQ ID NO: 62571 - DNA, 1473 bp, Oryza sativa
  Clone ID: PAT_MRT4530_63897C.1
atggggcttcgtgccaccgaggcggcgacgggcaacggcggcggcatgaggagccttccggatttcttggggaggaagagcaagtacgtgcgcatggacgacgtgctcccggatgagcagggagatggcggcggcggcggcggcgtcgttcgtgtccgcggcggcggcggcagcgggagatacgtctttgcctgctctgtcttcgcctccctcaaccatgtcctgctcggctacgatgttggtgtgatgagtggctgcatcatattcatccagaaggacctccacatcagtgaagtgcagcaagaagtgctcgtcgggtgcctcagcttcatctccctcctcggcagcctcgccgccgggaggacgtccgacgccgtcggtcggaaatggaccatcgggctcgccgctgccgtgttccaggccggcgcggccgtcatgacgctcgcgccgtccttcgccgtgctcatgatgggccggctgctggccggcatcggcatcgggatcgggatcatggtggcgccggtgtacatatcggagatcacgccggccacgctgcgggggtcgtacgcctcgttcccggagatcttcatcagcctcggcatcctcctcgggtacgtctccaacctcgccttctccggtctccccgaccacatcaactggcgagtcatgctcgccgccggcatcgtcccttccatctccgtcgcgttcgtgctgctggtgatcccggagtcgccgcggtggctcgtcatgcagggccgggccgccaaggcgcgcgcggtgcttctcaaggtcaccgatggcgaggacgaggcgcaggagaggctcgccgagatcgaggaggcggcgcgcgtcacggccaccggcaacggcaaggccgtgtggcgcgagctcctgaggccgtccccggtgatccgccgcatgctggtgaccggcatcggcgtgcagctcttccagcagatcaccggcatcgacgcgctggtctactacagcccgacgatattccgggacgccggcatcaccaccgagagccagctgctcgccgccaccgtcggcgtggggctctccaagcgcacggccgggatcaccgcgtgcctggccgcgctcgccgcgtcgctctccctgctcgcgcacggcgcgctgccgcgggcggcggcgatcgggcggcccatcctgacggtgtgcggcttcgtggcgttcttctcggtggggatcgggccgatcaacatggctgaccagcggcccggtgcccatgtcgttcctttccttctgcggccccggtgtccgtcccgggtgcccttcgccgcgttcgccgccttctcggcgctgtccgtggtgttcgtccacgtgttcgtgccggagatgagcggcaagtcgctggagcagatcgagtccctgttcggcgccggcgccggccccggagaggtgaagctcggtaacgcggaacatctggtacaagggaaagaaatgagctga

SEQ ID NO: 62572 - DNA, 324 bp, Oryza sativa
  Clone ID: PAT_MRT4530_63898C.1
cccggtgggtggttcggttcgcccacaggtgaactacccggcgtgtgcgacacaacaatgacgccctggacgagatcccggaggtcaaatgattttgaatttcggatgggatgcgtgcgtgcgagctgggaggctggcacaagaatcatctttgaattggatcaccggagtgaggagaggatgcactgtcgtacatgtgggaagaaattgaattaagctgcttgatgcgagtctgtgtgtggtgtgattagtggtgaatggtgggtgggttgtcttgctgttgatgaatgcccgtgatgaatgacctgatggtgaatgttggcc

SEQ ID NO: 62573 - DNA, 1608 bp, Oryza sativa
  Clone ID: PAT_MRT4530_63899C.1
atggggcttcgtgccaccgaggcggcgacgggcaacggcggcggcatgaggagccttccggatttcttggggaggaagagcaagtacgtgcgcatggacgacgtgctcccggatgagcagggagatggcggcggcggcggcggcgtcgttcgtgtccgcggcggcggcggcagcgggagatacgtctttgcctgctctgtcttcgcctccctcaaccatgtcctgctcggctacgatgttggtgtgatgagtggctgcatcatattcatccagaaggacctccacatcagtgaagtgcagcaagaagtgctcgtcgggtgcctcagcttcatctccctcctcggcagcctcgccgccgggaggacgtccgacgccgtcggccggaaatggaccatcgggctcgccgctgccgtgttccaggccggcgcggccgtcatgacgctcgcgccgtccttcgccgtgctcatgatgggccggctgctggccggcatcggcatcgggatcgggatcatggtggcgccggtgtacatatcggagatcacgccggccacgctgcgggggtcgtacgcctcgttcccggagatcttcatcagcctcggcatcctcctcggctacgtctccaacctcgccttctccggtctccccgaccacatcaactggcgagtcatgctcgccgccggcatcgtcccttccatctccgtcgcgttcgtgctgctggtgatcccggagtcgccgcggtggctcgtcatgcagggccgggccgccgaggcgcgcgcggtgcttctcaaggtcaccgatggcgaggacgaggcgcaggagaggctcgccgagatcgaggaggcggcgcgcgtcacggccaccggcaacggcaaggccgtgtggcgcgagctcctgaggccgtcgccggtgatccgccgcatgctggtgaccggcatcggcgtgcagctcttccagcagatcaccggcatcgacgcgctggtctactacagcccgacgatattccgggacgccggcatcaccaccgagagccagctgctcgccgccaccgtcggcgtggggctctccaagacggtgttcatcgtgatcgccatcgtcctcgtcgaccgcgtcgggcggaagccgctgctgtacgtcagcacggccgggatcaccgcgtgcctggccgcgctcgccgcgtcgctctccctgctcgcgcacggcgcgctgccgcgggcggcggcgatcggggcggccatcctgacggtgtgcggcttcgtggcgttcttctcggtggggatcgggccgatcaacatggtgctgagctcggagatctacccgctgcggctgcgcgcgcaggcggtggcgctcggcttcgccgtgaacaggctgaccagcggcgcggtggccatgtcgttcctgtccatctgcggcgccgtgtccgtcgcgggcgccttcgccgcgttcgccgccatctcggcgctgtccgtggtgttcgtccacgtgttcgtgccggagacgagcggcaagtcgctggagcagatcgagtccctgttcggcgccggcgccggcgccggcgaggtggagctcggtgacgcggaacatctggtacaagggaaagaaatgagctga

SEQ ID NO: 62574 - DNA, 237 bp, Oryza sativa
  Clone ID: PAT_MRT4530_6389C.1
atggccatcgcgcctccaccgcacttcctcgcgctgcctcgacacgcagtgcaaacgctgctgtgccgccacgccgccgtgccgcatcacttcccgcgacaccacttctgcgccacgctcaagaatgagtacatgggattgcagagcccaatcactctttggaccgccctcaagaagcggttcgagaagttgaagtacaccatcctgcccaagcagagcaggactgggctcgcctga

SEQ ID NO: 62575 - DNA, 229 bp, Oryza sativa
  Clone ID: PAT_MRT4530_638C.1
ggatggttgaaatctatttggatttgaagtctatgcaaccactttccagtaagaaagaaaatgatgaagttttcatcaaactgggatctgacaaggatgctttgaagaagaaagaaaatgctgaacgtgatgagcgtgctaagaagtctgtgagcatcaacgagttcctaaaaccagctgaaggagagaggctctatggcggtcgtggtcgtggcaggggccgcgggga

SEQ ID NO: 62576 - DNA, 948 bp, Oryza sativa
  Clone ID: PAT_MRT4530_63900C.1
tttttttaagaaatcaggattatatgacagaagtttgttaagcctgcaactaaaagttgtctgtgttcttcggtatagtgtgttactgcaaccaagaaagttattactgaaagactaaaccaagaagaaccaccttttatagagattctagaactccattttttttgtatcaagatcaacactgcagcaactaaactcccctgtgttcttgagtgaatcactttcaacaagggccattattttcagaggagaaggcaaaaacactcttgtgaaaaattcagagaaatgcaaacgctttgtgtgaagcatcatctccatcttgttgtgatcagtgcatgacgtagacgttgtactcgacaatggcgtcgccggtcttgaggtccagggtgtgcgtcctggcctgggcgtagccgcgggcgaagcggaaggcgccggtgccgccgatcaccggcatctcccggacgtcgtcgaaggggcagttgcggccgagcacggtgaccacgctgccgttgtaggtgccgtcggtgaacaccaggttcattgcctggaggaagcccagcttggcctggtctgagcccatgtacagcccctgggcccggcccatgggcttggactcgggctcgggcccctccgtcagcggatcgtccatgacgttgatcatcccaaagaaggaccgcgatgacgggtccaccgggtccaccacccgcactgccgtcggtgatggcttgctcaccttgtcgtggaagtagaagtgcaggtgagtcgtcggtgaggatgctgacccgcggcgggccaagcccggcctggtttcttctgggcgggccgccctcgcaaccgccgcaagtgtgaccacaagggtgatcaccaccactcccttggcctccattgttgagctcaatgtgagcaaccaagctagcttcttgctatcgtgtgagtgagcgcgtgggc

SEQ ID NO: 62577 - DNA, 1003 bp, Oryza sativa
  Clone ID: PAT_MRT4530_63901C.1
atggcggtggcgatcgccggcgccgccactcgccgcctcctcctggcgcccgcccgccgcagggccttctggtcctcgccctgggcggaggaatctccgcactcccctgggccctccgccgacgagaataagaagaagaagccctcgtcccaccaccgcctggccgcggtcatggacgccgtcgccgaccgcaagctccctcccgagctccgcggccgcgccaacgccgtcagatctgagactgatataatcaatgttgtggaacaaagaatatggcattcaatggaagaagggcactttgaaaacctacctgggaagggaaaacctttaaacctcaattcaaaccctcatgctgatcctgcagaagacacactttacagaatactttcaaggaacggctgcgcacccgaatgggttgagctgaacaaggaaattcgaggcatgattgcacgatggagatcagcattgaggaaggcttgggcgaaccgctctgaggatgatcgttctacctggcatgatgatcacagactgcttcaggaacaaattcgccaaataaatgacaaggttttccgatacaatctgatagtgccctttgggcgccaaatgtttggtcttaactgggacaaggagctggacaaattgaaacagtaagacgggaaaagtgtaggctactgggatgcagttttataggcattatcctgtattttgttgtatccaagaataccttagaactcgagcagtggtaaatagcttgaataaaaaaattaagaaactatagttatatacgcggcatttttgtagtcatcttgctcttggatttagattttcagatgttagcctgcagtgtaggacatgaagcaaagggggtcgaaataatggtgtgtagcatgcagaacagctaattttctgcagcagagctgaatactgaagttgtgtgctgtactatagtagaatttgagaatggtttcagattattcaaaaaaaaaaaaaaaaaaaaaaaaaa

SEQ ID NO: 62578 - DNA, 270 bp, Oryza sativa
  Clone ID: PAT_MRT4530_63902C.1
gtctgtttgagtccctttatccggacaaattgcaggtaaatccaaagagggcaacggggttgtaatgcttccattttggatgtacttgtgacaatatgaacaaactcggcaggatgcattaacatctaaaagagggggtcaatacagctctgttccctgttatgatggacatatgcaaagcaatgtggtccttggcaacacaaaattcaacccttcctttgctgtcgtgaactcatggacagtgcggattggcaacaactttggaaaaag

SEQ ID NO: 62579 - DNA, 1028 bp, Oryza sativa
  Clone ID: PAT_MRT4530_63903C.1
gcacgaggaccgaaaccacctccaatttcgttccattccccaccaccaccatcgccaaaaccctagcttcccccaacccccccgccgtgggatgggatgccgtccccccaccgcctgagcgccgccgccgccgcctggatgtccgcatggacggctaccgggccctgatcgccgccggggccaccgccgtctgctgcctcgtctgcgccgtctgggccttctcctcctcctcctcctcctccgcctccaagaagcatcagcgtcagcgtcagcagcgtccgctgtccccggggtgctgcggctgcgcccgctgcgggtgccgcgccgcggccgtcaacggcgagatggccgtgggcggggagcagaagaaggcgccggggccgtcgcccgccgccgccgccgccgccgcggccgcgggggcgtccatgatggagcagctcgtgccggagatcaccacccacgcgctcagctacctcgactacaccagcctctgccgcctctccatgaccaactccgcgatgcgccgcgccgccaacgacgacggcgcctggaaggcgctctaccacaaggattttacagtggagcagcacaacataacaccaccaaacggatggaaggcatattatgcagctacaaaagccatcatgaacgtgaatactgagttctataatatcatcagggaagggtccttgccagcaatgagtcacttctggcttaacgcagactatgtcaaatgcattcatgctaccggagagcttttcacaggatacaacgcagtgatggacagctggggcctgttattcaactggggccaggatggagggcagggcattgctttccagctacgggatgtccgagctcgtgttctcggtgaggtggcatgggttaacatgaaggcgcatgttgatgttgaccctgggcatttccatgttaccaacgtatatgagttccgtaatggcaggtggtatatggttcatcaccatagctcgctcatggctgaccctgctccacataatctgtttgcttga

SEQ ID NO: 62580 - DNA, 240 bp, Oryza sativa
  Clone ID: PAT_MRT4530_63904C.1
atggcgttgaggatggcggctcccgaacctcctgtcgtgaatagcgttcaggacggtgttgtctcccgagccctcccacgtcggatgggtcgaggatggtggcggcggcggctcccgaggcctcccaccacggaggtggtcgatgacggcggttgcgacggtggtggagagagaggagaggggaaagagaagagaagggagggaggtatagatggaagtgacagcttgttgtacaagtga

SEQ ID NO: 62581 - DNA, 213 bp, Oryza sativa
  Clone ID: PAT_MRT4530_63905C.1
atgcagataatagttgtcaaatatagcatcactgacctgcgcctgcagggccgcacgttgattgtcgaaacacagttgtggagatgctttggctgtagtcaaactgttgatcttcttatttgtcagttgtccatattgccgaagaagaaaccaggtcacatccgagacatttacctacaaactcaattcattacactgattaaaaaatcctgc

SEQ ID NO: 62582 - DNA, 460 bp, Oryza sativa
  unsure (1)..(460): unsure at all n locations
  Clone ID: PAT_MRT4530_63906C.1
tttttggttttttttttttttttttttttttttttttttttttttttttttttttttttttagcagctcgggagcatcgaaagccatgaagctggttggtggtcttttcccggggggaaaaattggcaatgcccatcggggactggcagtttgatcgggaaaacgagctgggagttagcgctgcgcctgcacatttacataacctgggaagggacaatttgtaaagggggggttgncgtggggacggaactgagccactccctgggctacccatgcgagacaaggagcccatccagccgttgatcgggggggccaaccccttctccggcgttcgatcctgccgcctccggccgtccgccgagccgttgttttcccgcgagctggatggagcgtcaaccttggaagcatccggctgccattccgggcgaggggggcgcaacgcaaccccaaacctggggac

SEQ ID NO: 62583 - DNA, 1710 bp, Oryza sativa
  Clone ID: PAT_MRT4530_63907C.1
tccgatcccggtattagctgggctgcgctccacgccggccgcggacgcaccgacacacagacgcactcacacactcagcttaagcgagcgagcgagtgaacgagagagagagacagagatggcgagtgttgcctccttcccggtgatcaacatggagaacctggagaccgaggagaggggcgcagcaatggaggtcatccgcgacgcctgcgagaactggggcttcttcgagatgctgaaccatggcatcgcgcacgagctgatggacgaggtggagcgggtgagcaaggcgcactacgccaactgccgggaggagaagttcaaggagttcgcgcggcggatgctggaggccggcgagaagggcgccgacgtgaagggcatcgactgggagagcaccttcttcgtccgccaccgccccgtctccaacctcgccgacctccccgacgtcgacgaccactacaggcaggtgatgaagcaatttgcgtcggagatcgagaagctctcggagagggtgctggacctgctgtgcgagaatctgggcctggagaagggttacctgaagaaggccttcgccgggtcgaacggcccaacgttcggcaccaaggtgagcagctacccgccgtgcccgcgccccgatctcgtcgacggcctccgcgcccacaccgacgccggtggcatcatcctgctgttccaggacgaccaggtgagcggcctccagctgctcaaggacggggagtgggtggacgtgccgcccatgcgccacgccatcgtcgccaacatcggcgaccagctggaggtgatcaccaacggcaggtacaagagcgtcatgcaccgcgtcctcacgcgccccgacggcaaccgcatgtccatcgcctccttctacaaccccggcgccgacgccgtcatcttcccggcgcccgcgctcgccgccgccgacgcggcggcagcctgctaccggcggctcatgttccggggctacatgaacctgtacgtgcgccacaagttcgcggccaaggagccacgcttcgaggccataaagtccgcgcccgaggtcgtccacacggcgcccatccccaccgctggataggtatcaggcttggtttggtccggcttcgtagggcatgatgcgggcattggtcatctgttcagtagcgtgcttgctactttactaaatcaacccctctttttctgtcgaatgtttatacgtactagactgccactagtgtgggctacgtaacctgggtactggaagttgtacgtcaggcactcgtgcgtgggtaagtaggctgctctcatggtattcttgtttgattgaatgcgtacctcgtaatctactccccttctgttaagaagtgatttctcataaaaaaaaaaaaaaaaaaagtgtgtgtgtgcatgaactgtggtttcgtcgtcgttttgtgatactcctacataggattcgtcagagtggttcgtactgtactgaataaaagagcatgcagctagccaggtgtagccgtgtaggtatgaatagattactactcgcgacgagctcgaaagtttgtaccgtgtcgggttcttatttcgatccgtgtcatagcaagtccctgtttatttcttggctactagtactaaaaactgcctgcagtctcctcgtgaccttgcctgtatcttggtttggatgcattattaccttgatttttttttggcaaaaaaaaaaaaaaaaaa

SEQ ID NO: 62584 - DNA, 590 bp, Oryza sativa
  Clone ID: PAT_MRT4530_63908C.1
ttttttttttttttttttttttttttttttttttttttttttttttttttttttttttttttttttttttttttgttgtaaattcagccacatgttatcatatcttggatgttcgaagtcacagctgctacatgaagcattcagaggtcaaacatgttggtaagctagtacagcagaagttctctaaagaaataacatggtagcatcatgattacagtggttgctacagtagtatttaactgatgaaataataccagcattcatcacttcaagttattgacatactggactcttcaaagttcaaacatgttcctacagatcacgattacgaatcggcacctaatgaagccatctgtttgttgagctcatcatcagccttcttcaggaacacatcccagccactgccctctccccaatccagcatatcatacggcactgctgtcattaatcctggcctcacagcaccatgttgcatcaccactcttacctccacctcctctctctcctcctgctcaagttcctcccatgtaaacagcagtggcaaggtatacccaccccacggattgaaatcaattagctttacccaccca

SEQ ID NO: 62585 - DNA, 447 bp, Oryza sativa
  Clone ID: PAT_MRT4530_63909C.1
atggcggccagcagctcgaaggagatagtggacgcggtggagaagtggatggcgttccccatctccaccgccgccggcttggagatcgttgccgaggagggctctagcggaagcagcgcccagcagcagcaggcttggcgtccggtggcggcggcgtggtgcgacaacggcggcacgtcggggacgggagcggcatgcaagtcgtcagtggacggcggcgcgcggcggcggccgcgcgtcgtaagactggctgccgcgtgggtgtcgctggaggtcaaggacgcgctgtccagcctgcagcagacgttcgtcgtctccgacgcgacgcgcccggactgccccatcatctacgccaccgaggggttcttcaccatgaccggctactccctcaagggagataaggcgcaagggcatttcggtccaaccacattaaaaaagggctcctga

SEQ ID NO: 62586 - DNA, 304 bp, Oryza sativa
  unsure (1)..(304): unsure at all n locations
  Clone ID: PAT_MRT4530_6390C.1
gctaccggccggaagggggagggagtcgcccctcgatccgagtcggacggcgctcgcggccacgncgcctcccgatccgtgccggtgggggtgggaggagaggagggatggtgcaccgcttgcgccgtcgtcggagaggacagagaggagggggagtcgcgncgtgggatccgaggtcgtgctgtacagcagatccgngcgctggtcgtcggagcaaagaggggtggtcgagcgtgggagagacgagatgttgntcgcgcgtggnatctggagcgatgaggagangagcgggggggggcgggca

SEQ ID NO: 62587 - DNA, 239 bp, Oryza sativa
  Clone ID: PAT_MRT4530_63910C.1
ctgctcatggtcttcactaacaattcaaatatgttgagcaatctcttctatgaatatgatacaccattgattcttggtaaaaacacaaagacatccatggatttttccgaatgtgaaaatcttggaaaagattatcttaatatgcttgaaattaacaccaaaggtctccagtcgatgttctgtcaagtttgtggacaaaatcaaccatttttccaaacaaaaaaagactactttcaaca

SEQ ID NO: 62588 - DNA, 711 bp, Oryza sativa
  Clone ID: PAT_MRT4530_63911C.1
atggagaagaacaccaccgccatggggcaattgatgagctcctccgcgacgacggcggcgacggcgacggggccggcgtcgccgaagcggccggcggggcggaccaagttccaggagacgaggcacccggtgttccgcggggtgcggcggcgcgggcgcgcggggcggtgggtgtgcgaggtgcgcgtcccgggcagccgcggcgaccgcctgtgggtcggcacgttcgacaccgccgaggaggccgcgcgcgcgcacgacgccgccatgctcgccctgtgcggggcctccgccagcctcaacttcgccgactccgcctggctgctccacgtcccccgcgcccccgtcgcctccggccatgaccagctgcccgacgtgcagcgcgccgccagcgaggccgtcgccgagttccagcgccggggaagtactgccgccactgccaccgccacctccggcgacgccgcatccaccgctcctccgtcgtcgtcgcccgttctgtcacccaacgacgacaatgcctcgtcggcgtccactcctgcggtggcggcggcgttggaccacggcgacatgttcggtggcatgcgcaccgatctgtacttcgcgagcttggcgcagggtctgctcatcgagccgccgccgccgccgaccaccgctgagggtttctgcgacgacgaaggatgcggcggcgctgaaatggagctgtggagctag

SEQ ID NO: 62589 - DNA, 2758 bp, Oryza sativa
  Clone ID: PAT_MRT4530_63912C.1
gtggatccccgggctgcaggttttttttaagacataatgggaaaatagtattgaaagtaaaattgaacattgactatgtgatgcaggataaagaatgaatgtcctgactgaaaccaacttattgaatcctttctgcagccaacacaccatttctgatgaacccaacataaactctctggacgtcacaaatcattcgctcttttttctgtcggattctatccacaagctcttctgctgtatgatccagagtgagctcctcaagagtcctcacatgttcaataccgcaaggcaactgcttcaggtttggacagagcaggaacttcagatctgttaggcttgccacagctccttttgtcatcttaatttcattcaggtgtggggcaccccatattttcagtattctgagctttggaaatgagttctcatggaagtatatattcattccatcatatgcatcataaagctgtagctttaccaactgctgtaatccctcaagattaaggaatgcattttcgtcaattcttgacccagcaagacgtagaaacgtgaggttattcagattgcttacagacacgaaatgaggtaatgattcatgagataatgtaccttgcaagaaaagtttcttgctgatacgaaaggttcttaactccacaagagagcctaggtgatgaaccatttgagaactagcttccatgagtagtaatgtctgaagggttgtcatggagcagatacgcaaaggtgctggcacatcaaaagaaggaacaaattgcttagaaacaacgactgctttcgaagttacaataagatgtgttagcttttgaagttttgtaatcgccaatggaagctttacaattttacacttccaagcgtccaacaccagcagaatttttagccttccaatggagcttggaagcttggagattttagtacgcctgagacccagaaaacgcaagttgaacaagccaaacacttcctttggcagcctatcaactgaactatcagttagatccaaaacagacaacaacttcatagactttggtaatgactgaagcgaactgacattgggtgaactttggaaaagcagcaaggatcgaagatgtggtgcatggtctgcaagttgtgcaaaatcccctctctgaattgataaacggcgtgcttctccaataagatgtgtactcctcgagtggttaacgacaatgcaaaaattttgttcatgagccttggaaagagccaaaacacggaggatatcgtgcatttggacttcatgaacatgtccagcctcatttctcttcaccagcaacagaagacatcggttcacaacttccctcaggcgttcctctgccacttcctcaagtgttctatgctcagtttcttcaataaatccttcagcaacccagagtcgtactagggacttcctcttcatcacataattttcaggaaacatggagcaataaaggaagcagttcttaatgttgtgcggtagatcttccaaactaatcttcaagataatgttcatcatgtccatgatagagttgtttgttagttgcatctcaagatttttgtacaccttttcccagtctgaataagttgacccttgaaatgacagaaggcgtccaatgcacacaattgcgattggcaagccattgcacttgtcaacaaaattattagcccagggctgcaactccggcggacaattccttatctcattcttccaaaatgcctctttacagaacagatcccacgcatggtgtttctccaacggctgcaaattaattatatgggtttcatgcgcaagtaacgccacatcataattccttgatgtaagaattattcggccaatattgccatcttcaaatgcatctttgctatcgaaccaaacatttgcattccatacatcatctaggacaaggacataccttttgttctccaggtaagagcgggtggtttcgaccaagcctctgtaatttgtgatatcaacgtcaattgggaagtctttcttccgatcattcttgcgaaactcttgagcagttcgcctaagcaaatcgtcagcctcgtagctctgagacacagtgatccaagcacaggtgtcaaagtcagccttgatagcattgtaaacattagcaaccagtgccgtcttgccgattccactcattccccacacactgaccaccatgcggcgctgctcctcatctttcacccatttcatcagcaaatccctcttcttctcgataccaacaagctcatcctccctcttgaagagtacagagtcagatctccagtttgagctcctccttcccgccatcgatttcgcgcctctctcgacgcccttcagatcatacctaatcctcctctcggcagcgtttttcaggttgaccttgatgtcctgcagattgccagccaggcgagaccatgtgcccatcttgcacatcctcttgagtgccactgccatccccatccggccgtctccttcccccagctcgtaggtgaactcatcgactacgtcctcgatgctcagggcgaggctcctcacctgcttgacgaacgcggaggttgtctcgtcggcgtccttgaaccgctcggctgcctgcaagaaggcatggatgctctccagctcccccttcacctcccggatctcagaaaagaggcgcttcagagcagatccctctagcccaagcaaggacttggcgacctccactgcttcactcgccagggcatccccaagcttgacgattagtgagcccacaacaccctccgccat

SEQ ID NO: 62590 - DNA, 1097 bp, Oryza sativa
  Clone ID: PAT_MRT4530_63913C.1
atgcgtcagctagagaaaagctacactacaagcccagccgttgcccacgctggcttgtgggctgacgtcatcaaggggggcagcgccgacaggcggggcccgcatgtcagtggcgcaagggcggccggtccaccgtggaccggaccacgtgggtggtccaccgccggtccacgggaccgacggcccagatcgacccggggccgatcggacgggcggcggcggcctcgctcggctcggctcggcacaaggccggccgaccggccacggcaagggcggcggcgcgcgcgcgcacgcgttgccggcgacggcaaccggcggcggatgcggcggcgcaaaggcggcgcgaaagcggcggcgctaaagcggcggctaggaaggagagggaggggaatagaggggaggggatgcctcaccgagggtggccggcgcggaggaagacgacgtcgaacggcgacggcgagccacgggaggacgacggcaaccggcggacgagcttcgggatgccctaaggaaggaaaagagatagattagagggagggagatgaaccacggcggccggaatccatggccgaaggcggcggtaggggtagagctcaccggagtgcgaggggatgcgggttccggcgacggacctcgacggaggaggggcggacggggtggaggacgtggccggtaggggcgggatttcgccagccaatgtggggagtgggggaggagagagaggcgggattcgaaaatcgaatcccggccatctcgcgcgcgggcgcgggcgagagagagggggagtgggcgcgggaggtgcggcgcatgcgcgggcgtggccgacgtggcccggaggaggcggaggcgtgggcgcggcggcggttgccggcgcggcggcgcgggcgcgaggtgggagacgggtccgacaggtgggccccacctgtcagcgaccccgggtgagaggagggaggcggccggcccgcgcggcttagctgggccttggccttcggccggcccagcgggaggggaggggaggaaggagaatgggccggcggcccattcaaaagaaaagagaaaggaaaataaggaaaaggaaaaagaattttccagggatt

SEQ ID NO: 62591 - DNA, 290 bp, Oryza sativa
  Clone ID: PAT_MRT4530_63914C.1
ctcatggaccgcgtcgtggcgttcatctccgcctcctgagtccacctgggccgccgattaggtgggggtggattccggcgagggagggggaagtcgaagcggtcgagctgagcagtgtgtatgcagattcttcgaataaagtggctacatgtcaaattgatatctcaatctgcgccgcctaggcgaacggtgcggtgaagctggacagtgcagggcactgtggttctgttagcgttttctacagcgcagtgacgtggcattcagatctcgagcttacacataggagattt

SEQ ID NO: 62592 - DNA, 525 bp, Oryza sativa
  Clone ID: PAT_MRT4530_63915C.1
atgggccgccggcccattcctcctttttctccccctcctcccgctgggccagctgaaggccaaggcccagctaagccgcacgggccggccacccgcctcctctcacccgggtcgctgacaggtggggcccacctgtcggacccgtctcccacctcgcgccgcgccgccgcgcccgcaaccgcggccgcgcccacgcctccgcctcctctgggccacgtcggccacgcccgcgcatgcaccgcacctcccgtgcccacttccctctttctctcgcccgcgcccgcgcccgagatggccgggattcgattttcgaatcccgcctctctctcctcctccactccccgcgttggccggcggaatcccgcccctaccggccacgtccgggattcccctcccctatttaagctccaccgccaccccctctctctttttccccattttcgccgaactctcctgagctctccatcgctcccgcgccgtgcacccacccgccgccgcctttcccgccactccggccgcctctag

SEQ ID NO: 62593 - DNA, 459 bp, Oryza sativa
  Clone ID: PAT_MRT4530_63916C.1
atgtcagtggcgcaaggggagagaggggcgccggcaagtggggcccccgggtcagcggcactaggcggccggtcctccgtggaccgggaccacgcgggtggtccaccgctggtccaccggaccgacggcccagatcgacccagggccgatcggacgggcggcggcgacctggctcggctcggctcgacacaaggccggccgaccggccacggcaagggcgtcggcgcgcgcgcacgcacgcgttgccggcgacggcaacaggcggcggcggcggcggcggcgcaaaggcggcgcgaaagcggcggcgctaaagcggcggctaggaaggagagggaggggaatagaggggaggggatgcctcaccgagggtggccggcgcggaggaagacgacatcgaacggcgacggcgagccacgggaggacgacggcaaccggcggacgagcttcgggatgccctaa

SEQ ID NO: 62594 - DNA, 226 bp, Oryza sativa
  Clone ID: PAT_MRT4530_63917C.1
aaaaaaaggaaaaaaaattttttttttttttttttcccccaaggtttcacatggcaaatagggggaattcgggccttttttttattttccgaaccacttttcggggaaaacttattaaaaaacccccccaaggggggaaagggtacggggggccccataatccctgggggaaaacccatatttaaagggcccgttaaaagccaacaaagtttgggcttgacccaaa

SEQ ID NO: 62595 - DNA, 2243 bp, Oryza sativa
  Clone ID: PAT_MRT4530_63918C.1
atggcagcggccgcgcggctccccgcggtgggacttgggagagtgtgtgtgtgggccccgccgcatataaaaatcgctacgcgcacacgcgacgaaatcctcctctcgttcgcctcgtcttctcttctccccccacttcctccgcctcctccgccgccgcgcttctcgccgccgcggcgagccatggacgccgcaggttacccgaagatgcaaggaggaggggcgtcctcctcgtcgtcgtcctcggcttcctgccgcgccgccgacgcagccgtgtgggacgcggtgcagcagcagaagcggcagcgctgccagggttcttcatccaatgatcaagttggactcagtactgaaaataattccttccaagcacctgaacctgagctgcagaattctgactgtgtggaagatgaggaagaagattactatttgtatgatgaggatgatgtctgctatgatgatgatggagactatgaatttgatgaaactgacttcaatcagcagctagctgataagtttgatggtttggatttgcctccgggagtggaggctaccgttccatggctgcaaaaaaaggatattgctgatggacctagcactttcaagtcaatggcagaactagatgctgatattactaagaaatatgaattctttaagcagtttgatgttgttgagaatttttcggaccatcattatgctgataagcctgttgggaagacagggaaagactggacaaaaaggattcagtatgactggaaacttctggagaaagatttaccagcatccatatatgtccgtgtgtctgaaaatcgaatggaccttctgagggctgtaataattggacctcaaggaacaccttaccatgatggccttttcttctttgatgctcaatttactagtacttatccatctactcctccagtggtatattatcattctggagggcttcggctcaatccaaatttatatgcttgtggaaaagtctgtcttagcctgctaggcacctggtctggtagtggttgtgagaagtggaactcagctcactcaactatgctacaggttttagtctccattcaagctctcgtattgaatgagaacccatacttcaatgagccaggatatgagacctatgccaacagtgctactggacagaagagtgccatggactataatgataccacatttcagtactcatgcaggacgatgttatactcactccgtagatctccacagcactttgatgcccttgtagctggccacttccgccaccgtggtcatgccattctggctgcatgcaaatattacatggaaggtcataaggttgggtccgtagtccctaacgaggacgaggaggatgcgaagcagcaggacgacactgatgcaggaggatccggcagcagcagcggagcaaagccgcagcctgaaaagccagacctgtgcaagggccgtgctgcatccttcaaaaccaacatggccgttctgtttgaggagctcttgatggaattcaacgtcaagggtgctgacaccaagaagttctgcgatgagaagttgaagaagaaccagcaggctgctgctgctgctcgctgaagaggccccccagctgaagctacaaaacgcacagatcttctctagttctgagggtttcataatgaagcgaaaaccgtagaaaggggttttgcttgcctaactataaaagtgctgtgtagatagtccattctcgtttttctccttttgttgtacaggttgagtgtgtggacttaaaaaatttaaatgatcatgttagatgctaactgaagtatcatcaacccacccctcgttgtggtgcgatcatgaaatagacacctgcataagtaagcaaggtggcggttccatatgatttatgttagcaagcataaaaattacacccgttgttacttgcaagagtgttctccatcggctagcgtggtggctttgatcatatggttagatttgccctttttcttgtgagttcactttttttgcagctaacacttgcgttagtttcaaactgctttactaatagatttaattcaaccttgagttgacatttatcttctcggaaacatacacagataatggttatctcaaggtcgaattacatccgtcagtaaagaattattcatatgtttccgagaagataaccattatcttgtatgaaacatttgaaccatttgtgcgatttatcgtggctagacttttttttttaaaaaaaaaaaaaaaaaaaa

SEQ ID NO: 62596 - DNA, 391 bp, Oryza sativa
  Clone ID: PAT_MRT4530_63919C.1
aaaggcagaaggtattattgaaagcaatcttcttgtctgggaaaactggcagaccgtgcttatcagtatacacaattcaaacaactcacacatcaatcacctatttgctttatgtatgcctacatgcagtctgtagtatctacaacttattcaacctcattctgcggttgtccaacgctccaaaagcaattgaatcagtgatttgagtcaggcaaaatccagcgtgcgtagactttccacttgtccaattacctaacctggtgtcacacaaaaagatttctagtcaaggccgaacctcttgaagaggtgctcaaagattccttgtccggagacaagctcctgtgcaacgaatccagcaatggcaatcatggccagacgtccgttggtcagc

SEQ ID NO: 62597 - DNA, 211 bp, Oryza sativa
  unsure (1)..(211): unsure at all n locations
  Clone ID: PAT_MRT4530_6391C.1
ctggatacactacaatgccacctccgccacgntccagctccgcctctccgncacctcccgacgncccgncctcccgctgctctccctccacccgcttcctccctccgncctcctcctcctccggaccaagcccatgntcgacggcttcacctcctccgncaccaactgcaccctcttcgcatgggccttccgcgncaacaacaccatgcag

SEQ ID NO: 62598 - DNA, 1653 bp, Oryza sativa
  Clone ID: PAT_MRT4530_63920C.1
atggaggaggaagggcggttcgaggcggaggtggcggaggtggaggcgtggtggggaacggacaggttccggctcaccaagcgcccctacacggcgcgcgacgtcgcgctcctccgcggcacgctccggcagagctacgcctccggcgacatggccaagaagctgtggcgcacgctcagggcgcaccaggccaacggcacggcgtcgcgcaccttcggcgcgctcgaccccgtccaggtcgccatgatggcgaagcacctcgacaccgtctacgtctccggatggcagtgctcgtcgacgcacacctcgacgaacgagccgggccccgacctcgccgactacccctacgacaccgtccccaacaaggtcgagcacctcttcttcgcccagctctaccacgaccgcaagcagcgggaggcgcgcatgtcgatgtccagggcggagcgcgcgcacgagccgtacgtggattatcttaagcccatcatcgccgacggcgacaccgggttcggcggcgccacggccaccgtcaagctgtgcaagctgttcgtcgagcgcggggcggccggggttcacctcgaggaccagtcgtcggtgaccaagaagtgcgggcacatggcggggaaggtgctcgtcgccgtctccgagcatgtcaaccgcctcgtcgccgcgcggctccagttcgacatcatgggcgtcgagaccgtcctcgtcgcgcgcaccgacgccgtcgccgccacgctgatccagaccaacgtcgacgcgcgcgaccaccagttcatcctcggcgcgaccaacccgcgcctcaggaaccggagcctcgccgccgtcctctccgacgccatgtcggcgggcaagaacggcagggagctccaggccatcgaggacgagtggctcgccacggcgcagctcaagaccttctctgactgcgtcagggacgccatcgcgagcctcaacgccaccgacgccgacaagcagcgcaagctccaggagtggagcgccgccaccagccacgacaagtgcgtgcccctcgagcaggcgcgcgacatcgccgcgggcctcggcgtcacatccctgttctgggactgggacctgccgagaacacgggaggggttctaccgcttccgcggctccgtcgcggcggccgtcgtccgcggccgcgcgttcgcgccgcacgccgacgtgctctggatggagacgtcgagccccaacatcgccgagtgcacggcgttcgccgagggcgtgagggcggcgagcccgggcgcgatgctggcgtacaacctctcgccgtccttcaactgggacgcctccggcatgacggacgccgacatgtcggagttcatcccgcgcgtggcgaggctggggtacgtgtggcagttcatcacgctcgccgggttccacgccgacgcgctcgtcacggacacgttcgcccgcgacttcgcgcggcgcggcatgctggcgtacgtggagaggatccagagggaggagaggagcaacggcgtggagacgctgcagcaccagaagtggtcgggcgccaacttctacgacagggtgctcaagaccgtgcagggagttactgaagagcagttcaagggctcatggacagggcctggaagtgagagcagcagccatgttcttgccaaatccaggatgtga

SEQ ID NO: 62599 - DNA, 973 bp, Oryza sativa
  Clone ID: PAT_MRT4530_63921C.1
gcgttcgcgccgcacgccgacgtgctctggatggagacgtcgagccccaacatcgccgagtgcacggcgttcgccgagggcgtgagggcggcgagcccgggcgcgatgctggcgtacaacctctcgccgtccttcaactgggacgcctccggcatgacggacgccgacatgtcggagttcatcccgcgcgtggcgaggctggggtacgtgtggcagttcatcacgctcgccgggttccacgccgacgcgctcgtcacggacacgttcgcccgcgacttcgcgcggcgcggcatgctggcgtacgtggagaggatccagagggaggagaggagcaacggcgtggagacgctgcagcaccagaagtggtcgggcgccaacttctacgacagggtgctcaagaccgtgcagggtggcatctcctctaccgccgccatgggcaaaggagttactgaagagcagttcaagggctcatggacagggcctggaagtgagagcagcagccatgttcttgccaaatccaggatgtgatgaggattattcagaggaaaattttaaacagttgaaatttatgtaataaaagccactctggacttcagccaaggagccttgatactttacagactgaactacagcacgcacggatcaactaattacatatagttacagtatatatgaatgattgagttatgactcaaaatggaacaatcagtttggggtaaaatgtaattgatctgtgagtttatcacagaaagtattttttgcacctagatgcaaaaattgggcacatacagtactgttatgcatttacagagaattctcaagttcataaaaaaaaagtttgcaaatgaattttttagtaaaaactttttttctctttcttgataatgtatattgcccaaatttatctaaatcctgaagcatcagcttcaaaaacagtggtaatttcttgtgcaacgggatggttacaaacccc

SEQ ID NO: 62600 - DNA, 315 bp, Oryza sativa
  Clone ID: PAT_MRT4530_63922C.1
ggacagtaaaatatgtggtgtggtatctacatataaaagaaaggagacaggtttcattcattaaaccttacataagcttgagtatgaccagataagaacaactcctgctgctgtaggataaatctgcaaacacacgacctgattccgacctattatgatggaaagcaggaagcacgggcagaaaaggacgaggggggcacactttgaacgacattaacaatcaccgaggaaccacaataacctactgggtcaacaccatggcccacgcaagggagcacatagggggagggctgaagccagtggagggggttgacc

SEQ ID NO: 62601 - DNA, 1102 bp, Oryza sativa
  unsure (1)..(1102): unsure at all n locations
  Clone ID: PAT_MRT4530_63923C.1
cgatgaaacccactgttgcgccccattagtttcacaacaacaatcccattctctgcactctcagcctcaacatgagcagcattgatggccctctgagcctcctccacccgcagtgtcaaaaccaaaaggacttgtcgatcaccgcaatgtcgttatctatggtctttgggacaccaaccacagaacatttgaggcctcgcctccgaacttcctcataaattacggaagcacctttctgggtaccatcacctccaataatatacacctggttaataccgcgatccttaatactgtcaactattttgccggtgtcatggcctcctctggaggttccaagaacagtcccacctctcttgtggatgtcattcaccgatttcggtgtcagtgcgacggtgtttctagaatagaaacccttgtatccaccctctatgccaacgacgctggtgacgccatacatatcatacaagccgcacacaagctcgcggataacagtgttaagtccagggcagaggccaccgcaggtgacaatggccgcgttgacctcatcggactggaagtacacccgctgccgcggcccggctcgccggaaatgggtgcccctagcactggtcttatgaacaacgatcttttgcgtgacggtgtcgtcagtgttgacgaagtattgcttgacgactgaataagccgggttgtcttgcagaggattcgggtaagtcgaaagctcgcggaggtagtccgtacccgggggcacgtccctngagcacgtacccggcgtcgccgccgacgagcttcttcttcatcgcccacttggccgccatcgacgtcgacggcgccgccggcgccgccttccgggactccttcacttcgagcagcttcttctccggcacccccgcgggggccggagccacgccgacggcctccatgcggcggcgacgacgacgaggaggggcggcgcttaattatccgttaaccaaaaaaaaaaaacaaaatctttctcgagtggcgaacgcaaagcgaattctttgtatctgcgattaggaacaaaaaaaaacaagcttaatcgcgaataatctttgggactaatctgaggtggcggacgcgtggg

SEQ ID NO: 62602 - DNA, 266 bp, Oryza sativa
  Clone ID: PAT_MRT4530_63924C.1
cgccgcgtggcagcgccgcgtgcgcgcggcggcgcggccgtggctcttctccttcgccggcgggccgcgcaagggcaacggcaccatccgcgccgacatcatccggcagtgcggcgcgtcgagccgctgcaacctcttccactgccacggcgcggcggcgagcgggtgcaacgcccccggcgccgtcatgcgcgtgttcgagagctcccgcttctgcctcgagccacggggggacaccatgacgcggcgctcgacgttcgacgcca

SEQ ID NO: 62603 - DNA, 2635 bp, Oryza sativa
  Clone ID: PAT_MRT4530_63925C.1
atggctgttaagtgggattacacctttgatttggctgaaattgcatgtgatgccatccaatatgttggaaaaaatgactcttttgccctgtctcaaggacgtacggtagcaggggagagttggcgccgttggcaccgtgaaacaaatcttgtgctgatttccataatgccgagtggagacgaagccggccgggaggaaggggtcgtcgtcatcgtctccggcggccgaggaggacgacgacgacggcactgcgtcagcgaggtcggccaaccctcggcggggtcgcccttgagctcgcctcccctcgttgtgccgctctggctcaccgccctcgtcggtcaggtgtgcgccggggagtcgtcgccccagggagggcagaagcgggagcccccctcgtcctcgccctcggtctcagcgtcaccgttgtccccgctgcggcctgctgcttttgcgcctccgggatggacgccgacagcccgcgtcgacctacaacagtaccttctaataccccacaagtatcaggcttgataccttggtatcaaggtctgatacctaggtaccacccggtatcttgggtaccgagcatcaggtatcggtcgatacctaattggtatcaaagcgccgcccctcctcgtcgtcgtcgccgccgcatggaggccgtcggcgtggctccggcccccgcgggggtgccggagaagaagctgctcgaagtgaaggagtcccggaaggcggcgccggcggcgccgtcgacgtcgatggcggccaagtgggcgatgaagaagaagctcgtcggcggcgacgccgggtacgtgctcgaggacgtgccccacctcacggactacctgcccgagcttccgacttacccgaatcctctgcaagacaacccggcttattcagtcgtcaaaattccattattccatagtccaaccacgcttggtacaaaaaggcttacctttcttcacaccacgtgtgcgcattacccgaatcctctgcaagacaacccggcttattcagtcgtcaagcaatacttcgtcaacactgacgacaccgtcacgcaaaagatcgttgttcataagaccagtgctaggggcacccatttccggcgagccgggccgcggcagcgggtgtacttccagtccgatgaggtcaacgcggccattgtcacctgcggtggctctgccctggacttaacactgttatccgcgagcttgtgtgcggcttgtatgatatgtatggcgtcaccagcgtcgttggcaccagcgtcgttggcatagagggtggatacaagggtttctattctgacaacaccgtcgcactgacaccgaactccgtgaatgacatccacaagcgaggtggcactgttcttggcacctcccgcggaggccatgacaccggcaatatagttgacagtattaatgaacgaggtataaaccatgtgtagattatgggtggcgagggtacccagaaaggtgcttccgtaatttatgccgaagttcggaggcgagggctcaaatgttcggtggtcggtgtcccaaagaccatagataacgacattgcggtgatcgacaagtcctttggttttgacactgcggtggaggaggctcagcgggccatcaacgctgctcatgtctaagcggacagagcatagaatggcttttgtgtagttaaactaatgcgacgcaacagttgcttcatcacaaatgctactctggctagtcgcgatgtggattgttgcttaatcccagagtctccattctatctagaaggaaaaggtggactccttgaattcatcgagaaacggctcaaggacaatggccatatggtcattgtagtggctgagggtgctgggcaagatctcattgcgaaaagcatgaattttgtggaatactcaagatgcttctggaaataagctacttctggatgttggcctttggctctcccagaagatcaaggatcatttcaagaagaagcgcaacttccccatcactctcaagtacatcgacccgacatacatgatccgtgccgtcaggtcaaacgcatccgacaacgtctactgcaccctgctagctcacagcgccctccacggcgccatggcggggtacaccggcttcaccgtcgcgccggtcaacggcaggcacgcgtatatcccgttctacagaatcacggagaagcagaacaaggtggtgatcacggacaggatgtgggcgagggtgctgtgctcgacgaaccagccatgcttcctgagccacgaggacgtcgagcacctcaagcacgacgacgacgagcaccacctgcacaacacgcagctcctcgaaggcgagagctcgccggtgaaggactcctccaagtgcaacgggacagcagcgccagtgtgagaaccaacgagaatatatatatatatatatatatatatatatatatatatatatataagcatgtaattgtagctttctttttgtcctttttttctgaaatgacattgtggggaagctactgtaatagaattaccgtgtaatatagcaaggctggtttcatcctcgaagcagaatggtaggtttggttttgttgggaaaatagtaagggtttcatgtcatcaattcatcatcctactagtaataagggttaattttgtagt

SEQ ID NO: 62604 - DNA, 588 bp, Oryza sativa
  Clone ID: PAT_MRT4530_63926C.1
atgtcggtgatcccgctgtggaagcaagtagactacttccgggagtacaagcggcggctggcggcgcacctgggcgcggcggaggcggaggcggtggtgtcggatgcggtgtacgccatcagcatgggcaccaacgacttcatcgagaactacttcgcggggacgacgcggcggtacctgcagttcggggtgggcgagtacaccgacttcctggtgggcctcgcccgtggcctcctcgtggagctctacggcctcggcgcgcgcaaggtcgccttcacggggctcggcccgccgcgggctgcctcccgctggtttcgtgaaggcggaggtgggatgctgcgggacggggacgtacgagatggggtacacgtgcagcgcgtgggacgcgaggacgtgcagggacgcggacagactagtcaaggtacatacacggatgtacagccgggatccaagctagctaccctaccacaacattgctacaactctgcccatctacacccacctggttctttccttccgggcgggtggattgatggatctcaccatcctcgccctcgccctcacctccctaccggagttctgaactga

SEQ ID NO: 62605 - DNA, 750 bp, Oryza sativa
  Clone ID: PAT_MRT4530_63927C.1
atggaggcagaggcactgccggtgctggaggcggaggacggaggcagaggtggtgccggcactggaggcggaggcggcgcacagggcggcggcgacctacggaaggcgaaggagcggctgcgggaggccatccgggagcttcaccatcgcgatcggcatcaccagcacgggggaggaggggatagggatgggaagggcccggtggatggagaggaggatgatggtggtagtgggttagataaggtcgtggagtggataagcgtcgcctctcgtcggggagcacaaacccggccacgcgccacggcgccagcgaggggaggaaaggaagaggccgcgtcgcaccggggcacgcacgggcggcggtggccggtggcagctgcactgcacgggctctcgagccggcagcggcacgcgcggaccggtctgggagggcgccgccacgcagacgcggacaaaacgaggcctccctcctcctccaccgccggcttttgcagatgcgaggacgttggcaagtttttagtggagggtatcttgtattcttgcaagcttgtcccctttgactcggggatctcctccctgcgcactctggcaggatccaaggcaaacgacgctgtgcgcctgtgcggcgtgcaggggacgcagagcgacagcggcggtgacagctggggacgaggaggcggcggcggctgcggccatgacgagcagccgcccctcggcgcagggacggatggagatgggtgtgggcggtag

SEQ ID NO: 62606 - DNA, 219 bp, Oryza sativa
  Clone ID: PAT_MRT4530_63928C.1
atgagaggagatggggatggggaacggggttgtgcggataccggtcaggatgagggccgccgcgacaacgacggcggcggcgacggcgaagcggacgagccgccgctgctgctgacgcttccccattcgcttctccagtacacgatactaccagttgacgacttgacttgcaggtctacgagatatatatggccggtcaacacccgcaagctcgatcgt

SEQ ID NO: 62607 - DNA, 470 bp, Oryza sativa
  Clone ID: PAT_MRT4530_63929C.1
cagcaaagcaggttctgactgcgtcaaaaaacctgatcaattaatgttacagtgtactcctatattaccatgaaaagattacactctggcttgaccataaccatacaagctggccaaaactgttcttctgaaactgcggtggaaagaccaacctcaggaggaaagaaacacatagaaagacttctgaacacgtatttctttctctaaagacttctgaacacgtctttctttctctctccatacaggtggtcaatgcattcaaagccgacattttctatagttttgataaggaaatgtgaaccaatctccctcttatgtctatcatattgacagctttgtaattgcatttgacaggttcaaccggttgcctcgcagagaaacttttggttagtcaagtatggaagtgatcaagactaacaaatgccgctctccaagggctataagttttgttgtcatctagtacgagcaaa

SEQ ID NO: 62608 - DNA, 351 bp, Oryza sativa
  Clone ID: PAT_MRT4530_63930C.1
atgagctggcggactgagcagctcggtggtgggcggatctacctcggccggcctcgcgacggtcgggcggcaggcggcacggtcgacggcgaagacggcggctccctcgccctcgctcgcgaatctccagaggtggccttgagtgacgatgacgacgaggaggcggtcgggagtggtgccgctggccccgcacgcatgccggccatatctgccccggccgaagacgactacgacgacgacgatgtaaccgggagcggcaccgccgaccccgcgcatgcgtgctggccgggtccatgcggccccctccgacgacgacgaggcagccagcggcgccagtcggctggattctag

SEQ ID NO: 62609 - DNA, 613 bp, Oryza sativa
  Clone ID: PAT_MRT4530_63931C.1
ctcacagcctacgcctagcgccgtgatctcgcccgctgcccgatgacgcctctcccttgcggtcccctgggtcgcctgccggtccccggccggttttcccggggcggcccccgcggccccgctgtggcgccgctcttcgcttgttcgcattccgcctcttcggttggccgggctcctgctgcggttgcgcttccgcttggctcggggcggcctggcgcctgctccgctgcgccggccgccgctgccgatccgcctgggttcggtctgcggctgtccggcgacagctgcgccgctgcagaaatattactcgattttctacattatacttaaacaacacacggagacatacaaatcgtgctattttccagtttcgtaattccgtatgacaatggaacgatacagttaatgcacatgcccccttgacgagataaaattccacggaggtcgcgcaaggagaggtgcgtgtttgatctgctaatacgttggaggtcgagcaaggagaggttggaggtctaatgtgttggaggtcgagcaaggagagatcgttatctaattgaatgaatattctatttttgactggcgtgccacttcttaaaaaaaaaaaaaaaaaaaa

SEQ ID NO: 62610 - DNA, 2715 bp, Oryza sativa
  Clone ID: PAT_MRT4530_63932C.1
atgtacatcaagagtgccatatcaaatgtcattattggtggtattgaggactctgatgatgttaagacatacttagaaaacattgataggaacttcaggagttcttctaagtcttatgctagctctataattaagcgcctaacgtccatgcgctataattataaagatggtgtgagaaagcacattatgcagatgggtgctatgaatggagagcttaagagtatggacatgggaattaatgatgatcttctagtccactttatcttgagttcacttccttctgattttgagtctttcattattaactataataatcagagggataagtgtaagaaaaagttctatcaaggggagtccagcaactcccaaaacaagaagaagaagcccaacactccttccactcaggcttctaatggtgctcataagggcaaatctcaggttccagcaggtcagaactctgctggtaagttcctttgcaagttttgcgaggcagaaggtcatgcacagagggactgtgaaggcttttgggcttggcttgctaagaaaggtactaatgttgatattgtctctaatgttgatgaattactttacgttgaattttctcataaatcatggtggattgagtcaggtgccactgtgcacgttgctaactcattacagggattccgttcccataatgcaaaaattaaggtagtgagatcatatcgaggaggagaattttatgggagacatactccttatgggcaaagttctggtccatttgcccaataccttcatatacatggaataattgcccaatattccatgcctagagaaccacaacaaaatggagtggctgagcgtcgcaatcgtacacttatggacatgaggcacttaaaacagctgcacacatactcaatcgagtttcaaaccgtggtagcaccagatgaaaattctggtgataccgactctgttgaaaataataatgaattaaataatgacactcaacagacttctgaggcacaaaatgaagaaattatagaagaaccttctcaaccgtcagtgatcgaaaatgaaccacttagaagatcacaacgggagaggagatctgccattccaaattattatgatgtttatttaggtgaaaatattgggaaggtggatgatcctacctcattcaaagaagcaataacgagtgaacattcatccaaatggcttgaagttatggacgatgaattaaaatctatgagtcataatggagtctgggacttagtagaaattcctaaaggatccaaaacagtaggctgtaagtgggtctacaaaactaagcttgactccaaagggaaaatcgaaaggttcaaggcaaggcttgtagcgaagggtttttcacaaagagagggaatagattacaatgaaaccttttctcccgtctctaagaaagactcatttagaattgtcatggcgcttgttgctcattatgatttagagctccatcagatggatgtaaagactgcatttcttaatggtgaattgcatgaggatgtatacatggcagaacccgagggttttgttatggaaggcaaggaccatttggcttgcaaacttaagaaatctatctatgaacttaaacaagcgtcaaggcaatggtaccttaaattcgatgaaataattaagagattcggatttaaggagaatgaggtggataattgcatttacattaagactaagggtggaaaatttataatactagtactctatgtggatgacatactgttagcaagcagcgacattaatatgttgcatcagactaaagaatttttgtcatctaattttgatatgaaggatcttggtgaggcatcttatgttttaggcattgaaatacaccgagataggtctaaaggagtactggggttatctcagaaatcatacattagcagagtactaaaaagatataatatgagtaagtgctctgcaacacctgctccaatagtcaagggtgataaattcggattatttcaaagcccgaaaaataaattagaatcagatcagatgaaaatggtaccatacgcttcagctgtcggaagccttatgtatgctgaagtctgtacgcgtccagacttagcatttgttaccgggatgcttagcagatttcagtccaatccaggattagaccactggaaggctgttaaaaaagtcttgcgttatttccaaggcactaaggattacatgctcacatataagaagtctgaagaacttgaagtcctaggttattcagacgcagactttgcgggatgtgtagacactaagaaatccacatcaggttatgtattcactctcgcaaatggagctatttcatggaaaagctctaaacaaaccttgactacatcgtcgacaatgcaggctgaatttttggcatgttatgaagcaacggggcaggccgtatggcttaagaatcttatcccgggtttaagagtggtcgacagcatttctaaaccaattacattatactacgataataaagctgcggtattctattcaagtaacaacaagtcgagtggtgctgccaaacacatcgacattaagtatcatgttgtgaaagatagaatccaggatcaaaccattaagattgagcatattagcactaagtcaatgctcgcggatccgctcaccaaaggcttacctcccaatttatttaaagatcatgtagccggcatgggaataactgattgcctttga

SEQ ID NO: 62611 - DNA, 6171 bp, Oryza sativa
  Clone ID: PAT_MRT4530_63933C.1
atggaggcaaatgctgagagtcgcttgatccgacaggcttcggataaattgaatgagatgctttatagagaggaaatgctttggttgcaacggtcccgtattaactggctaaaggaaggggatagaaatactcggtttttccacagcaaagcagtttggcgggcgaaaaagaatataattgtcaggctgagggactcaggaggcactgtacaaaattcgacaacagtgatggaggatatggctaccaagtatttccaagagatgtacacagctgatagtaccttagatcacacacagataatacacctcatccaggagaaagtaacacctgaaatgaatgaatccctgtgcagagagttttctgaggaagaaattgccacagctgtctttcagatagggccgcttaaggcaccaggtcctgacggttttccagctcgtttctatgaaaggaactggggtgtgttgaaagaagatatagtgagagtggtgaaaaccttcttcctgacaggagttatgccctcaggggtgaacaacactgctatagtgctcattccgaagattgaacaacctatggaggttaaagattttcgtcccataagtctctgcaatgtcctctataagtttgtgtctaagtgcttggtaaatagattaagacctatccttgatgagctggtttctcaatcacagagtgcatttgtcccaggacgtctgattacggataatgctatcttggcctttgagtgttttcattcgatccagaagaacaagaatccaaacagttcatcttgtgcttacaaattggatttgtccaaagcctacaatcgcgtggattggaccttcttggagcaatcaatgtataagttgggtttctctcatcgttgggtttcctggataatggagtgcataacctcggtgagattctctgtcaaattcaatggaaccttacttgatacatttgctccttcccgcgggttacggcagggtgatcctctatccccattcttgttattgttcgtggctgatggattatctttactgctggagtataaagtgtctcagggtgctattacccctgtacatatctgtcgccgtgcactggggatctcacacctctttgccgacgatactttgcttttcttcaaatctgacaaccagcaggcaaaggtgatcaaagaaaccctgtcaacatatgcagcggcgactggacagttgatcaaccctgcaaagtgttccattctgtttggtagttcctctacgtctgctgtgtgtgatgccattaagcataccctgcagattgttaactcctcctttgaggacaaatacttgggctttcctaccccagaaggaagaatgaacaagggtaagttccaaaccttacaggagaaaatctggaagaggatcatttcgtggggagaaaatcttctatctagtggtggaaaagaggtcctgatcaaatcggttattcaagccataccggtttatgttatgggaatgttcaaattacctgaatcggtctgcgaggatctgaacaggttgactaggaatttctggtggggggcagataatggagaggaacgagatgtttctctcatgattatgtggcgtaattggttcgttcgtaatgagctaacacatggcaaaagccccccgccagtagaggtttccaaacgattcctggaaagctatttacagtcgctgttcatgatccgacaacaccccaccgctgagctgacaaaagggaagcaggtagtgtacatgtatcccagggacagggaaaagagtaaaaggcagagggtggccagcgatctgctgtggtcatgtccggaaactggatggatgaaggttaatgtagacggatcctttgatgcgcagcaggaaagtggtgggatcggcgtagttatgagaaacagcgaagggagagtgatctttgcagccttcaaaagtctgaatggttgcaagagtgcacttgaagcagaactggaagcgtgcagggagggcatcgttctagcgtctcaatggacgatgtgccccttctatatagaatctgactgtcaagtggctttgcagatgatccagggcaaggaggaagagaggtcagagttagcatacctcatcagagagatagtgagtgctgcttttgggaatagggagattcgtctcaggaagattcacaggagccaaaactctgttagccactacttggcaaataagggccgatgtgagagtcttagtaagggattcgtattgctgttccgggacagagtaggtggcgaccggaaggccgccgtcaccccgcaggtgatcgccggcgacctcttcaggatcaagccggtgtactcactgctacgaccacttctcctacaccgacaattcgcgaggtggttcgaggttctacatcctctacatccaccccggaccaagcgagaacaattgcaatggcttcaaacaacgatccaactcattgagccttttgatgggtcaaattatgctaagtggaaggctgatgtgttactcaacttaggcatactcgattatgattatgccattagagaggaccgtcctgaggagccttttagtgttgagcacgattatgaggagaaactgaagttatatcgtgagaaaactaatgaatgggagaagtccaataggatttctctcatgtacatcaagagtgccatatcaactgtcattattggtggtattgaggattctgatgatgttaagacatacttagaaaatattgataggaacttcaggagttcttctaagtcttacgctagctctataattaagcgcctaacgtccatgcgctataattataaagatggtggcagtaagaagaagttctatcaaggggagtccagcaactcccaaaacaagaagaagaagcccaacactccttccactcaggcttctaatggtgcccataagggcaaaactcagattccagcaggtcagaactctgctggtaagttcctttgcaagttttgcaaggcagaaggtcatgcacagagggactgtgaaggctttcgggcttggcttgctaagaaaggtactaatgttgatattgtctctaatgttgatgaattacattatgttgaattttctcataaatcatggtggattgactcaggtgccactgtgcacgttgctaactcattacagggattccgttccgtgaggacgctaagaaagggggagcggatcctaagagtggctgatggagctgaaattaaagtgatggccgttggggagcttcatcttcgacttccaagcggcaataatcttttacttcatgatgttctttatgctccctctgttaagaggaaccttatttctgtaatggttttaacaaacagtggttatgattgtaatttttctaaggacaaatgctttattaagtataataatattgatattggtcttgctagcgtgcaagacaagctctatttgctctctttggatgatcatattatgaatatattgaatgcctgtaatgataatgagacatcttcaaaattgtggcactgtcgtttaggccacatttctaaggggagaatggagcgtctcattaaggaagagatacttcaacctttagatttttcgaatgcggatcattgcttaaattgtatcaagggaaaattcactaagaaaattaagaaaggagctactaggagcacgtgtccattagagataatccacacggatatatgtggaccgttcccagtaacatctgttgatggatatgactcgttcattaccttcacagatgatttctcccgttatggatatgtttttcccattaaagatagatctgaatcactcgataagtttaagatattcaaagctgaggttgaaaatcagcataatgcaaaaattaagatacatggaataattgcccaatattccatgcctggagaaccacaacaaaatggagtggctgagcgtcgcaaccgaacacttatagacatggtacggagtatgcttagtcattctactttgtctgtgaatttatggatagaggcacttaaaacagctgcacacatactcaatcgagttccaagtaagtcggtacctaaaacaccttatgaattatggactggaagaaaaccgacattaaattatttgcgtgtgtggggctgtcgtgccgaggcaagaatatttaatccacaactaaagaaattagatcccaagactgtaagctgtcattttatcggataccctgagacatctaaagggcaccgattttattgcccagaccgtgtcactaaatttgtggaaactagacacgccgtattcttagaaaataatgaagtctgggggagctcacaggaaagggaaattaatcttgaggaaattcgggctaacgttacaccggaaatcctagagaataatattccaataaatttggtaactcgtgttgtacctgtgactcagaccgtggtagcaccagatgaaaattctggtgataccgactctgttgaaaataataatgaattaaataatgacactcaacagacttctgaggcacaaaatgaaggaattcaagaagaactttctcaaccaccagtgatcgaaagtgaagatattgggaaggtagatgatcccatctcatttaaagaagcaataacgagtgaacattcatccaaatggcttgaagctatggaagatgaattaaaatctatgagtcataatggagtctgggacttagtagaaattcctaaaggagctaaaacagtaggctataagtgggtctacaaaactaagcttgactccaaagggaaaatcgaaaggtttaaggcaatgcttgtagcaaagggtttttcacaaagagatggaatagattataatgaaaccttttctcccgtctctaagaaagactcatttagaattgttatggcacttgttgctcattatgatttagagctccatcagatggatgtaaagaccgcatttcttaatggtgacttgcatgaggatgtatacatggcacaacccgagggttttgttgtggaagacaaggaccatttggcttgcaaacttaagaaatctatctatggacttaaacgagcgtcaaggcaatggtaccttaaattcgatgaaataattaagagattcggatttaaggagaatgaggtggataattgcttttacattaagactaagggtggaaaattcataatactagtactctatgtggatgacatactgttagcaagcagcgacattaatatgttgcatcagactaaagaatttttgtcatctaattttgatatgaaggatctcggtgaggcatcttatgttttaggcattgaaatacaccgagataggtctaaaggagtactgggattatctcagaaatcatacattagcagagtatcagaaagatataatatgagtaagtgctctgcaacacctgctccaatagttaagggcgataaattcggattatttcaaagcctgaaaaataaattagaatcagatcagatgaaaatggtaccatacgcttcagctgtcggaagcctaatgtatgctcaagtctgtacgcgtccagacttagcatttgttaccgggatgcttggcagatttcagtccaatccaggtttagaccactggaaggctattaaaaaggtcttgcgttatttgcaaggcactaaagattacatgctcacatacaagaagtctgaagaacttgaagtcctaggttattcagatgctgactttgcgggatgtgtagacactaagaaatctacatcaggttatgtcttcactctcgcaaaggcagctatttcatggaatagctctaaacaaactttgactgcatcgtcgacaatgcaggaatttgtggcatgttatgaagcaatggggcaggccgtatggcttaagaattttatcccgggtttaagagtggtcgacagcatttctagaccaatcacattatactgcgataataaagctgcagtattctattcaagtaacaacaagtcgagtggtgctgccaaacacattgatattaagtatcatgttgtgaaaaatagaatccaggatcaaaccattaagattgagcatattagtactaagtcaatgctcgcggatccgctcaccaaaggcttacctcccaatttatttaaagatcatgtagccggaatgggaataactgattgcctttga

SEQ ID NO: 62612 - DNA, 390 bp, Oryza sativa
  Clone ID: PAT_MRT4530_63934C.1
gaagagctaccaggagcacatgccgatgcccctggcacaaggctggtcgtcgtcctcctcgggatactactgcggcgaggggtcgtcgtcctgacaggagtactacggcgaggggtcctcctaggggggggggtggggggagcagcagcagcacccggggatgacccccgtgaggctgaccaacgcgaggcagttcgcggcgcagctgccgtctatgtgccaggttgagccccagcagtgcagcatcttcgcctacggccagtactatgcttagctggcttgcctcataactagtaggatcacaccgttgctgtgttgcatgcaacgagatagtgatcaaaacaaataatgaataatgaactgttttgaaaacaaaaaagacaagacaat

SEQ ID NO: 62613 - DNA, 2562 bp, Oryza sativa
  Clone ID: PAT_MRT4530_63935C.1
atggcgtggcgccgcctcacaagcgccgctgccgccgccgccaccgtgaaaatcgccgctgcagccgttcttttcgggagagagaaacataatggggaaatttttagggttaggattccgtcgtttccggagagtccgttttcgcagaagaagagtttgaagagttccaaggcagcaaggcaatggtacacctctggccagagtaaaactattcgaatagccgtgcccgcggttatgggcggaaattccgggcgtgacatccgacccattgagcctcttgaagggtcaaattatgctaagtggaaggctgacgtgttgctcaacttaggcatacttgattatgattatgccattagagaggaccgtcctgaggaaccctttagtgttcagcacgattatgaggagaaactgaagttatatcgtgagaaaactaatgaatgggagaagtccaataggatttctctcatgtacatcaagagtgccatatcaaatgtcattattggtggtattgaggactctgatgatgttaagacatacttagaaaatattgataggaacttcaggagttcttctatgtcttacgctagctctataattaagcgcctaacgtccacgcgctataattataaaggtggtgtgagaaagcacattatgcagatgggtgctatgaatggagagcttaagagtatggacatgggaattaatgatgattttgagtctttcatcattaactataataatcatagggataagtggtccattgaagaactcatttctcattctattgaggaggaggatcgtcaaaaggctgacaaacagaagcataaggatcagctgaacctccttcatagtgctaagggcggtaagaaaaagttctatcaaggggagtccagcaactcccaaaacaagaagaagaagcccaacactccttccactcaggcttctaatggtgcccataagggcaaagctcaggttccagcaggtcagaactctgctggtaagttcttttgcaagttttgcaaggcagaaggtcatgcacagaggaactgtgaaggctttcgggcttcgcttgctaagaaagggtggattgactcaggtgccactgtgcacgttgctaactcattacagggatttccgttccgtgaggacgctaagaaagggggagcggatcctaagagtgctgatggagctgaaattaaagtgatggccgttggggagcttcatcttcgacttctaagcggcaataatcttttacttcatgatgttctttatgctccctctgttaagaggaaccttatttctgtaatggttttaacaaacagtggttatgattatgatttctcccattatggatacgttttccccattaaagatagatctgaatcacttgataagtttaaaatattcaaagctgagattgaaaatcagcataatgcaaaaattaaggtagtgagatcaaatcgaggaggagaatattatgggagacatactccttatgggcaaagtcctggtccatttgcccaataccttcagatacatggaataattgccgaatattccatgcctggagaaccacaacaaaatggagtggctgagcatcgcaatcgtacacttatggacatgaggcactttaaacagctgcacacatactcaatcgagttccaagcaaaaatatttaatccacaactaaagaaattagatcctaagactgtaagctgccactttatcggataccctgagacatctaaggggtaccgattttattgcccggaccgtgtcactaaatttttggaaactagacacgccgtattcttagaaaataatgaagtctgtgggagctcacaagaaagggaaattaatcttgaggaaattcgggctaatgttacaccggaaatccaagagaataatattccaataaatttggtacctcatgttgtacctgtgactcagaccgtggtagcaccagataaaaattctggtaataccgactctgttgaaaataataaagaattaaataatgacactcaacatacttctgaggcacaaaatgaagaaattctagaggaaccttctcaaccgtcagtgatggaaaatgaaccacttagaagatcacaacgggagaggagatctgccattccaaattattatgaggtttatttaggtgaagatattgggaaggatgtatacatggcagaacccgagggttttattatggaaggcaaggaccatttggcttgcaaacttaagaaatctatttatggacttaaacaagcgtcaaggcaatggtaccttaaattcgatgaaataattaagagattcggatttaaggagaatgaggtggataattgcatttacattaatactaagggtggaaaatttataatactagtactctatgtggatgacatactgttagcaagcagcgacattaatatgttgcatcagactaaagaatttttgtcatctaattttgatatgaaggatcttggtgaggtatcttatgttttaggtctagaggagtactgggattatcttagaaatcatacattagcagagtactag

SEQ ID NO: 62614 - DNA, 5337 bp, Oryza sativa
  Clone ID: PAT_MRT4530_63936C.1
atggccgaacaagcaaaggcgcacaacctctctccgagtgttagcggtgacgacggggagccgaacccacgccgtcgagctcgtactccaccgccccctccacgccaaagtcctaggcgggaggaggtgctcgagagggtcgaaagatccgcgacttcgacatccacgggtgatggagaagggcgccgagatggggagcgtcgcctcctcgtctacggcgacggtagcacgccccagggcgcgctccaagctgcgggcgcgctcctacgtcacccgcccgtcgtccctgacccggagtctccagcccaacgttggctggacgacgtggccaacttggtcatgacggcgcggcagcgcctagatgctggtgggcggtcctccgccaccaagacctctggtactgctaccaccggctccgcgtcgtcaagacggagggcgcggcgagcggcggccgctgttcgccattcggccgccactccttcgtcagcgcctccgacccgggaagatctgcgtggggggccggatgcccgcatcagtatcgagcgccggcgtaatggccgacgtgctccccacgcaacggagggcgcctcctcgtccggagtgtcacctcaacacggacgcggggatcagccctccgtgcccccggttggtggtgtcggctgtagagcctttgtggcgagccttcggaacgtccgttggcccccaaggttccggcccaccatcgccgaaaaatatgacgggagcgtcaaccccgccgagtttctccaggtctacacgaccgggatcgaggccgccgggggtgacgacagggtcatggcgaatttctttcccatggccctgaagggacaggcgcggggttggctaatgaacttgccacccgcgtccgtccactcttgggaggatttgtgccaacagttcaccatgaactttcaaggcacatatccgcgcccaggtgaggaagcggacttgcacgcagtacagcgaagggatgatgagtcacttcgctcatacattcagcggttctgtcaagtccgcaacaccataccatgcatccctgcacacgcggtgatctacgcgttcagggggggtgtgcggcacaaccgcatgctcgaaaagatcgcctccaaggagccccagactaccgtggagctttttcagctcgcggaccgagtggctcgtaaggaggagtcatggacctggaacccctccggttccggtgtggcagcttcggccgcccccggatccgctgctcggacagggcggcgtgacaggaggaggaagaaaaggtcagcccattccgacgacgagggtcatgtcctcgccgtcgagggtgcttcgcgggccacccgaaaggggaggcctgcgagcgacaaaaagaaggaggccagcgctcccagcagggagcgcccaaccggcaagtggtgcaccgtccacaacacctcccttcacgacctcgcggactgccgcgcagtcaaaagtttggctgagcggacgaggaagtgggaggaggagaggaggcaggagcgccgagagggcaagtccccggcggttccttccggcaatcggcgaagtgaggccaagcagaaggcccccgccgaggacatcgatgacggcgatgatgacctaggtttccaagagcctggggccaccattgccactgtcgatgggggagcatgtgctcacgtttctcgccggagcctcaaggccatgaagcgagagcttctggtcgcggcccctactcatgaggcgacgcgccgggcgcggtggtcggaggttgccctcaccttcgaccagaccgaccacccaccgtgcgttgcccggggaggacagatcgcaatggtggtttcccccactgtttgcaacgtgaagctggggcgtgtcctcattgatgggggagcagccctcaacatcctttcccccgcagcctttgacgccatcaaggccccggggatggtgctccggccgtcccagccgattatcggtgtgacgccggggcacacttggccgctaggtcatatcgacctcccggtcaccttcggtggatccgccaacttccgcacggaacgattgaactttgatgtggcggacctcagtctgccctacaacgcggtcctagggaggcccgcgttggtgaagttcatggcggcggtccattacgcctacctccagatgaagatgccgggccccggtggccccatctctgtccatggcgacctcaaagtcgcgcttgcttgtatggagcagcgcgtggaccacctcgccgctgcgtccaagcctgagggtggcgacgagaggcttggcacctccgtctccgccgccccgaggcagcggatagtcacatgcgacgaggtcccggaagacgcgctcgtctccttcctgcgggcaaacgctgatgtcttcgcatggagaccggcggatatgcccggggtccccagggaggtgattgagcaccgtctcgccgtgcggccgggcgcaaagccggtccggcagaaagtgcggcggcaggccccggaacgtcaagctttcatccgcgaggaggttgcgcgacttctggaggccggattcatccgtgaggtcatccatccggagtggctagcgaacccggtggtcgttcccaaggcgaacgacaagcttcggatgtgcatcgactacaccgaccttaacaaggcatgtcctaaggacccttaccccctgcctcgcatagatcagattgtcgactccacagcggggtgcgaccttttgtgttttctagatgcatactctggttaccatcagattcgcatggctagggaggatgaggaaaaaactgcgttcattacccccataggaacttattgttatacgacaatgcccttcgggttaaagaatacaggtcctacttttcaacgtactactcgaatttctttgggtagccaaataggacgtaatgttgaggcttatgtcgatgacttggttgtgaagacgcgcgaccgagaaactttactttcagatctggcggaaactttcgagagtctccgctccgcccgcataaagctgaaccccgataagtgcgtgtttggtgtacctgcgggcaagcttctcgggttcttggtctctgcccgaggcattgaggccaaccccgagaagatacgagctatagagcggatgcgcccccccagcaaacttagggatgtgcaatgcgtcaccggttgcatggccgccctaagtcggttcatatcgagactgggagagaaggcgctacccttatttaagctcctcaaacgctccgagccgtttacctggacggaggaagctgaacgtgccctcactcagttgaaggcgtatctcagctctcccccggttctggtcgccccggagccaggtgaacccttgctactctacttagcggtgaccccgcaggtagtgagtgcggcgttggttgtggagcgcgatgaggataaccctcattccgcgcatccccaccctgtgttggcttggcccgggagagagcagggaggagaggcccccgagccgaacggtggcccaaggctcccgacgaccggagttggccctctgcccgcttgtcagacggtgccaggtgcccccgacccccaggatggcccgggggccactgcgggaaggccgcacctatcgccctctgaccccgagggcgccggtgcgggggtcacgttgacctcgccgagcggagacgtcctcagatacctggttcgccttgactttcgggcgaccaataatatggcagagtacgagggactccttgcgggactcaggttggcagctggactggggatccgccgcctcctggtgttaggcgactcccagctggtcgttaaccaggtctgtaaggagtaccggtgctctgacccgcagatggatgcttatgtacgccaagtgcggcgtatggagcgccatttcgacgggatagagcttcggcacgtgcccagacgggataacacgattgctgacgaactctcacggctcgcttcctcgcgagcccagaccccaccgggcgcctttgaagaaaggcttgcccagccgtcggcgcgacccgaccccttaggggagacggacgcgcctgaccggcccccgaggcccgtcggagtccaggcctcgggacccgaggggagcgctcccagctcccttagattgattgcttggatcgctgagatccaagcatacctcatagataagactctacccgaggaccgcgaagggagtgaacgcgtccagcgcatctccaaacgctacgtgctgatagaagggaccctctatcggcgcgcggctaacggaatcctcctaaagtgcattcctcgggaacaaggcgtcgagcttctcgccgatatccatgaaggcgaatgcggagcccactccgcctcgcgcaccttggttggcaaggcctttcgccagggtttctattggccgacggctctcaatgatgcggttgacctggtccggcggtgcagagcgtgtcaattccacgccaagcaaatccatcagccggcccaggccctgcagatcataccactttcatggccatttgagtatctgtatgtcgcgatcgacaagttcactaagtggcccgaggcttatccggtcgtcaagatcgataagcactccgcacttaaattcattaagggcatcacagcccggtttggggtgcctaaccgtattattacggataacggcacccaattcactagtgagcttttcgatgactactgcgaagacatgggcatcaagctctgcttcgcctcacccgcccaccccagaagcaatagccaagtggagcgcgccaatgcggaaatcctcaaaggccttaaaaccaagaccttcaacatcctcaagaagcacggcgattcgtggatcgaggagttgccagcggtgctctgggcaaaccgaaccacaccaagccgagcaaccggggaaacgcctttcttcctcgtctacggcgcggaagcggttctcccatccgagctcaccctgaggtcccctcgggccaccatgtactgcgaggctgatcaagatcagcttcgcagagatgacctcgactacttggaggagcgaaggcgacgcgcggccctccgagccgcgcgctaccagcagagcctacggcgctaccatcagcgccacgtccgggcccgatcactctgcgtcgacgacctcgtcctacgccgcgtccaaacgcgtgctggattgagcaagctctcaccaatgtgggagggtccgtatcgagtgatcggcgtcccccggccgggctccgttcggctggccacgggcgacggcacagagctgcctaacccgtggaacatcgaacaccttcgtcgcttctacccctaa

SEQ ID NO: 62615 - DNA, 6339 bp, Oryza sativa
  Clone ID: PAT_MRT4530_63937C.1
atggctactacagatacaaccatagctcacattatggatgaacaagatgatatcaagatcaagtcctccaagtgctggaatccgattcggccacctgctacactgctgacttcaaacggctaccgaatttgcatacgacctccgttttcggcccatgagtacttgatggaaagttctcggagtcctctttccaacagatctggcctcatcagcagactccatctcgtttggccgcaaatacaaaaacaaggtgctgcgtcacctgtcatgggccaatgggcttgtaacttcgtttgggaccccggcccaagtggggcccatgtggggaatagggttgatctgcaccggcaagatcaacaacccacggagagttatcacaactcaccgaaagatcgggccaacaacagccttgagtgtcgagaggaactcagggttcatcaggtggtctcagagctttcatttctcggattgcgcaagggaatacgagaacatcgacttctacaccttcgacgagatatgacgacttcttcatgtgatgcatatgaggaagttcagaaaagtctccaaaatgagaagaacgatatgtttgagatgtcacttccatcactcgcgaatgaggagatggctgatgcagctacattatctgaagagggcataaaaggtaaattaaatggtgcagaaattactcaaggaatagggttgatctgcaccggcaagatcaacaacccacggagaggtgtatcgattgctaaggcgcaacacaacgtctcactagcaccaatattacaagagatggtttccactaatcagagtgctttcataaggaagagagctatacatgacaacttcatgtatgtgcaaaacccggtcaagagactgcatagaaggaaaacacccaccttgttgctcaaacttgacatctcaaaggcattcgactctttgttgctggatttcctaggagctgttcaaggcttcccaaccagttacttagcctacctcttcaccttagaaaactatggaagaggcatggactccccagcgacccccatgaacttctcgccgcttctcagtctagcaccccgtaatgaaccatgctatacaaaagaagaaaatcaagatgtgacaatttcatccctctcattgaaaaaattggctccagaattccaggacgagtgccctcgtggccgggttgacgcgcaccacaagttcgcggcgaccattggagacggtccagagaataaagatgaggagggtgcatctcattccccacgcaccaaaggcaccatccaatactttacaaggaaagtgaagcagcacacagaaagacttgagacagatttgcaggtgacaaatgagaagattggacaattggagtccacgcagatcttcaccaacactaagcttacagggctggagacagcggtcgcccgcattgacactagccttgctgcacttgtgaggcattttgatgctctcaatgctggaggcaatggtgggggtaatgacgatgacattgacggagagtacgtcgaggataatttggaggatgaatatattgctgacactgagcaagatgatcgagatgctcgagatcatcgacggctacacaacaatcgacgagaggaaactgaggatgctgccatggctagatttttgggtgggttaaaccgcgagatttatgacatcgtagactataaagattacactaatatgacccgattgtttcatcttgcttgtaaaacttcatcatggcagacacgcaccactcctccggccggccgtactgcttctccatcttccacacccgcaaccagtcgggcagcacctcctccatctagtgacaagtcagcgacaaaggctgctcagccagcactgagtgcttcttcagtggcatccacaggccgaacgagagatgttcagtgccaccgttgcaagggctttgggcatgtgcagcgtgactgccctagcaagcgagttttggtagtcaaaaacgatggtagaccatggcaatttgatagggattctatgcatcatggtaggtcaaaccagtactcttttctgtaccatgataagaaaattgtgttgcatcccatgtctcctgaagatattttgcgtgatgatgttgctaaggctgccaaatccaaatgtgagagtgataaaaaagcccaatctaatggcaagaaacctgagacaatcaatttgaaacccaaatgcttacttgctactaaatctgatattaatgagttgattgcatcaccttcagttgtctatgctttggagtactctgatgtgtttcccaaggaagtgccaccggggctgccaccggtgcgcggcattgagcatcaaatcgacttaatcccaggtgcttccctacccaaccgtgcgccataccgaaccaaccctgaggaaaccaaggagattcagcgtcaagttcatgagttgcttgataaaaggttagatgatatgcttgatgaattgagtggctctattgtgttctccaaagttgatttgcgtagtggttaccaccagattcgtatgaagttgggtgatgaatggaaaacagcatttaaaacgaagtttgggttgtatgagtggttagtgatgccttttggtttaactaatgcacccagcactttcatgaggttgatgaatgaggttttgcgtcctttcattggaaaatttgtggtggtctactttgatgatatcttgatttacagtaagtctatgggtgaacattttaatcatttacgtgctgtttttaatgctcttcgtgatgcacgtttatttggtaaccttgagaagtgcaccttttgcacagatcgagtttcttttcttggctatgttgtaactctgcaggggattgaggttgatcaagccaaggttgaggcaattcagagttggccgactcctaaaacggtctcacaagtgcggagttttctaggactcgcggggttctatcgccgctttgtgcaggatttcagcaccattgctacaccattgaatgcgcttacaaagaagggagtgcctttcacttggggcacatcacaagagaacgccttccacatgttgaaagataagttgacccatgcacctctcctccaacttcccgattttaataagacttttgaacttgaatgtgatgctagtgggattggattgggtggtattttgctacaagaaggaaaacctgttgcatattttagtgaaaagttgagtgggcctgttctgaattattctacttatgataaggaattgtatgctcttgtgcgaactttagaaacatggcagcattatttgtggcccaaggaatttgtcatacattctgatcatgagtctttgaagcatattcgtagtcaagggaaactaaactgtagacatgctaaatgggttgaatttattgaatcttttccttatgttatcaaacacaagaaagggaaggagaacatcattgctgatgctttgtctaggagatacactttgttgacacaacttgactataagatttttggcctggaaacaatcaaagaccaatatgcgcatgatgctgattttaatgatgtgttgctgcattgtaaggatggaagaatatggaacaaattcgtcatcaatggtgggtttgttttcagagctaacaagctatgcattccagctagctccgttcgcttgttgttgttgcaggaagcgcatggaggcggtttgatggcacattttggtgccaagaagacacatgacatccttgctagtcatttcttttggccacagatgcgaagagatgttggcagggctgttttgaagaaaaatatcaagatgtgggaagaatgcttgcctcatattgaatttgcttataatcgttccttgcattctactacaaaaatgtgcccatttcagattgtgtatggtttgttgcctcgtcctccaattgatttgatgcctttaccatcttctgaaaaactgaattttgatgctaagcaacatgctgagttgatgttaaaactgcatgagacaactaaagaaaacatagagcgcatgaatgctaagtataagtttgctggtgacaaagatttcagggttagtcccacatttaacattgcagatttgaagctgtatttgggagaagaagatgagcttgagtcgaggacgactcaaatgcaagaaggggaggatgatgaggacatcaacaccatcgatacatccacgttccccccatgtacaccatcgatacatccacgccgcctccatgtacagcatgatggtcctattacccgcgctcgtgcacgtcaactaaattatcaggacgagtgccctcgtggccgggttgacgcgcaccacaagttcgcggcgaccattggagacgcttttggtcagatccgactcattaagcctcttgatgggtcaaattatgctaagtggaaggctgacgtgttactcaacttaggcatactcgattatgattatgccatcagagaggaccgtcctgaggagccttttagtgttgagcacgattatgaggagaaactgaacttatatcatgagaaaactaatgaatgggagaagtccaataggatttctctcatgtacatcaagagtgccatatcaaatgtcattattggtggtattgtggactctgatgatgttaagacttacttagaaaatattgataggaacttcaggagttcttctaagtcttacgctagctctataattaagcgtctaatgtccatgtgctataattataaagatggtaataatcagagggataagtggtccattgaagaaatcatttctcattctgttgaggaggaggatcgtcagaaggctgacaaacagaagcataaggatcagctgaacctccttcatggtgctaagggcggtaagaaaaagttctatcgaggggagtccagcaactcccaaaacaagaagaagaagcccaacactccttccactcaggcttctaatggtgcccataagggcaaagctcaggttctagcaggtcagaactctgctggtaagttcctttgcaagttttgcaaggcagaaggtcatgcacagacagactgtgaaggctttcgggcttggcttgctaagaaaggtactaatgttgatattgtctctaatgttgatgaattactttacgttgaattttctcataaatcatggtggattgactcaggtgccactgtgcacgttgcgaactcattacagggattccgttccgtgaggacgctaagaaagggggagtggatcctaagagtggctgatggagctgaaattaaagtgatggccattggggagcttcatcatcgacttccaagtgatgatttctcccgttatggatatgttttccccattaaagatagatctaaatcactcgataagtttaaaatattcaaagctgaggttgaaaatcagcatgatgcaaaaattaagatacatggaataattgcccaatattccatgcctggagaaccacaacaaaatggagtggctgagcgtcgcaaccgtacacttatggacatgaggcacttaaaacagctgcacacatactcagtcgagttccaaaccgtagtagcaccagatgaaaattctggtgataccgactatgttgaaaataataatgaattaaataatgacactcaacagacttctggggcacaaaatgaagaaattctcgaagaaccttctcaaccgctagtgatcgaaagtgaaccacttacaatattacaacgggagaggagatctgccattctaaattattatgaggtttatttaggtgaagatattgggaatgtagatgatcccacctcatttaaagaagcaataatgagtgaacatttatccaaatggcttgaagccatgaaagatgaattaaaatctatgagtcataatggagtctgggacttagtagaaattcctaaaggagccaaaacagcaggctgtaagtgggtctacaaaactaagcttgactccaaagggaaaatcaaaaggttcaaggcaaggcttgtagcaaagggtttttcacaaagagaggaaatagattacaatgaaattttttctcccgtctctaagaaagactcatttagaattgtcatggcgcttgttgctcattatgatttagagctccatcagatggatgtaaagactgcatttcttaatggtgacttgcatgaggatgtatacatggcacaacccgagggttttgttatggaaggcaaggaccatttggcttgcaaacttaagaaatctatctatggacttaaacaagcgtcaaggcaatggtaccttaaattcgatgaaataattaagagatttggatttaaggagaatgaggtggataattga

SEQ ID NO: 62616 - DNA, 5700 bp, Oryza sativa
  Clone ID: PAT_MRT4530_63938C.1
atgacggcgcggcagcgcctagatgctggtgggcggtcctccgccaccaagacctctggtactgctgccaccggctccgcgtcgtcaagacggagggcgcggcgagcggcggccgctgttcgccattcggccgccactccttcgtcagcgcctccgacccgagaagatctgcgtggggggccggatgcccgcatcagtatcgagcgccggcgtaatggccgacgtgctgcccacgcaacggagggcgcctcctcgtccggagtgtcacctcaacacggacgcggggatcagccctccgtgcccccggttggtggtgtcggttgtagaggctttgtggcgagccttcggaacgtccgttggcccccaaggttccggctcaccatcgccgaaaaacatgacgggagcgtcaaccccgccgagtttctccaggtctacacgaccgggatcgaggccgccgggggtgacgacagggtcatggcgaatttctttcccatggccctgaagggacaggcgcggggttggctaatgaacttgccacccgcgtccgtccactcttgggaggatttgtgccaacagttcaccatgaactttcaaggcacatatccgcgcctaggtgaagaagcggacttgcacgcagtacagcgaagggatgatgagtcacttcgctcatacattcagcggttctgtcaagtccgcaacaccataccatgcatccctgcacacgcggtgatctacgcgttcagcgggggtgtgcggcacaaccgcatgctcaaaaagatcgcctccaaagaaccccagactaccgcggagctttttcagctcgcggaccgagtggctcgtaaggaggaggcatggacctggaacccctccggttccggtgtggcagcttcggccgcccccggatccgctgctcggacagggcggcgtgacaggaggaggaagaagaggtcagcccattccgacgacgaaggtcatgtcctcgccgtcgagggcgcttcgcgggccacccgaaaggggaggcctgcgagtgacaaaaagaaggaggccggcgctcccagcagggagcgcccaaccggcaagtggtgcaccgtccacaacacctccctccacgacctcgcggactgccgcgcagtcaaaagtttggctgagcgaacgaggaagtgggaggaggagaggaggcaggagcgccgagagggcaagtccccagcggttccttccggcaatcggcgaagtgaggccaagcagaaggcccccgccgaggacatcgatgatggcgatgatgacctaggtttccaagagcctggggccaccattgccactgtcgatgggggagcgtgtgctcacgtttctcgccggagcctcaaggccatgaagcgggagcttctggccgcggcccctactcatgaggcgacgcgccgggcgcggtggtcggaggttgccctcaccttcgaccagaccgaccacccaccatgcgttgcccggggaggacagatcgcaatggtggtttcccccactgtttgcaacgtgaagctggggcgtgtcctcattgatgggggagcagccatcaacatcctttcccccgcagcctttgacgccatcaaggccccggggatggtgctccggccgtcccagccgattatcggtgtgacgccggggcatacttggccgctaggtcatatcgacctcccggtcaccttcggtggatccgccaacttccgcacggaacgggtgaactttgatgtggcggacctcagtctgccctacaacgcggtcctagggaggcccgcgttggtgaagttcatggcggcggtccattacgcctacctccagatgaagatgccgggccccggtggccccatctctgtccatggcgacctcaaagtcgcgcttgcttgtatggagcagcgcgtggaccacctcgccgctgcgtccaagcccgagggtggcgacgagaggcttggcacctccgtccccgccgccccgaggcagcggatagtcacatgcgacgaggtcccggaagacgcgctagtctccttcctacgggcaaacgctgacgtcttcgcatggagaccggcggatatgcccggggtccccagggaggtgattgagcaccgtctcgccgtgcggccgggcgcaaagccggtccggcagaaagtgcggcggcaggccccggaacgtcaagctttcatccgcgaggaggtggcgcgacttctggaggccggattcatccgcgaggtcatccatccggagtggctagcgaacccggtggtcattcccaaggcgaacggcaagcttcggatgtgcatcgactacaccgaccttaacaaggcatgtcctaaggacccttaccccctgcctcgcatagatcagattgtcgactccaccgcggggtgcgaccttttgtgttttctagatgcatactctggttaccatcagattcgcatggctagggaggatgaggaaaaaactgcgttcgttacccccataggaacttattgttatacgacaatgcccttcgggttaaagaatgcaggtcctacttttcagcgtactactcaaatttctttgggtagccaaataggacgtaatgttgaggcttatgtcgatgacttggttgtaaagacgcgcaaccaagagaccttactctcggatctagcggaaacttttgaaagtctccgctccgcccgcataaagctgaaccccgataagtgcgtgttcggtgtacctgcgggcaagcttctcgggttcttggtctctgcccgaggcatcgaggccaaccctgagaagatacgagctatagagcggatgcgcccccccagcaaacttagggatgtgcaatgcgtcaccggttgcatggccgccctaagtcggttcatatcgaggctgggagagaaggcgctacccttatttaagctcctcaaacgctccgggccgtttacctggacggaggaagctgaacgtgccctcactcagttgaaggcgtatctcagctctcccccagttctggtcgccccgaagccagtgcggcgttggttgtggagcgcgatgaggacaaccctcattccgcgcatccccaccctgtgctggcttggccccgggagagagcagggaggagaggcccccgagccgaacggtggcccaaggcccccgacgaccggagctggccctctgcccgcttgtcagacggtgccaagtgcccccgacccccaggatggcccgggggccactgtggaaaggccgcacctatcgccctctgaccccgaggttaaccctgtgccgactcgacccgggagagtgcagggagaagaggcccccgagccgaacggtggcctaaggctcccgacgaccggggttggccctttgcccgcttgtccgacgacgccaggagcccccgacccccaggacggccctgaggccactgtgggaaggccgcacctgtcgtcctccgaccccgaggtcgtcggcacagaagacaagtgcgccccgcgaggccgcttggacgaagagcgccccaggaatgcggcccctggcgaagaggatcggccccaccgaaaggtgcagcggcccgtctactttgttagtgaggccctccgggacgccaagacccgataccctcaggcccagaagatgctttacgctattctgatggcttcgaggaaattgcgccattatttccaggcgcatcgggtcacggtggttacgtcttaccccctcgcccaaatcttgcataatcgagagggtacaggacgggtggtgaaatgggcaatcgaactttctgagttcgatttgcactttgaaccacgccacgctatcaagagccaggccctcgccgattttgtggtagagtggaccccagctcccgagcccgtctcagtccccgaggccagctcgggcccctcgcagctgcttcacaccgcccactgggtgatgcagttcgacggctccctatctcttcagggcgccggtgcgggggtcacgttgacctcgccgagcggagacgtcctcagatacttggttcgccttgactttcgggcgactaataatatggcagagtacgagggactccttgcggggctcaggttggcagctggactggggatccgccgcctcctggtgctaggcgactcccagctggtcgttaaccaggtctgtaaggagtaccggtgctctgacccgcagatggatgcttatgtacgccaagtacggcgtatggagcgccatttcgacgggattgagcttcggcatgtgcctagacgggataactcgattgctgacgaactctcacggctcgcttccttgcgagcccagaccccaccgggcgcctttgaagaaaggcttacccaaccgtcggcgcgacccgaccccttaggggagacggatgcgcctgaccggcccccgaggcccgtcggagtcctggcctcgggacccgaggggagcgctcccaactcccttagattgattgcttggatcgctgaggtccaagcatacctcacagataagactctacccgaggaccgcgaagggagtgaacgcgtccagcgcatctccaaacgctacgtgctgatagaagggaccctctatcggcgcgcggctaatggagtcctcctgaagtgcattcctcgggaacaaggcgtcgagcttctcgccgatatccatgaaggcgaatgcggagcccactccgcctcgcgcaccttggttggcaaggcctttcgccagggtttctattggccgacggctctcaatgatgcggtcgacctggtccggcggtgcaaagcatgtcaattccacgccaagcaaatccatcagccggcccaggcactgcagatcataccactttcatggccgtttgctgtctgggggctcgatatcctgggaccgtttaggcgggccccgggcggatttgagtatctgtatgtcgcgatcgacaagttcactaagtggcccgaggcttatccggtcgtcaagatcgataagcactccgcacttaaattcattaagggcatcacagcccggtttggggtgcctaaccgtattattacggataacggcacccaattcactagtgagctttttggtgactactgtgaagacatgggcatcaagctctgcttcgcctcacccgcccaccccagaagcaatggccaagtggagcgcgccaatgcggaaatcctcaaaggccttaaaaccaagaccttcaacatcctcaagaagcacggcgattcgtggatcgaggagttgccagcggtgctctgggcaaaccgaaccacaccaagccgagcaaccggggaaacgcctttcttcctcgtctacggcgcggaagcggttctcccatctgagctcaccctgaggtcccctcgagccaccatgtactgcgaggttgatcaagatcagcttcgcagagatgacctcgactacttggaggagcgaaggcggcgcgcggccctccgagccacgcgctaccagcagagcctacggcgctaccatcagcgccacgtccgggcccgatcactctgcgtcgacgacctcgtcctacgccgcgtccaaacgcgtgctggattgagcaagctctcaccaatgtgggagggtccgtatcgagtgatcggcgtcccccggccgggctccgttcggctggccacgagcgacggcacagagctgcctaacccgtggaatatcgaacaccttcgtcgcttctacccctaa

SEQ ID NO: 62617 - DNA, 3531 bp, Oryza sativa
  Clone ID: PAT_MRT4530_63939C.1
atggcagaagtggccaatgtgggaacaaagtcgtccatcaataacaatgaagacaccagtcggcggcgacggaggcggtcgacggtgaaagcgaagatgcccactaatggcggcataataggtcagccgtgtaagcggaaacaccagtcgacggcagcgaaggtgagccaacgattgagtttccccctgactgatttggatcaagtcagagaagaggagcttgaagaagtggtcgacggaaaggaagtgaaaactcccaaagcgaaaacgaagtcggcgactcatgaaattgattccatcgcgctcgttgataggaaactcgacgcaacccctacctggcgcgccaactgtcgaaacatgatttcggcaataataaaagggggtagcgcacgagacctaaaagtggatggatgcggagacaaaggatttagacaggttcaggccctctcaatgagagaaaatgaactagcaagtaggttttcatacgggttatgggactacccacttacattcctaaatgactgctgctcagaggcttcccagccatcgctgtatgatctgaggagaggagctagtgcaggggcagtgctgtatgcttttggtcagatccgactcattgagcctcttgatgggtcaaattatgctaagtggaaggctgacgtgttactcaatttaggcatactcgattatgattatgccattagagaggactgtcctgaggaaccctttagtgttgagcacgattatgaggagaaactgaagttatatcgtgagaaaactaatgaatgggagaagtccaataggatttctctcatgtacatcaagagtgctatatcaaatgttattatggtgagggataagtggtccattgaagaactcatttctcattctgttgaggaggaggatcgtcagaaggctgacaaacagaagcataaggatcagctgaacctccttcatggtgctaagggcggtaagaagaagttctatcaaggggagtccagcaactcccaaaacaagaagaagaagcccaacactccttccactcaggcttctaatggtgcccataagggcaaagctcaggttccaacaggtcagaattctgctggtaagttccttttcaagttttgcaaagcagaaggtcatgcacagagggactgtgaaggctttcgggcttggcttgctaagaaaggtgccattgtgcacgttgctaactcattacagggattccgttccatgaggacgctaagaaagggggagcggatcctaagagtggctgatggagctgaaattaaagtgatggccgttggggagcttcatcttcgacttccaagcggcaataatcttttacttcatgatgttctttatgctccctctgttaagaggaaccttattactgtaatggttttaacaaacagtggttatgattgtaatttttctaaggacaaatgctttattaagtacaataatattgatattggtcttgctagcgtgcaagacaagctctatttgctctctttggatgatcatattatgaatatattgaatgcctgtaatgataatgagacgtcttcgaaattgtggcactgtcgtttaggccacatttctaaggggagaatggagcgtctcattaagaaagagatacttcaacccttagatttctcgaatgcggatcattgcttagattgtattaagggaaaattcactaagaaaattgagaaaggagctactagaagcacgtgtctattagaaataatccacacggatatatgtggaccgtttccagtaacatctgttgatggatatgattcattcattaccttcacagatgatttctcccgttatggatatgttttccccattaaagatagatctgaatcactcgataagtttaaaatattcaaagctgaggttgaaaatcagcacaatgcaaaaattaaggtagtgagatcagatcgaggaggagaatattatgggagacatactccttatgggcaaagtcctggtccatttgcccaataccttcagatacatggaataattgctcaatattccatgcctgaagaaccacaacaaaatggagtggctgagcgtcgcaatcgtacacttatggacatgaggcacttaaaacagctgcacacatactcaatcgagttccaaaccgtggtagcaccagatgaaaattctggtgatgccgactctgttgaaaataataatgaattaaataatgacactcaacagacttctgaggcacaaaatgaagaaattatagaagaacattctcaaccgtcagtgataaaaaatgaaccacttagaagatcacaacaggagaggagatctgccattccaaattattatgaggtttatttaggtgaagatattgggaaggtagatgatcccacctcattcaaagaagcaataacgagtgaacattcatccaaatggcttgaagctatggaagatgaattaaaatctatgagtcataatggagtctgggacttagtagaaattcctaaaggagccaaaacagtaggctgtaagtgggtctacaaaactaagcttgactccaaagggaaaatcgaaaggttcaaggcaaggcttgtagcaaagggtttttcgcaaagagagggaatagattacaatgaaaccttttctcccgtctctaagaaagactcatttagaattgtcatggcgcttgttgctcattatgatttagagctccatcagatggatgtaaagactgcatttcttaatggtgactttcatgaggatgtatacatggcacaacccgagggttttgttatggaaggcaaggaccatttggcttgcaaacttaagaaatctatctatggacttaaacaagcgtcaaggcaatggtaccttaaattcgatgaaataattaagagattcggatttaaggagaatgaggtggataattgcatttacattaagactaagggtggaaaatttataatactggtactcaatgtggatgacatactgttagcaagcagcgacattaatatgttgcaccagactaaagattttttgtcatctaattttgatgtgaaggatctcggtgaggcatcttatgttttaggcattgaaatacaccgagataggtctaaaggagtcctgggattatctcagaaatcatacattagcagagtactagaaagatataatatgagtaagtgctctgcaacacctgctccaatagttaagggcgataaattcggattatttcaaagcccgaaaaataaattagaatcagatcagatgaaaatggtaccatacgcttcagctgtcggaagccttatgtatgctcaagtctgtacgcgtccagacttagcatttgttaccgggatgcttggcagatttcagtccaatccaggtttagaccactggaaggctgttaaaaaggtcttgcgttatttgcaaggcactaaggattacatgctcacatataagaagtctgaagaacttgaagtcctaggttattcagacgcagactttgcaggttgtagacactaa

SEQ ID NO: 62618 - DNA, 608 bp, Oryza sativa
  Clone ID: PAT_MRT4530_6393C.1
caatctccccctttcatcagcgccatggctctctcctccttctccatgtccctccccttcgccaagctgccttccacctccaaatccacccgcttccttcccatccgggcctcctctgccgccgccgccgcctccccttccttcgatttgcgcctctattggacatccctgatcgccgatgtggaggccgagctcgacgccgcgatgcccatccgcacgccggagagaatccactccgccatgcgctacgccgtcctcccgggcgccggcaacgagggcaccgccaagcgcgcgcccccggtcctctgcgtcgccgcctgcgagctcctcggcgcgccgcgcgaggccgcgctccccgccgctgtggccctcgagatgctccacgcggcgtcgctcgtgcacgacgacctcccatgcttcgacgccgcgcccacccgccgcgggcgcccctccacccacgccgcctacggcaccgacatggccgtcctcgccggggacgcgctcttccccctcgcctacacccacgtcatcgcccacactccgtcgcccgaccccgtaccccacgccgtcctcctccgcgtcctcggggagctagcgcgcgccgtggg

SEQ ID NO: 62619 - DNA, 955 bp, Oryza sativa
  unsure (1)..(955): unsure at all n locations
  Clone ID: PAT_MRT4530_63940C.1
tgggtgatgcagtttgacggctccctgttcttcagggcgccggtgctggggtcacgttgacctcgcgaagcggagacgtcctcagatacctggttcgccttgactttcgggcgaccaataatatggcagagtacgagggactcctggcgggactcagggtggcagctggattggggatccgccgcctcctggtattaggcgactcacagctggtcgttaaccaggtctgtaaggagtaccggtgctctgacccccagatggacacttacgtgcgcaaggtacggcgtatgaagcgccattttgacgggatagagcttcggcacgtgcccagacgggataacacgattgccgacgaactctcacggctcgcttcttcgcgagcccagaccccaccgggcgcctttgaagaaaggcttacccagccgtcggcgcgacccgaccctttagggaagacggacgcgcctgaccggcccccgaggcccatcggagtccaggcctcgggacccgaggggagcgctcccagctcccttagattgattgcttggatcgctgagatccaagcatacctcacagataagactctacccgaggaccgcgaagggagtgaacgcgtctagcgcatctccaaacgctacgtgctgatagaagggaccctctatcggcgcacggctaatggagtcctcctgaagtgcattcctcgggaacaaggcgtcgaacttctcgccgatatccatgaaggcgaatgcggagcccactccgcctcgcgcaccttggttggcaaggcctttcgccagggtttctattggccgacggctcccaatgatgcggtcgacctggtccggcgatgcagagcgtgtcaattccacgcaaagcaaatccatcagccggcccaggccctgcagatcataccactttcatggccttttggggtngngagcagngtgtctaacgcgct

SEQ ID NO: 62620 - DNA, 487 bp, Oryza sativa
  unsure (1)..(487): unsure at all n locations
  Clone ID: PAT_MRT4530_63941C.1
nnnnnnnnnnnnnnnnnnnnnnnnnnnnngcggggatgtgtagacactaagaatccacatcaggttatgtattcactctcgcaaatggagctattcatgggaaaagctctaaacaaaccttgactacatcgtcgacaatgcaggctgaatttttggcatgttatgaagcaacggggcaggccgtatggcttaagaatcttatcccgggtttaagagtggtcgacagcatttctaaaccaattacattatactacgataataaagctgcggtattctattcaagtaacaacaagtcgagtggtgctgccaaacacatcgacattaagtatcatgttgtgaaagatagaatccaggatcaaaccattaagattgagcatattagcactaagtcaatgctcgcggatccgctcaccaaaggcttacctcccaatttatttaaagatcatgtagccggcatgggaataactgattgcctttgattaagact

SEQ ID NO: 62621 - DNA, 5839 bp, Oryza sativa
  Clone ID: PAT_MRT4530_63942C.1
ggggtagaagcgacgaaggtgttcgatgttccacgggttaggcagctcagtgccgtcgcccgtggccagccgtatggagcccggccgggggacgccgaccactcgatacggaccctcccacattggtgagagcttgctcaatccagcacgcgtttggacgcggcgtaggacgaggtcgtcgacgcagagtgatcgggcccggacgtgacactgatggtagcgccgcaggctctgctggtagcgcgcggctcggagggccgcgcgccgccttcgctcttccaagtagtcgaggtcatctctgcgaagctgatcttgatcagcctcgcagtacatggtggcccgaggagacttcagggtgagctcagatgggagaaccacttccgcgccgtagacgaggaagaaaggtgtttccccggttgctcggcttggtgtagttcggtttgcccagagcaccgctggcaactcctcgatccatgaatcgccgtgcttcttgagtatgttaaaggtcttggttttaagacctttgaggatttccgcattggcgcgctccacttggccattgcttctggggtgggcaggtgaggcgaagcagagcttgatgcccatgtcttcgcagtagtcgccgaagagttcactagtgaattgggtgccattatccgtaataatacggttaggcactccaaaccgggccgtgatgcccttaatgaatttaagtgcggagtgcttatcgatcttgacgaccggataagcctcgggccacttagtgaacttatcgatcgcgacatacagatactcaaacccgcccggggcccgcctaaacggtcccaggatatcgagtccccagacagcaaatggccacgaaagtggtatggtctgcagggcctgggccggctgatggatttgcttggcgtggaattgacacgctctacatcggcggaccaggtcgaccgcatcattgagagctgtcggccaatagaaaccttggcgaaaagctttaccaaccaaggtgcgcgaggcggagtgggccccgcattcgccttcatggatatcggcaagaagcacaacgccttgttcccgaggaatgcacttcaggaggattccattagccgcgcgccgatagagggtcccttctaccagcacgtagcgtttggagatgcgatggacgcgttcactcccctcgcggtcctcgggtagagtcttatttctgaggtatgcttggatctcggcgatccaagcaatcaatctaagggagctgggagcactcccctcgggtcccgaggcctggactccgacgggcctcgggggccggtcaggcgcatccgtctcccctaaggggtcgggtcgcgccgacggctgggtaagcctttcttcaaaggcgcccggtggggtctgggctcgcgaggatgcgagccgtgagagttcgtcggccatgacgttatcccgtctgggcacgtgccgaagctcaatcccgtcaaaatggcgctccatacgccgtacttggcgcacgtaggcgtccatttgcgggtcagagcaccggtactccttaccgacttggttaacgaccagctgggagtcgcctaacaccaggaggcggcggatccccagtccagctgccactctgagtccggcaaggagtccctcgtactctgccatattattggtcgctcgaaagtcgaggcgaaccaagtatctgaggacgtctccactcggagaggtcaacgtgacccctgcaccggcgcccagaatgaccgacgtgactggtctgactccggtcatgtcgtcagcaggcggccacaattccacgacgcgtctgctcctggcgaaagtggaggtagttgtgggccgtcccatcagaaggtgactcggacggcaaccatgcaaatctccgtccatttatgaaaaggtagggtaagtccccagtgagaaggggggatggtgcatgtggtatccccttaagatataaaaggaggaccttgcccactgagagagggggagagctttttcttggactggacctttccagattaggaacccagaacaagggagaggctggctgatactttgtagctctttcatacacagatctcccaaaacacaggagtagggtattacgcttctcagcggcattccgttcggctcgggggcctcttctccctgctctctcctgggtcgaatcggcacagggttagcctcggggtcagagggcgataggtgcggccttcccgcagtggcctcggggctgtcctgggagtcgggggcacctgacaccgtctgacaagcggggagagggcctgctccggtcgtcgggggccttaggccaccgtccggctcgggggcctcttctccctgctctctcccgggccaagtctgcacaaggtgggggtgcgcggaatgaggattgtcctcatcgcgctccacgaccaacgccgcactaaccacttgcggggtcgccgctaagtagagtagcaagggttcatttggctccggggcgaccagaactggggggagagctgagatacgccttcaactgagtgagggcacgttcagcttcctccgtccaagtaaacggcccggagcgtttgaggagcttaaataagggtagcgccttctctcccagcctcgatatgaaccgacttagggcggccatacaaccggtgacgcattgcacatccctaagcttgctgggggggcgcatccgctctatagctcgtatcttctcggggttggcctcgatgcctcgggcagagaccaagaacccgagaagcttgcccgcaggtacaccgaacacgcacttatctgggttcagttttatgcgggcggagcggaggctctcaaaagtttccgctagatctgaaagtaacgtttcctggttgcgcgtctttacaaccaagtcatcgacataagcctcaacattacgtcctaattggctacccaaagaaattcgagtagtacgttgaaaagtaggacctgaattctttaacccgaagggcatcgtcgtataacaataagttcctatgggggtaatgaacgcagttttttcctcatcctccctagccatgcgaatctgatggtaaccagagtatgcatctagaaaacacaaaaggtcgcaccccgctgtggagtcgacaatctgatctatgcgaggcagggggtaaggatccttaggacatgccttgttaaggtcggtgtagtcgatgcacatccgaagcttgccgttcgccttgggaacgaccaccgggttcgccagccactccggatggatgacctcgcggatgaatccggcctccagaagtcgcgccacctcctcgcggatgaaggcttgacgttccggggcctggcgccgcactttctgccggaccggccttgcgcccggccgtacggcgagacggtgctcaatcacctccctggggaccccgggcatatccgccggtctccatgtgaagacgtcagcgtttgcccgcaggaaagagacgagcgcgccttccgggacctcatcgcacgtgactatccgctgcctcggggcggcgggggcggatgtgccaagcctctcgtcgccaccctcgggcttggacacgacggcgaggcggtccgcgcgctgctccatacaagcgagcgcgactttgaggtcgccatggacagagatggggccatcggggcccggcatcttcatctggaggtaggcgtagtggaccgccgccatgaacttcaccaacgcgggcctctccaggaccgcgttgtagggcagactgaggtccgccacatcgaagttcacccgctccgtgcggaaattggcgggtccaccgaaggtgaccgggaggtcgatatgacctagcggccaagtgtgccccggcgtcactccaatgatcggctgggacggccggagcatcatccccggggccttgatggcgtcaaaggctgcgggggaaaggatgttgagggctgctcctccatcaatgaggacacgccccagcttcacgttgcaaacagtgggggaaaccaccattgcgatctgtcctccccgggcaacgcacggtgggtggtcggtctggtcgaaggtgagggcaacctccgaccaccgcgcccggcgcgtcgcctcatgagtcggggccgcggccagaagctctcgcttcatggccttgaggctccggcgagaaacgtgagcacacgctcccccatcgacagtggcaatggtggccccaggctcttggaaacctaggtcatcatcgccgtcatcgatgtcctcagcgggggccttctgcttggcctcacttcgccgattgccggaaggaaccgccggggacttgccctctcggcgctcctgcctcctctcctcctcccacttcctcgtccgctcagccaaacttttgactgcacggcagtccgcgaggtcgtgaagggaagtgttgtggacggtgcaccacttgccggttgggcgctccctgctgggagcgccggcctccttctttttgtctcccgcaggcctcccctttcgggtggcccgcggagcgccctcgacggcgaggacatgaccctcgtcgtctgaatggactgacctcttcttcctcctcctgtcacgccgccctgtctgagcggcggatccgggggcggccgaagctgccacaccggaaccggaagggttccaagtccaggcctcctccttgcgagccactcggtccgcgagctgaaaaaactccgcggtagtctggggctccttggaggcgatcttttcgagcatgcggttgtgccgcacgccccccctgaacgcgtagattaccgcgtgtgcagggatgcatggtatggtgttgcggacttgacagaaccgctgaatgtacgagcgaagtgactcatcatcccttcgctgtactgcgtgtaagtccgcttcttcacctgggcgcggatatgagccctgaaagttcatggtgaactgttggcacaaatcctcccaggagtggactgacgcgggtggcaagttcattagccaaccccgcgcctgccccttcagggccatgggaaagaaattcgccatgaccctgtcgtcacccccggcggcctcaatcccggtcgtgtagacctggagaaactcggcggggttgacgctgccatcatatttttcggcgatggtgggccggaaccttgggggccaacggacattccgaagactcgccacaaaggctctacagccgacaccaccaaccgggggcacggagggctggtccccgcgtccgtgttgaggtgacactctagacgaggaagcgccctccgttgcgtgggcagcacgtcggtcattacgccggcgctcgatgctggcgcgggcgtccggccccccacgcagatcttcccgggtcgaaggagtcgacgaaggagtggcggccgaatggcgaacagcggctgccgctcgtcgtgccctccgtcttgacgacgcggagccggtggtagcagcaccagaggccttggtggcggaggaccgcccaccagtatctaggcgctgccgtgcagtcatgaccaatttggccacatcgtccagccaacgttgggctggagactccgggtcatgggcgacaggcgggtgacacaggagcgcacccgcagcttggagcgcgccctggggcgtgctgccgtcgccgtagacgaggaggcgacggtccccatctcgccgcccctttccacctcctgtggatgtcgaagtcgcggatccttcggccctctcgagcgcctccccctgcttaggactttggcgtggagggggcggtggagtacgagctcgacggcgtgggttcggctccccgtcgtcgccactcacactcggagagaggtcgtgcgcctttgcttgctcagccat

SEQ ID NO: 62622 - DNA, 4429 bp, Oryza sativa
  Clone ID: PAT_MRT4530_63943C.1
atggatcggctgctcaacatcccaggacctcctttaggcagcattgacaacatagagctggcaaggttttggagcagaaactttgacagatggtggggagaatggaaacaacatatcttccatcagccagcctccatgtacatgacagatctatttcctgatgttgtccctcagacaacagaatcttcccctccacaccaaagctacagtggcagggacatagagtatgctccaggcctcttgccaaatggtgttggattaacacctccagtcatcggctaccatgcccccaagatctcaagcctacttcaaggacatttgagagaaccagctgatgttggtaggaaaaggaagatcaaggcacaaacaattgatccatcggctctggctcccaagaagaaggccaagaagcaaaaacccaagccaaccgatgacttgccagccttggatccgtccatcgaacaagccctggatgaagaggagattgaagaggatgttgacaaagctgtagccgaaaagaagaagattgctgtgaaaaagaaatcggcagcaacaacacttaaaccagctccaccggccttagccaatctgttctcctttgatatcaaagattattttgatgaagagacagaagatgatcccaccagcaaagctctagctcccttgtccgatgacgtgaagaaaactcttgaagacatttctcattggctagaggcatcatcactagatagcttggtggtagactgtgggtcgatcagaactcggctacatgaaattcaagctctgatcccggatgagctaaccgatgttctcactctagccgtctatcgtgaacaacatcaattcaagctggagaaggccaagcaaagactagccgaacgtcgggagcgcaaagacatcgaagccacaatccaagccaatcggcagcttgtttacgaagagaagtccaagcttgatcggctatctgatggcccgatcaaatccaatattgatcggcttgaagctcgtaagattgagctcttggcacaacttcaagaatgcaacgccgaactggatttggaacacaaaatgctagccgatctcccacaagctgtcgaagaacaaaaggcaaggctgaaatcggctatcaagaatgtcgctgatctgaccaagtctttaaaagtcatccctggaaccgatgctcaagatgcccaagctattgaagaagacgagtgccctcgtggccgggttgacgcgcaccacaagttcgcggcgaccattggagacggtgtatcggttgctaaggcgcagcgtctttggacagttgtagtcgggcccggggacggtgggcaccggcacggcatcagaccgtgcggcatcagcctgccacacggggcgccgccggccgcagccctctccgctgcgcgttgtcaccgcgccgctccgccacctatcgcctgcgccgcccccttcttttggtcagatccgactcattaagcctcttgatgggtcaaattatgctaagtggaaggctgacgtgttactcaacttaggcatactcgattatgattatgccatcagagaggaccgtcctgaggagccttttagtgttgagcacgattatgaggagaaactgaacttatatcatgagaaaactaatgaatgggagaagtccaataggatttctctcatgtacatcaagagtgccatatcaaatgtcattattggtggtattgtggactctgatgatgttaagacttacttagaaaatattgataggaacttcaggagttcttctaagtcttacgctagctctataattaagcgtctaatgtccatgtgctataattataaagatggtaataatcagagggataagtggtccattgaagaaatcatttctcattctgttgaggaggaggatcgtcagaaggctgacaaacagaagcataaggatcagctgaacctccttcatggtgctaagggcggtaagaaaaagttctatcgaggggagtccagcaactcccaaaacaagaagaagaagcccaacactccttccactcaggcttctaatggtgcccataagggcaaagctcaggttctagcaggtcagaactctgctggtaagttcctttgcaagttttgcaaggcagaaggtcatgcacagacagactgtgaaggctttcgggcttggcttgctaagaaaggtactaatgttgatattgtctctaatgttgatgaattactttacgttgaattttctcataaatcatggtggattgactcaggtgccactgtgcacgttgcgaactcattacagggattccgttccgtgaggacgctaagaaagggggagtggatcctaagagtggctgatggagctgaaattaaagtgatggccattggggagcttcatcatcgacttccaagtgatgatttctcccgttatggatatgttttccccattaaagatagatctaaatcactcgataagtttaaaatattcaaagctgaggttgaaaatcagcatgatgcaaaaattaaagtagtgagatcagatcgaggaggagaatattatgggagacctactccttatgggcaaagtcctggtccatttgcccaatatcttcagatacatggaataattgcccaatattccatgcctagagaaccacaacaaaatggagtggctgagcgtcgcaaccgtacacttatggacatgatagaggcacttaaaacagctgcacacatactcaatcgagttccaagtaagtcggtacccaaaacaccttatgaattatggaccggaagaaaaccgacattaaattatttgcgtgtgtggggctgtcgtgctgaggcaagaatatttaatccacaactaaagaaattagatcctaagactacttctgaggcacaaaatgaagaaattatagaagaaccttctcaaccgtcagtgatcgaaaatgaaccacttagaagatcacaacgggagaggagatctgccattccaaattattatgaggtttatttaggtgaagatattgggaagcttgaagctatggaagatgaattaaaatctatgagtcataatggagtctgggacttaatagaaattcctaaaggagccaaaacaggaggctgtaagtgggtctacaaaactaagcttgactccaaagggaaaatcgaaaggttcaaggcaaggcttgtagcaaagggtttttcacaaagagagggaatagattacaatgaaaccttttctcctgtctctaagaaagactcatttagaattgtcatggcgcttgttgctcattatgatttagagctccatcagatggatgtaaagaccgcatttcttaatggtgacttgcatgaggatgtatacatggcacaacccgagggttttgttatggaaggcaaggaccatttggcttgcaaacttaagaaatctatctatggacttaaacaagcgtcaaggcaatgctaccttaaattcgatgaaataattaagagattcggatttaaggagaatgaggtggataattgcatttacattaagactaagggtggaaaatttataatactagtactctatgtagatgacatactgttagcaagcagtgacattaatatgttgcatcagactaaagaatttttgtcatctaattttgatatgaaagatctcggtgaggcatcttatgttttaggcattgaattacaccgagataggtctaaaggagtactgggattatctcagaaatcatacattagcagagtactagaaagatataatatgagtaagtgctctgcaacacctgctccaatagttaagggcgataaattcggattatttcaaagcccgaaaaataaattagaatcagatcagatgaaaatggggaggccggtgtcgtggataggtgacgatctctccacgatcatcttctccccgaaaattcccaaaaccctatccgatcaagttgagtgctggagggacaacgtgtggtggttccgggacagtgtaggtggcgaccggaaggccgccgctaccccgcagcggtgttcaagagatgaagttatcagacttgaccgtaatcagggattgattgggccgataagggagaaattttcatcacaagactttgagagtttagcacaccatgttcagaaggtattggctcatgaacaaagattccaggaggctaaaaagttcaagaaggtcaactatgtttatagttgtgtttcagactcagatgatgatcaagaccttgaaatcagtttggccgagtggtctaaggtcaagaagacaactatgtgtcaatgggtcaaggatacaaacaaggaggagaaatatgactttgacattaataaagccgacaagatttttgacttattgctgcaaaagaaacaaattcagttgccagttggttgtgacatcctggcccaattaggatga

SEQ ID NO: 62623 - DNA, 5164 bp, Oryza sativa
  Clone ID: PAT_MRT4530_63944C.1
atggccgaacaagcaaaagcgcaccaagctctctccgagtgttagcggtgacgacgggaagccgaacccacgccgtcgagctggtactccaccgccccctccacgccaaagtcctaggcggaagaaggcgctcgaaagggtcgaaggatccgcgacttcgacatccacgggtgatgaagaagggcgccgagatggggagcgtcgcctcttcgtctacggcgacggtagcacgccccagggcgcgctccaagctgcgggcgcgctcttacgtcacccgcccgtcgtccctgacccggagtctccagcccaacgttggctggacgacgtggccaacttggtcatgacggcgcggcagcgcctagatgctggtgggcggtcctccgccaccaagacctctggtactgctaccaccggctccgcgtcgtcaagacggagggcgcggcgagcggcggccgctgttcgccattcggccgccactccttcgtcagcgcctccgacccgggaagatctgcgtggggggccggatgcccgcatcagtatcgagcgccggcgtaatggccgacgtgctccccacgcaacggagggcgcctcctcgtccggagtgtcacctcaacacggacgcggggatcagccctccgtgcccccggttggtggtgtcggctgtagagcctttgtggcgagccttcggaacgtccgttggcccccaaggttccggcccaccatcgccgaaaaatatgacgggagcgtcaaccccgccgagtttctccaggtctacacgaccgggatcgaggccgccgggggtgacgacagggtcatggcgaatttctttcccatggccctgaagggacaggcgcggggttggctaatgaacttgccacccgcgtccgtccactcttgggaggatttgtgccaacagttcaccatgaactttcaaggcacatatccgcgcccaggtgaggaagcggacttgcacgcagtacagcgaagggatgatgagtcacttcgctcatacattcagcggttctgtcaagtccgcaacaccataccatgcatccctgcacacgcggtgatctacgcgttcagggggggtgtgcggcacaaccgcatgctcgaaaagatcgcctccaaggagccccagactaccgtggagctttttcagctcgcggaccgagtggctcgtaaggaggagtcatggacctggaacccctccggttccggtgtggcagcttcggccgcccccggatccgctgctcggacagggcggcgtgacaggaggaggaagaaaaggtcagcccattccgacgacgagggtcatgtcctcgccgtcgagggtgcttcgcgggccacccgaaaggggaggcctgcgagcgacaaaaagaaggaggccagcgctcccagcagggagcgcccaaccggcaagtggtgcaccgtccacaacacctcccttcacgacctcgcggactgccgcgcagtcaaaagtttggctgagcggacgaggaagtgggaggaggagaggaggcaggagcgccgagagggcaagtccccggcggttccttccggcaatcggcgaagtgaggccaagcagaaggcccccgccgaggacatcgatgacggcgatgatgacctaggtttccaagagcctggggccaccattgccactgtcgatgggggagcatgtgctcacgtttctcgccggagcctcaaggccatgaagcgagagcttctggtcgcggcccctactcatgaggcgacgcgccgggcgcggtggtcggaggttgccctcaccttcgaccagaccgaccacccaccgtgcgttgcccggggaggacagatcgcaatggtggtttcccccactgtttgcaacgtgaagctggggcgtgtcctcattgatgggggagcagccctcaacatcctttcccccgcagcctttgacgccatcaaggccccggggatggtgctccggccgtcccagccgattatcggtgtgacgccggggcacacttggccgctaggtcatatcgacctcccggtcaccttcggtggatccgccaacttccgcacggaacgattgaactttgatgtggcggacctcagtctgccctacaacgcggtcctagggaggcccgcgttggtgaagttcatggcggcggtccattacgcctacctccagatgaagatgccgggccccggtggccccatctctgtccatggcgacctcaaagtcgcgcttgcttgtatggagcagcgcgtggaccacctcgccgctgcgtccaagcctgagggtggcgacgagaggcttggcacctccgtctccgccgccccgaggcagcggatagtcacatgcgacgaggtcccggaagacgcgctcgtctccttcctgcgggcaaacgctgatgtcttcgcatggagaccggcggatatgcccggggtccccagggaggtgattgagcaccgtctcgccgtgcggccgggcgcaaagccggtccggcagaaagtgcggcggcaggccccggaacgtcaagctttcatccgcgaggaggttgcgcgacttctggaggccggattcatccgtgaggtcatccatccggagtggctagcgaacccggtggtcgttcccaaggcgaacgacaagcttcggatgtgcatcgactacaccgaccttaacaaggcatgtcctaaggacccttaccccctgcctcgcatagatcagattgtcgactccacagcggggtgcgaccttttgtgttttctagatgcatactctggttaccatcagattcgcatggctagggaggatgaggaaaaaactgcgttcattacccccataggaacttattgttatacgacaatgcccttcgggttaaagaatacaggtcctacttttcaacgtactactcgaatttctttgggtagccaaataggacgtaatgttgaggcttatgtcgatgacttggttgtgaagacgcgcgaccgagaaactttactttcagatctggcggaaactttcgagagtctccgctccgcccgcataaagctgaaccccgataagtgcgtgtttggtgtacctgcgggcaagcttctcgggttcttggtctctgcccgaggcattgaggccaaccccgagaagatacgagctatagagcggatgcgcccccccagcaaacttagggatgtgcaatgcgtcaccggttgcatggccgccctaagtcggttcatatcgagactgggagagaaggcgctacccttatttaagctcctcaaacgctccgagccgtttacctggacggaggaagctgaacgtgccctcactcagttgaaggcgtatctcagctctcccccggttctggtcgccccggagccagagtggaccccggcttccgagcccgtctcagtccccgaggccagctcgggcccctcgcagctgcctcacaccgcccactgggtgatgcagttcgacggctccctgtctcttcagggcgccggtgcgggggtcacgttgacctcgccgagcggagacgtcctcagatacctggttcgccttgactttcgggcgaccaataatatggcagagtacgagggactccttgcgggactcaggttggcagctggactggggatccgccgcctcctggtgttaggcgactcccagctggtcgttaaccaggtctgtaaggagtaccggtgctctgacccgcagatggatgcttatgtacgccaagtgcggcgtatggagcgccatttcgacgggatagagcttcggcacgtgcccagacgggataacacgattgctgacgaactctcacggctcgcttcctcgcgagcccagaccccaccgggcgcctttgaagaaaggcttgcccagccgtcggcgcgacccgaccccttaggggagacggacgcgcctgaccggcccccgaggcccgtcggagtccaggcctcgggacccgaggggagcgctcccagctcccttagattgattgcttggatcgctgagatccaagcatacctcatagataagactctacccgaggaccgcgaagggagtgaacgcgtccagcgcatctccaaacgctacgtgctgatagaagggaccctctatcggcgcgcggctaacggaatcctcctaaagtgcattcctcgggaacaaggcgtcgagcttctcgccgatatccatgaaggcgaatgcggagcccactccgcctcgcgcaccttggttggcaaggcctttcgccagggtttctattggccgacggctctcaatgatgcggttgacctggtccggcggtgcagagcgtgtcaattccacgccaagcaaatccatcagccggcccaggccctgcagatcataccactttcatggccatttgagtatctgtatgtcgcgatcgacaagttcactaagtggcccgaggcttatccggtcgtcaagatcgataagcactccgcacttaaattcattaagggcatcacagcccggtttggggtgcctaaccgtattattacggataacggcacccaattcactagtgagcttttcgatgactactgcgaagacatgggcatcaagctctgcttcgcctcacccgcccaccccagaagcaatagccaagtggagcgcgccaatgcggaaatcctcaaaggccttaaaaccaagaccttcaacatcctcaagaagcacggcgattcgtggatcgaggagttgccagcggtgctctgggcaaaccgaaccacaccaagccgagcaaccggggaaacgcctttcttcctcgtctacggcgcggaagcggttctcccatccgagctcaccctgaggtcccctcgggccaccatgtactgcgaggctgatcaagatcagcttcgcagagatgacctcgactacttggaggagcgaaggcgacgcgcggccctccgagccgcgcgctaccagcagagcctacggcgctaccatcagcgccacgtccgggcccgatcactctgcgtcgacgacctcgtcctacgccgcgtccaaacgcgtgctggattgagcaagctctcaccaatgtgggagggtccgtatcgagtgatcggcgtcccccggccgggctccgttcggctggccacgggcgacggcacagagctgcctaacccgtggaacatcgaacaccttcgtcgcttctacccctaa

SEQ ID NO: 62624 - DNA, 4248 bp, Oryza sativa
  Clone ID: PAT_MRT4530_63945C.1
atggatgtggtgggggcggcgtcctggctggttcaggtcgtcctggagaagctcgtcggcgacggcatcgacgccgcctgggccgcggcgcgcgccgggggggacccgggccgcgcccacggcggcgacgtccgccgcctcggctcccgcctccagagcctccacgccctcctctccgaggcccaagagcacgcgcccatggcacgcaggcgcagcgaggccctccttcgctctctccgtagcctggagagcctcgccaccgatgctgacaacctgctcgacgaaatgctgtaccaccaaatccaccgacggctacatccggacgagcctagtacctcctccaactcttgctcctcattgtttgcagtccaactagtggagcccaataatcgcgttgccaagagggtgcgccatagtggagatggcgataccaccggtagaattaaagacatcctagagcggatgtgtgaagccggagatgatgttcgtgaggcaatcaagatggagaaactggacgtcagtgccgctgggggaggccaagatgatcgtataattcaacggaggccaacaacatcttactccactgagccaaaggtgtttgggagggacaccgtgaaggatcgcattgtggtgatgttgattagctcagagacatgtggtgctgatttggcagtccttccaattgtggggaatggtggcgttggtaaaactacactggcacagctagtctacagtgacacaagagtgcaagctcaattcagcaagcgaatatggatttcagtgtctgttgacttcgatgaagttaggcttactcgtgagctactcgattgtgtgtccaatggtgtcaataagcatggtggtatcactaacctgaataagctccaagagattcttgaggaggatcttaagtccgagcggctactccttgttttggatgacatgtgggaagacaatgataaaagccgttggaacaagctattagcacctctgagatgtagttcattgaggggcaatgcaatcttggttacaacaagaaatcactctgtagtaaagatgattgctacaatggatcctatccatttggatggtttggaagatggtgacttttggcttctgttcaaggcatgtgcatttggtgatgaaaaatatgaagggcatccaagtttgcaggttattgggaagtgcatagctaacaagttgaagggttatcccttagctgcaaaaagtgttggtgcccttttgaatagagaccttgatggtgggcattggatgagcatattgcaaagtgacgaatggaaactgcagagaggacctgatgatatcattccagcattgatgcttagttacatacacttgccttttcatctacaaaggtgtttttcttactgtgcattgtttcctaagggtcacaggtttgatggcttagatttggtccgtgtttggatatcacaaggttttgtttcttcgaacaataagaaaatggaggacattggccatcaatatttgaatgatttagtggattgtggattttttcaaagaagcacatactattctatgcacgacctgattcatgacctggcacatattgtttcagcagatgaatgccatatgattgatggttttaattcaagtggaatagctcagtcaaccattcaacatttatctattaatacaaggtatgcttataagtgggatgtatattcccagaagttttattcaaaagatgacttccagaggaagcttacttatgttggtgaaacagtgcaaaccaggaacttgagtacattaatgctatttggaaagtatgacgcagacttttctgaaactttttcccatatttttaaagaagtgcaatatcttcgtgttctgaggctacccacgctcacttatagcatagactatttactctctaacttcagcaaattgatccatcttcgctaccttgagctaatatccagtggtcctggtggacccttgccagaggttatatgtcagctttatcatctacaggtccttgatgtcgagtactgggtacacctctccactttaccaagagccatgaatgatcttgtcaacttgaggcattttgttgcccgtggtgaattgcacgcactgattgctggagttgggagattaaagtttctccaggagttaaaggaattccgagttggaaagactactgactttcagattggacagttgaatggattaagggaattgggaggatcattagcaatttacaatctagagaacatatgtagcaaagaggagtctaagaatgctggattaagggataaaatatacctaaaggatttgttgctatcatggtgtagcaaccgatttgaggtaagttctgttatcgaggaagaggtgcttgagagccttcaaccacactctgggcttaagtgtctaagtataaatggctatggaggtatttcttgcccaacatggttgagctccattaatccactcatcagcttagagactatctgtctagatagttgcacaaaatgggaggtccttccaccgcttgggcaatttccactccttagaacactgcatttgattcagttgccttcttcaagggttgtaccaactgtatccagtgacgactggactggttctgaaaaacatattatatttccatgcctagaagaacttgtgataagggattgccctgaactaaggacattaggattgtcaccatgctcttttgaaactgaaggctctcacacatttggccgtctccatcatgctactatctataactgtcctcaactaatgaatttaccacaatttggtcagacaaaatatttgtccacaatatctattgagggagtaggatcatttccttacatccgattgtttgtgcgagcattgtatatcaagggatgcgctagcccaagtaaattggatcaaatattaatgttgattgagggcaacctatgtcttcttgagaaattaacgattgagagttgcctcgatcttacatatttgccatggaaaacactcagcaaacttgtctctttggagatgctggtaattgtggactgcccaaggctttctttgactttatatccatataaccaagatgggggtaatttttctttcatgtcattgctcaacaagcttgtaatccgagcatgtagcattacagggaagcagttatctcacttgatcttacagttgcccttccttcattacttgacaattggaaagtgcccaaagataacatccttgttgcttggtgatgtgattaatgggagtgacagctcttcaacatctgattacctccaattgacaactgatggcatgttgcaaataccatctcatctcttaattcaacttcagtatttgagcatagatgactttccagatctggttctactctggaaagaaggcttccatggattcacctcacttcggaccctacacatcacaggatgcacacaacttctctcccccatgataacagaaaacaaaagatccaacaaaaactcttccctcctgccaccattactacatgaccttatggttactcatgtgcataatgagttgctacctttcttgctctcgaacctcacctcgttatccatatttgcaatatctaacagtccagagttaacatcccttgttcttcattcttgcacatctttagaaactttgatcattgagaaatgtgttgggctgtctgctctagagggtttgcattccctccccaaacttaagcatctacggatttttcaatgccctagtttggctaaaacatggggcccttcctcagtggacaggccaggtttctctttatatctagacaagcttgaaattgataccactgtgttatttaacacagaagtttgcaagaagcttccatctcttcgacatttagtgtttttcatgttgtcaatcaaggcttgtccaggaattaaatcattgccagaaaatggcctcccagcttccttacacgagctctacgtgagcagttgcagtgcagaactaaaggagcagtgcaagaagacaaaaaatgttagatgtgtttatgttgatagaaatgcaagcaaattcatagttatatgcaagctgctacgtctctattttaggatcaccaagctgggagcatggcagcgatcactatggctgcaatcaagaactgggggaagcaatgagctcatggtcctaaccaaagtcctatttactatcgccactacagttgttttcagaactggactagtcatctctgaactctga

SEQ ID NO: 62625 - DNA, 168 bp, Oryza sativa
  Clone ID: PAT_MRT4530_63946C.1
tgccgttgtgtgatgtgtgctgaattgtgccacggtgtgaaaaaccttgtgggagatagctgtctgggagtgctgtgatgtggtgtgcgccctgtgcacggttgtgtgtgtgtggggaatgcgagtacttcccgggctaaatcctttgctctttaaaaaaaaaaaaaa

SEQ ID NO: 62626 - DNA, 344 bp, Oryza sativa
  Clone ID: PAT_MRT4530_63947C.1
gtaatccaacagaacaagcagcatcaactgctcactcaccgaccatggcatacactatcatggggccaacctgccgcgtacttgccaccaagaccccattactcagccatcccaagacgttcaatgcctctcgccgcgacatcgccgacgccgacaccagccgcatcaccatgagcaaggagctgtagtacagcccggatagggtgaactacctgtggccattctcgacgcacacaccgtcgtacctgaggggcgagttcccgggcgactactggtgggacacagtgggcttctccgagtacccggaggcgtacaccaggaacatgacgctggatggatccacg

SEQ ID NO: 62627 - DNA, 374 bp, Oryza sativa
  Clone ID: PAT_MRT4530_63948C.1
atgggggggggggattccaaaatgctaattcccaactactagtataatgggggttgaatgacctacccccccccacccaaatgggggttgccttatttaagttcccaaaatttattttacaggacttttttaaaacttaaaaattaaaaaaaatttttaattcagtcaaaaaataaagcaaagtaagggaagggaaaaagctcaatccttacccccaaaaaccttttggccagctcaatgtaattgcctttttaactcgcctggttaacattgttggacctaaagaacttcccggaaaaacccttaacctgggggggaaaagaaacaaaaaaagggggggcccccccctgttaaccttttttaagccccaattt

SEQ ID NO: 62628 - DNA, 231 bp, Oryza sativa
  Clone ID: PAT_MRT4530_63949C.1
atggatggatggatgtggtcatctgattttatggatgcattaggctggctgctggtgctggcgtggcgtgttagagctgatgaagccgatagtttggaggtggtggggatgctaacacagattggagtaaaccgttctatctatgggacaatgatccaagacctcaagaacatgttaaagacgtacttcctgggaaatgaaggtccaatgggtgcagcgatcggcgaataa

SEQ ID NO: 62629 - DNA, 2100 bp, Oryza sativa
  Clone ID: PAT_MRT4530_6394C.1
tcatctcggcccagagagctcgactgcctggaccagcaatgacgagtcatccgtcaggtcagagtagcagcgaccgaaggtgaactcaggcactttgaacttgtgtgagtcagcgcgctgggatgcttcccaccgctctgccagtccatctccctccagcatcctgaccacctctgacatcctgggcctgtgaccagggagatattgggtgcacagcagtgccacctgcaccatctcctccagctcgacacggtcgtagttgcttctcaggcccttgtcgacaagcacgtcgagcttcttctcctggtgcatcttcttcacccagtccagcatggctcccttctgatttgatgacttcccaaattcaagtgcagtttgaccagtgatcaattcaagcagcagaattccaaaaccaaagacgtcggtcttctcagatgactggccggtggagaggtattccggggcaatgtgcccaacggtacccctgacagctgtggtgacatgtgagtcacgatgatctaggagcttggcaagcccaaaatctccaacaatggcttcacagtagtcatcaagcaatatgttggctgcctttacgtccctatgaataatcttggggtcacactgctcgtgcaggtacagtaggcctcttgctgcaccgagtgctatcctctgtctggtgatccagtccaatggtggcttccctttcagacgcaatgcgacactcccatttgacatgtatggatataccagaagcctctcagtagcagtcatgcagaacccataaagcctgaggaggttccggtgaagcgccaagctgatcatctcaacttcagtctgaaactgtgcctgcccgcctgcagcattaccatctttcagcctcttgacagctacaacagttccatctggtagctttccccggtaaacgtttccaaagccgccttttcctaagatgttcttattgctgaagttctctgttgcaacctgaagctctctgaactgaaacctcttcacatttcctaggttgacattctctgtgtgttgctcatcaacatcaaaaagaatttgatggtttcgcctatgcctccaccagaacagcaatcccataacagggataaggaagctgatgcagccaattgtagaaccaaatgcaattgcaaccttgtggcttttagattttgctggcatcagagtaccctgtgtattattcaggctgtaggacatcggcattggtaaagttccataacaatcatgttccgtacccgcagcacagatcaacggattccccactatattgaacgttcttgccaaagaaccaggtactggaccactcagattattatacgaaaggtccaggaaaacaagctgtgataaattagctgatgatgaagggtatgcaccagacagggtgttgttgttgagcctcaagtactggaggctttcgaggtggcctactgagtttgggattccaccagagaagtggttactggagagatcaagtgttttgagttttgttagcctgccaatctcttctggaattggaccattgatgttgttgttctgcagaagaactatctcaagattggtcaagttgcctatgcttgcggagagcaggccagaaagattctggcttggagcctccaggccagtgacaaggttctcaggtgagcaagtgaccatggtccagctgcaaggatccacggagtcttggtcccagttcttgagcacaccgtgaggatccttgagggaagtcttgatcatcatgagagcttgcacttcatagtttacacccttgggagagaggagggcacttgcaagcctgcaagggaaggagaaggaggcaagcaacaccagtgagtaaaccgcaagagccacctccattgccatggaagggcggaagcaggagaggaagggctaatcgcttgtggtggtgtgttcaaacatggaggaagggtgaggccaaggaaaagaagcatgcagccttctcttctcacaattgccagaggcctctgagccgctgtcagtagcaaatgacacaaaagaagatgcttgtgttctggccgcaagcaaaagcgcataatgaggggcgagagggaacaaaca

SEQ ID NO: 62630 - DNA, 243 bp, Oryza sativa
  Clone ID: PAT_MRT4530_63950C.1
atggtcaaagtctcaaagaagtcatcgtacatagggatgtcgtggttgatgcagccaatagctactgtcgtggacgagatagctgagccacaaggtaaaactttatcaattgcttcgtgcaccggtttacctttggtcttccaagaagacttcgacctacaactttatgatgtacctgagcgtgcaggattacaaaggatggtgataaatcctgaagttgggaggaaaatcagactaaagtga

SEQ ID NO: 62631 - DNA, 1881 bp, Oryza sativa
  Clone ID: PAT_MRT4530_63951C.1
atggcgaaccgagaggagccttattctaccactggcggcactgctgcaaaagctcctccggtggcgatggacgccaaactgctgatggcggaatgccctgaagatcgcaaacttctcaaggagcttgtgcacaaggaagacgcttcgaagatgatggtggttttggcgtcaaccaccaaccagcctgctgcagagaagcctgcggcagcccgtgcagtaatgaatccgctgctgctagcagcagcatcctttggtgcttgcgaggttttctactttcttttctgcagagaagacgcacgagagccgctgccgacaatgacggctcgtgcatttcacgccatgcttgctggggacgcctccggcgccgatgggcggtggccgtcgacccatcagcaagctctcgacgaagtagaagaaggcggcgccggtgccgccgttgccgttggtcatcagtccactcgacggctaccaccacctgacgcgccgctcctggagggcatcaccgttgaaggtgacaccgcgctgcacgtggtggccacccatggtaacgccgccaacttcttggagtgcgctgaaatcatctgcaacagagccagacgcctactgttggcgactaacgacaagggtgacacggccctgcattgcgctgccagggccaggaggttggagatggcctctcgtctcattgctctagccaaagctagggaagaccacgaagtcgaacgtggccaagcagcatcgtttggcaaggtactcctgagaactgaaaatgagcgcaatgaaacagccttgcatgatgcagttcgcgccggagatggtgacatggtccggcggctaatggacgaggacccagatttggctttgtttccagtacagggcacttcacccttgtacctggctatctctctacggaatggcactattgctgagatactacatgagaagagcaatgggaatatatcctactccggaccacatggacaaaatgcactacatgctgctgttcttcttcgacatacagcggtgttagaactactattgaaatggaacagcaaccttacaaaacaaggagacgaaaatgggagtacacctgttcattttgccgcatcttttcctctatggcatcgaaaattccattggagacatccttggattattcgtgttccccatagtctctcgatgttgttaaacactggtgaggtagatccattctatcaatccgacaagaatggaatgtttcccgtacacgtcgctgctgccgtgggggcagaacttaccgtcgcttttttgctcgacaagtttcccaacagcgcgggtttgcgtgatgccaagggaaggacattcctctatgtcgcagttgagaaacagagtttagctgttgttaggttcgcttgccggactacgtcgttacagtggattttgaacatgcaagacaaggatggcaacactgcactgcaccttgctatccaggccaatcaccatcgattgttttgtgctcttttagggaatcctcaagtcaatttagatttaacaaatcatagtgggcatactcctctcgatttgtccagaaggatgcttcccagagggatgaaatatacggcgaacactgaggagctcatatatttgacactcaaacaagttggctctgaacactatcacgatcgccgggatcacatcgaagaaatctatagccgtcgtgtggtatcaaaagaggatctggccgaagaattagacaagatgcaagaatcgacacaaacactaggcattggttcggttctaattgtgactgtgacgtttggtgcaatgtttgctcttcctggaggatatagagctgatgatcacccttatggaggcacaccaacattttctgggaggtggtag

SEQ ID NO: 62632 - DNA, 165 bp, Oryza sativa
  unsure (1)..(165): unsure at all n locations
  Clone ID: PAT_MRT4530_63952C.1
gtaaaatgttccnccgtgcagattccagataattcaccaccaacactttcaatcaacaccggcattccaccatcatcacacctcacacaaccatcacatcaatcactctcacattatcagcattgtttcnccagcacggggtgcctccacacanttttctgccct

SEQ ID NO: 62633 - DNA, 1024 bp, Oryza sativa
  Clone ID: PAT_MRT4530_63953C.1
atgaaggtgcagtgcgacgtgtgcgcggccgaggcggcgtcggtgttctgctgcgccgacgaggccgcgctgtgcgacgcgtgcgaccaccgggtgcaccgggccaacaagctcgccgggaagcaccgccggttctcgctgctcaacccctcggcgtccggccgctcgccgacatcgacgacggcgccgctctgcgacatctgccaggagaagaggggtttcctgttctgcaaggaggaccgggcgatcctgtgccgcgagtgcgacgtgccggtgcacacggcgagcgagctcaccatgcgccacagccggtacctcctcaccggcgtgcggctctcctcggagcctgccgcgtccccggcgccgccgtcggaggaggagaacagcagcagcttctgctgcagcgccgacgacgccgtgccggccccggcggcgcccgccacgagccacggcgggagcagcggcagcagcagcatctccgagtacctcaccacgctgcccgggtggcacgtcgaggacttcctcgtcgacgacgccactgccgaggccgccgccgccgccgccgccacctcttccggcatctccgcgaacgggccgtgtcagggggtaacacggatcggagggctgcaagaatccgccggctaccctgcgtggatggcgcagcagcagctgtgctgcgacggcctcgtcgccggcgacgcgtcgccggctagccgggagcggtgggtgccgcagatgtacgcggatcagcttgccgccggcagcaagagatccaggacgtccactgcttcttcctactcctactggtgaaactaaagcaattgaggccatggtttgtacgtagtagatgttgtttcgggcttaattaatgactgcattttgcgcttccggacgggagtgtttgtgcgttatttttgaggcgcagaggaaaatctgagccttttgtatcccttcctttttgctcgtcacgactagtactgtatgtttttcttctacgcaataacgagaatttttcctcttttcc

SEQ ID NO: 62634 - DNA, 1104 bp, Oryza sativa
  Clone ID: PAT_MRT4530_63954C.1
caaccacgtacgtccatacgttgcatcgcccatcgatcgaccgattagctatctaattggcccaactaaatcttgctttgctagcttgtgcttcccctagctaacataagctatagcctatagcttcctccctccctctcaaacttagttaattacttccaccagcctcatcaagctatagctagcatgagaaggatacagatacacccctcacatggcggcggcggcggcaccggcggccgtgcacgtcgtcaggcggcagatcagccggtggtgtacacggtgtggaagaggtccagcataggctttcagggcaccgacggcttctccgtctacgactccgccggcaagctcgccttccgagtcgacaactactcccgccgccgcaaagctttcgccggcgacctgctgctcatggatggccacggcacgcctcttctctccctcaggccccagattctcagcctgcacaatcgatggaactgttacagagcacaagaggtaaaattcttccacagctcaagctctctttcagattcacagcagcaagtatcctccatgatggaagagctcagctcttccatgagcaggcgaagaagcagaagttttcatgtcaacaagaacaagtggtgacagccaacacctgatgcttctcccagccccagcttcagaatcgacggcttgcttctccatgaggagctgcaagatccgaggcagcaacggcgaggaggcagcgcggatcacgaggaagaacgccggcgtgatgtccagaccggtcagtctcggcgacgacgtgttcaccctcgtcgtcaggccaggcgtcgatgttgcggtcgtcatggctatggtcgttgtcatggaccgtatctgccggaggccctacacaccaatggcgtgttcatcatctggaaattcagtagttcatagtggagaaatcatcaaatccaaggaaaaataccatctaaaccgcagtagtagtagtttgctgtaaggagcgagagcgagagggggaggggagaagggagggggcgcgcggcggaggtcggcggagagcaccggaagcatcagcgcggagagcgcaggccgtataagccggggacccac

SEQ ID NO: 62635 - DNA, 891 bp, Oryza sativa
  Clone ID: PAT_MRT4530_63955C.1
cggcacgaggcagaccgccaatccggcaattccccacttcgacggcattaccgcacccaccgcgccgccgcgagctgcaaggacgtacgccgaggaggcaggcccccgccactcgatggttcgccgccggcggcacggccgatggactcctcccgctcctccaactctctcgattcggggagctctctgacgctgggggagctcgcgtgcgcggcgctgattccggtgctcgccctggtggacgcggtcgtgttcgcggcggcgcaatgcttccagaagcgcccgccggggctgctgcccgctacactcgccgcccgcgcgcgccgccgcgccggtggccgcctcaccttccgtgagctcgccgacctcgccgacgagtcccgctgcttctcggtgaacgaggtggaggcactgtacgagctctacaagaagatcagctgctccatcgtcgatgacggcctgatccataaggaagagctgcaattagccttgtttagaacaccggctggaaagaatctttttctagatagagtttttgatctgtttgatgaaaagaaaaattctgttattgaatttgaagagtttattcacgcaataagtgtatttcatcctaatactcctcttgaagacaaaattgatttttcattcagattatatgatttgaggcaaaccggtttcattgaacgtgaagaggtaaaacaaatggttgttgctaccttattggagtcagaggtgcagctgtctgatgatcttgtggaagccatactagacaagacatttgaggatgctgacactgacaaggataacaggattagcaaagaggagtggaaagcttttgtactgaagcacccgtctgttataaagaagatgaccctgcccaccctgaagtaa

SEQ ID NO: 62636 - DNA, 301 bp, Oryza sativa
  Clone ID: PAT_MRT4530_63956C.1
gattaacttgaggtccttcaagtactcctgggttgtcgggtttgataaggccttgcgttagagaggcctcaccatcgatattgccctgtggaagttcgagaccaccaagtactactgcacggtcattgatgcccctggtcactgtgacttcatcaagaacatgatcacgggtacttcccaggctgactgtgtcgtgctcatctattgactccaccattggtggttttgaggcttgtttcttacacttttgtcttgacttcttgatcccattaaggaccatatttatttcatatattttcat

SEQ ID NO: 62637 - DNA, 336 bp, Oryza sativa
  Clone ID: PAT_MRT4530_63957C.1
cgggccggattttcggggagagccccacgcttcctttaaaacagtagtagcttaattggctaccatgtcgatgtccactagcatgctggggcggaagcagaacgcgcagcagaagggcggaggcggcggcggacgcaccgacggtggcggcggcggcaagatcgagccggtgagcgtggacatcatggagccgttcatggacgcgatctcgctgacggcgttcgcggcggcgccgtcggcgggggacgcggcagcgggcgtgccgtcgactgcgagcatggactggaaggagacggcggcggcgcacgtgttcatggcggacatgcccggagtgcg

SEQ ID NO: 62638 - DNA, 637 bp, Oryza sativa
  Clone ID: PAT_MRT4530_63958C.1
ctccccccccccccccccccccccccccccccccccccccccccccccccccccccccccccccccccccccccccctttttttttttggccccaacaacacccttttttttccacccccccttggccccccctccgggtttccccttattttcccaaataataaagaggggaaaaaaaaaaaaaaattgggggagccctttcttgaaaaaaaccaccttccttctcccaatttcccgggtcccccacttaaaaaaggggggtccaaaaactccccccccccaaaccccctttgaccccaaaaaaaaattggcgggcaatagggggttttcgggggggaggcccttttcaaaaaggaccagggtttcggtcctttttttttttttttcacaaaacacatttttcctgcaccccccaaaatgggttttttttaatcaacaaaaatgagtgtttttttaagggggcccccctttttccatcccaacaaacgaaagggccccggggcaaaagggggttacccccctttttaggggcaacccccttcccgcggggcccattctgtttgggccctgttggccctaacccccccaacccggggcccgggagaaagaccctgttcccatgccggggccgggggg

SEQ ID NO: 62639 - DNA, 493 bp, Oryza sativa
  Clone ID: PAT_MRT4530_63959C.1
atacgtcccgattcggggtaccggaccccaccttgtcagtgactgctaccgcacaagtagtactgcagattccatgtccatattcacttctgaattctgaattaccaaatgatagtgatgtacagctttcagttttaactataatcttctccatgcatctttgtatcttatcttttgttccatacgtccatacgcctatggagtgtacatgtggaggacagatagtggcacaggtggttggtactagcacatcaaacatgaacggagtcacaatcagctaaggccaatcggtggattacacacattgggttcggaccattccagggctttctcatccccatcactttgatcacttgtgttgatcctaatctagagcttgtttaatgtactagtcgtactactcataaatattatggatgctaatcttgaatgttccttttgcgttcttctgaataaaactttggatataacctctgaaaaaaaaaaaaaaaaa

SEQ ID NO: 62640 - DNA, 355 bp, Oryza sativa
  unsure (1)..(355): unsure at all n locations
  Clone ID: PAT_MRT4530_6395C.1
atggcgaagccgtttgggggcctagattccagtggaggagaacaacggaaggggcatgggtgcagcggtggaggccgagcccggcgcttccggctggcggcggttggatccgctgtcctcgcggctggacctcgtcggacccttggcgacggcgacgggttctctccgcggtgcggcaccctcgccgttgcagctccatgtgaccacggagggcctcggctcagcatcctcatcgtcgcgcccccctccccctggtgccggcggtgtgggctgggcccggtgcccccagctggcggcgcctagcgatggcgggctccttcccccgttgtcnccgtccccccccccacaggtngtc

SEQ ID NO: 62641 - DNA, 1277 bp, Oryza sativa
  Clone ID: PAT_MRT4530_63960C.1
ccgggctgcaggaattcggcacgagcaaccttggcttgagagacttgagaggcagcactcccctaccaatccacacgacaatgagcgcggcggcggaggcggaggcggcggcggtggagtcgttaccggacgacgtggtcgccgagatcctcctctgcctcccgcctcacccttccttcgtctccggcgcctccctcgtctgcaagcgctggctccacctcatccgcagccccagcttcctccgccgcgtgtgcgcattccatcgaacaccccccgtgctcggcttcttccacaactaccgggacctccccagcttcgtccccgccgagggcgtccccggccgcaaccgcatggacggagtcgacgacggcggcgacgcgcggatgttcatcgactgccgccacggccgcgccctcctccgccgatacgactgggccgtcctggtcgtgtgggaccccatgaccggggagcgccgccgcatcgccggccccaaccagaagatgcagggcggcggcgccggcacctcccgccgcagcgccgcgttgttctgcagctgcgatgtttccggaggcggcggcgaccaagactgccactctagccccttccatgtcgtcgtcgtgttcaccggtggctgccgcgcgttcgcctgcgtgtactcttcgctgaccgacgcgtggggcgacctgatctcaacgccggcgccattgccatgtgagctctgtgacacgccccctgccctggttggggaagcctcgtattggctttcttatgggggactcatacttgagttccaatttggcagccaaagtttaactctgatgaaacggccattggagatgcttgccgatgtacgtcttgtgaggttggaagaagatgggcttggtcttgccttcatcaaggattccaccttgcacttgtgggcgcgggaggttgccgatgatggtgcgccgaaatggaaatggataccgcgcagggccattgagcttgacaagttcctgccgatgccaagggtgctcaccggaaaatggtgtggtgaaatgtttgtttcgattagtgggttctctgaggatggaaatgtggtgtttatacggacccttgccggcgttttccttgtttggcttgaagcattgaagttcaagaagatgtctgaccccttatacatgatgactgttcacccatattcaagcttttatgtcccaaatggagtgaaagcaaatagagtatacaatagaccaaacttttccaagtcactttcattttatggcttgttgagctga

SEQ ID NO: 62642 - DNA, 536 bp, Oryza sativa
  Clone ID: PAT_MRT4530_63961C.1
agacgaaaggtaggagtagctggaacatcaaggtacactctcagcttgtcaaaagcagcagaaggtacacatgccccccaacatcatgagattcatgacttttaatggcagaacgaacatcaccattgccaataattaagacgtactacttcacttgttccttcaatcatcacattaatgtcattgctacatccttacatttacagtaggagcaactctgaagaactctgaagcctggccagaaacaaaaatcttttccttacatttaccagcacacaccaattggagatttgatgatcatctttaccagcacacaccaattggagatttgatgatcatcttttgctcagctgcacactacatcggagtaaaaggctattgttctccgttggcagtcctgaacagcgaggagttcgatgtcgaatacctcgaactgcttcgcactgaagaatgttgacggcccaacaggaggaccaagctctggaggtataataattcttctcttaccacctggtttcatgtcccgtatcccttct

SEQ ID NO: 62643 - DNA, 551 bp, Oryza sativa
  Clone ID: PAT_MRT4530_63962C.1
ctgcaggtttttttttttttttatcccaatgtttaccaatatatatgtatttacgtatgtatgtatgtgtttcttatgtttagttacagagatggaaagaacattaataagtatacaccaagaccaaaaactgacaaaaacaaaagatgtagagggggcaagcaacagagagaacaacaaaatgtgtgactaaacaatctataacatacacttcctcctatctttctttcctgtatacaaattatccttaaccccccaacaataatgcctaaactaaaggaattaatctagctaaattaagaatcatcttggaaaaaaggagagttctctcatattaatatttctccccatcccatgcatgcatatgcatccatcacctccaaggctaggcaccattttgcaaattaatctctctctctagagatctctgatgcttgatctcttttaatttctctctccttgctgtaacttctttttgtttctctctctagatcttcttctcactctagtgctccaagtgcaatgcatggatgagccaaatcatggatgga

SEQ ID NO: 62644 - DNA, 132 bp, Oryza sativa
  Clone ID: PAT_MRT4530_63963C.1
atggggcggctcgagcggatgcggatttggaggggaaatggggcggctcgagcggcatggctgggctcggccggccggctgctagagggtgtgccgccgtgggagaccctaggcctccacttcccgtgctaa

SEQ ID NO: 62645 - DNA, 255 bp, Oryza sativa
  Clone ID: PAT_MRT4530_63964C.1
tttttgttacgaccaagatccaaattcatattagatagatagtacacataaaacagaatcttaattacaatgctgataacaaaagacatttctctcctccagagaggttactattaacatttttccaatgattttaaacattaatcacactaacattctattctctccctgtgctctcaccacattattgggtggctcccgttacccactaacgccttgttccagaatgacctttcatgctgcagctttaaaacg

SEQ ID NO: 62646 - DNA, 279 bp, Oryza sativa
  Clone ID: PAT_MRT4530_63965C.1
atggcaggcggcagccgaaggtgccgcggcggcggccggaggggcgcgcccggtggcggaaaggcggccggaggtgccgcgcgcggcggcggccggaggggcgcgcccggtggcggaaaggcggccggaggtgccgcgcgcggcgacggccggagggggcgcgcccggcgggccgatgtagctgccttcgtcgaatgtgaaggtgtgggggcgatgctctgggatttagcgttgctctcgccagtggcaaatcgggccgtgaccggcgagggtgtttga

SEQ ID NO: 62647 - DNA, 732 bp, Oryza sativa
  Clone ID: PAT_MRT4530_63966C.1
ttttctctctctctatctctctctttcaaaagcgtgtgtgcctgtgagcctgtgactgacgacggactgtctgctggcacgcacgagcgggcgcctgtgcgtgtgtgctccgacctgcaaatcagagaccagatcgagccccctggccggctgcagctgcctccttgcttcctctagctcctggagtgaggagagctcgccattgctgtctgctcaagctctctagcgtagctagacttctccggcgtgtgcttggctgctgctagctgctagctggccagtcttcctctcttgtccgccggcgagatggtggtggtgggcgccgtgagctgctgccggagagggagttggcggcgacgcgccgccgacctcgccctcgccgtcgtcgtcgtcttcgccgcggcagctggtgccgctgctgcaaggaggccaatccgtgtactacggagaccagcagcagcagcggcgcacgtgaggagactagactcgtcgccgtcgctgatgctagcgaggaggaccaacgcggcggccggcggcggcgacaacggcgacgtccggcggcggcggctgatcgggcccgggtcgtcgccgccgacgtgccgggcgcggtgcgggcggtgcgcgccgtgccggccggtgcacgtggcgatccagccgggcgtcggcgcccagtgggagtactacccggaggtgtggcgctgcaagtgcggcgataagctcttcatgccgtga

SEQ ID NO: 62648 - DNA, 1973 bp, Oryza sativa
  Clone ID: PAT_MRT4530_63967C.1
atggcggatgtggaggcctgcctcctcgcccacctcaactccggcggcgaggtgccggactcccgctcctacgcctcctccctccgcgtcacccacgacgagctcgaggccgtcatcaagagcctctcggctttccgcattgtcgacaccacggtactcctcctcccctcccctcccctctcatctccatctccgaatttatccccgggcctcccgaaccctaacgagctatctgccccgcaggacatcaccaaggagacgtgggtgctaaccgatgaagctaaggggtacgtcgcgggtggctcccccgaagcgcagctcgtcgctgcaatcccaccggagggtgcctccaaggacgtgctcagggagaaattgggatctgtctttgacatcggcatgaagacggctgcgaagaacaagtggattggttttgagaaagggaataaggacttggtgttgagaaaggttaacaccatcaaggatgacttgcaagagcaactgaaaagtctagagagtggagaggtgcctaagatcgttgactggtttttatcggtgcataggagcccatttacctccactgttccacaaaatattgttctttctgacaaggtgattgatgatttgaaaagaagaaagcttatcacaaaagagaaatcaatttggtatgccctaaagaaaggaccccagtttgtcgcgaagaggaaaaaactggcaactgatgtgacacaagagcatctcagaagtggtgattggaaggatcttgaattcaaagactataactttggagcccagggacaacctattgccattggttatgtgcaacctttgttggaggtgcgagaggaaatccagaacatctttcttcagatggggttcactgagatgccaactaacaattacgttgagagcagcttctggaacttcgatgcactgttccagccccaacagcatcctgctcgggattcacacgatacattttttcttgaagcccctgccgctacaaaacaattgcctgaagattatcttgagaaagtaaaggaagttcatcaacgtggtggttatggctccaagggatatggctatgactggaaacgggatgaagcagagaaaaacctgcttcgtacccacactacagcagtttcaacaaggatgctatacaagctagcacaagagaaaccttttgcccctaagaggtactactccattgatcgtgttttccgcaatgaagctgtggaccggactcatcttgcggaattccaccagattgaaggcatgtcaaagctgcgtttcaagcctgcctacaatccatacaccgagccgagcatggaaattttcagttaccatgaaggtttgaagaaatgggtggaagttggtaactctggcatgttcagacctgaaatgttacttcccatgggactgccagagggtgttaatgttattgcatggggtctttcactagaaaggccaacaatgattctttacggcatcgacaacattcgagacctctttggaccaaaggttgatttcaacctcatcaagagcaaccctctctgccgcttgggactgcagtaaaaccttgcaaaagttggttggaagtgattaagtaacaagatttgtttagttgatcagtggttgaacgtgaagagatcatttctggcttaccttgaaacaccaatacatgtgcatttagcagaggtttttgtattacagttttgagtgatatgagactaccagccaatttttgtgtgtgtccatattcgaatactttgatacattttaattgagcacatccaatgtatgaagtggtcatctgccgctgcggttgcttgaatcaaaatatggaccattgttttcttttctttgacaaacttggcgctccaaaaactgttgttgagaagtgtcatcaaacaggatgtaatagttatgatactgatctaagattaataatatctgctgaagctgatgcctttcac

SEQ ID NO: 62649 - DNA, 979 bp, Oryza sativa
  Clone ID: PAT_MRT4530_63968C.1
cacaccggccgggaaaaccctagccgccgccgccgactccccctcgcgccgtccccgtcgccgagcgccgccgcctccgtcaagcccaagcccagtagtccactcccaggcagctctcccctctcgccgccatggcggatgtggaggcctgcctcctcgcccacctcaactccggcggcgaggtgccggactcccgctcctacgcctcctccctccgcgtcacccacgacgagctcgaggccgtcatcaagagcctctcggctttccgcattgtcgacaccacggacatcaccaaggagacgtgggtgctaaccgatgaagctaaggggtacgtcgcgggtggctcccccgaagcgcagctcgtcgctgcaatcccaccggagggtgcctccaaggacgtgctcagggagaaattgggatctgtctttgacatcggcatgaagacggctgcgaagaacaagtggattggttttgagaaagggaataaggacttggtgttgagaaaggttaacaccatcaaggatgacttgcaagagcaactgaaaagtctagagagtggagaggttctttctgacaaggtgattgatgatttgaaaagaagaaagcttatcacaaaagagaaatcaatttggtatgccctaaagaaaggaccccagtttgtcgcgaagaggaaaaaactggcaactgatgtgacacaagagcatctcagaagtggtgattggaaggatcttgaattcaaagactataactttggagcccagggacaacctattgccattggttatgtgcaacctttgttggaggtgcgagaggaaatccagaacatctttcttcagatggggttcactgagatgccaactaacaattacgttgagagcagcttctggaacttcgatgccctgtttcagccccaacagcatcctgctcgggattacacgatacattttctcttgaagcccctgctgctacaaacaattgt

SEQ ID NO: 62650 - DNA, 544 bp, Oryza sativa
  Clone ID: PAT_MRT4530_63969C.1
tcttattcaacaaggatgctatacaagctagcacaagagaaaccttttgcccctaagaggtactactccattgatcgtgttttccgcaatgaagctgtggaccggactcatcttgcggaattccaccagattgaaggtctcatttgtgattatggtttgacgctgggtgatctgattggtgtattggaggatttcttctcgagtctaggcatgtcaaagctgcgtttcaagcctgcctacaatccatacaccgagccgagcatggaaattttcagttaccatgaaggtttgaagaaatgggtggaagttggtaactctggcatgttcagacctgaaatgttacttcccatgggactgccagagggtgttaatgttattgcatggggtctttcactagaaaggccaacattgattctttacggcatcgacaacattcgagacctttttggaccaaaagttgatttcaaccttatcaagagcaaccctctctgccgtttgggactgcagtaaaaccttgcaaaagttggttcggaagtgattaatt

SEQ ID NO: 62651 - DNA, 4154 bp, Oryza sativa
  Clone ID: PAT_MRT4530_6396C.1
atggattttcccaaattcgacggcaagtccgaccctctcgccttcatcaactgttgtgaatcctactttcaccagcagcggatcgcggaggaggagaaggtttggatagcctcgtacaatctagaagacgccgcacagctatggtacacccaggtccagcaagacgagggcacaccgccatggcgtcgcttcaccgagctgctgcacctccgtttcggccctccactgcacaccaaccccctcggcgagctcatggcctgcaagcgcaccggctccgtcgtcgactaccaagacaagttggaggcactccttccgcgcgcgggcaagttgacggaggaacaacgcatccaaatcttcacggccggactgcaactgcccctcagcctcgacgtggagattcacaacccgcagacgctcgtcttcgccatgagcctcgcccgcaagctcgagctgcgcaaccagtgcgtcgctcccgccgcgcctccgcgccacaaccagcgtggcctcctgcccgcgcctccacagctgctggcactcccggcgccgccaccaccgactgcaccgtctccagcgacggtgaccgtcgagggccgcacggtcaagcgcctctcccaggcagagatggaagaacgacgtcgcctcgggctatgcttcaattgcaacgacaagttttcacgtgggcataaccgcgtctgtcagcgcctcttcctcctcgacttggccgcgcccgacgacgactacgatgacgacagcacaccagaggagacaggcgaaactgacccgcacgtctcgctccatgcgatcgccggcgtccgcttcagcgacaccatgcaagtgcacatcaacatgggcggcgccaacctcctcgccctgctcgactcgggttccacacacaagttcgtctctatggcagctgcaagtcgcaccaagctcaagctcctccctcgcggccagatgcaggtcacggtcgccaatggagaacgcgtgccgtgcccgggcctctaccgcaacacggccttctccatcgacggggagacgttccacgccgacttctttgcactgccattggcagggtagaacgtcgttctcagcacacagtggctggccaccttgggaccgatcttgtgggatttcggctccctctccatgtccttttggcggcatgaccatcgtgtgtgctggcacggcgtggcaggctccgctactccctcgctgaaagccgtcgcgggccaagacatcatggcagcactgcttgacgagttcactgccgtcttcgccgagcccaagggaatgcctacaccgcgctcaagggaccactacatcaaccttttccccggctcctcaccggtcgccgtccggccctaccgctaccccgcctcccacaaggacgagttggaacgtcaatgttccgacatgttgacacaagggctgatacgacggagtacatcggcgttctcgtcaccagttcttcttgtcaagaaagccgacggctcatggcggttttgtgtcgactaccgcgccctcaacaccattacgatcaaggacgcataccccatccccgtggtcgacgagctccttgacgagttacatggcgcccgcttcttcacgaagctcgacctccgctccggctaccaccaagtacggatgaacgccgccgacatcgccaaaaccgcgttccgcacacatgacggcctgtacgagttcatggtcatgcctttcgggctttgcaacgcccccgctaccttccaagccctcatgaacgacgttcttcgaccgttcctacgccacttcgtcctcgtcttcttcgacgacatcttcatctacagcgactcatgggcggctcatctcgggcatgtgcgcaccgtcctcgacaccctccatcagcaccgcctcttcgtcaagcgctccaagtgcgatttcggcgtcacctccataagctaccttggccacgtcatctccgacaccagcgtcgccatagatccggccaaggttcaagccgtctccgactggccgcagccacactcggcccgcgcggtgcgagggttcctcggcttggcaggctactactgcaagttcgtcaaggatttcagcacgatcgcggcgcctctcaccgctctgctgcgcaaggaggggttcttatggtccgatgaggcggcagctgccttcaacgtcctcaagtcagccattacctccgcaccggtccttgccctccccgacttcgccaaaccgttcgtcgtcgagtgcgacgcttccacccatgggttcggtgcagtactcctgcaagaccaccatcctgtggctttcttcagccatccagtggcaccacgacacagctccttggcggcatatgaaagggaattgatcggcctcgtcctcaccattcgccattggagaccatacctatggggctgccgttttcttgtccgaactgatcatttcagtcttaaattcttgcttgatcagcgtttggcaaccatcccccaacttcattgggtgggcaagctcctcggcttcgacttcacggtagagtacaaggccggtgctagcaacacggtggctgacgccctttcacggcgcgacaccgatgagaccatgctcctcgccatctccgggcctcggttcgacttcatcgactacttgcgccaagcccacgactccgatcccacactggtggcactcagggaggagctgcaggccaaccagcgtagggccccatgggccttgatcgacgacatggtgacgttcgacggccgcctctacatttcgccggcttcaccacttctccaggaaatactcactgcgatacatgctgatggccatgagggtatacagcgcactctccatcgactacgccgcgacttccactcaccaaaccatcgctcaatcgtccaggaccatgttcgtgcgtgaatcacttgccaacgctacaagtccgaacatctgcatctggcgggcctcctccttccgcttccggtaccaacagcggtttgggcggacatcggccttgatttcatcgaggcgctgccccgcgtcagcggcaagtcagtgatcctaacggtggtggatcgcttcagcaagtactgccacttcatcccactggtgcacccgtactcggcggaatcggtggcccaagcattcttcaccgagattgttcgtctccatggcgtgccgcagtccatggtctcggatagggacctggtgttcacctccctgttttggaaggagctcatgcgtctcatcggcgccaagttacacatgacgtcggccttccacccgcaattcgacgggcagaccgacgccaccaacaaggtcatcatcatgttcctccgctgcctcaccggcgaccgccctcgacaatggcttcgttggcttccatgggcggagtacatctacaacacgccgttccagtcggcgctcaaggacacaccgttcaaggtcgtctacggtcgagacccccccaccatccgctcatacgagcccggcgagactcgggtggtagccattgccaagagcatggcgcaacgcgacgagttcctcgcagacgtccgctatcgtcttgaacaagctcaggctgtgtacaagaggcactatgacaagactcatcgcgacgttagcttccaggtcaacgactaggtgtggcttcgccttcaccatcgcacccggcctccctcaacgtcacaaccaagggcaagctgaagcccaggttctacggcctgtaccgcatcctagcagtcatcaacgacatcgcctatcgcctcgagcttcctccgcgcgcgcgtcttcatgatgtgttccatgtcggcctcctcaagaagttcgttggcacgccaccatctgtaccgccaccactgcccaacacacaccatggggctgtggttcccgagccggagcgagctgtgcgctctcgcctcgcccgaggcgttcgacaagtccttgtccagtggaagggcgaaccggctgcctccgccacatgggaagacgtcgacggtttccttgaccgatatccttcttttcagctcgcggacgagctgctcgtcgagggggggagagatgtcatgtgggggcgccactaccaccgcaggagcaggccggaggcacagttgcagcaagcagcatgagtcaaggttgcaaacttagaaagaatcatgcaagga

SEQ ID NO: 62652 - DNA, 311 bp, Oryza sativa
  Clone ID: PAT_MRT4530_63970C.1
cagcgattggggcccagatccactctccaggcagtcgagggcattcagatctggaggccgacgcccgcgagctccagaatggctcgacccgacaaaggtcagccctcgtggtggagaagccaacctccggcttgcttgggccgacggaggtggaggcggtggcagaggcggcagacagcccacgggcaaaggcggaggcggaggtggcgactagaccatgggcggaggcggttcccgacgcgctagagccaatagaggtggaggcgatcagatccaaccgcagcgaggtcaggggtggtcagatccagtga

SEQ ID NO: 62653 - DNA, 493 bp, Oryza sativa
  Clone ID: PAT_MRT4530_63971C.1
gcaccaatgtgtgtgcaccgcctaataaggaaggatgtgccactgagccatgaggaaggatgggatggttgatgtgtgctgtgatgtgctgatgtgaacctgggatggccctggctggacctgatgagtgtgggctgacgtgttgaaagtgtgcagtgtgtgcttgatggttggccaaccctaagataacacatgccatggttgtgtgggttgattgactttgttttgctgtgatggaagtgaaatgaagaaagagtgctgtgggaaatgggaaagttgcaactgtgctgtgcaggtaatgtgactgacatggggtgttgactgatgtgtggtaatgaatgagtaacatgttgaggatgtgccatgacactgtgatgtttgatgtgctcatctcctttttttggtttaagatgtgtttgatctaatgtcatgtagattgtattctaaatatcttctaagccaaatacttttgtggatctaaaaaaaaaaaaaa

SEQ ID NO: 62654 - DNA, 1637 bp, Oryza sativa
  Clone ID: PAT_MRT4530_63972C.1
agaactagttgatccccgggctgcagtgttcgcactgacgaaccctaaaccccaaatcctctcatcccttctctcaaatcaggagcaaatcaaccaaaaatcggtagctttgaagtattagatgccaatggaagaggtgcagatggatttcggcgagtagagcaaggcaagcaacagcttggggcgacggctgcagcgggcggcatcaggttacggtgcttgcggcggcttggggcggcacctgcagcgggcggcgtcaggctacggcgcggctaccacgcttgcggtggctccgtcgagcggcgtcaagttgcggcgcgcggccgcggcacgtggctgcagcgggtgtcggcgtcgacggtaggctgcagcgtcagctgcttcaagcggcatggtggctactgtgggcagtagtagcaggaccaccatggaaaggaatgagctgctgactatggtgaaaaaacattcccatttgattgggtggacagttgttgatgctgaagatgatgcatcagacgtgggcatggatgatcgattctgggcatgaaatacttggatcttttcttcgtggcatgggtagggtttcaaaaggggagggaagaggatgaccttgtcttctttgttaataatatgaaattgaacgggtacaggtccagtgataacatggaaaatccacctcccttttttgtgcgaagatgggctcctaagcttgaaaagatcaccaatataaatttagctgatgtcaattgggaacgttcattctatttgaatttaattgctcacacgtcatactctgttacagttgcaatatgcagtatcatggatctttgcaaccgtgcagagaaaagcaaaccattatcaccagtttataaggtaatgtacaagtcacaaaaactgtgtatgcatccccgagccgcgtaaattttcatcttgatcgaaggaaggcagtagaaacggtacctgcataccccaatatttgtttctcaattgatgacttcgatgatacctttgatgcagttgttttatcagaccctgaacattgctactgtgttattctcaatgcacatgatggggcagcatttcctgaaaacactgaatcgaaaaatcctagctcaaatgtgctatctggggtaaacactgggagcaaacaagaaaaaccaccaaagagaactctcttttcaggctacgtcagctaccaaaacgttcgagaagcttatgatgctggcagatcaaaatttgagagcttattctcactcgggcatgaccgcactaaacttgataaactttatatgaggggccctgaaggacgtggagaagttgaagtagctgtttctggaatagcagatcagagccatgagagatcaaagaaagatccaggaaatagctttcgggcccttgtccatagtgcagcatctactgcatcaaaactagcaaagcatgcctacgaggctgcatctaccaacaaacgctttgatgatgagcttctgcctctaaaatgttgcttgatgtcagtatctcttccttgggactacattgcacatgacctgctgcacaaggttaaccccgacaggagtacgggacatcaatggatacatggttatggcaattacgagcaacatcagcaggagcctccatag

SEQ ID NO: 62655 - DNA, 2120 bp, Oryza sativa
  Clone ID: PAT_MRT4530_63973C.1
aactagtggatccccgggctgcaggtgccgtggcccgctatggagggcttggctccagcccgcaagtctgactcggaggggcgtgcttcgcttgtagtagcactggtcggacacgccgcagctcggctacagcctactgctccgtgtctctcgcctgaagcccgggcgtttgcgccgccttggtctccgtgtgggtgctcctcatcgcggtctgctcatggcgctgtgccgggcatttctggcccacccccgcacgtccacgccccgagcactccccctctttcttggcctcgatcgtgcttgtcacgccacctctgcccaccaagacgcttggccccccccgtccgtgtaccgaggcaggtctctgtggttcggataacaaacgagtttgaggctcactcctgcactgcaccacctctggctccactcgaacggtaacccccggtgctcggcatgaccctctaagcgcatggggttctggcgtcgactatggcgcgtaccccacctattgtgggtctccgccgtcctggccaccctcccatgttgcccgggactgtcccttttgctccggccccactccagggggccttgactactggcgtccctggacggcgccccggttgtgcccacctccatccccgggcggcgggctgccgtctcctctccaccctccgtcagaatggtacaagtcttgttcagaagttaactgtcatcctttaagtataaaactggatcctatctccaacagtagaattaacataaactctgcatctggaagagctagcaacgattctcaagcaccaagtgtacaacctcagaaatgtggacctgtggattctacagtagtaagcatggccctcaaaagagaacaattctccatcccaagtatgtgttctgaaagcttttcatcccattgcacaaaaagtcaggattctgttgtgaggatgagacccgatgacacccttgtgaggagggcattaatcagtgatagtgttaatggctgtgattctgttggaccaactgttgaatcgcattgccattctctcctttcgcagaattttgactctgaagggcatgcttctcatgtagtatcaatgtttggaaactctggagcaagactacattctagtgcaccatgtatgacaactgaagcccaggtgtttgttgcaccaagtagagcatatgagaactcatcatctctgaatgctgaaggcagtgatgctgtgatttcaagcatagcccctcaagtccacgcaccaagtattccccctcaaaattgtccacgaacgagtgtggcacctcacctctgtttaccaagaagtatggcgccccactccgtgtactgagaaagatttctaaggttcattcaacaaacatgcctgaagctcactattccagtgcagcaactatggttcctgtcatctgtaaacctccattgtttggcattacccaaaaagggcatggtgttcatacatcaagtatgatgtgtacaacaccaaatgtagttctccatggtcctgatcaccctgcaaagttggcagatacagagcgtaatgctccgtcactaataaatggggcgttgagaagagaggtacaagtacaacgcccccaatcaaggtgttgatgctagtagcatcatcacccaagcagcagatacactcgtggcgttatcagcccacggtgagaaaggctggtagaaccgtagaagagttatggttcatttgttactcaggtgtttgtcgctccactgtaaataagtggaggaatccatcttttcctccctttggcagcgcaaatttcaccttgttaacttcgatggttattctgcagtggttaagtactgttgcagtgttgcttctatactaacctggctggttactcaacagagattgtacattttgtacagttggtcatgctttttcacatgtgtatatacattgactggcatatttcatagtagtacataaacctgaaagttgctgaatgttcagagcccaagcccaagcttcagtttgtcaggttaacaaggctgtatctaacatgttgtcattgtgcttatctagttgagaatgaactggaaagtggaaacactgaaatcacaacttagaaactttacttct

SEQ ID NO: 62656 - DNA, 762 bp, Oryza sativa
  Clone ID: PAT_MRT4530_63974C.1
atggccgcctgcgcctacgacgtcgccgcgcgcgccatgcgcggcaccagggcgcgcaccaacttccccgtccccgccgccgccggcttcccggggggaggcggcggcgggtgctggccgtgggttaacatcccgccgcagggcgcggcggcggcggcgtcgcaccagcagccgctcaacacgctcctcctccacaacctcctcatgagctcctccccccacggctgcctcctcctgcaccacgccggccacggccacggccacgcccattcccattcccactcccacagccgcgcacacaaccccagtactcgcccacccacctccgcgccgccgccgcctccacctgccgccgcctcatccgccacgaccgcgccggccaccacgacaggcgccgcagcgacgtccgcgccgggagcggacgacgacgcgtggggcttcctcctgcgacgtgagccgccggaggcggggctcctgcaagacgtcctgcacgggttctacccgaccaggcggccgcacgacgacgcggggccggcgccgaagctggagcggccgtacgaggcgacgtcgtcgtaccgcgtgtcctccccctggggcgccgtcgaggactgcgacgacggcgacggcgacggcgacgacgactaccgcgggttcccgatgatgccgcaggggctcctcgaggacgtgatccagtgcccgccctacatggaggtcttggcggcgccgtcggccgccgtcggccgcgtcagccgcaggggctga

SEQ ID NO: 62657 - DNA, 310 bp, Oryza sativa
  Clone ID: PAT_MRT4530_63975C.1
aaaaaataaaaaaccgatctttttggcgggggaaaaagttttttaccgggggccttccataaaaagggcccaattttggtcggggggcttgaaaaaccattatggggggaaaaaccaaattaacgggtgggccccatgggaaaaccccccttaaaaaaggggggggtcccccataacgtccccttgggagcaacaaggttactggtgcaaattttcgggggtttcctcagcttgacttccccggctcgaggggtgggataaaatcatctaggtgggcccctgggacctccttgacaaccttccccccctt

SEQ ID NO: 62658 - DNA, 347 bp, Oryza sativa
  unsure (1)..(347): unsure at all n locations
  Clone ID: PAT_MRT4530_63976C.1
gctcgttttctcctctcttcaagtggaggcggcggcaggcgggtgaaaggcggcaggcggcggtgcaagaggggaggcggcgggcgacgggtggcggcggcaggtggagatggtgcagcggcggcacaacgggaggcagcatcggcggcgatggccggccctcccctccgccagatttggtgggaggggaggcagcagcggcgancggcgcctcccctccgctagatctagcaggaggggagacggtgggcttccgtggcccctncggcgagctctccatgggcggggaggcantaggttccgaaccancggcgacttcccacgacagcacangggatctcacaaca

SEQ ID NO: 62659 - DNA, 294 bp, Oryza sativa
  Clone ID: PAT_MRT4530_63977C.1
atgggagagggagggggtcctcaccatggggcgctggcgaggggcggcggccaaaagggcacggcagcaagtggtggcagcagcgggctcctcggggaggcgacatggacggcggcccgacggcttccgacgaaggaggaggaggggccgaggcacggcgcggcctgggagatgaagaaccaccactacaaagtgagccactcgccagtgccgtgcttgcacgggagctccgccggcaccagcttcaacgccatgcagacgaagatgctacaacttggtggccaaaatgcttga

SEQ ID NO: 62660 - DNA, 744 bp, Oryza sativa
  Clone ID: PAT_MRT4530_63978C.1
gagatgagaaggttacattaatggtacatgtacaccagcaagaaaggcctcatgccattaactgttcaaacactggctgaagctttcattgccgacgaacgttttttgtcgcttgatttcgctgatcttcacgcagtctatcgtcgggaaaagatggacatgaaagaacaagaacttgaagagatagcgggatacaagaagggcttgcacaagaccaagttgcttactgtggcacaatatattagacgagctttcctgaaatttcaaaacaagagtcataatggcctatacaattttaacgatcattacatttgtttcttgatctacccaaagtatgaaaccattacagtcctggaccccctgattataatcactggtcgtatagaaaatttctaacaatcctacaatatgtgtacaactactacaagggtggagaacaagagataaagctgctagtgcatacatattggccatgttacaagcaacctaaaggtagtgtcagatattacacaagcgaatctctcagggtacaggaccaaccaaaactttcatgcatgcagttgcctagaattgaacatcatactagctttgacgacgaaggcattaaaaatgtgcagcgggacctttgccacttcatccaccggcgagtgttgtcataaggttggacttttcttcgaccctgaaggcagcctagtgataagtgatgaatacaagtctcttcgggagtggaacaacacgatgcca

SEQ ID NO: 62661 - DNA, 1662 bp, Oryza sativa
  Clone ID: PAT_MRT4530_63979C.1
aattaacgtttttcgtttattacagcacacgatcagagatgatcatgttgctggccacttctaatctacacatattcaaattgtttacattacacctgattaacaccaccaaattataagtgcaactacgaattaaaaaatatgaaacttcgcactcttttatagggctgtttaaaaaaaactactccctccgtttcacgatgtaaatcattctagcatttctcacattcatattgatgctaatgaatatagacatatatatctatctagattcattagcatcaatatgaatgtgggaaatactaaaatgacttacattgtgaaacgaatggagtattaattagtttacagttacagcacacgattagagatgatcatgttgctggccacttctaatctgcagtgtacaaccagcttcttggcgaccagccgaataccagcattatttttgtagttgtacagttccacagagaagaacgcgtcgaccatgtcccctcgaaaaaacataaattccagctctgcgacatctgccttgctgaaatctttcttccggatgttgccgctagcctctttcaggtatatctctatcgcataggtcgcatcgtcgccgctgcctataatggggatgtttaggcgtacacaaggacgattcccgtattccttaatcacttgccgccattcagaagtgctcccaaactcccggaatgttgtcttagctatttcatcacaaaattctagaacttgtctgagattctcagggatgtcaaccactatgctcaactttggtcgaccttcactgttttgattcagagaaacttcataatggaccctcaaacctatgcaatgaagttgtagcggatcatcgttgtgcttgatacataagctccgttcaaattcgtatggaagaggattggtgcggaggccggaatttagacttcttttgcccaaacaagaggaaaaagaaatagaaacttggatgaactcaagtgaaatatcatttgggttgaggaaaccgccgcttagcagttctggaaaatgcctcaacccaccgcttagcagttttggaaaattatcctccaggaacagcactgtagaacaacacttgagaacatcaagattcatcctgacatcatacagactcctgtgaatttgcggccctagattaaagtaatctgccaaatttgccatcttcatgttccctgctctcctcccaaacgtctgggtaagcagaggtaaggtgtcgatcatcccctttggttccggaggcgaccgtccaatttcagcgaatgcttcccttattatctctgagtcaaacgaaatgatgttgtgaccagcccagattcgcccgtgcaggacgttgtggatgttatcagcgacgtcacagaagggcggggcgtcttcgagggcgccacgcgtgatgcccttacgttcgagcgcctccgtgaccaccccaaggtcggaggggcgcacgagcgtgacgaagggctccgcgacctcaaccagccgcgggcagaggaagatggacccgaactcgagtagcgtgcgcctctccctaggaccccatggcatggaggtctccacgtcaaagaaggcgatctctggctcctcctcgaccatcgccctactactcccctcaccctcctccatggacatatatgccat

SEQ ID NO: 62662 - DNA, 1838 bp, Oryza sativa
  Clone ID: PAT_MRT4530_6397C.1
ggttaagcaaaaacgatctcgatccgcgattttttaaatatccagaatgatccatcccggtaaagataagataagaactgctcgttagatagaatggattcaattttgatttggagttgcttcttttaggtaaaagaaaaaataagtaaaagcaaagaccttaattttactttacaggaaatgcgttttttttacttcatttttttctttcttttggtattcgagtcgaagaaatacgagaattctataactaccaaaaaactttcttttcattgcaatagtttaactagttaatagttaattagttttgttacggaaaaatggtatggaaaaatagattgctaatctaatatattaattaaattaattaaacgggaggttgatagtttatttgttggagaagagtcaattcttctcttatcatttcaggattggattgatcatctcgagtcctctgttgaggatggaaattccataataaataagtcttaagcaaacttgtttattcccttttttcgaactatatttcattcatatgatagaatatgggtttaaataaattggctctttgcggagtctttcccgataaatacttaatttcttttattcatatttctccatagatagcaaagcaagtttgaattagtatacaaaaaacgaaactaatgactattcatgattccatccatattggatcaattccctataacactttgcaatgaaattagaggaatgttatgttaaaacttcgtttaaaacgatgtggtagaaagcaacaagctgtctatcgaatcgttgcaattgatgttcgatctcgaagagaaggaagagatcttcgaaaagtaggtttttatgatccgataaagaatcaaacttgtttaaatgttccagctattctctatttccttgaaaaaggtgctcaacctacaagaaccgtttctgatattttaaggaaggcggaattctttaaagaaaaaaaaaaaaaaaggttaaaataagaagaaagtccaattttggaagatatgggaaaactcttttgattaaaagtctatcagaatcaatcgctcatattcgatttctatagaagagggaaatgctttatcgaaggaaataagaaaaaagggtatgttgctactcttttgaaagaaaaaagaataagaattcccgaagtaatgtttaaacctaaggatttcacaaatcaaagataaaggataaaggattcccgaacaagtaaacacgattttcaactgtctcaacaatagaattggaccggaataaggaataaaagtgaatttgttcgagatgaggcaaagaaaagagtttagagacgactcaaaaaatttcaaaggatttttttctttcaagtctgtcaatcaaaattagtcaacttgagtcatgagtataaatgaaatttgttttttctgtacggaaattaatgcaagtcatattctcgagccgtatgaggagaaaacctcctatacgtttctagggggggctttgtttatctacatctatcccaataagctgtctatcgaatcgttgcaattgatgttcgatctcgaagagaaggaagagatcttcgaaaagtaggtttttatgatccgataaagaatcaaacttgtttaaatgttccagctattctctatttccttgaaaaaggtgctcaacctacaagaacagtttctgatattttaaggaaggcggaattctttaaagaaaaagaaagaactttgagttaattgaagaatgcgttgggagctctatgagaactatgaattgcgtgagaaatttaattattgtggtgttgcagcgcctattaaaaaaaaaaaaaaaaaaaa

SEQ ID NO: 62663 - DNA, 1262 bp, Oryza sativa
  Clone ID: PAT_MRT4530_63980C.1
ctacctgcagtgtacaaccaacttcttggcgaccagccgaataccagcattatttttgtagtcgtatagttccacagagaagaacgcgtcgaccatgtcccctcgaaaaaacataaattccagctctgcgacatctgccttgctgaaatccttcttccggatgttgccgctagcctctttcaggtatatctctgtcgcataggtcgcatcgtcgccgctgcctacgatggggatgtttaggcgtacactaggacgattcccgtattccttaatcacttgccgccattcagaattgctcccaaacttccggaatgttatctcagctatttcatcacaaaattctagaacttgtctgagattctcagggatgtcaaccactatgctcaacttatttggtcgaccttcactgtcttgatacagataaacttcataacggaccctcaaacctatgcaacgaagttgtagcggattatcgttgtgctcgatacataagctccattcaaattggtatggaagagaattggtgcgaaggccggaagttagacttcttttgcccaaacaagaggaaaaagaaatagaaacttggatgaactcgagtgaaatatcatttgggttgaggaaaccgccgcttagcagttctggaaaattatcctcaaggaacagcactgtagagcaacacttgagaacatcaagattcatcctgacatcatacagactcctgtgaatatgcggccctaaattaaagtaatctgccaaatttgccatcttcatgttccctgctctcctcccaaacgtctgggtaagcagaggtaaggtgtcgatcatcccctttggttccggaggcgaccgtccaatttcagagaatgcttcccttattatctctgagtcaaacgaaatgatgttgtgaccagcccaatgggcggatgtgaggacgttgtggatgttattagcaacgtcacagaagggcggggcgtgttcgagggcgccacgcgtgatgcccttacgctcaagcgcctccgtgaccaccccaaggtcggaggggcgcacgagcgtgacgaagggctccgcgacctcaaccagctgtcgcgggcagaggaagatggacccgaactcgagcagcgtgcgcctctccctaggaccccatggcatggaggtctccacgtcgaagaaggcgatctccggctcctcctcaactagcgccctactactcccctcaccctcctccatggacatatatgccatcgtcttcgacaacatttgtg

SEQ ID NO: 62664 - DNA, 372 bp, Oryza sativa
  Clone ID: PAT_MRT4530_63981C.1
atggcgccgagcgccgtgcaggcgatgtcgtcgagccacggcgccgcggcggcgatggtggcggcggggcagaggcggcggctgacgcggctgctgctgaacgtgacggtggagcagagcctgtggcccgtccacgtcgtgatcggcgcggactgcaccgtggccgacctcgtccgcgccgccgtcgacgcgtacgtgcgcgagggccgccgcccgccgctcccttccgccggcggcggcggcgacgcggcggccgggttcgagctgcatttctccaagtactcgctcgaaagtctaaggccggaggagaagctggtggatctgggctctcgtaacttcttcctttgcgcacggagaacacctgctgcttaa

SEQ ID NO: 62665 - DNA, 218 bp, Oryza sativa
  Clone ID: PAT_MRT4530_63982C.1
ggatcaacaacaaacattctaaacaatgggagagcttgattattacagaggtggaccaaacaaaacaaaacacttagcttggcccaggcaagcgaccacacctacctgcccctccatagatcacatacacctcttattataacataaacgctccctcactcatatccaaagatagacacatagatttgctttgatcaccaggcaacaatctaacaacg

SEQ ID NO: 62666 - DNA, 195 bp, Oryza sativa
  Clone ID: PAT_MRT4530_63983C.1
atgtcgctgaaaagaatcgagcagtcggcggggagaactgagctgccagcacgagggaagtgtggtggtcggcactgggttgctggtccgactaagtgggtgccgccggttggactggagatgtccgggcggtcagaccggcaaactctaggtgggagccggtttcaggtgttgcttgaggccatgggtgtatag

SEQ ID NO: 62667 - DNA, 117 bp, Oryza sativa
  Clone ID: PAT_MRT4530_63984C.1
acatgggaccaaatgccatagcaggcagatccaacatatgcaatagtcgaagaccatgagcagtaggctgtacgcacacaacatcatcagtgaattcctttactaacttcattgttt

SEQ ID NO: 62668 - DNA, 950 bp, Oryza sativa
  Clone ID: PAT_MRT4530_63985C.1
aagttcaagttaagttataatgttctacagttgatcctgctggtggaaaaagtatatatcacagtccagtcggttagtagtgatggttcactagtaaggccgaaagttgttaagagtgttcactattgccctgctatggaggatgaaaatggtaacttgttggtcactgagtacgggatgtgtgaatacaaggatcaccaaacactctccatgcaagaagtgcctgaaaattctgcccctggacagctcccaagaacagtggacattattgtagaagatgacctagtagattcttgcaagccaggtgaccgagtatcaattgttggtgtttacaaggctcttccagggaaaagcaagggcagtgttagtggtgtgttcaggactgtccttattgcaaacaatgtttcacttatgaacaaagaagcaaatgcacctgtctatactcgggaggatttgaagaggatgaaagaaatatcaaggagaaatgacacatttgacttactaggaaattcacttgctccatctatatatggccatctgtggataaagaaagcagtagttctattaatgcttggtggtgtagagaagaatctgaagaatggaactcacttgagaggagatataaacatgatgatggtaggagatccttcagttgccaagtcccagctcctaagagcggttatgaacattgcccctttggctatttcaactactggaaggggttcatctggtgttggtttgaccgctgctgtcacttctgatcaagagactggtctgagcgatttcttgtggttaggtgagagaaggctggaggctggtgccatggttcttgctgatcgtggtgttgtctgcattgatgagtttgataagatgaatgatcaggaccgagtggctattcatgaagttatggaacagcaaactgtgacgattgcaaaggcaggaattcatgc

SEQ ID NO: 62669 - DNA, 380 bp, Oryza sativa
  unsure (1)..(380): unsure at all n locations
  Clone ID: PAT_MRT4530_63986C.1
cggacgcgtgggcggacgcgtgggatcaacccgacaccattcccagaaaaacaaatacatccgtattcagattgatcaacacagcaaacacaatcaccgtaattacaggttaagtagataatttggaagaacaagcgagaaatgtagacgtcgtactcgaggatgagctggctgtttgggtccgccgtcttcaccgtcctgctgagcgtgtaccctcgcgccatccggaacgcgcccgtgccgccgaccaccggccgctccatcgccgcgccgccgggcagcggcagcccgacgccgaacgccgccaccgtgctgcccttgtacggccgtncgtgaacacgaagtccagcatcgtcgtgaccgagccgtcngcgagcgac

SEQ ID NO: 62670 - DNA, 1537 bp, Oryza sativa
  Clone ID: PAT_MRT4530_63987C.1
ggtaagatcctctgctttgctcttctctgtatgcgctcccccgccgctgatggaagcttccgcctccacctccaccgcacgccgcctacgggccttcaggcggtggatgcgggaccacggcgtcgtctgcagcaacgcgctccgcctcgacgccgccgaggacggtggcggcggcgtctacgtgcgcgccctcgccgcgctccgggagggggacctcgtggccaccatcccgcggggcgcgtgcctgaccccgcgcacctccggcgccgccgaggccatcgaggccgcggagctcggcgggcccctcgcgctcgccgtcgccgtcatgtatgagcgcgcgcgcggcgccgagtcgccgtgggacgcctacctccgcctgatccccgagcgggagcccgtgccgctcgtctggcccgccgatgaggccgagcgcctcctggccggcaccgagctcgataagatagtgaagcaagacaggcagttcatatgtgaggactggaaagagtgtattgagccactcattttgtcaggagaacttgaggttgacccagatgattttagcctggagaattatttctctgctaagagtctactttcgtcgaggtccttccgaatagatagctatcatgggtctggaatggttcccctggctgacctttttaaccacaagactggtggggaacatgtccacttcacttcagtgttagaagcctcggactcagatagtgaagatggtgaagatccaaacaatgcttctgctgatgaacagtcaactatagaaaattctgccgacatcccttcaggagatgacgatgaagatttggaaatgattgttgtgagagatgtcaatgaaggggaggaggtttttaacacatacggtaccatgggaaatgctgctttgcttcatcgatatggcttcacagagatggacaactcatatgacatcgtcaacatcgacttagctctggttactaagtggtgctcttctaagtactcccgtcgatatgcaagagcaagggtatcactctggcataatctgggctattcaggttgcaccagccaagatgctgactactttgagatttcatatgatggagagccccagcttgaacttttgatcctgctttatatcatctccttgaagtctgatgcttatgacaagctggccagcgtggctcatgatctgattggtgatgatgaggtcgacagcattagtagtgtgcttaaggttgtcagagtaacaagctccaatcaacatccagatattagcgggcttgaaaaattgcctgatgttaagaagctattgcttaatgagagcgtttgttctgcacttgtatcccttgttgacatgagggagagcctctatggttcaaacactttggaagatgacaggcaaaaactgcaagcatgctcttctgtcaacgaaaggaatctctatcattctttggtgctgcgggtgagcgagagaacaatacttcacaaattgaagaaacatgcatctagttggtcaaagaccaagaagaggaaacagctctag

SEQ ID NO: 62671 - DNA, 1083 bp, Oryza sativa
  Clone ID: PAT_MRT4530_63988C.1
atgggcggcgaggcggcgcagctcacaccggccaggatcgacttctccggcgtggacccggcggcgccggggaccgggcggtgggcggaggtgcgcgccgaggtgatgggcgcgctcaccacccacggctggttcgacgcgcactacccgcagctcacgccggagctccgcgccggcctgttcgacgccgccgtccggccgctcttcgcgctccccgtcgacgccaagcgccgcaactaccacggccccgagaagcccttccacggctacctcggcggcctcccgggcctcgactcctacgagagcctcgccatcgttgacggcctcaagcccgagagcgtccgcgccttcgccgacctcgtgttgcccccggcgccaacgacgacgacggcttctgggctcggcgtggcggagcaccacgaggcgcagggcgagtccttctggcacctgttccggatgtccgagtacagggcgcccaattccgacgagaaggtgaccggtggctccaagtctgggtccccgcatcaccagctactaccgctcgccgccgtctcattgtcctccatcgtcaattgcagcgctgcccttccgtcgtggtcatcagctgccgctcatcctcacccgccagcaccagatctggtagcatgcctcgacggtgatggcagcggtggtcgttgtcatcgcgcccgcggctggcgagagcacgtggacaccaactggctcagcatcgtgtgccagaacgaggtgaatgggaacgagatgcagaccagggacggcgagtgggtcctcgtcgagccgtcgccgacgtcgctcatcgtcaacgtcggcaatgccctccgggcatggacaaacgaccgtctgcacgcgccatttcatcggataatggtgagcgggcatgccacgaggtacacctgcatgctcttctcctcccccaatttcatgatccaggtacctaacgagctcgtcgacgagtgccaccctccccgtttcaagacgcatgacaacgacgatttcattcgcttctgcgtttctgaagaaggagctcgccacgaggataaactcaaggccttctgtggcttatag

SEQ ID NO: 62672 - DNA, 1458 bp, Oryza sativa
  Clone ID: PAT_MRT4530_63989C.1
ggctcgtgggtgtgtgtgtgttcttgttttttgttttttttttttttttttttttgactaactaatatttttttttcttataaaagagtttacaacagtacaaccacgaagatcagcactaccattactgattttgttaacatagagtgatttatcatgtgtgccagacaaacaacagatacattcatacatagcataacttacagcacatgatacagactacggagaacggttaatcttaaaataaaaacaaaaaaacaaggaggcaaagcttattttgcctgggattcatctaaatgcagttgtgtgcagaaggagatcatgcctgtgcccttgttggtggatttgcatggaaagctgattgtctattttgacctcctaccagatttaatgaaagagaagtagacactgtctcttgattggactctcctatgctgagcttcgacatgccaacaagctcatcaacgttgattgggctctttgaatgaactggaacaggcttgacaatctcatgtgtttcttgcacaggaccatcttcatctttctgattttgccagaaaggaaccgagaattgcaaaaagggcgagaaataagctggaacaatcactggataggtcgactgcaaattatctggcatgatagcagaagcggaagagctctctgcaacggcagaagtatctgactccatagaatctacctcctcctcctccctcggtggaggtagtgctggttgatttaatacttgggtctctggttcttgacctccaggaagtggtggaaggtccatagactcatctggcaccatgtcaaaaaggctagaccttcttttccttctggtcatattggattggcgtataaaatatttctgagcatgactggctacttgagtaggtgttcttgagaccacgaaattacgagagattcctcgccaatcacctttgccaagcttttgcaatccaagcaaaaacctccggtgttcttcttcagtccaaggaacacccttcttgcggtcgcgggtggcggaggaggagccctggacgaagtcgtcggaggcgtagccgtcggcggcggtgggggcggcgtcggggccgtcggcgggggaggcgccgccgctggtggatccggcggcggaggagaggagggagaggttccccatgctggcgctcttgcggatggagccatcggtgaggcgcaccccgaagatcttgaccccgcggttggggcacgtccgcgagttgtgcccgttgtggctgcagtgcgagcaccgcctcgtcatccccccctccgtccctccaccttccaaagcttcccttcccccacctatggagatcgatcgatcgatcgagtggagacggagatggtggtggtggagacgacgaggagagggaggggggagaggacgcgtgggcggacgcgtgggcggacgcgtgggcggacgcgtggaggcacgcgtggggg

SEQ ID NO: 62673 - DNA, 198 bp, Oryza sativa
  Clone ID: PAT_MRT4530_6398C.1
atggcggtggagagggcagtggcggcggatttgaagatggggagggtgacagaagtggatttggaggtatgtcatgagggccttcgcccgacctgccgaaaccgtctaaaccatcaaacatcggctaaatcccagatggacaccaaaggcgaaaccaaggggcgcagcccttgggcgaagccggatgacgaagactaa

SEQ ID NO: 62674 - DNA, 1643 bp, Oryza sativa
  Clone ID: PAT_MRT4530_63990C.1
atgggcggcgaggcggcgcagctcacaccggccaggatcgacttctccggcgtggacccggcggcgccggggaccgggcggtgggcggaggtgcgcgccgaggtgatgggcgcgctcaccacccacggctggttcgacgcgcactacccgcagctcacgccggagctccgcgccggcctgttcgacgccgccgtccggccgctcttcgcgctccccgtcgacgccaagcgccgcaactaccacggccccgagaagcccttccacggctacctcggcggcctcccgggcctcgactcctacgagagcctcgccatcgttgacggcctcaagcccgagagcgtccgcgccttcgccgacctcgtgttgccccgcggcgccaacgacgacgacggcttctgcgagatcgtcaatggcgcggcgaagcgcatcgcggatctggaggggatggtgcggcggatgatcctggaagggctcggcgtggcggagcaccacgaggcgcagggcgagtccttctggcacctgttccggatgtccgagtacagggcgcccaattccgacgagaaggtgaccggtggctccaagtctgggtccccgcatcaccagctactaccgctcgccgccgtctcattgtcctccatcgtcaattgcagcgctgcccttccgtcgtggtcatcagctgccgctcatcctcacccgccagcaccagatctggtagcatgcctcgacggtgatggcagcggtggtcgttgtcatcgcgcccgcggctggcgagagcacgtggacaccaactggctcagcatcgtgtgccagaacgaggtgaatgggaacgagatgcagaccagggacggcgagtgggtcctcgtcgagccgtcgccgacgtcgctcatcgtcaacgtcggcaatgccctccgggcatggacaaacgaccgtctgcacgcgccatttcatcggataatggtgagcgggcatgccacgaggtacacctgcatgctcttctcctcccccaatttcatgatccaggtacctaacgagctcgtcgacgagtgccaccctccccgtttcaagacgcatgacaacgacgatttcattcgcttctgcgtttctgaagaaggagctcgccacgaggataaactcaaggccttctgtggcttatagcctataggcaacatcagaatctgcagctggttgatccccaataaggtgcactatcaaacaaagtaacctggacatcttgcacaggccaaataggatatcggttttgttgcctggccgttttttttgttaactttccggggaaaaggaggttttcccatttttacccccccccccccccccggtttgggggccgtttgcccccctttgtatgtgaactttgttcggctatacttgtacttcatcgctcaggtcaaacaaacaccttgcttccccaaaaaaaaaaaaaacctgactcggagtgccgatgacagggcgcccaattacgacgagaaggcgaccgggtacatcgaccatcaggacaccaactggctcagcattgtgcgccagaacgaggtgaatgggaacgagatgcagaccacggacagtgagaggttacttgtcttgccgacgcttacgatcataatcgtcaacgtctgcaatgcccttcg

SEQ ID NO: 62675 - DNA, 574 bp, Oryza sativa
  Clone ID: PAT_MRT4530_63991C.1
gactccaccactaaatttaggacattcaatccacaggcttataaatcatataagccagaaagctgacttaaaagcctaaaccaataagcctaaccttaaacaaagaaggcctatagtctttttatgcctttctcagtcaaatagtgctaacaattactccatttattaggtttaaataactgaaaagaaacaccacatccatttacaaatatttcccccacttcctctaccagtgtcccaataaatacatttgaagaaaataacaaattgatgcactatctcatcatgccatatgcatgtaccgccatcttccttccctcctctcaactcccattctgttatctcctctactattttcaaatcaacaacctaatatattaaaaaaaattaatagttacatagctaaatgatgaattatatatatatttctatttattttaattgttactttatttataattaaataaataagtcaagatctatattacatatatgctactttgtaaaattcgaaatacgtcatagataccctcatcttatcctttgcatagtaactacatatgaatgaagcact

SEQ ID NO: 62676 - DNA, 254 bp, Oryza sativa
  unsure (1)..(254): unsure at all n locations
  Clone ID: PAT_MRT4530_63992C.1
cgcacccgcgccctccagtgggtgcagcgtgacgagagggggtcgagcatcccgtcaccttcccactcctcatttgctcgctcggtcggtgcctcangagcgtcgtcgccgtcgtcgncgccgttgcgcaacgacggttgctgctttcccctcccttcacatcaccgggacgatggggacgaaggtccggcctgaagggagggcttggggatgagggatggattgcctccactcctcttctcgtcgtcggccgn

SEQ ID NO: 62677 - DNA, 286 bp, Oryza sativa
  unsure (1)..(286): unsure at all n locations
  Clone ID: PAT_MRT4530_63993C.1
gccattgccattgctattaggtacgttggtgtagtcgcgccaacgtcgaatgagctataattatcgtctatcccggctataaatctcgatctccctgcacactgtgtgtgtgcatgatctcatcgtcttctcctccagctcgatcgatagatagatagttcgagctaaactgattgatcttgccacgaaaatttctttggttgttagttgttcgggagatgatgaagaggatggtaatcttgaggcggtgcgagccgccgccgncgcaacctgcgnggggttgggt

SEQ ID NO: 62678 - DNA, 1580 bp, Oryza sativa
  Clone ID: PAT_MRT4530_63994C.1
ctaaaaattatttttagtcccggtttttaatgaaaccggcactattatagattttggtcgatcaatcaaaaatggtttctccacaagtgcaggttgcccccagggcaagacgatgctgtagatggccccgagagcgccgccgatcccagcgtatccgacgttgtcgatggcctcatgcaggggcgccggcgtgagcggcaggaacagggtcgtgtacgtctggacggaggagaccagcgacatgtagacggcccacgagatcagcagcggcagccgccacgggacggcgaggaagaaacgagggtcggggagcacaaggcccaagcagcagattattatcatgcatggcacaacaccgaagcgcaaccacagcatgtcggaggacacgtccggccacgcctccccgactgtcagcagcggcggcggcgccgttgtcgccatggtaactggtggagaaaccatctttactcggtcaccacgtgaggccgagcggcagcggcagggaggcgggcagccgagcaggcggcaggcgaggccggcgaggcggcgggcggccgacgaggcgagtctagcgaggcccgcgaggcggcgggcagccgggcgggcgaggcccgcgaggcggcgcgcggccgggcgggcgagtccggcgaggcccgcgaggcggtaggcggccgggcaggcgggcggcgaggcccgcgaggcggcgctcctcgggcgggcggtgaggcggcgggtggcggtgctcccaatgcggcggcgctccccaggcggcggcggagcccgaggcggccggcgggaggccggtgaggcggcggacggtcggcgcccgatctctgtgatgtggttttttttcctgatcggaacacgactgcagcagcatatcccttgccgctgttcgtcgggggctttcttcttggcgcgcgtctttcttggcaatgctgtattgctgtgcctgtgccctgtgagcctctgacctccgttcttgtttgagttgccaatcaggctgtattgaatcagccatggataagcttgaggctttagcccttgggagcagccatagcccaagtacgcgacgccaacctcgccgcggcatggctcgagtcctgctccgacgagagcctcctcctggccaaatgtaggttcactaagaggatttgggcggaaatccagatatggacgcacatggacctccaaatgggcaaatgaaatgattgcccctcgatcgaacatcggtggaacctcgtcgttgaatcccccaacaccccaagagcccctctgcgaactctactgatgctagtcacctgggagatctggggggagcgtaatgcaaggatctttcgaagcacagcctcaacaccagcctcaattcttgcaaagatcaaagaggaaagcagagcttgggtcaaagccggagcggctaggctgcaggagttcggatttttgggagatatcacctaaagaacttctctcctgcgggccggtcttctgactggccctgtacatactttgtataattttttccctctctattaatatatgaggcaaagcttttgtcctcctttcaaaaaaaaaaaaaaaaa

SEQ ID NO: 62679 - DNA, 247 bp, Oryza sativa
  Clone ID: PAT_MRT4530_63995C.1
gtctccttgttttgagaggacattgataactcactcggggactgctttaatgctttagccatattgctgacattgcccgagcctgatcatcgccgaattattgatctaaacttgcgcatatgttcggtctatgagttggtgtctaagacttcagatgcacctccataccgcgcttaggctatttcattatgctagtcactcatacaaagcctaaaatatgaccacgattctttgctggctggttaag

SEQ ID NO: 62680 - DNA, 237 bp, Oryza sativa
  Clone ID: PAT_MRT4530_63996C.1
atgggttggattgggccaactggggggtcggccgaaccctggctggctcccctggcccacagccttcttcaggatgctgacatgtgggccccactttatgcgaccgtcaacaagtatcacctattgctgttggaggcgatgcgccaatgccggatcgatgatctgtttaggaggccgtcggcttgttgttgtcatgggaacatggaggaggcggtggggagcaccgaggctgattgc

SEQ ID NO: 62681 - DNA, 2616 bp, Oryza sativa
  Clone ID: PAT_MRT4530_63997C.1
atggggttcctcaaccttgtgggcaactccattgggtgctcggcttccggcgagcggctcgtctcggcggacagggacggcgacctgcaggaggcgcgcgcgctgctcgagtacaacccgcggctcgcctggtactccactttcggtggccgcaactcgccgctgcactacgccgccgcgcagggtcaccatgagattgtttctctgttgctcgaatccgaagtcgagatcaacctcaggaattacaggggccagcggatcctgtctggtgatcattcttgaatcgaatgcggtttgggcggcctcgtggattgggaaatttcagggtgaagtcttcgatgccacgcccccgtctctccaccatcttcgccggcgcggccacctccacggcgccggccccggcccccgcggcctcgccgtcggcgcgcgcacccctgcggcgacggcgacggctcggccccggtcccggcgcgcgccctcaacgggatcctcgccgcgctcgcccgcgccccgccttccgccgcctgcggtgacgcccccgccctcgccatcgagctcttcaagcggatggaccgatgggcctgcccccgccactctcctcccaccatccacacctacaacatcctcatcgactgctaccgccgcgtgcaccgccccgacctagggctcgccatcgtcggccgcttgctcaagaacggcctggggccggatgatttctcgtactcgctcatctacggtttcgttaaggatggggaggtggacaaagctcactgcttgttccttgagatgatggagcagggcgtattgccgaagatactgatttgtaactcaattatcaaagagctttgcaagatgaaggaaatggacaaggccgagagcattgtgcagaagatggtcgattcgggtattgcaccggacttgtttacttatagcttgattattgacgggctgtgcaagtcaaaggcaatggacaaggctgagagggttttggagcagatggttgaggctggtactcgacctaacagtataacatacaatagcttaatccatggatattccatttcggggatgtggaacgaatcggttagagtgttcaaacaaatgtcaagttgtggtgtcatcccgactgttgataattgcaactcattcattcacgctctcttcaaacacggtagaaccaacgaagcaaaatgtatttttgactcaatggttctgaagggccccaaacctgatattatctcctactctacgatgcttcatgggtatgctactgctactgacagttgtttggctgatgtgcataatatcttcaatttgatgctaactaaaggtattgcacccaacaaacatgttttcaacatactgattaatgcatatgctcgttgtgggatgatggataaggctatgcttatatttgaagacatgcagaacaaaggaatgatccctgacactgtcacatttgcaaccgtgatatcttctctttgcagaattggcaggttggatgatgctctgcacaaattcaaccacatggttgatattggtgtaccaccgagtgaggctgtttacggctgtctgatccagggttgttgtaatcatggtgagttggtaaaagccaaggaattgatttctgaaatgatgaacaaggatattcctcctcctggtgtcaagtatttcagttcaataataaacaacctgtgcaaagagggaagggtagcagaagggaaagatatcatggacatgatggtacaaacggggcaaaggcctaatgttgttacttttaattcattgatggagggatattgcttagttggtaatatggaggaggcatttgcattacttgatgctatggcatcaattggcattgaaccgaattgttacatatatggtacgcttgttgatggctattgtaaaaatggaaggattgatgatgcattgactgtattcagagacatgttgcacaagggagtcaagcctacaagtgttttatatagcatcattctccatgggttatttcaggccaggaggacaactgctgcaaagaaaatgttccatgagatgattgaaagtggaacaaccgtgagcattcacacatacggtgttgtgcttgggggactttgtagaaacaattgcaccgatgaagcaaatatgctgttggagaaattatttgctatgaatgtaaaatttgatattattactttcaatattgtgattagtgcaatgttcaaagttggcagaaggcaagaggctaaggaattgtttgatgcaatctctacttatgggttggtgccaaatatacaaacctacagcatgatgataacaaatcttataaaagaagagtcatacgaagaggctgacaatctctttatatcagtggagaagagtggccatgcttctgactctcgtcttcttaatcatatcgtcaggatgttactcaataaagctgaggttgccaaggctagtaattatctgtctataattggcgagaataacctcactcttgaagcttcaactatttctttactggcttctctcttctcaagggaaggtaaatatcgggagcatataaaattgctccctgcaaagtatcagttttttgagggagcctggcaagattaa

SEQ ID NO: 62682 - DNA, 1368 bp, Oryza sativa
  Clone ID: PAT_MRT4530_63998C.1
atggctaacaagggagggtatctaagcgtgttagcgcccattgaaactacaccaaccatcaagcaagaccacattacttccaatgctgacctacaagacaggattagccagttgccagatgatattttgctagccatccttgatggactcaatgtccgagatgctgcaagaacaagcctcctctcaaagcgttggaggccactccccactatgatatcacatcttacaatagatgtttctgactttgatcccaagagcatgtccagcttctctgatgatgaactgggtcggatcaatgcaacagtggttaaggcaacgaagagcatattggcatgcaggaagtcaaatgagcacactatcagcctcctatccatgagattctacttgagagacgatgactgcatatcctttggacacactgttggccacgttatggcaacccaaaaagttgagatgattgaatttacaattttgacagagaaagatgacaatcagtgcattgacgatgatttcatcgtctatgggagacgttttgcgttgttcttcagttattgtccaaatacattcggaggtctcacaggactccaacttgagaatttgagatttggtgaaccagaaatcattgatgtcctcaacacttgcaagcgattaaactatttgcgtttgtataactgcagctcaggaatttccacttttttggaagttgaacacttgcaactcagtgaacttagtattattaattgccgttttggaataatcaaacttagttcactcccaaaactcacacggatgatctttggtggttggatagctttccaagatccactttcttttggacatgttccattactggagtctgtaaccctcaccaatgttggtcttagttggcacaatgcggtgaagttgagcgaatttctgagcaatatctctataagagatctgactttagattttaatagtgaaaaggtatgggatcatctctgcgaaatagagacggatgatgagaggaggaaagcctactcatacagcgagaataagaacgcggattggaatgcgtctgcgtcagatttcaagaaccacagcctgtcaacgttagtcatgtttggctttcagtcgaacgacgaaaacttgattaggtatatcagacttgtcatggatgcagcggtgaaccttgaggatatattcctgtataagaggatggcgtgtgaaaagtgcaagggcaagaatccaaggcccttgaggtacccgtcgaccaagaaacagagacaggcactgaggaacagaattgctctggggacacattcgcttgctacgatccatttcccaactgtattaagggctaatcactatgcaaaactgttgtattaa

SEQ ID NO: 62683 - DNA, 537 bp, Oryza sativa
  Clone ID: PAT_MRT4530_63999C.1
atgcaggcaggcgtgggcagcggcgtgcgatcgtggtggcgtctggagaaggcaggcgagggggcggcgcccggagcaggcaagcgagggcggtggcgcccattcgtgctgggaggggcgatgccctatagcgacgggaggagcagcgcccggccgctgcagcaagggcgacgcccggtcgcggcgggaagggtggcgtgtagcaggcaggcgacgacggcggcatccagggcaggaggccacgaggcgagggcggtgtctcccattcgtggtgggaggggtggcgcccggtcgcgacgggaggagcagcgctcggtcgctgtagtgctgggaacgccaacgcgccgtgggagctcgagggcacacccagtgcgcggccgtggcgtcgagctcgtgttccggccgccatggaccatctcgagtcgagcttcctcgccaacacattcaactgcctttgaggtccaaaaccccctaaatagccccaagatccatgcagcgtggtgggagatcggcgtcatctttcccagctctggctga

SEQ ID NO: 62684 - DNA, 669 bp, Oryza sativa
  Clone ID: PAT_MRT4530_6399C.1
atttcatacagagaggttatgaggtgagcatagctagctaggagctccagcaatgaatgatgtaaatatataattctactacaatccgcgagaaacggtgactgtttcgattcaaggggagcattgtgagtagctgtgactgtttcagagcatgtgcattatttcagctgctgcctctggatagaacgcatagttggccagttgggatcgtttctgcccgatcttacacgtttgtctgatgatgaatggagccagcacgtttgtctgtcacggcacgctgccgtagtgctgccccatcttgccggcatcctgtcccggttgacgcaattctgtaattcactgcagccgactaccaagtttagttgtagagttatggattttggtctgcactgtaagatgggcactactggttacttcagctaacaagtactacttgtgtataggctgggtttaatataaatctattatctaaaaaacaagtactactggttctggtctgtttttatacttgttacttcagctaacaagagatgtctagttgtagtgaaatatatattccctccacctaaatttttcttactattttattttcctatttgtaatttctatgtatccaagacttgaatgaagagagtatatctttgtttagcaacaaaaaaaaaaaaaaaa

SEQ ID NO: 62685 - DNA, 483 bp, Oryza sativa
  Clone ID: PAT_MRT4530_639C.1
cgggctgcaggaatcggcacgagggtgtgttttgggagcaagagcagatggctccgatcatagatacaaggatggagattatgtcccgctctacgccaacaaggtcggccctttccacaatccaagtgagacgtatcggtactatgacctacccttttgtgcaccagatcatccaaaggacaaaagggaagcccttggggaggttctaaatggtgatcgattggttgatgcaccatatgagttgaatttcaaggaagacaggaactccaaggttctttgccagaaatcattgtcgaaggtggaagttgcaaagcttcgagatgcagttgcaaaggattactacttccagatgtactacgatgacttgccattatggggattccttggtaaattggacaaggataaggagcagggcaatgcaaagtacctgctcttcaagcacatccactttgacataatgtacaacggtgatcgtgtcataga

SEQ ID NO: 62686 - DNA, 396 bp, Oryza sativa
  Clone ID: PAT_MRT4530_63C.1
atgggggagctccccgaaacggacctcgacttcgggaggcttgtcgacgaagaggaggagcacgacgaggacggggttgcggtcggggtggctgtgcaccacgcggcgccagcggcggactgccatggcctgtggcgattcttggagatgtggtatacgggtggtctagccgacacatgcgagtacaaggaagtagctgaagctaaacttacatataaacaaaacctatgttacaaagaaattgcgtggcatgatcttggtgtcttcatgttgatgtatgatgcgaacaatggttctatctatagtaggcatggtcacattaacttatgcaagtgccccatcttcgttgtcattgtcatcgctgtagtccgtctcaccatctctactagtgtttga

SEQ ID NO: 62687 - DNA, 609 bp, Oryza sativa
  Clone ID: PAT_MRT4530_64000C.1
atgggcacgtctagcaaaaccatgcacccacagcccaccatggctgacgtcagcaagggaggggaggcgccggcatgcgggacccactggacagaggcacaggagagagggagagggggcggctggcaggcgggacccaccgggcagcgtcacaagggggggggaagcggcgaggcgcccggcatgcgggacccgcgggtcagtgactcacggagagagaggggcggctggcaagcgggccccaccgagcggcggctcatggggaggaggagacgcccggtcggctcggctcggcctcaaaccggccgaccggttatggcgaggtcggtggcgcgcacgcacggtcgccggcgacggcaaccggaggcgcgggaagcggcggcggatgacggcggcgcgaaggcggcggcacacagccgaagcggcggctcggcccggcacggcgctaggagggagagaaaggggaaaagagggggaggggcgcctcaccgcgagttggccggtgtggggggaagacgacggcgaacggcgacggcgagcgaccggggaacggcgacgataggcggacgagctccgagacctcctagggaacaagatgggagggattag

SEQ ID NO: 62688 - DNA, 420 bp, Oryza sativa
  Clone ID: PAT_MRT4530_64001C.1
atgagtcagcggctcaagagagagagggaggggcgccggcacgtgggccccactggcagtggcacaaggcgggaggggcgcggctcacggggaaaggaggaaggcggcctggctcagctcggcttcaagccggccggccggttatggcgagggcggcggcgcgcgcgcacggtcgccggcgacggcaaccggaggcgcgggaagcggcggcggatgacggcggcgcacaggcggcggcacacagccgaagcggcggctcggcccggcacggcgctaggagggagaggaaggggaaaagagggggaggggcgcctcaccgcgagttggccggcgtgggggggggggaagacgacggcgaacggcgacggcgagcgaccggggaacggcgatgataggcggacgagctccgagacctcctag

SEQ ID NO: 62689 - DNA, 351 bp, Oryza sativa
  Clone ID: PAT_MRT4530_64002C.1
atggaggcgcaggcgaacgtcgccgccatgagggagcagcgccaggcttggaggaggccattggtttccatcgggagatgcagatgggcctcgttgccttgctctagcgccccccatacaggagcagtgccggagcctggaaaaggccatcaacttccacagggagacgcatatgggcctcgtcccctcactcccaccaagagccccgccgccctaaagccccaccaccgccgcgtcctccctgaccagctcgtccccttcgccgagatcaacgctgccgcgctcgcgcaccgcctgcaacggagagctcatctactagcgagggcgagcagactgctcttgctgacctag

SEQ ID NO: 62690 - DNA, 275 bp, Oryza sativa
  Clone ID: PAT_MRT4530_64003C.1
gccgccgccaccttgcgcctcttcggcgacggcggggcaggggcgccgtcgtcgtgaatgactgttgttgttgttgtcaccgctggcgtcagagtaaagtccatcatcggtccctaaacttgtaccgttgtgtcatcacggtccctaaactcgcaaatcgaccgttcaggtcctcaagcttgttcgactgtatcatcccggtccctaaacttgtagattactagtttagttcctccaacttgttcagttgtgtcaccccggtacctaaacaggac

SEQ ID NO: 62691 - DNA, 209 bp, Oryza sativa
  Clone ID: PAT_MRT4530_64004C.1
ttgtttttatgcaaacgagcaccacacaccagcggcggggagtagtcgatcgatcgtgagcacacacgaccaagatcgagatggcccgtgcacagctggtgttggtcggcctcgtggcagcggctctgctcctggcgggcccacacaccaccatggccgccatcagctgcggccaggtcaactccgccgtgtcgccctgcctcagctac

SEQ ID NO: 62692 - DNA, 647 bp, Oryza sativa
  unsure (1)..(647): unsure at all n locations
  Clone ID: PAT_MRT4530_64005C.1
cnnnnnnnnnngaattgtatnngantcaanntagggngaattgggttcngggnccccccnccaatttttttttttttttttttttttcaagttanangtncnactcnccgcggnanaatccaatcnaagcgaactatnaattcatcnnccnaaacntacatntntttcaacacaagcattatttgtttatttcatacggnaagccgtccatccatctncaacagatacccnacatncagtntngtatnaacgaaaaccnttcnccngccaaaattataacggnataatccntctctaaaattcncttagtnaaggaactacaacaaacaggaaccntgttggggattctcnttcngaaatcatatgcctctactccaatgcanaaaattgatcaggcaggcacttgtttcacagccaaaacacctgtganntgttcatcanttgctggtgctaantggaanggtttnctnctggtaataaacagggtcncagaaaggcccaaccnncggcaatgcngcctgggtgcccccnnnaccaaaaacccaaattctccnctccggacncctcggataggtcccctgtctccctttntttccgnntctntattttaaanggggaggcttcantngntnggtccnaaaggtcaa

SEQ ID NO: 62693 - DNA, 225 bp, Oryza sativa
  Clone ID: PAT_MRT4530_64006C.1
atgagcattaccacttgtgcaaaggagggaattaaaagcagagaagaagaagaaacaacaacagcagcagcaacagcgaaagggagcaaacgggataatgttaagccagtaaagggtctattcggttatcggggctacgccaataagagaggctgcaacagccacaacaacaatcgcagcttgccgagcagactcaaaatcggcttgtttcgaatacatgatata

SEQ ID NO: 62694 - DNA, 426 bp, Oryza sativa
  Clone ID: PAT_MRT4530_64007C.1
actgtcaagtttcatcactgaactccatgaagatgcatggcaacagatcaaaaataggattagagcaaaagtgccttcatcaaacttcatcgttaaagaaagcagataacctagcgaatcttacattcccacctatgatcctctttacttacatacatgtcgaactatcctagtgtgtgacgtatacatggctgatggctcaaacatttgctcttgattggaatgcgcagctcttgaaaaattttcgtgcgtcatgtttgcattcaataatcatgagttcatgatcctccaaatctgcaggacctctacatatcctcattcctcaatgattcattgataatatcctcatcgccgtcactgttatcgtcctcgttttgagaggtaaaaatgggagtaaggtaatgctttgccagtaaagcgaaagag

SEQ ID NO: 62695 - DNA, 1038 bp, Oryza sativa
  Clone ID: PAT_MRT4530_64008C.1
atggacgccgcccgcgcctccctcctcttggccggcggcctcgccgtatccacctccacctccgccgtcgccactgccgcccaaaccgtctcgattcctcacctatcgccgcacacccgccgaaggcgacagcgccgcttcctccgcctggcctccgctgcggcgtcgtctcccccgccgctccccgctgcttcggcgcagccgcattgctctaggtgggtcgtggtgatggagagaccccccgcgccagcgggaggcggcgaggtgtcccgtgcggaggccgtcgaccactacgtcgccacactggccagggtattggggaggttgaaaggatcgtgcagccaggaggaagcacagatgcgcatatacgatgcttcgtgggatgggagctacgagttcagctgcgagatcgacgatgaagcgtcaagggaccttgcgaaaatgcccggggtattagctgttaagccagatacggataaggttgatatgtcagagaaggataatcatggctcaggcctctcagcagctaacctaggaaatttcagtgatgctgtttccaatcactcttcttctagtggggaaaatgagttttggcttgtgcgaatggagaagcctggggttgaagttgtgacaaaggcacaaatggtggatcattatacccaaaccctcatgaaagtgttggggaatgaaaaggatgcacaagtcagcatatatcacatttcatgggagagggattatggcttctgctgtcacattgacgaagaatgtgccaaggagctagctggtgatgacagcttcaaatcgtctgaagctactcaggctgaagtcaaaactaaaaggctttttgttacaggtctttcattttatacatctgagaaaactttgcgggctgcctttgagccttttggtgaactagttgaagtgaagataataatggacaagatatcaaaaagatcaaaagggtatgctttcatagaatacaccacagaagaagctggaggtgctgctctgaaagcaatgaacggacaggtaacctga

SEQ ID NO: 62696 - DNA, 300 bp, Oryza sativa
  Clone ID: PAT_MRT4530_64009C.1
atggatgtagcggctgataagacaatccaaatcaatacacgtgatgcacaagttctgccacggccgcacggcgtcgtcgtcgtcaagcgcgagtatgatcttgtccggcacagcgctacagccacgatcgaatttactttcgaatttcgaaagatctcgttgtgtatacctatggcaccaatcgatcttgctcgctgccactgccacttgctgcacgcactgaaagggagacgtagagctgttcctctgaaaatgaccgataaatccacgaaacgattcggtttcacccgtaacttgaca

SEQ ID NO: 62697 - DNA, 786 bp, Oryza sativa
  Clone ID: PAT_MRT4530_6400C.1
atgacgtccaccgttccggcagcggcgacggcgacggcgagccgcctcatcctcgtacacggcgcgggccacggcgggtggtgctggtacagggtcgccacgatgctgcgcgccgcgggccaccgcgtccacgcgcccgacctcgcggcgtcgggcgccgacgcgcgccggctgcgcgacgcgcccacgttcgccgactactcgcgcccgctgctcgacgccgtccgcgcgctcccgggcggcgagcgcgccgtgctggtggggcacagcctcggcggcatgagcgttgcgctcgccgcggaggagctcccggagagggtcgccgccgccgtgttcgtcgccgcgttcatgcccgactgcgccagcccgcgccccagcgtcatcgacaagcttccatggctggactggatggacagcgtgagggacgaggagcacgctccgccgtcggtgaagctcgggccggagctgatgcggcggaagttctaccagctgagcccggaggaggacttcacgctggcgcagagcctggtccggatgggctccagctacgtggacgacatgcgccgccggccgccgttcagcgaggcccgctacggcgcggcgcgcaaggtgtacgtggtgtgcggggaggacctggccatcgtggaggcctaccagcggcggatgatcgccgactgcccggtggaggaggtgagggagatcgccggcgccgaccacatggccatgttctccgcgccagcggcgctcgccggacaccttgccgacgtcgccaacacctacgcctga

SEQ ID NO: 62698 - DNA, 137 bp, Oryza sativa
  Clone ID: PAT_MRT4530_64010C.1
gtcggacgacacgtaagtgctggcggcgttcatgaagttcccggcgttcaggcgggcgctgaacggtggaccagacaatcagcgacgcgtacttgtcgatgagggcaccaccataagacgatgagaagatccagtcc

SEQ ID NO: 62699 - DNA, 2631 bp, Oryza sativa
  Clone ID: PAT_MRT4530_64011C.1
ccacccgttagtgcaagaatagaatagccagcaggagcagagcacctcctcgatctcaatcgtgggccgggtcgaggctccgaccaattcgttcctccacgatggctttaatccatctgctgcttctttctttcttttcttcctcttcttgggagttgaagagaaagaatcgagttgttgctttgtttaattttgtgtgttgctggcggtagcgtcatggcagggtgactcaatgacgacgacactcactgattcttaccctgtttaaatagaccgcgcggaaaggagagatttggggagagcaacagggcggtgctaggaaggcggtacaaacctacgcgttggccggccggggtggtaacccaatcccttcccggagttagcgccgccggccggtagaggagaagagagagagagaggccgaggttttccggcgaggaggatgggcgagttggacgactactgggaggggtcccggctcgtatgttgtgtggaattgtgagcggataacaatttcacacaggaaacagctatgaccatgattacgccaagctctaatacggctcactgtggggaaagcgggtacgcctgcaggtaccggtccggaattcccgggtcgacccacgcgtccgggagaagccttctgcctaaaagctccctttcggaagcttttgctctgtcccattatggtgttttgtttcctcgctgctcagcattgtgattcttaacgctgcccgcccccggccgggctcgccgtgcccggtcggatctaattaatttacctcctccacctcctcctcctccccccgatcggatcggcccggctcctcctcctccgccgccgccaccgccgccgcagataggagaagatggccgcacttgataccttcctctttacctcggagtctgtgaacgagggccaccctgacaagctctgcgaccaagtctcagatgctgtgcttgatgcctgcctcgccgaggaccctgacagcaaggtcgcttgtgagacctgcaccaagacaaacatggtcatggtctttggtgagatcaccaccaaggctaacgttgactatgagaagattgtcagggagacatgccgtaacatcggttttgtgtcagctgatgtcggtctcgatgctgaccactgcaaggtgcttgtgaacatcgagcagcagtcccctgacattgcacagggtgtgcacggccacttcaccaagcgccctgaggagattggtgctggtgaccagggacacatgtttggatatgcaactgatgagacccctgagttgatgcccctcagccatgtccttgctaccaagcttggcgctcgtcttacggaggttcgcaagaatgggacctgcgcatggctcaggcctgacgggaagacccaagtgactgttgagtaccgcaatgagagcggtgccagggtccctgtccgtgtccacaccgtcctcatctctacccagcatgatgagacagtcaccaacgatgagattgctgctgacctgaaggagcatgtcatcaagcctgtcattcccgagcagtaccttgatgagaagacaatcttccatcttaacccatctggtcgcttcgtcattggcggacctcatggtgatgctggtctcactggccggaagatcatcattgacacttatggtggctggggagctcacggtggtggtgccttctctggcaaggacccaaccaaggttgaccgcagtggagcatacgtcgcaaggcaagctgccaagagcattgttgctagtggccttgctcgccgctgcattgtccaagtatcatacgccatcggtgtcccagagccactgtccgtattcgtcgacacatacggcactggcaggatccctgacaaggagatcctcaagattgtgaaggagaacttcgacttcaggcctggcatgatcatcatcaaccttgacctcaagaaaggcggcaacggacgctacctcaagacggcggcttacggtcacttcggaagggacgacccagacttcacctgggaggtggtgaagcccctcaagtgggagaagccttctgcctaaaagctccctttcggaggcttttgctctgtcccattatggtgttttgtttcctcgctgctcagcattgtgattcttaacctgccccccgctgccatttatgcccatgcacgctactttcctaataataagtacttataagggtattgtgtttgaatattttacctagaggaggaggaggatttgttatctgttattgcttaagcttatgtaatggtgaaagaaggaaagatgctacactactttgagaagaagaaatgaaacctcctatgttttggttattctaaaaaaaaaaaaaaaaaaaaaaaaaaaaaaaaaaaaaaaaagacagaaagggcattcccccccctggccgcgtttgcccgttggctcgtaccccggggtccccacttgatccccgggcacgccccttccctgtgggtaagcactgccccccgctccgtgtttgaatattttacctagaggaggaggaggatttgttatctgttattgcttaagcttatgtaatggtgaaagaaggaaagatgctacactactttgagaagaataaccaaaacataggaggtttcatttc

SEQ ID NO: 62700 - DNA, 1377 bp, Oryza sativa
  Clone ID: PAT_MRT4530_64012C.1
atggctgtgcccgacgaggtcgccgccgacgccgacgccgaggttgaggaggaggagccggaggaggtggagtggttgtcgtcgtcgtcggactcggagccggagcacccggcgctcaaacagtggaccccttcatcacccgactcggaggaggcggaggcggagcagcagccgtcggcgccacagccggcgagctcggtgtcggcggggaaggaagatgagggggaggtggggttggaggaaggtgaggtggggaagccgttcagatggcccgggtggcccggcgcgagcgtgttccggctggtggtggcgacggacaaggtgggtggcctcatcgggcggcggggcgacaccatcaagcgcctctgcgaggacacccgcgcacgcgtccgcgtcctcgaagccgccgccgccgccgccgccaaccggatcgtagattctgatagtaatgatttcatagctaaggttacttttgaaatggtgttaatatctgcaacagaagaatctcaagcagagttacctccggctatggatgctgcaattaagatcttcatgcatataaatgatatagagaagatcaattgtgatgatacattatctggttctgcaccagaaaaatgttctgctaaattattagtcccttcagcacaagccacacacttaattggcaagcaaggagtcaggatcaagtcaattcaagaaactaccggtgctactgtaaagattatagataaagttgagcttctgagttatgatgtagtggatgagagaattgtggacatacatggtgctcccctcaaagttctccatgccctaaaatctgtactcggagttctcaggaagttcctagttgatcacggtgtgcttcacctatttgaaagaaagaaccaagcagtaggtgaggcacatgataattctaaagaaaatcaagtaaatcaggttgccagtgattatcgtcttccagtgaacaaggacatattgttacctgaccatcgaactcctcttaacccaaaaataacacaaacaatgcagatcccgttgccatttgctgaagagataattggtgcaaggggacaaaatatttcttatatacgttctgtcagtggggcagttgttgatcttgaggaaagtagagattatccgaatgaggttttagttatgatcaaaggcagttcttcacaggaggtcttatcaggcaataaagagcgaccttctggaagcagctacatcaatcttgattctggcccaaagtttctgatctctggacatatcaatccagtaaaccgggatcacttggcatcataccgcgtccatcaaccgtacattgttcgatatggatcttcaagcttaccgcggttgagaggatacaggctgtag

SEQ ID NO: 62701 - DNA, 297 bp, Oryza sativa
  Clone ID: PAT_MRT4530_64013C.1
atgcggtgcatgaaaacccccttcttcgccaacggcgcctttggcggtgacgcggggtcgggctttcaggcggcggccatcgcggcgggtgcggacgggaaggtcgcggtcgacgggcggcggcgaggcgactgcttctgcgagcctaaaatctcccccccaaccacgccgctggtctcctccaagaagatgtccgcacccgccgccgcgccgaccacccccgccaccccggcccccgccgcggcgctgttaacgaccaaatttggtaaattctatcactattggcatcggagatga

SEQ ID NO: 62702 - DNA, 1521 bp, Oryza sativa
  Clone ID: PAT_MRT4530_64014C.1
atgtcttcttcctccctcgccgccgccgccgccgccgccttcctcctcgccgtcgccatgtcgtgccattgccatgtggcgcgagggtggggcggactcggcgtcaactacggcacggtcgccgacgacctccccacggcggcgcgctccgtcgagctcctccgcgcggcgggcgcgggggcggtgaggatctacgacgcgaacgcggacatcctgcgcgcgctcgccgggacgggcgtgccggtgtccgtcacggtgccgaacgacgccatcccgtcgctcgccgcggcggcgtcgcccgccgccgtggacgagtgggtggcgcgcaacctcgcgccgcacatcccggcggcgcgggtgctgtgcctgctcgtcgggaacgaggtgctctccgaccgcgccaccgcggggaccgcgtggcccagcctcgtgccggcgatggccaacctccgccgcgcgctctccgcgcgcggtctcggccgcgtcaaggtcgggacgacgctcgccatggacgcgctcggtacctcctacccgccgtccgccggcgcgttccgcgacgacatcgccggcgccgtcgtgcggccgctgctcgagttcctgaacgccacgggctcgtactacttcgtcgacgcctacccgtacttcgcctgggcggcgaaccaccgctccatctcgctggactacgccctgttccagggcgaggcgagcacccactacgtcgacccgggcacgggcctcacatacaccaacctgttcgaccaaatgctcgacgcggtcgtcgccgccatggcgaggctcgggtacgggaacgtgaagctggcggtctcggagaccgggtggccgaccgccggcgacgcggacgagctcggcgcgaacgtccacaacgccgccacctacaaccgcaacctcgccgcgcggatggccaagaaccccggcacgccggcgcggccgggagccgagataccggtgttcctcttctccctctacaacgagaaccgcaagccggggccgggcaccgagcggcactggggtctctactacccgaacgcgacgtgggtctacgaggtggacctcgccgggcggcggccggcggcgtcgtacccgccgctggcgcccacgccgccggcgccggaccaggacgggactcccgtgtggtgcgttcttgccggcggcggcggcgaggcggcgaacgagacggcggtggcggccgccgtggagtacgcgtgccggcagcggagcgggacgtgcgccgccatcgaggccggcggcgagtgcaaccagccggacacgctcgccgcgcacgcgagctacgcgttcaatgcgtattggcagctgttcaggaaagctggtggcacctgctacttcaacggccttgcagagaagaccaccatagatccaacctttgcactcagaagtaaacatgcaaaaccatttgttaacctgcaatgtgatcgcgcagttcctagcttggtggaattcagagtttcagctctaaactgtgctcagaagcaaaatgtatag

SEQ ID NO: 62703 - DNA, 216 bp, Oryza sativa
  Clone ID: PAT_MRT4530_64015C.1
aagctttttttttttcagtatagcgaacaagtaataggcacatatttttttccaaggaagcaaagactacattttacagtataatcatgaacacactggagcgagcctctctcacacaaagaatggacggagcagctctgcacagccgatcgagctgatcccaaaagaatggcgaacagtgacagtgacagtgaagtgtaccaatggtgcaagctt

SEQ ID NO: 62704 - DNA, 167 bp, Oryza sativa
  Clone ID: PAT_MRT4530_64016C.1
atggagacgctcgaggtcatctatctcctctgtagccattcaggaagcccggagatcatccctacgtcgctctgccctattcatcttcatccttcctctatgaccttgaatcattgttggtggtgcattgtcgccaactcgttgtgtcaaagagaagttgaagaaag

SEQ ID NO: 62705 - DNA, 652 bp, Oryza sativa
  unsure (1)..(652): unsure at all n locations
  Clone ID: PAT_MRT4530_64017C.1
ccggccgggaatccgtgccgtcccgcctcctcgcctgccgatctccatctatcagaggtgcggccggggccctcatgatcccgcagcattagctcgcccgggagcatcctaatccatcccatccggtgtcggcctcggcctcgaattgcggctcctcgcccgccgcttgcgccgatccccatcctgcgcactacaggtggagaccggcgtactccttcaattcttccagcgcatcatcgctcggcggtgctggtctcttggagcccggaacacatatgctatgtgcgacttgctggactcttctttttcctgaaaagcgagcctagaaaatgacattgttcacgacgattgtggattgcacatgcatagagaatgaggccgtcgataccctaatgctagtaggtaaaagggtagctgagacgaagctactggctgtctctgctgctcttggtagacacccttgagatcttgccgagatgagggaccactgtgattctttgtggagatgcgatagcaatgctgggaagtagctgcaacgctgnaaccgtcaaggaacaaaactgcgaggttactcctcttgagctaagcttgattgtgccatatcttgcgatttcggagaagatatcacaggtcagtgaacacttccctttga

SEQ ID NO: 62706 - DNA, 404 bp, Oryza sativa
  Clone ID: PAT_MRT4530_64018C.1
gaccctatagagcgcgcgcccttactttttttttctcctaaattcaaaacccacgatttatcagggggggaattttaagaccacaaacgggggagaccccaaaaggcaagaaaagagaaagggcccagccgaaacaaccttgcgccagttacgcccatgctagggcactagaataccccggcagagagcccacccacgcgcgtgccccggaagggaaacgggttgagaaggaccgatcatcctctacggggggctgtacaggcaacagaacatcttaagaactcgcgcggtgcccccgcatgagctatgttaccaactcaacggaacaacaattgtggaatcgaaagaagcggcggtcttttaaacaaggccgctggaccccattccacgctgcaagaatgtgg

SEQ ID NO: 62707 - DNA, 204 bp, Oryza sativa
  Clone ID: PAT_MRT4530_64019C.1
tgatgttgagcaagaatattctcttgctgctaaccttctatgtgaaaccaatgttcctgagatggaaattgatgatggggagattttaggagtcatcgataccgcaaactacaagaccatacttgtgctgcaagtgctaagcgttcaagtggagcatgtggaggaacttcaacaccataattcttcatcatcaaggattgtcgg

SEQ ID NO: 62708 - DNA, 330 bp, Oryza sativa
  Clone ID: PAT_MRT4530_6401C.1
atgttctattttttttatatgatcttttgttcgagtgatatgtgtattgatatttcaattgcttgattcctgtttctctggaagtggagaagagctgctatttttcatccttcgtttgttttggaaaaaaaaattccctgcacatcccccctcagtgatagaacaaacccggggggaccaacaaggggttatttttctctccgggggtgttaataaacaaaggggttatgcacaaaaaattttctttggggggccaaacctccgagaaaaattggaataatctccccctttccaaaaaaaggtggggccccttttgttttttttcttccc

SEQ ID NO: 62709 - DNA, 181 bp, Oryza sativa
  Clone ID: PAT_MRT4530_64020C.1
gcacgaggcaactaccccagctactgccgtgccgagggaagcgggagcgccgccctagcgaccgcaactgcaggcgcgcatttcacgggattccgtgggctgtgctgtgctgtacagaccggctgcgggcgctgccgccgcaggtgagcgagttcctcagccccgagcagctggtccccgg

SEQ ID NO: 62710 - DNA, 2716 bp, Oryza sativa
  Clone ID: PAT_MRT4530_64021C.1
ggctcccaacttcagtttctatttctttgtttttgtcaatggtgtgcttttacatttttcatctttgctccgtaattgcggattctctgatgattaactaccatcacatctctgtttcagtattttctttttttttttttttttatatgaactactagctactatatcatttccttgcaggaagccaatttgttacactcatcacacgggaggtaacagctgacaactattaggactgtatcagttaactgacaccaggctgaattcatggtttttccccaatccaaacccaaattcttgctacctacatacaccaccgtgtgcagctccggccggcgagctcagaacaccgggcatcccttgacggcgatccccggcgcggtggggcaggaggcgagcgggcagtggtcgaccgccgtgccccaccacttgagctcatggtgggcgttctgcagggcgaagaagatgagcacccccatgaaggccgtgccggcgtcgagcgccgccgacagcacgtagttgtacttctgccaccaccccttgcggtacttgaacacgaagtagttgaagatggtgcccgtgacgagccagctcgcgatgttggtcggcgtcgccggcggcatcccggcgaacccgtaggagatgacggggacgttgatgagcgcgatccacttcttctccgggaacgccctgctgagcagccacaccggcacgggcagcacggcgccggcgaggaacagccacaccaggttgcggtacaggccgtggcggccgaacagccgggcggggccgatgagcccccagatcaccgacgcgtcgaacgtgacccggtacttggggcacgtccacgggctgtccgggtgcagcgcctccacgtcgcagatgttgtcgatgctgcccagcatccaccacgccaccgccaggttcaccacgccggcgaccaccgtgcccaccagctgcgccgtgtacatgcaccgcggcgggatcttcatgtagtgccccagcttgaggtccgcgaggaacgacagcgcgtgcaccgtgctgatcctcccgtagatcttgaacagcaggttcgcgatcggcttccccggcagcgcgtacccgatcatgaactgcgcgatgatgtcgtaccccggttgctcctccctgtacacgaacgacatgaccagcgacacggcgacgctgccgacgagcagcacgaggaaccaccactgcggcacctgcttgtaccgccgcatcagcttcgcgtgcacgtccatcttcgccgccgcggagctcatcgccgacctgctctgcctccagatgtccccgccgtggaacagcgccacgtgcacgatcgtcgccgtgaacctcaggaacccggacccgatggagatggcgaacagcgggctcaggtacagcttcccgtagctctcgtacgccgccacgttgaggtcgaactccctcgtgagcaccttggtggtgtcgtacttctgcccggacgccgtgaacagctggttggagaagattgggaacttcctcgcgtcgaacgtgtcgaacttccagtagcagagcggcacgatgaggtagatgaacatgacgaagcccgcggcggtgttggcgatggacgaccacggcgccaccagcgggctcccgtggtacgccgagatgccggcccagtccagtgtgaaggcgccgacgccgaggccgtggtagccggagcccacctgctgcgccgtgatgctgtgcggccacgcccagcacgcccacgagaagaaggtcaggatggggagcaggtagcccggcagcgcgtagtaggcgaagctcgcgaagaagaagatgaggaagaagcgcatccgtgtaggccccctcgacgacgaccccttcccgccatcgccgccctccttctcgtgcaacgccctgaagagtgagacctgggctaaattcgatggccaccacatgtcagccgggtcaaccaggtacctcctcagcatcccggcccaaccatagcccagtatctgtgtggtgaggacgatgaggagggcgcagaggaagctgagggactgcttgtagtaggccttcatgacggtgatggcgccgatggagtaggcgtcgccgccgccataggagacgccgcagttggcgaagatggtgatgatgacgtgctccttgatgttgaagggccccgggttgaggttgaagctgccgaggcggccgccgaggaggcgcacctcgcggctgggcagcacggcggccatgaactgccccgcggggagcaccaggatctgggccaggatccccgagatggtgagcggctgcgtgcggtaggtgaagaaggtgttgaggaagatgagcacgacgcaggacgcgagccccagcgtccacgcccggaatgtcatcaccggcgtcgtcgggtcgtcggtctccggcaccaccagcgccacctcctccaccgggcacctctccccttcccccttcgccgccgccgccgccgccgtcgccgcctgctcctccgccgccaccggcgacttcaacgacgccatctccctagcctcgatctccttcctcctccgcctcacaagtcgccactacaagcaaagcgagctaagctagctgcgaatgatttgtaaagaaaataatttgccagtatctggagaggaaggtagtaacgctttcggggattcgatttggatggtagcacttgaccgcggcgcgcccccccgccgccgtcttgggc

SEQ ID NO: 62711 - DNA, 1630 bp, Oryza sativa
  Clone ID: PAT_MRT4530_64022C.1
acgcgtccgatcagtttgattgcatatgaaatggctgcttcatcgctcgacgccgaggcagcagctgcaggccaacaagacaaggccggcagcggcagctacaccactgcagccactgctcatcaaatagacacagattcatggcagcaggtaggggtgctgctggtggtggggttcaactgcgcctacgtgctgagcttctccaacctgatgatggcgccgctgggttgggggtggggcatcgcctgcctgctgttcatcggcgccgcctcctggtacggcaattggctcctcgccggcctccatgtcatcgacggccagaggttcatccgctacagggacctcatgggcttcgtcttcgggaggaaaatgtactacatcacttggttcctgcagttcatcaccctgatactcggaaacatgggcttcattctgctaggcggaagagcactcaaggcgatacatgcggagttcagcagcagccactcaccggcgaggctccagtggttcatcgctgcaaccggattcgtctacttcgccttcgcctacttcgtgccgaccatttccgccatgaggaactggctggccacgtccgccgcactgaccgtcgcctacgacgtcgccctcattgtcatcctaatcaaagacgggaaatcgaacaagcagaaggactacaatgtccacgggacgcaggcagagaaggtgttcggcgcgttcggcgccatcgcggccatcctcgtgtgcaacacctccgggctgctgccggagatacagtcgacgctgcggaagccggtggtgtccaacatgcggcgggcgctgctgctgcagtacacggccggggcggcggtgtactacgggatcagcgtggccggctactgggcgtacggcgccgccgtgtcggagtacctccccgaccagctcagcgggcccagctgggccaccgtcctcatcaacgccaccgccttcctccagagcatcgtctcgcagcacctgttcacggtgccgatacacgaggcgctggacacgcagatgcagaggctggacgaagggatgttctcgcggtacaacctcgggaggcggctgctggcgagggggctcgtgttcggagccaacgccttcgtcaccgcgctcttccccttcatgggcgacttcgtcaacctcttcggctccttcgtcctcttccctctcaccttcatgttccccagcatggtcgtcctcaagatcaaagggaaggatgaagcagggagatggaacaggatttggcactggggcatcatcgtcgcctcctccgtcctcagcgtcgtcaccaccgccgccgccgtccgtctcatcgtccacaacgccagcgtctaccatttcttcgcggacatgtaatcaatcgacgccggagattaccatttgcaccgtcgattaccatttgcaagtgcagtgtgctgtgatcagccgggtttagagctttgcattcttccattaaggatgagattgcaagcgcagcgctgtgattagcgggtttacagctttgcattcttccgtaaggattatatcatctttgacgaaaaaaaaaaaaaaaaccaatgttaagctatgccaacctattacacttgacgccgaaaaaaaaaaaaaaaaaaaa

SEQ ID NO: 62712 - DNA, 326 bp, Oryza sativa
  Clone ID: PAT_MRT4530_64023C.1
atggtatacaagaaggattatgtgtgcgcatggtctgaccggcagtgttcgggcggtctgaccggcgaaggtttggcagtccgactggaggcttgtgagcggttcgaccggcggccacaggactacgtcaagacctccatcaatttgaagttgggggtgaagaatgcccggttttgtggttcagggggtaattcggtcgaccgtgatagttcagggggggaggtggtagacgacgtacccgtcgacagcgagacacctgtggtgacttcgtcaatcttatttgctggcccggtcttcgaagaggctcaaaggggtagggtttgcgt

SEQ ID NO: 62713 - DNA, 440 bp, Oryza sativa
  Clone ID: PAT_MRT4530_64024C.1
aaccacatggttacgtaaatcctgattgcaactcataacaggagcctcctcatcttccatgatgtttaacatgcaggcatgtgatgtctcctgtttgaactcatggtaaaaggactgaaaaatggagacgtgagtatacggttgcaacaagtatgacagcaagatgcgcatatttacatcgatttcttgcccatcttgacatcttattcacttgatatgggttcctcatttcttcctagatgatgaggatgaagaagaagcggcagcgatgattccaccagcaacaagtcccacaagtccgaaggcaccagtgacatttgccatgccaatcatacccgcctttctggttttgtcctcaaccaagcctttgtaaagtgagagcttgtcttcagtcatgtcgaatctttttatcattttttcaaaagctgccgtctttcttg

SEQ ID NO: 62714 - DNA, 458 bp, Oryza sativa
  Clone ID: PAT_MRT4530_64025C.1
attgtggatattatttttacatgagattacacatatttatacggggatacacacatagtaacgctaacaattaggggcttaattaatttataacaaattttacaaaatttaattgggttaaaaacatttaaaatttttaatgaaaggtggtttttattccggactaattaatgtaaaaaacttttttgcggcgagtgttccgttgcttatttacttgattttataaagttaacatttacatttttcccacattgtgacccacttttccttgagaggggaccttcccttttttccaaattttaaaaagcctttcaaaccaattaattttttttatcttgggcccattaaaaggtccattcaaattttatacaaaaatttgggggaaacaattaggcttaaaaagtgggtttttttatactttgggaaatttttaaaaaattattgttcaaaataatttt

SEQ ID NO: 62715 - DNA, 430 bp, Oryza sativa
  Clone ID: PAT_MRT4530_64026C.1
gacgagggagcttaaataggggaggggagtcccggacgtggccggtaggagcgggattccgccggccaacgtggggagtgggggaggagagagaggcgggattccaatcccgcccatctcgggcgcgggcgcgagcgcgagagagggggaagtgggtgcgggggacgcggtgcatgcgcgggcgtggccgacgtgacccgggagaggcggaggcgtgggcgcggcggcggttgcgggcgcggctgcgccggctggaggaaggggacgggcctgacaggtggggcgtcccggggagagagggaagggcggcttgggccggcccacaaggaggagggcgcgcgcggcggccgggtggactgggccgacggcccaagaagaggaaaaggagggaaaagaaaaagaaaaggaggaaaagattttccctgggatt

SEQ ID NO: 62716 - DNA, 456 bp, Oryza sativa
  Clone ID: PAT_MRT4530_64027C.1
atggcgggcgccgccacctccaccacccccagtccagcggccgtgccctctttcgttcttgccgccagtccagccgtcgttgccctcgcggttgccgccggcgtgggcttggccaccagagaagtcatcgccaccaccctcaccattggagaagatctggcgtgcgctgccaccacccccactgccaccatccccaccaggagggaaagaggagccggggctggcgcttgcaaccagcatcgtcgctgtgaagctcgggatgcgcagctccttcagcaggagggtattgcgtgccgatgtgaagctcgggagaacggccatgcctacgatgttatcagcggtgttggagaagtgatcgttgaggcatcggagaaggttgagcacaagttaggagttggagacggcgtggtcgatgtcgcgaagggcgtcggtagcggtcttcatcttctgcagtaa

SEQ ID NO: 62717 - DNA, 729 bp, Oryza sativa
  Clone ID: PAT_MRT4530_64028C.1
atggcagaggagagagaattggctcaaagccagtgggctttgtctgacgtcaaggaatctaccttgttggagatggtggaacactgtgttcttcccagcaaagagatcatcggttggcatctagcattcggtgaggccttccccactccggacaccgacgaaatcatgcctaacaagagaaatccctgtctggttggcggatccggcctgcaactccgcgggtccctctccaaaaaatacttcagtcttccttttaaatcatccaataagggctggcattcgatctggttttacatccataacccttctccttctctacccgagtactcttgcactcctcctgtctataatgaaatctggagttcactcccgatgggagacgagttatctcaagccaaacaccctcctggaaaaaatgctgaaaatcaaagagcagggactgcaacgggagcaagtcacctggcacttcatcaaatgctgactagctctgataaaagagaggtcaaagcctgccttcgagtacaagggccaaactgtcccaatcatgaagaccccgactcactggacttcaagatcacgaaggctagaatgtacacgatcttctctacgggcattgaggtagactacagccaagggctgcctgttacccctttcaacatattcaacctgcctccaaaggaaaatgctctttacagctctaagccattctcctcgctaccaaacgactaa

SEQ ID NO: 62718 - DNA, 496 bp, Oryza sativa
  Clone ID: PAT_MRT4530_64029C.1
aaaaggttaaaaacctcccctttaattttaaaaaaaaaatcttttttgctaaagcatttcctccctccacgaggatgaacatttagggttaaagggtttgcccctggaaaattcttaaattctaacccaaacggttattttttaaaaattaaattaacccctcaaacggttttattaataatgcaaatcaaccttattgccaaaggtccactttttatacttttttggggccgcccaaatttaaacaggccctgctggaacaattgcctcttttgggccttgaacaaactctttttaaccccgggaaatttttttttaacaaagggccttttttttggcccctttaccccaaaacggggcagagaaggttttttttttttccttttcaaccttaaacttggggatactttccaaaaaaaaccccttttttttgaacaatgtccccttgaccttcatgcacacgtaaagaaacaaggggcttgaaaaattttttggc

SEQ ID NO: 62719 - DNA, 101 bp, Oryza sativa
  Clone ID: PAT_MRT4530_6402C.1
gcacgagggtgatatcgctactgcccctcccacactttcatgtctttgggtagactttcctagttctagatgtatggaatagctatggtattggaggcatt

SEQ ID NO: 62720 - DNA, 596 bp, Oryza sativa
  Clone ID: PAT_MRT4530_64030C.1
ctagcctacttgttgattgccaataggggtagcatcgggtttcaatcgatcttatctaatatgcatgtctccttactcgtttcatttatagacaaatcacctagtatagatcacctaatataggctgatccttaagaggtccgcatgcaaaaatcgattttttgcatgtggctctttaaacttcaaatcgaattttatgtaactgtcatgggtacgaataaggcataccttctatccaatgacttacggaatatacgagtacggtatacctttgcgcatacgatttgttttcgtatgcgttaaggaaatttactggatattgtagaaaatattctcacgggtaaagagattagcagagtactactcggagttctacttggagaacaaggtgatccacggtataaaagggacaccccctgagggattcagatcatcgaatctcactgccaacacacccaccatagtttacaaagctagagcacgtgaagtgtaaaatccttgtctccttgtttgcttgatgtcatatcacgtagatcctcataccaacgtaccccaatatcctattcatccggtctacgggtatcacccatcaacaa

SEQ ID NO: 62721 - DNA, 904 bp, Oryza sativa
  Clone ID: PAT_MRT4530_64031C.1
ttatgccgccctgctgctgccacctgccgccgccaggttgccgctgccctggtcctcgaacgcgccgatgatgccgatgacgaaggccgtggagaaggactgcatcgccgtgctgttgggcgccctgtggaactgaagcggcaccgggaagaaggcgtggcccttgagctggttcgtgccgttggtcaacatgagcagcccgttcggggtcaccgtcgccatgtcatcgaagctgagattcgcggcggtgaacccgttgaggacaaactgctcgtcgccttccgcctcccgcaaacctccgcagcccgtcggcgctgcctcccgcagacctgacgatttggggatttttggaagaactagtaggttttgggtgaagaaagggggagggaaatcgaatcgattcccgatggcggcggcgccgattgtggttgtcgacggccgcgcggcgcggcgtgctcgcagaggcagccagcgacggcggtcgcccatcctcaagatcattcgagtatgccttctttctctcccttgcctgttgcgctgatacccggttcctcagcaaccttttgaggcgcttgtgctccttatccgcggggctgcgcccgcggcggcgcgcgctggcctgcgccgtcgacgactgcgcgcgctccgccccgccgccgccgccgccggccgccctccccgacgtcgaagcgccgcccggctccagccccagctccggcactctccctatctcctcgtcgctctccattccttccttgatctccatgtggtggccgccggagctggacgacctctcggagctggacggccgcgagctcgtcgcctgctcctgcattctcgccggcgaggagggattcgcgtgcactcctccgcttgcttcagcttcagcttccccactctgtcc

SEQ ID NO: 62722 - DNA, 179 bp, Oryza sativa
  Clone ID: PAT_MRT4530_64032C.1
aaaagcgtggagaaaaaaggataaatttgcccctgccggctctttctccacctagccacggcgcagggaggccggtgcaagcgcaggaacaatggagtcgcggatgggatgccaatgggaacggcgaagctggcggaggggccccgccggtgctcagggaggtcccgatcgacgcctag

SEQ ID NO: 62723 - DNA, 1276 bp, Oryza sativa
  Clone ID: PAT_MRT4530_64033C.1
gttgttttttttttttttggggtttagatcaaatatactggtagtatatacttcaagaagaatgtacccgaaaagttctctttttttccctgggttaatccaaccaaattaagttccaagttttaggatcaattcaaacccaaaagcatattcgagcataaaggggtctactacttgctgacatcttctcctcttatgccgccctgccgctgccacctgccgccgccgggctgccgctgccctggtcctcgaacgcgctgatgatgccgatgacgaaggccgtggagaaggactgcatcgccatgctgttgggcgtcctgtggaactggagcagcgccgggaagaaggcgtggcccttgagctggttcgtgccgttggtcaacatgagcagcccgttcggggtcaccgtcgccatgccatcgaagctgagattcgcggcggtgaacccgttgaggacaaacttctcgtcgccctccgcctcccgcaaacctccgcagcccgctggtgccgcctcccgcagacccgatttggggattttcagaagaactggccctcttctgctcacagttgtattcttcagtatctgtctgagcatctggttctcattctgtagggtggagaatctttcttccaactctgagttcttcttctccaagtccttcaccttcacctcaagatcattcaagtatgccttctttctctcccttgcctgctgcgctgatacccggttcctcagcaaccttttgaggcgcttgtgctccttatccgcggggctgcgcccgcggcggcgcgcgctggcctgcgccgtcgacgactgcgcgcgctccgccccgccgccgccgccgccggccgccctccccgacgtcgaagcgccgcccggctccagccccagctccggcactctccctatctcctcgtcgctctccattcccgaaagaggaacagtaaaatggaaatcaagaaagggaaggagaagggatcgaagtggcgcttccttgccttccttgatctccatgtggtggccgccggagctggacgacctctcggagctggacggccgcgagctcgtcgcctgctcctgcattctcgccggcgaggagggattcgcgtgcactcctccgcttgcttcagcttcagcttccccactctgtcctctcctctcgtccttgctgcttgcgtgaagcatggaccatgagagctttttggctttaactggcgcgcgtgccgcgggagagggaaggaggggatcggtgagagatgcgcgtgttgtcgccat

SEQ ID NO: 62724 - DNA, 906 bp, Oryza sativa
  Clone ID: PAT_MRT4530_64034C.1
atggctggaggaagacccttggagtcggtgctcgtggcccccggggtgaagggaaagaaggtactcgcattcaagcgcgacgggctcaagaaaaacgaggcagtgacgggcctcatccacgacatcgtcgccagctccagcgccaggagcgcgttccacgtcctggacctcgccaaggtggtcgacctctacgcgggatggcgccgcgcgctccccggcgtgaggcccttctacgccgtcaagtgcaacccggacacggcgctgctcggcgcgctcgccgcgctcggcgccggcttcgactgcgccagccgcgccgagatcgaggccgtcctcgcgctcggcgtcccgcccgccgccatcgtctacgctaacccgtgcaagcccggcgcgcacgtcgcgttcgccgccgaggccggcgtcaacgtcaccacgtacgattccgaggaggaggtggccaaggtgaagcgctgccaccccagttgcgagctgctgctccgcatcaaggcgccggactgcggcggggtccagcccggccggtacttcgccgagaccgccttcacgctcgccgcgcgcgtcatcgggaagcgcaggcgcggcgacgtgcgcgagtactggatcgacgacggcgtctacggctcgctcaactgcatcctcctggacagctacgtgccgcgcccgaggccgctcgccggcgcgcgccccggcgaggagacgcacgcctcgacggtgttcgggccgacgtgcgactccatcgacacggtggtgaccgggtaccagctgccggagatgagcgtcgacgactggcttgtgttcgacgacatgggcgcctacaccactgcggccggctccagcttcaacggctttgccacgtcagccataaacacctacctggcatactccagctag

SEQ ID NO: 62725 - DNA, 108 bp, Oryza sativa
  Clone ID: PAT_MRT4530_64035C.1
ggttgttccatttgaggttcctttaaccctaaatctcggattaacccatggccacggctggccttggcacttcggtctggaaccctacaaaagaggccttgcctggcc

SEQ ID NO: 62726 - DNA, 450 bp, Oryza sativa
  Clone ID: PAT_MRT4530_64036C.1
tttgtttttttattttttgggtttttttttttttttttcccctacaaaatcgaagtaagaaaaaatttgtaacaccaaaagaatttatccataaatatttggatttaatacaaagaaacttgtaaaacatatatgggatgaaacatggaaaaaatgacaaaaaaatatgccaatccaaatttagggcctttttactttccgagggctggatctaagattccttcgatgaactcgggcctttgacgtagggacccggggctccttaccttaaatgatcttgccttcctaattgggggagtccaaagcaatggccatctccttaatcgctggttcgccacgatgggggaatcccccttctcctttccactggcgagcttttagaaggttttttactttgcccgaacaacagttgttttccccgtaactatcgccaccaggcggccatggaaa

SEQ ID NO: 62727 - DNA, 2104 bp, Oryza sativa
  Clone ID: PAT_MRT4530_64037C.1
ggagatgttaactcaaaattttttcacatgaaaacaaattcgagaaagaggaagaatttcatacacagtcttgaaaccccatctggcactgcaatcacatgtgaccaaaagaaggctgaacttcaaccttttttcaatcaaagattaggaggtgatcaaaacatagacagattacaagatttgaactcagcaaatatctgccttattccaaaaaaaggggatgctaccagagttggagagtataggccgattagtcttatgcacagctttgccaagatcctagccaaaatcctggcaaatagattggccccccgaagctcaatctcctaatctctcaaaatcaaagtgctttcattcggaaaagggtgattcatgacaactttctttatgtacaaaacatggtgaaactgcttcatcggcaaaagaagtcttctctctttatcaaggtggacatctctaaagcttttgactccgtcaactgggcatatcttcttgagactctccaaaatttcggttttggtcaaaaatggcgcaactgggttgctaacttgttaggtacatcctcctccaggattttacttaatggtgcaccaggggaccatatttatcatgcacggggcctaagacagggtgaccctctatcacctatgcttttcattttagctatggaacccctacaacaaatcatgaaggaggcagaggaagcaaacattttatctaatctcttccaaagacaaagaagattccaatgttcactttatgctgatgatgttgccattttcgccaaacctacaaaaaaacgaattatcggctttgcggcgaatcttatttttctttgctgacgccagtggcctccatacgaatatgtgcaaaatagagatctacccaataaactgtgcagaagatgctttagatgttatcctcccttctttccctggtaataggaagaccttcccttgtaaataccttggcattccactccatactaggaagctaaggaaagttgacctacagcctctggtggacaaagttgcttcgtgaataccaggatggaaaggtagattcttcacttcggctggtcgcgaagtccttgtcaaatccaccctgtcagcagccccaatctaccacctcactgtccttcatcagaacaaatggttatataaaaagaattgatcgtctaagatgatcctttctatggaaagcagaagatccggacaatgtaagctggaaggatgacaccaaaccttgggctaacatggagaccccatgtgataatatagatcgagaactttttcgcgcaagcacaatcatcaccatcggtaatggagagaaaaccaaattttggaccgatcattggctagaggggaagagtctgaaagaacttgttcctttgattttctcccttgccaagaggaaatcaaacactctgaaaaaggagctagacaacaatcactggatgatgggccttcgccctatcacttcaatgggggaaattgatgagctagtgcgtcttggaagcatcctgaatgatatttctctaaactcaaacacagctgatgatatttcctggaaatggacaggcaatggccaatacactgcaaagagtgcctacctagctcaatttcagggaggaacaacaagctcaaatttcttgccactctggacaacgaacgccgaaccaaagcaacgcttctttggttggctgattttacatcaaaaagccctaactgctgacaattttctaaaaagacactggccatgccattggatttgctgtttatgcagaagtgcttttgaagatgctaaccatctagccaaagaatgtcctttctttgtctgggtatggaacaaaatctgccactggcaagggcacaatgccttctccttgcacaactcgtattcgaccctgacagattggtgggtggagctttgtaagatcaagccgctagcaacaaggaaacggattcttggtgatcttctcataacatggtggaacatttggctagaacgaaatcaaagaattttctgccaaagcgtgcaaagcgagagtcaggtggcttccttaattaaggaaaatataaaccaaatcaacctgtcaaagggc

SEQ ID NO: 62728 - DNA, 360 bp, Oryza sativa
  unsure (1)..(360): unsure at all n locations
  Clone ID: PAT_MRT4530_64038C.1
ctttcatcgacgttggccgttggctgccagagaccaacgccccgtaccatctcgatctcgatctcggtctgtaataatacctgctactctctttatttactgtttgcctgcctatatttgcttggtattggtattgtatcatcgatctcgatgtgctagcccctgtgtgtgtngtatgccatggtttgtacgtaactggtactgtatgatgcatgcgtgctcctgtgtgtgtgtgtatatgcgatatgatggtttgtaactggtnctgtatgatctcgatgtgctccgatgtggctgtgtgtattgcgatggttnatggtttgtnacttnattttctttctttaaaaaaaaaaaaaaaaa

SEQ ID NO: 62729 - DNA, 436 bp, Oryza sativa
  Clone ID: PAT_MRT4530_64039C.1
tcgtttgacttgagttgctgagctctaacgacgagagcgcgcgtaccagcgaggcaaagatgtctagcttcaaatcgccagccattcctctcgccgctcttgtcatcaccgtactccacattgccgccacccatgcgcagatacccgccgcgacgacgacaggtgccgccgtctccgccaccaacccacagaatggcggtggcggcgtctccggtggcgtaggcgccaccgcgggcggcgcgcacgagcccctggagctgtacatgcacgacatcctcggcggctcgagcccgacggctcggcccatcaccggcttgctcggcaacatctacaacgggcaggtccccttcgcgcggcccatcggcttcgcgacgcccaagaacggcgtcccgatccgcaactccaatggcgccatccccacgtacaacggcaacaa

SEQ ID NO: 62730 - DNA, 1293 bp, Oryza sativa
  Clone ID: PAT_MRT4530_6403C.1
aactagtggatccccgggctgcacgccgcctcctcctcccccacttctccccaccaccacaccaccacacacacgcacgcacgcacgcacgcctccgttttcccccaccgacgagaggcggagagggaggggagctagggtttttcggggcggggatggcgcggagggggagagtgcagctgaggcggatcgaggacaaggcgagccggcaggtgcggttctccaagaggagggcggggctgttcaagaaggcgttcgagctcgccctgctctgcgacgtggaggtggcgctcctcgtcttctcccccgtcggcaagctctacgagtactcctcctccagcattgaaggtacctatgatcgctatcagcaattcgctggagccaggagagacctgaacgaaggaagtacaagcatcaacagtgatgaaaatgcaagtatacactccaggcttagggacataacggcctggtctctccaaaacaatgctgacgagtcggatgctaatcagctagagaaactggagaaactgctgacaaatgctttgagggatacgaaatcaaagaagatgttggcaaaacaaaatggtgaagggagtaggagcagagcaaactccagtggctctagggggcaggaggaaggaagtgcatgagcaggaagcacaggtgtcctgtgcataagtttggcagtgcatgcacctcccaaattaaaaagctaataaaaaaaagagaaaatggtgcatgctctgtttgctgccagtttctcccactgattgatcccaggtagagaaaagagttgccatggcctctggctctgcttgttagatcaagggggggagatggaataaaaggatggggaagtattcaggttcttgtaatgaagacctatgctgtggtgttttagcaatgtttgatatgtgtgctacctgtgtttgactggttgtgttgcttgatgtgtcatctgaccatgatactgaaagcctgataattgcactgacttgtgtatggagtttgtttcaacctattggtatgaatctgtttgattctgtaggaactgtggtttgctgtttgccagatctgattattacgcagtgatacaatctgtccttattatgtctagggacccttatgtctatgtgtgttgtttattcgaatctggcagtgaacaatctgacgaggaactgaaaataactgatagatggttacgttgctgtatctgtaagtgtgagtgagtggatgcttatacaatcttatttttaaataattataagttgtgcctgcgtcgggagtattcat

SEQ ID NO: 62731 - DNA, 1396 bp, Oryza sativa
  Clone ID: PAT_MRT4530_64040C.1
gcctcttctacgctaccaacaacaacaacgacgacaacaacaacaagaaagcgcacaacaacaacaagaagaagaggaggcaacaaggaggagttgaagtggaagctttcagctcacctctgctcccattcttgcgctttctcggagcgcaggaatgggcgcgatcggggagtggcggagggggccggtcatcggccgcggcgcgacggcgacggtgtcgatcgccacggaccgccggacgggcggcgtgttcgcggtcaagtccgtggacgtggcgcgcgccggcgcgctccggcgcgagcagggcatgctctctgctctggcctcgccgttcgtcgtgccgtgcgttggatccggcgtgtcggcggcggtggacgggagcggcggggcgtgctacgatctgttcttggagtatgcgcccggcggatcgcttgccgatgagatcaagcggtgcggcggccggtgcgaggagcccctgattcggtcgcgggtgggcgatgtcctgcgcgggctggcgtatgtccacgccgccgggatcgcgcactgcgatgtcaagggccggaacgtgctcgtcggcgccgacgggcgcgcgatgctcgccgacttcgggtgcgcgcgctggatggcggccgaggactgcaatgccggcggcgtgacgatcaggggcacgccgatgttcctggcgccggaggccgcgcgcggcgaggcgcaggggacggccgcggacatctgggcactcgggtgcacggtcatcgagatggccaccggtggcgctccgtggccgcggtttgccgaccccgtcgccgcgctccaccacgtcgcgcactccgtcgacgtcccggagtcccccgcgtggttctccgccgaagggaaggacttcctggcgaggtgtttgatcagagacccagccaagcggtggacggcggagcagctgctcgagcacccgttcgtcgcctccgcggcatccgattccacatccaaggccgtgcagatcgagcagcgcgtttcccccaagagcatcctcgaccagtgcctgtgggagtccacctcgacggactccgacgccacggtggcgctcgcccccgccgaccgtctccgcgcattgtccgccggcgcgtccgtcgcgcccgactggacctggagcatggacgactggatcgccgtctgcggcggccgcgccgacgaccacgacaccacgccgtcgccacaacccgacaccaccaccagcttcttccgcggcgatgaggcttcgtcagaccttgtcttccccggaggcggtgagactgagagaggcgccgttgcggttgcggccactgtgccattgatggcgaaaagcagcgagattacgggagttgaacggtcgatcgagagtcgcgtcgcgtccgggtccggctag

SEQ ID NO: 62732 - DNA, 383 bp, Oryza sativa
  Clone ID: PAT_MRT4530_64042C.1
tctgtcgttccggaggttcccgaagcgtggttcgcggtcgtcgccgaaggatcggaaggcaaatgaaggctacacgagctgcggcccggtagtcgagatgtcatacggcagaggccgagccctcggatatgggcaagccgagcaatgtacccaagtcagtgaagaagaagacatcgtcagttgtttgtcgaaattccagaaggctgcaggatccgctagtaaagtgaaggaagcagtgaagatcttggagaacccgtcgcagaacctaagccaccctctaggagaaaaaggaaagaatgtcagcggggcagacatcgctaaaccagcctcctcgcaccaagtcaagcttgcatgcctgcaggtcgactctagaggatccccgg

SEQ ID NO: 62733 - DNA, 414 bp, Oryza sativa
  Clone ID: PAT_MRT4530_64043C.1
gctgtcaacgttgaaattgcagaaggagggattttggaaagtggagtgcctgatgggtgctgcctgcgcagcaaagctgcaactgtgagctggattcagcgtgtgtgtgtgactgtttggctggatgggaatgcgactggaatgccatgtgccacgtggcctgatgattggaaatgttggctggaaccgcctgggtactgcccacagtgtgcaaagatgttggccaaatggatggagtgcaacgaacaccacaggcgcgatgggtgtttggaggtagggaatgcggacaaaatgatttggagagcacatcaaatggatcagcttacacggagatgccccccccttggaatgctgcaactgatgtgtctgggaagcgagtgcatggcctcttgggaagcgtattgaaggagtgtt

SEQ ID NO: 62734 - DNA, 776 bp, Oryza sativa
  unsure (1)..(776): unsure at all n locations
  Clone ID: PAT_MRT4530_64044C.1
cgggttgtttcgtcgtgcacctctgggctgtacgattccgatgcacccggcacgggcatcaaccccggcgaggagcctctggcngccgccgtagctgtacacgaaccagcacgcatgacattgagaaangatgcactcttgtgatccttgttctgggtctcgggtgccctgntgattcccggtggctgttgtcttggcgtgtcagngctgttatcctctcagatgcttggtgctggcgacggccgagccccggccacatggctgctctcgtctcggtgttcnaggacagcacccaagcggtgcgaccggcgtgaaggaacgactgactgcatggttgcattggatgtaccagtacgaagtatcccgattcccatgctggctttggattnatattgtgtgtctttcgattgtgctccttggttgcccacattttcaccacatgctttactgacttcatgtgcacctgatctattgcatatggatatgatcagagtgcactgcgtnctcattgtcaagttttgtagttctgggaccttgtccaaggtgtgaggaagatgntgaagtggttggtaaaagtaaggttggacggtgatcgtgatatggtaatcttnatagtncatgcaccggcaccgggtacgccgagtggtttagtggatgaatgccttttgttacgtagcaggcttaattangtcaatatgtgtgcgtatgttgtcgtggtaattattatactgggtaatatatatatacttgtgcagcttaaaaaaaaaaaaaaaaaa

SEQ ID NO: 62735 - DNA, 157 bp, Oryza sativa
  Clone ID: PAT_MRT4530_64045C.1
atgccaaaacctgggatcaacggtgatcaccagggttcggccgaacctaggctgggccctcctggcctggccttcgatgttggcggtatagaatcaacatttaacagccgccaagaaaaacccccacacttagccctttgctcgtccctgagtaaag

SEQ ID NO: 62736 - DNA, 571 bp, Oryza sativa
  Clone ID: PAT_MRT4530_64046C.1
ggaacgactctgctgttatgatgatcgctcaattctttatcgaacatatcatgtatggattgttattatatcttgagttgcttgttaacaccatgggtaggatgcttagtgagtgttactttgcatgcctgaacatgttatcgcacgggcgatggagaaatgcagtagatttttccatcaagccttctgtgctagggtgataatgtaatactattacaattgaacattgtacgcacgaaattctgttttcgcagcatgtcaaatgtggttgtacgcctgatccctgagtccctgactgaggaatagccattttgtttttggacatcctttaaaacttcttgcatttggcaattgtgtgctaagattaactggtcttgtgaattgacatttgcaatcaaacctgctcaattcacttcattattttcatattgtcataaaccatgcttccactacttttgagggttcagaggggcatgtaaatggtctgtgccatgatgctttcctggtttctttgaaatccattccaatatgaatagcttgaaagctgaatattttgatctaacagtaagtc

SEQ ID NO: 62737 - DNA, 1383 bp, Oryza sativa
  Clone ID: PAT_MRT4530_64047C.1
atgaaggttcagacttcgtcaccttgcttgctactcctacttggctctcttgcactggttacactgacactgtgtggcccagctgcttctgcacggcctgaaacgggcagcctcgatgcatcagccacggcggccatggagttgcaggagctcgaccgcgtgatgtcgctgcccgggcagccggcctactcgccggaattcaggcaatactccggctatgtcaccactgacgagtaccttggcaaggcactcttctactggttcttggaggccactgacaagcctgacgagaagccactcgtcttgtggctaaatggaggacctggatgttcttccattgggtttggacaggcacaggagctagggccatttctggtgaagaaagatgtggctgaacttgagctgaatccatacgcatggaaccaagttgccaatttgctgttcctggactctcctgctggtgttgggttttcttacaccaacacatcctttggaaaagatccaccaggagacaattccaccgcatatggttcatacactttcctgatcaggtggttccagaggttccctcagcacaaaatgaaggagttctacatagctggagagagctatgcaggacattacgttccccagcttgctaatgtgattgtggatcagaacaagattgcacctaaagaaaattatataaacttgaaaggcatcatgataggaaatgcttacatggatggtgacacggatttgctaggaattgttgattctgcatggcatcacgcactcatctcagacaaactttacagtgactttcagaagttctgcaacttcagtttggttgatctgtctaaagagtgcaacgctgcaatcgatcagttcaacgctctctacagcatcatagatatctacagcctttacacccctcgatgcgagctcggatacccaaacttcaactcgtcgtttgcagcacaaatcggacggaccagcagccgttttgatttcctgaagataccaatgggctatgatccatgctcgcaaactaattctatcaaccgagcatggaacgactctgacatgactgtccttccaatcgtcaagaaactcactcaatcagggctccggatatggatttacagcggcgacacggacgcaagaatccctacaacctcaaccaggtacacgctgaaaaagcttggcctgcccatcaaagaggactggtcgccatggttccatcacaagcaggttggtgggtggagtgtggtgttcgacggactgacatttgtcacggtgagaggagccggccacatggtgccatccatcatgccagagcaagcgcttgagctgttcaagtacttcctggccaatcagaacctcccatccaagccattctag

SEQ ID NO: 62738 - DNA, 450 bp, Oryza sativa
  Clone ID: PAT_MRT4530_64048C.1
gaaaattaacggaaatagtcgcctaccgccctctgggagggcgattttaaaagtggcagacggccgttcgctctcgggcgacggccgtcaacgaaatttgcaggcggcccccttgccgccctccgcgagggcgattttctactgtgcggggggccgcctgcaaatgggcggcgagggggcatggaattttgcaggcggcccccttgccgccctgggggagggcgattttttcctccccccacggcctcgcgcgcctatcgtcggaacaggacctcgacctacggtacctgtttcacacggtactgctcagcccagagtagccagttctacgacgacgacttgcacggtgcacaccaccacgacgtactaggctcctctcagcttggaggagctccagaggcgcacactcaggagcagccagaggtcacacctgtacaggcaggacgggtt

SEQ ID NO: 62739 - DNA, 921 bp, Oryza sativa
  Clone ID: PAT_MRT4530_64049C.1
tccctcctaccctgtgccctaacgtgcccctaggagtacgtgagtcggtccggtggtatggataggagagaggcaaaaatcgccctcccccagggcggcaagggggccgcctgcaaaattctaggccccctcgccgcccatttgcaggtggccccccgcacagtgtaaaatcgccctcccccagggcagcaagggggccgcctgcaaaattccatgcccccctcgccgcccatttgcaggcggccccccgcacagtacaaaatcgccctagcggagggcggcaagggggccgcctgcaaatttcgttgacggccgtcgcccgagagcgaacggccgtctgccacgtcactttcgccgccctctgggatggcgatttttaaaaatcgccctcccagagggcggtaggcgaccacttccgtcaattttcaaaatggaaaattatttttgtaaaacttttaataaaaaaattaaaaataaaaaaaattctggtggcggtgggtggccgagaggctagcacagctatagacggccatgtgggccgcctggcacgccggctgtgcctgggccgaggcttgtcgggccggcacggcccgaccgacgcaccgggccgtgccgtggcagcccacgtgccgcactcacggcccaggcatggcccaacacgactcggccgtgccgggccaacacgaaggcacgatggcctatttccctatactttgtatgtcgggcctggcatgctggcccattgtgtcgggccggcccaaccgtgccgggccagcccagcatgccggtggggaggcccaggcacggcccggaggtcgggccggcacgggcctgacccaagtcgggccgggccttcgggcctcgggccttatggccatctataagcacagcatcgacgaccgtagcacacgggcgaacaga

SEQ ID NO: 62740 - DNA, 470 bp, Oryza sativa
  Clone ID: PAT_MRT4530_6404C.1
gtcttggttgcttctgccatggatgtcctcgtcggctttttctccggtgaagattccctatcaatcattttccaggttcaccattaacgcccgaagctaagagcacgatgggtttgcccaaaagaaggtagcgctggccacttgcttcttctccggcgagctttctgcatctatgttggtcttcttactcgtctttggcgttagctttacaagctagccatggattatcagctcctgtcgtcgttcaatgcgtcgatctggccttcgttgttgtggacatggcaaagagaaggacccgattgctttttctgtttctttctaggtccttccttgcatatttcagggttaaaatgtaatttggccatctgtcaggggtctccctgtaagacttgctgtactctcaacttgcttaataaatttctaatctgaggctgtagcctcagtttgttctaaaaaaaaaaaaaaaaaaa

SEQ ID NO: 62741 - DNA, 420 bp, Oryza sativa
  Clone ID: PAT_MRT4530_64050C.1
tcgttttactgccaatccttccttacgactcggcggctgttatccacatagccgccacgatccccaaacgccaagccgacccgtcaaatccccgtcatgctgaaggcccccacggatgcgcgcctaagctcaagatgtaggcagggaaggtaaccaccacgccggctctggataaacgggtgttgcaacaacaacaacaaatacaacgccgccgaaaaccgcaagaataacttcagacgccggcgcgacaccaccagcaacggcaaccactacctaacgatgagaccaaacgttcctcatgtggatgagagagaggacatacatggacagctcccaggagatggcgaccccaaggaccgccacgttctaggcgcacgaggaggagaagaaggccgccacgttggacgatcccgaagaggt

SEQ ID NO: 62742 - DNA, 2611 bp, Oryza sativa
  Clone ID: PAT_MRT4530_64051C.1
taccgtgcgaaaccggtgctgtaggtcgcactgctccgaagctaggggcgctcgaagacaaacgaggtcctgctccgacggtaggaccgcgaggccggggaggcaaaaatcgccctcgcggagggcggcaagggggccgcctgcaaaattccatgccccctcgccgcccatttgcaggcggccccccgcacagtgcaaaatcgccctcgcggagggcggcaagggggccgcctgcaaaattccatgccccccctcgccgcccatttgcaggcggccccccgcacagtacaaaatcgccctcgcggagggcggcaagggggccgcctgcaaatttcgttgacggccgtcgcccgagagcgaacggccgtctgccacgtgttgtttattttatgtttgtgtgtcacaaagatgtttgcccaatttgatgcttgtttgcatatgcattcttgtgctttcccgaattgttaactactgtcaagtacaatccgctcccccaaccttcctcctcaaccacctcctcaccgcctacgccaagtccggccgcctcgcccgagcccgccgcgtgttcgacgaaatgcccgaccccaacctcttcacccgcaacgccctcctctcggcgctcgcccactcaaggctcgtcccggacatggagcgcctcttcgcctcgatgcccgagcgggacgccgtctcctacaacgcgctcatcaccggcttctccagcaccggctctcctgcccggtcggtccagctgtaccgcgcgctgctccgggaggagagcgtcaggccaacccggattactctgtcggcgatgatcatggtcgcttcggctctctccgaccgcgcgcttggccactcggtgcattgccaggtactgcggcttgggttcggggcatatgctttcgttgggagcccgttggtcgatatgtatgccaagatgggcctcattagggatgccaggcgggtgtttcaagaaatggaggccaagactgtggtcatgtacaataccttgatcacagggctgctccgctgcaagatgatcgaggatgcaaagggtttgtttcagctgatggtggacagggattccattacttggactacgatggttacaggactgactcagaacggtttgcagttggaggctcttgatgttttcaggagaatgagggcagagggtgttggcattgatcagtacactttcggaagcattcttacagcctgcggtgcccttgctgccttggaagaagggaagcagatacatgcctacataactcggacttggtatgaagataatgtctttgtcgggagtgcgcttgttgacatgtactccaagtgcaggagcatcagattggcagaggctgttttcaggaggatgacatgcagaaacatcatatcgtggactgcgatgattgttggatatggacagaatgcttgcagtgaggaggctgtccgggcattctcagagatgcaaatggatggcattaagcctgatgatttcactctaggcagtgttataagttcttgtgctaatttagcaagtctggaagagggtgcacagttccactgcctagcacttgtctcagggttgatgcggtacattacagtgtccaatgcactagttaccttgtatgggaagtgtggcagcattgaggatgcacaccgcttatttgatgagatgtccttccacgatcaagtctcctggactgctcttgtgacagggtatgctcaatttgggaaggcaaaagaaactatagatttgtttgagaagatgttggcaaatggcttgaagcctgatggggtaacatttatcggtgtcctttctgcttgtagccgtgcaggacttgtagagaaagggtgcgactactttgattccatgcagaaggaccacggtattgttcctatagatgatcactacacttgtatgattgacttgtacagtagatcagggaggttcaaagaggctgaggaattcataaagcagatgccacacagtcctgatgcctttggatgggcaacattgctgagctcgtgtaggctgcgtgggaacatggagattggcaagtgggcagctgagaatctcttggaaactgacccacaaaaccctgccagctatgtgttgttgtgtagcatgcatgctgctaaaggtcaatggactgaagtcgctcatcttagacgtggaatgagggacaggcaggtgaagaaggaaccaggctgcagttggatcaagtacaagaacaaagttcacatattttcagccgatgaccaatcccaccccttctccagtagaatatacgaaaagctagagtggctcaactcaaagatggctgaagaaggatacaagcctgatgtcagctcggtgctgcatgatgtggcagatgctgataaggttcacatgattagccatcacagcgagaagctagcaattgcctttggcttaatctttgttccacaagaaatgccaattcggattgtcaagaatctacgggtatgtgtggattgtcacaatgctaccaagttcatttctaagataactggccgtgatattcttgtgagggatgctgtcagatttcacaagtttagtgatggcacgtgctcgtgcggagacttctggtag

SEQ ID NO: 62743 - DNA, 693 bp, Oryza sativa
  Clone ID: PAT_MRT4530_64052C.1
atgccttatcggcactatggcgaagggcgtgggttggcgaaccctcttcgcccgcagcccttgacgccgtgccttattggcactatggcgaagggcgtggcgtttggcgaaccctgttcgcccgcagcccttgacgtcgtgccttattggcactatggcgaagggcgtgggttggcgaaccctcttcgcccgcagcccttgacgccgtgccttattggcactatggcgaagggcgtggcgtttggcgaaccctgttcgcccgtagcccttgacgccgtgccttattggcactatggcgaagggcgtgggttggtgaaccctcttcgcccgcagcccttgacgccgtgccttattggcactatggcgaagggcgtggcgtttggcgaaccctgttcgcccgcagcccttgacgccgtgccttattggcactatggcgaagggcgtggcgtatggcgaaaggtgtctagaggctggggtggcttcgtagccccccagcttggacttaactcacttttgccccaagcccttgtcgccgtacctcacgggtactgtggtgaagggtgtgggtgtggcgaaaggggtcccatttcgccctttcggtctaggttccccacggacggcgccagctgttgtcgaatggacaactatgccacgtcgaaaggcgtggttctctcaatagtagttggaatgtaa

SEQ ID NO: 62744 - DNA, 612 bp, Oryza sativa
  unsure (1)..(612): unsure at all n locations
  Clone ID: PAT_MRT4530_64053C.1
tgtcgtcccggtccncggtgtttccgggttgtgccctttcatgggtgcatagccatagttcgttgctgctgtgctagctttctgaggaggctttctcgcccgccggcggtcttcgcccggcgtgtggcgcccctgccgtgcctatcgaaccgctgccgcctgccgtggcctgtctccgggcagctggctcactcggcantcgtcngtccgccgctttgttcaggcagccagacggctctcatttgtgggcccacttngccgccgcctgtcatccacgccaggtgctcncgccagccaagcgctattnggcgnacgtcagtggaggtcttaagcttcncagttgtcgttttgcttggcactgccatctggcatgcacatggctaattaaatatgggatatatatatacgcgtccattgatgcatgtgaaatgttnttgcccttgtgtatggtttggttggttcatgcaaaatgcatggctgnatataggggaaatatgtacatatgagttgctgttcatagaaaagattgaaaggcatacatatactttgtacncaaatgtaaaatctaagagtagagtacgcncgcaactgtaaaaaaaaaaaaaaaaaaaa

SEQ ID NO: 62745 - DNA, 204 bp, Oryza sativa
  Clone ID: PAT_MRT4530_64054C.1
gagatccggagccaaccatcttaataatgtatacggcctttaagcgacaactttcgataactattgattgcttgaacaaaatcatctacaaaaaaaacataggatgcactgtcacacagactcacataacttggatgcaggcatcatctaattaagttgtatatatcgttgcaaacctgctgatatcaggctagcttgctgaac

SEQ ID NO: 62746 - DNA, 669 bp, Oryza sativa
  Clone ID: PAT_MRT4530_64055C.1
atggggagaaacgttctcgggaggaggcgtcccgcgttcatcagcgtgccatggagatgggtcatggtggatgtcgtcgcccccagggacgccggatcacatgtagagatgatgaggacgacattagcaattgccgatgacgatctatacattcttggtttcgctaatcgcaccggccattggcacgtcatgaaagattttggaggtttaccagaaccactcacgaagctaacgattgaacatagctatggcgacctggttggtagtttccagaatctccacacagttcctctgggaagggagtccgccgtacaagccgtcagaacacttgcaaactacaacagcgccatggccgaagcacaactcaaactgccgattgccaagtttgcgatcatgatatctgaagccctgcggttccctttcatcaggaatacgttcagtacaaattgggagagcgagaccttcatgaagccggaccatgtgaaatacgtggtttattggggacggctctctaaggccctagtgtggtggaagcaaagtggaaataattggtggccacgtccagacagcgaccttggtgaagactttgaatacattaatgtcaaaacgtcacaggatgctgtgaagctagttgatttgctgattcgcccagcttcaaggtactcctag

SEQ ID NO: 62747 - DNA, 472 bp, Oryza sativa
  Clone ID: PAT_MRT4530_64056C.1
gactaaatatgaaagacagcttttgttctatttattttacccaaagttacacatgtcacatatgatgatatatgagcgtattttgaacttccgaaccactatactgaataaactgattacaagacaccgccaggggtggtgacggtgctgggtgcaccataatacctagggtagataccatatctagatggcgcgttaaaagccaacggagcttgagcttgagccagattccggtcaaagtagagatcaccaaactgctggagatgtagctgctgcgctatggcctgaacaatgttaatgtgctgattgtgagatagttgcgccaccagcgctagctgttgtcatacttgaatggagctcagttggaactcagctgatagcaagaaggggcttgccggtataccatacttgctgcttacgaactaattatatggtgtaagcacctgtggctgtaacaagacatgcgactgca

SEQ ID NO: 62748 - DNA, 213 bp, Oryza sativa
  Clone ID: PAT_MRT4530_64057C.1
cccaactctcgccgcacctcgttggcgccgacgatgagccgccggcgcatgtgcactcgcacacagatcctagacggcaggctgacggtgaatattgccgaaggtaacattgcttgttgaagccagctagcaaccagagatcgcgtcagctcgaaggatcggcatggtgattattgggacagtgtagctagtcgctattctgaagcttggagc

SEQ ID NO: 62749 - DNA, 2970 bp, Oryza sativa
  Clone ID: PAT_MRT4530_64058C.1
gagatcagctttgcgatttgccggcaaaagactctgatcaatgtgacgggacctaccgcaagataccgaagctacattaagcacggtgcaggggttctttgacaggttgacggggaggaacaaggaggcgtggaaggaagggaggatccgtgggacggcggtgctggtgaagaaggacgtgctcggcctcggcgacttccacgcctccctcctcgacggcgtccacaacatcctcggccacaaggagggcgtcgccttccgcctcgtcagcgccaccgcccgcgacccaagcaatggagggagggggaagctggggaagccggcgcacctggaggagctggtggtgacgatgaagtcgacggcggcgggggagtcggtgttccgggtggcgttcgagtgggacgagtcgcaggggatccccggcgccgtcgtcgtcaccaactccaaccggtccgagttcttcctcaagacgctcaccctcgacggcgtccccggcaagggcaccgtcgtcttcgtcgccaactcgtggatctaccccgccgacaactaccagtacgagcgcgtcttcttcgccaacgatacatatctgcctagcaaaatgcctgcacctttgatcccttaccggcaagaagaactcaacattctacgaggggacggtaaaattggaccatacaaggagcatgaccgtatctaccgttatgattactataacgaccttggccaaccagacaaaggcagtaaactagtacgaccagtcctcggtggcagccaagaactcccctatccccgtcgaggcagaactggccgggccccaacaaagactgacccaaatacagaaagcaggcttcctctgctggacttgaacatttatgtcccacgcgacgaacggttcgggcacctcaagatgtcagacttccttgggtactctcttaaggctattgttgagggtgttctcccaataataaggacctatgtcgatacgacaccaaaggagtttgattcttttcaagacatcatggaactctatgaaggtggattgaaagtggccaatgcctctgcactagcagagatcaagaagagagttccctttgaacttattaagagtcttttgccagttgctggcgatcaagtcttgaagttacccctaccacatgttatcaaagaggacaaatttgcttggaggactgatgaggagtttgcacgagaaatgctcgcaggagttaacccagtgatgatcaagcgtctgacgaatttcccggcaaaaagtactctggatccaaatgtgtacggtgaccataccagcaagatcaccgaagctcacattaagcacaacatggagggcctcacggtgcaaaatgcactgaagggcaacaggcttttcatcctagaccaccacgatcacttcatgccgttcctggacaagatcaacaagttggacggtaacttcatatatgcgagcaggaccattctgctcctgaaggacgatggcaccctgaagcccctggcgatcgagctgagcctgccgcaccccgatggccagcagcacggcgccgtcagcaaggtgtacactccagccaacaccggcgtcgagagccaaatctggcagctcgccaaggcttacgcctccgtcaacgactctgcttggcaccagctgatcagccactggctgaacactcacgccgtgatcgagccgttcgtgatcgcgacgaaccggcagctcagcgtggtgcaccccgtgcacaagctgctgagcccgcactaccgcgacacgatgaacatcaacgctctggcacggcagacactcatcaacgccgatggcatcttcgagaagaccgtcttcccaggcaagtacgcgctcgagatgtcctccgtcgtgtacaagaactggaagttcaccgagcaggctctccccgtcgatctcgtcaagagaggggtggccgtgccggacccgacgagcccgtacaacgtccggctgctgatcaaggactacccgtacgccgtggacgggctggtgatctggtgggcgatcgagcggtgggtgggcgagtacctggccatctactaccccaacgacggcgtgctccgcggcgacgaggagctgcaggcgtggtggaaggaggtgcgcgaggtcggccatggcgacctcaaggaccaggactggtggcccaagatggacaccgtccaggagctcacccgggcgtgcaccatcatcatctggatcgcgtcggcgctgcacgcggcggtcaacttcggccagtacccgtacgcggggttcctcccgaaccggccgacggtgagccggcggccgatgccggagccgggcaccgaggagtacgcgaagctggagcgcggcggtgacgaggccgacctggtgttcatccacacaatcaccagccagttccagaccatcctcggcatctcgctcatcgagatcctgtccaagcactcctccgacgaggtctacctcggccaacgcgacacgccggagtggacgtcggacgccaaggcgctggacgcgttcaagaggttcggcagccggctggtggatatcgagaaccggatcaaggacatgaacggcaactcggcgctcaagaaccggaacgggccggtgaagatgccgtacatgctgctgtaccccaacacgtcggatgtcaccaaggagaagggccaagggctcaccgccatgggcatccccaacagcatctccatctgagtctcgcgtgcattctttagatcgatatacgtgtgctattgctagtgttgcgcgtttgccgtcgtcgatttgtttcattgtttgtatcagtgtgcattaccgtgattcttcgtagttcagggtctcagggataagtcgttgcaaatgtgagtaaccttgaggcatggataatttcattaggaattattcacatggaataatgaaagttaataaaatcattttgctttcagagttccctcaaaaaaaaaaaaacaaaa

SEQ ID NO: 62750 - DNA, 183 bp, Oryza sativa
  Clone ID: PAT_MRT4530_64059C.1
atggatcaggaagtggcgccgccaactgcgccgcccgagaatccatcaatccgcaagcttttgcgttgttactgcgaccttgatccaccaagatcccggaggattgacaggcaggacactggagcgaagctgcggaggagggattttgacgacgccagggcaagggcttcctcgtcgcagtag

SEQ ID NO: 62751 - DNA, 794 bp, Oryza sativa
  Clone ID: PAT_MRT4530_6405C.1
agcttccttcgtctctcaaagtctcgaggaacttctcaggcgaaaaaattatcccctcctttccggccccttcccttccatccccggcggcttcccagccgtcggcaagggggtaggggggggggggtgggagggggtctagttccttccttcactagtaagcttaggtttagacttctcgggtatctcccgttgttgggttaatccctttttgtacagctcgaaggggtcgtcggcgtccggcttcttcgtcttggttgcttctgccatggatgtcctcgtcggctttttctccggtgaagattccctatcaatcattttccaggttcaccattaacgcccgaagctaagagcacgatgggtttgcccaaaagaaggtagcgctggccacttgcttcttctccggcgagctttctgcatctatgttggtcttcttactcgtctttggcgttagctttacaaggtgcggctgatgtgtttctccgtttgccttagatgcttcaacctccatagagaggccccttttgggttcacatccaggcatcattatatgcagctagccatggattatcagctcctgtcgtcgttcaatgcgtcgatctggccttcgttgttgtggacatggcaaagagaaggacccgattgctttttctgtttctttctaggtccttccttgcatatttcagggttaaaatgtaatttggccatctgtcaggggtctccctgtaagacttgctgtactctcaacttgcttaataaatttctaatctgaggctgtagcctcagtttgttct

SEQ ID NO: 62752 - DNA, 646 bp, Oryza sativa
  Clone ID: PAT_MRT4530_64060C.1
ccggccgggatcaccagcttcaacatccaaacaatccttccaacttacaccacaactaaaacaacaacaccaaaaaccaaaaccaactacatcaccactatgcctgcttacgagtactgctgccagtgtggaggcatgattgtcatcagcaccacctgcaccgcctgtggccacaagcagtgcaacaactgccctctctgctaaatgcccagtcaagacggcgacaacatcacctatcccactccttcttttcccctactcctctgaactctaccccagaggttgcaatgcccacgagatgagagtctcgacacaccctttctcagatgagacatgacgacttttaacgacggcgcatctccttctctctaccctcttcaacaatgacacagtcgtcacattcaccctttacttcttcgacttgattgatacccttcttcggcattccagtatcagcaacactggtctcgtttcaggtctttgttaagtttacaatgtgcttttccatctcttgcgaggcgcacaaaggaagcaaggaaatgacgtcgggggtctttttttgttctgcaaccagggcgtttcaatcgtgctagctttggaggaggcttgtctggggggaggaacggattcaaaacggattattttc

SEQ ID NO: 62753 - DNA, 1209 bp, Oryza sativa
  Clone ID: PAT_MRT4530_64061C.1
atggccgcggcggcgcgggaggaggaggaggcgtcgacggcggcgaggagccggcaggagagcgagggggaggaggaggaggtgatggcggtgctggacttcgacatgctgtgcgcctcggtggcgctggcggcggagaggaggaaggattcggccgcggcggcggcggccacggtggaggccggtggtggaggaggcggaggaggaggaggaggggtgcagaggatgtgggaaggggacgtggtgctggattgcttggaggacaggcgaatcgcgctcgaggccgcgtgctgcccatgctacaggttcggcaagaacatgcggagagccaatcttggatcttgcttccttcaggccatggtttacttaatttctttagtggctattctggttagcctaatcgccttttctgtcacaaggcataatatatatttgtatatgggacttagctctgttctcttgatagcaatctatactggttacttccgaagaagaatcaggaagcagttcaatatcaggtttctagcattgaatgaacaggaggctcggacgttggagataaataatgtccagtgcggtgtctggcatgggcggggtgataccatttgtttaggaagcaacggtgaaggaaataaggcttttgctgctctacacaagtcctcttttgtgcctataaaatctcctgaggtgtgtggcatggacagaacatcaaatggtgctaatgagcatgaaccactcgtcccatcagatctaccagagcagtaggataatagcagttggcagttgtattgcatatacccttttgcacaaattcgaattgaaatggtgaaaattctcaagagaattggtggactgtccggcaagaaaataatctgtactgcaattacaggcctgtttgttgtatcaagcctgaaaatttgtattggcgctggcagcaaccatatgtgggtgataggtgcaagtgcaactgggttgttgtaaacttaggtgatagttctcatcgtgtatttggttttatttagtctcaagtcggtatctatattatatcatgatgctcaaggcttatgatgaatccaagtgtaaatttttctggctgttacatagtgtttcaacttccaactttcagggacaaattgacatgaatcaaatgaaatgtcatcaactgttgttaggtccttctcatgaatggaaaaaaaaaaaaaaaaaaaa

SEQ ID NO: 62754 - DNA, 452 bp, Oryza sativa
  Clone ID: PAT_MRT4530_64062C.1
tttttttttttttttttaaaatgaaacaaaaccattagaaaagggttaaacaattacaatttgcaatttccaaacacgatactaatacaaccaaacacccagaaaaagcaccacctgcaacacaccagtacacacagcacgcacatccgctggctttttgtgccagagttaaatcaccattaatttcaaagaaaccactacgtaactgtacgtgatcatccaagcaccgaagctaccatatatgccctcgaattctccgaattcagtatttcagtggcccaagcccatggcaatggcgacgttgagaatgaagccaactccgatggcggtgaggctgcatccgcccacctgcttccatgcgccggtgtcgtacgggctgttgtccaccagcgggttgggcgccgaatccgaacgacgtctgccccacgccctgtccctgcggggcccccccg

SEQ ID NO: 62755 - DNA, 481 bp, Oryza sativa
  Clone ID: PAT_MRT4530_64063C.1
gtgggttttttttttttttttttttttttttttttttttttttttttttttttttttttttttttttttggatcttggaaagcttttccttttatcaaaccgggttatttacccccaggcctttaaggttttttttccagagcaccgagtgttaccgaggaagcagggtaaaatttttgtcccgcgcgggcgacaacaaactaaaaacgggaaatggtaaaaaaaagcgaaaacggccgaaaatgccccatggaaattgggaatagcctaattcttaccgtttatttttattaaaaaataaaccccaaccgggaccccattttaactttaaaatttgaaattttaaactgaaactttaaaaactttaacccattttttcttggaaacttgaattttaaacaatcaaaaccctttggccaagaacttgacctaaggtcaaaattgtggaaacgttgattgaataaaaaaaaaaccccccaaa

SEQ ID NO: 62756 - DNA, 1351 bp, Oryza sativa
  Clone ID: PAT_MRT4530_64064C.1
ttgggtcggcattggcatagcacccagctcggtgctcacgggcacacaccgtcacgcccggcctgcccggatccgcttgtgtttgtgttttagacaccaagtgctttgaatagaagtatcaaaagtatcaaggtggaaaatttcttaaaatcgacaatactatagtctaagagtacatgtaaatatataatgtatttgacaacatacaaatttgggtcaaaaggcattctacagcaaactaggcaatcattgcaacatttgtagcccgacctcagttgttgtcgcttgggtcatctactgctgcggcccaggaaatccttgcattggaggacgaggaggtgctccaggagtgaagttagccattgcaccaccggtcataggtgggggtgggattgatcgtggaggtccatttgcaagtgggggcggtggtggtggaggttgagtaccaccaacaggtgggggtgggatccttgggggcatacccataggtgcatttggtggaggcggcggcggagcctgtggcgggggtggcggaacctgcggtgggggtgggcgtggtggacctccagatccatttggcaaagtcccaggagccgcaggcggcttattagcttctggttgtcttgttttgaagtatagttggagaatgtactgtttcttgtctggatccccaatagttgaagaatttatctgctgacttgtcgatctctgcgcttggtatcttaaagccaataatttcatagggctctgctgcaaaaagtagatattgatactttttatcccaagattcgactttctgttcatatgatgccatgaaacggtgccttggcttgctgttttcttcaatttcaggataaccaatctcaaaaagaaatgagtgttgcttcatgtcaggatcatactgcttagtcacctgatacccaggtcttccaatcttaacggacttgcggggcgcgaactttctcttgttgggctggggctgcgcgggcgcgtccttggcctcgcgggcggcacgcttggcgaggttggtctggtgccgcttcccctgcgtgtgagccaggtagttcccctcgttgttgtgcagcgtcaggcacagcttgcactcgtagctgccgaggtggttgcgcatgaagtaggggtccttggcgaggtaaacgaggaagaggaaaggtaggggttgagcggccggcaggcagtagccgccgtggtggttgcggatgaagcagcggtccctggcgtggtcgcccgtctcgagggccatggcgtccccgctcgcccgccggtcgatggcctcattctgggcggaggcggcgccgccgctgccgggcttggagccccactcgcgatccat

SEQ ID NO: 62757 - DNA, 118 bp, Oryza sativa
  Clone ID: PAT_MRT4530_64065C.1
agaccgacagaagaaggcaccggaagaacaccgggaagaggaagccgaaactgaccaagacgaagaagcagacgcgcaacagggacaacccggagccagaccaaggacagacccaaaa

SEQ ID NO: 62758 - DNA, 411 bp, Oryza sativa
  Clone ID: PAT_MRT4530_64066C.1
atgtggatgcggatgcggattttatcatccggcgccgccgctggtcgtcgtcggctcctcggcgtcgccgccagtgccagtacagtcgcccgcgccatccgcgccatcccaattgtcggcccgtcggcccgtcgccggcgccaggccgccagcgcccaggcggcaccgtcgcctgcgcaatccccatcgccagctgttgttcccctgttccagtccgacgaggtgatggccaacgacgaggctgtgtgccttactgctgtatgctgcgtgctctactgctctatgtgctctatgttgtatgcctgtgagctgaaggcagtagtatccatggtgacagggctggagcccagggagcagaggcccctgttcaggggcaaggagagggaggacagtgaccacctcaaggacatg

SEQ ID NO: 62759 - DNA, 167 bp, Oryza sativa
  Clone ID: PAT_MRT4530_64067C.1
ttgtggcctcttgcataacgcgggggaatcaccaacatgtaacatagggattatcaggttaattcttcgacccggccgctgccgtgaaaaaatacaactcggcagcctcaaccacggagatcatgatcacctgagtacacccatacgacactttgcacgatcgacgt

SEQ ID NO: 62760 - DNA, 302 bp, Oryza sativa
  unsure (1)..(302): unsure at all n locations
  Clone ID: PAT_MRT4530_64068C.1
cccacgcgtccgatcaccactttggttcctcccatttttcatttcaaagtgatactaataagcaagtgcaaggatagctagcttgacagtgtggaagtagtagtaggagcaagaggcaaattaaggggaagctgcaggtggtagatgcgtaatgcgagcggcagcagctgctgctctcgggtggcggcgccgttgcatgcgcaagtgcttggctcgccgtctccttctcatggcttacgcggcgccggcnacggctgncttctgcaggcacctcccccggcagncgnctgtggggagatgct

SEQ ID NO: 62761 - DNA, 204 bp, Oryza sativa
  Clone ID: PAT_MRT4530_64069C.1
atgtcgcactctcgcagcggggttggtcttgccctctacaggccctcctccacgtccaactcggggcagaaaccaaaggaaacccgaaacatgccttcccgagcaaggaaacctcgagacccgacaaaacacagtcggactcagacctgccggtcagaccggccacacaccgccggtctgaccggccctcaactggcggtctga

SEQ ID NO: 62762 - DNA, 570 bp, Oryza sativa
  unsure (1)..(570): unsure at all n locations
  Clone ID: PAT_MRT4530_6406C.1
tatccagttttagagtttagagtcaaaatgggggctgctaagagtttagagtcaaaatgtggtctgctaagagcaagtaaaaacttcctacattttggaaatggatctttgttagtaggttactagaaaaacaataggctgcttcaatncaggttttgatcaacccatctaacctcataaaaagtggggataaactatatgaaataatgaccaaattatacagaactgtgcagcagaattgccaagggtccatatgcagataaatcaggccaatggtatttgggcatttgtatcactgttgtcttgtggcagcaattagttacgcaactgaacatgcctgccatcagctgaccttgccttttgatctggaaagggtggtaaactgaatactgtttagcttgttttgtggacgatatatcatattggatattcttgtgttcattaaatgtggatcagcatttcatcaacttgcagttccttaattacttccttatagttttcattatagttttcatctttgcaaaactttcttatgatctactttgatctatctgcacagcagttataagt

SEQ ID NO: 62763 - DNA, 1227 bp, Oryza sativa
  Clone ID: PAT_MRT4530_64070C.1
atgcaagcctcatcggcggcggcggcggcggcgtgctcggctatcaagccggcggcgcatcagcacaccgtgcaagtccaggaagataagaggggatcggaattcagggctcggtttggaacgaggaaactgtcctggggaggtaaattgtcggtggaaaattctgctctacaccagtgtcaaaggcaagcactctctctcacaagaagcataaggaggcaaaaaagacaacattctccagtcctccaagtgagatgctatgccattgctggtgatcagcacgaatccatcgccactgagtttgaagaaatttgcaaagaagttccccagaaactgggagctttttatcggttttgccgaccccacacaatttttggcactataataggaatcacttcagtttctctcctgccaatgaggagcctagatgattttactatgaaagcattatggggatttcttgaggctttatcctcttctttatgtatgaatatctatgttgtaggcctgaatcaactatatgacatccagattgataaggtcaataagcccagccttccgttggcgtcaggagaattttcagtggcaactggagcagtgttagtactcacgtccttgatcatgagcattgccattggaatcagatccaaatcagctcctttgttatgtgctttgtttatcagtttctttcttggaagtgcatactctgttgatgctccgttactccggtggaaaaggaacgcgtttctcgctgcatcttgtatactatttgtaagagctgtcttagttcagctagctttctttgcacatatgcagcaacatgttctgaagaggcccttggcaccaacaaagtcggtggttttcgcaacattattcatgtgttgcttttcttcagttatagctttattcaaggatattccagatattgatggtgacagacattttggcgtcgaatccctgagcgtacgtttgggtccagaaagagtgtattggctctgcataaacatactattaacagcatatggggctgccattttggctggagcatcatctacaaatctatgtcaaatgattatcaccgttttcggccatggcctgcttgcctttgcactttggcagagagcacagcactgtgacgttgaaaacaaggcgtggatcacatcattttacatgttcatttggaagttgttctacgctgagtatttccttataccatttgtgcagtga

SEQ ID NO: 62764 - DNA, 443 bp, Oryza sativa
  Clone ID: PAT_MRT4530_64071C.1
atgttgcgcccctgggcggccaaccaccctcatgagaggcagtcacgacaccttctcgtccacgtcgctgccgccctccgccgtcaacagaggagccacgccgaccgtttcctgactagagaacagctcaccggcgtcgtcgagcggttcgacatggcgaaggcgagcacgcaacaggcagccgagccagccgactactcccattccccgatttcccccgacccccacgcatcccggccggcggccgccgccgccgcctcaccccttcgccgccgcgtcctcaccccttcgccgccgcctccgccacctcacctctttgccgccgccgccgccgcctcgccccttcgccacagccgccgcctcttcgtcggcgtcgtcgcgtcggccaacagccgcctcctcttcgccggcgtcgtcgcatcgccgtatcaccgccactgccg

SEQ ID NO: 62765 - DNA, 175 bp, Oryza sativa
  Clone ID: PAT_MRT4530_64072C.1
atgaggcttgcacatgccgacatcaactgtcaaggagcctccatagcacaattcaccgaatcgttttggatggggttattgtcatcccacggtaagacgctcagacagcccgagaatgcaaccgacgacacggacgaggcgaacaccaacaacagcagctgcagcggaaccaacg

SEQ ID NO: 62766 - DNA, 390 bp, Oryza sativa
  Clone ID: PAT_MRT4530_64073C.1
atggcgaagcaccaggccgacctcgtgaggtgctcgcggcagccgggcgccgccgtcggccgcgtctgcgcggcgcacgacggccgctgcgtcgcctgcgactccatggtgcggcccgccgcgccggcccgcgtctgcgacggctgcagcggcggcggcggcgggcacggctcccgcagcgagaggtgcctggtgtgcggcgccggcgccggagaaggaggtgcggcggcggtggcggatgcgtactactgcaggtcgtgcgtgcagatggagaaggatcgcgacggctgccccgccgtcgtcaacgccggcacggccaggagggacgccgccgccttcttcttctccgcgaggagcaagcgtggtggcttcagatcaacaatggcgtga

SEQ ID NO: 62767 - DNA, 747 bp, Oryza sativa
  unsure (1)..(747): unsure at all n locations
  Clone ID: PAT_MRT4530_64074C.1
tttgatggccctaaggaagttgcgtcactacttccaagcgcatcaagtttccgtagtgacgtcgtaccctctcggccaaattttgcacaaccgagagggtactggacgggtggtaaaatgggccatcgagctggctgagttcgatctgcacttcgaaccgcggcacgcgatcaaaagtcaagtcctggctgacttcatcgcggaatggaccccagtggatgaacctgttccatccgatgtccctttcccccctagagaggaagaggatccaaacgccgacattcgcggcgggcactggattatgcatttcgatggctccctcaaccttcaggtgcagggcggnaccagaatgggcatccgccatctcctggtcctaggtgactcccagctggtcgtaaatcaagtatccaaagagtatcagtgcaccgacccgcaaatggaagcatatgtctacgaagtacggcgcatggaacgccacttcgacggacttgagctccagcacgtgccccgacgcggcaacacagttgctgacgagttgttgcgtgttgcgtcggcacgagccccactccccccagggactttcgaagaaaggctcgcgcaaccatcggcgcgaccgaaccctttgagggaccccaacaacacgccctccaaccctggtatggatgaccgacatccggggtatctcgacggcaatactcttcataaggatcgcgcagaagctgaaaaggtcgcgcgcatctccaaacg

SEQ ID NO: 62768 - DNA, 973 bp, Oryza sativa
  Clone ID: PAT_MRT4530_64075C.1
tggccgccgtcggcctcctcccagcgacgaggtcgagggtagaaggggaaatcgcaagcgaggaaaccgtgtccacaagcgccgaagccccccaacgcgtcgcctggctgcagctccccacgaaaagctggcggggagcggagagagccgcgtcctttagcagagggacgcgctccatcgcggggggacggcgcggacggaaaagtttgccgccgtcgctaggggcacgacctgggggcacccattgtggatggcctaattcccctgggattcgattcccttttgcgtttgagtttccaatttcccttcgattaaaagtcatatgtaacagctggagaaaagaaaacatacagggagccccttacccggtctcaaggtggaacggcaagcggccgtggaagcccgggaggtgggtgatcaccgacgacgacgccgagcacggcagcagcagcggtagcaggagggagaggactcatgtggcgaggcgcggtggttgcaggagcatgcatcgccccccgcggggagcagcctttgtgagaagctcccagaccatcgctttgcttcctttttcagagctccggcagctcgaaatctaggttttttggtcaacagttttttttttgggggaactgaggaagcgcaggctgttttccatgggggcttgggggtgtagtggtgttatttttgtgccctaatccaagcgtagtgccagtgtgtcgtgcacgccggtagttttgggctggggggggcccggtggcggtggcgtcgtcttcgcggtgttggcgccgctagtggggtgcactcggggcgggggctggagggcgtggcgtggggtttgtggggaggcgatggagagctagtggtgattttgaggtggtgagcggagagatagagttaatggcgtgacatggttggtggtgtagtgtgaaggtgtctaggtagtggtaggttgaatctcacaaggaggaggaga

SEQ ID NO: 62769 - DNA, 2877 bp, Oryza sativa
  Clone ID: PAT_MRT4530_64076C.1
ttagataccaaattctaatttgtagtaattaactactaagacctgaagtgaattacatgagacaaatccatccccaataataaccccttggtcatcttccttcctgagcaacacctgctccttcatggtcctcggatatctcgacggaacaaccttgctcttagtcttaggatccaaataagaacagcacctacccaccaccctgtcatacagtgatatctcctccagattaaccgcggattccatcacgcgcctgatgaatcccacgaagtgttcatcgggttggaagccgacgatggtgagcttggccagattacggtgctcgaggttagccaccgatggctgccattcgacgttcgatttgtcgcagtagccgttctcctgccgtgtcgtctcgtccctctccatcttgcagcagtgatcccacactctgatggagagactctccagcctcggtgcggattccacgtttttcattgtccaagcgatgcagcagtcttaagagaggtagacgagagagacatgcggtggcgcgcccagcactggggctaaccacttcctgccttcaggctcaacccaaatctgctgcacgttccttctgaccgatttgcagttgaacagccgaagaaaccgcaggtttttgcaggtgaggaggatgccggcgatgtctgaatcgccgaaccagagccggatgaggccggcaaagacgggcgggaaggtggttaactaggagtggacatggacggcgtagtagaggaggtcgatagcgtcgcttgtcacgttgaagtgtagggcgtggaggtagacggggatctcaggccggaggaatttgaggacggcgttcgtcaagtcggccttgactccgttggtcgggacaacctcgtccagggtgaggccgcggaggtttggcggcgagaagtcggcgaagtcgaccgagataagggccagcatgtcggggaggatggcactcatgttgttggagcgaatgcatgatttcatggcggaagacgtgtccatcctctccaagatgttgagcacgacatcatccggcaaatcgttcagcctgtcctttccagggactaaacttggtgtaagtccattggcgttaagataccaacacttaacgtcgattaccctcctgaggggatttccatcaagtttcaagacttgcaggttaggctcaagcaaacccagctcaggtgggagtgttgttatattgttgtccgacagatcaagctcaatcaaagaagttaaatctttgataccctctggcacagatgtaagaagattctgactcagatcaagaattcgcagcagttttaagcccaataaactatcaggaaatccatggagtttcattcgtcttaggtagagttcctttaggtgaggtaatttcgaaaccgcagagggttcaggtagagaagaagcactgccacttaaatctagtacttcaagtttagacagggcctcaagatcagtagccaatatctctgccaaaggattgttgtctagctttaacaaagaaaggctggcaagggaggagaatacggtgccaggccaccttttaattttgttgttagacaaaatcaaagattgaagtgacgagcataatgacaactcgtttggcagatcttctattgaattcttagaaagatctagtttcatcacatcatttgtctcccaagctgcaggtggtacactggtcacaccaagaccactcaagtccagttccttagaagataaagacaatcttcttgctgcagcaatttgatcatcttttgttggagtgcttccagatcctgatgctccttcatcagatgaaagccgactgcgcagatactttaataatgctgttgttggtccagaaaccaaggaactccgaagtgtcctcataggattaccagtaagcagaagctttcttagggttgtcatagtaccttgaatatagcatgccgaagcatatgtgagtgtccatagtttcgaaagttcattaagatagtagcacacttgcatagagcatgctaagttttcaaagcagataccccatggaaaaaaagaatcagccctatgatctagttcagcaggcagaccagataatgagttgtttgatagatcaaggaaagagagcttgagtctacaagccccgacaggatactcctttagctggttagagtgtagatcaagtattcccaagttcgatagcatgccaatatcctctggtatggatgtcaacaagttatttcccatataaaactctgctagagaagagcaatcttttatggaaggaggaatcagggttatttcagcattcatctctgtaagcattgtccatgacataaacatcttgtctgatagcgtcacgagcttgttaccctctagattcaatctgaataacttggaacagccagcaagttcatctggcagtacggatatagtgttgtttgacgcattgagttctgacaactccaggcatctggcaagactaactgggagatctgtaaggcaattatttgagcagtcaaccttgactaaagcggtcgcaaaaccaatctcttcgggaaaagcgtttatttgattagaagatacatccaacgattttagcaaaggaaggtctccaatagctgcggggagggaagaaatattgttgtgactaatgtttaatacaacgagcgaagacaaatttctgaggtcttcacgcaacacctcaaggttgttatgagccaatatgagcttctgaaggtcaactccctcccaccatttctcatcctgagcccccgtgtccaagttgttgtacacctccttgggtacctccctgagggatcgattggagaggttgagggagcccgactccctggcggatttgagcacccgctccat

SEQ ID NO: 62770 - DNA, 492 bp, Oryza sativa
  Clone ID: PAT_MRT4530_64077C.1
atccccgccctcaacaccgccgccgccgccgtcgaggagaccggccgcgcctgatcctcctccccggcgacatggatgccaccaaaaaaaaactaaaaaaaataaaaaaaaacaaataacaccaaccatcctaatgtgaaaagcttagtggatcattccttttgatgtgattcgatgatgctgttaatctaaatctgatctgatgcgattatcttctttttttattttttgtacatacatatgctgtgcttctcctgcattaggatcttgggagaaactcaaaaactgatctgtaatattttctgtaatatcatctcgtctcatgtagttgtgacattgtggtgttgacattgtaacgaatcggtcgattcgaagagaacttgtggaaaaagaatcgagtcaagattgattcaaaaaaaaaaaaaaaaaaaaaaaaaaaaaaaaggggggggggcctcgtgccagaattcactgcagcccggggatccacta

SEQ ID NO: 62771 - DNA, 356 bp, Oryza sativa
  Clone ID: PAT_MRT4530_64078C.1
acagtatatcggtgcatatacggacattctctgaacacgttaaggaaatccatcacaaagtctgccaatggaaaggttactacccgtataggactgggtcgttactatatcgtgcagggtccggtgtctccgagtcctacttagagaccgtttgacctgcgatataaaagggaccccccgggggaacttaagggatcgaatctcagagcctacacaacgaccatagcctacgaagtcggagactacaggagccaagtcgccgggtgatctaggcgaatcaacttgactatggtctcgtcggtaccgctgagttttactactccctttgctcgtcgccgctccctcctgttcctcgc

SEQ ID NO: 62772 - DNA, 1253 bp, Oryza sativa
  Clone ID: PAT_MRT4530_64079C.1
ccgggctgcaggcagcttatatgacatcagaggctagtcctgcacttcctcgaagacatatgctcatgaaatcccacggcttcttccttcatgtggtgggaaatggcccacctctgatgctgcctttgaaggccacaaccttgtgaactgctatgctggcaacctctccatcgctgtcatccaagccaataattccttcaaggagcaataccgtgttgagtcatcccaacccttcggcaccgtcattggcatcttcgatggacatggaggctccgaagctgcctgattttcttgtgacaacctcttcctccacctccaagagaattgtccagctcacaacgtgtgacaactgatgctatcagcaaagcattcaaggccactgaagaagggttcattgagcttgtgtctcgccaatggaaaactgatccacaaattgcaactgttggggcatgctgccttgttggtgctgtgcaacaaaaaacactattcatagccaaccttggaaactctcgggctgttcttggaaaggtcagttgcattgggcagattgttgctgaacagctctctagtgagcacattgccaatgatgcatggaaagcaaagggcctcgtgcaggtgttgagagcgataggtgatgcatacttgaaatacccacagtatagcagggaaccactcaacaaaccaatactaagtgccaatccatctattgtttcacgcgttcttcgaccaagtgaccgcttcatcatatttggctcagctgttctatgggaatatctgtccaatcaggaagctgttgagattgttaaaaaccatcaagcttctggaagtgccaaaatgctagtaaaagcagctcttcatgcagcagccaaaaagcacaacttgcattactcagatctcttgaagatggacagggataatcctaggcatgtccatgaggatgtaattgccgtagtcttatttataaactatgatcaattactgaaagggaaacaagggcggcctctttccatcagataccctagatccatacaacatggattagttccttcaagcagaattagttaatgagatgttttcattgaaacaaccttgaaaagaggacacaacaaaacctctaactatgctaaattatcaacactttttgtattatgatagataatattctgttgttttgcatcatacaagtaaatgggaaactttgattgtaatatctactcactctggtcacatttattcagaattgtatttcttat

SEQ ID NO: 62773 - DNA, 427 bp, Oryza sativa
  Clone ID: PAT_MRT4530_6407C.1
cccacgcgtccgattgcaagagtgatagccatcatacgcaaacaagtaaacatggtgagagtggtgggagcaactctggtggatctagagccggcctattcagaacaccaatttcagggggcgtacacactgcgacttctgttcatgatttacccccaccggctcgagctgttcgcaatctgatggagcaggcacggtttgctcatctgtgtactgtcatgtctcggatgcatcatcgacgtgcaggatacccgtttggttctctagtggattttgcacctgatccaatgggacaccccattttttcactgtcccctttagccatccacacaaggaatcttctggaagatccgaggtgcacagtcgttgtacaggtgcctggatggagtggactgtcaaatgcacgtgtaacaattttttggtgatg

SEQ ID NO: 62774 - DNA, 453 bp, Oryza sativa
  Clone ID: PAT_MRT4530_64080C.1
ttatttcttctcttctcctctcttctcaacgcagtcgacgcaagatggggagaggcggtcgtcgaggccggccccggccgagctctgcgacggtgggcactggctggcgaggacagacgacgacagccggcgtcccaccctgactgggacgcggcgatggcgacgacatcggaggaacacgaagaggacggcgttgaagaggagaggggagatcggggacgggagggacggcacggcggagcggaaggcggtgagagccttcttggggaggtacgcggcggtgtaggagcagaggacaacagcaaggtgcggctcggtgggaggccgagagggaggcgtcgtcgatgacccggccttcctccccgtcgcgccgaaggagacggggcggagctccacggagtcgtccgcggcgtcggggctcgacttcgaggacaccgccctcaccctccgcat

SEQ ID NO: 62775 - DNA, 162 bp, Oryza sativa
  Clone ID: PAT_MRT4530_64081C.1
atgtttactaggctactcctgttacaccacacagcacagctggtcagctgcacggaggccatcggaggaaaaaagatctctcgagccctcgacgacgcctacttcttcgacggagacaaactagctagcgatctcctcctcgtctgcacaccaacggtttaa

SEQ ID NO: 62776 - DNA, 494 bp, Oryza sativa
  unsure (1)..(494): unsure at all n locations
  Clone ID: PAT_MRT4530_64082C.1
accttcctttcttttttttttttttttttagaggcttttaattgtactttgaagtgattagagaaatttaatcgcactttcaatcacataagccgagcatgcctccttcaacgtcgagctcggcgccttcggcctcgccaggctcgtcagcaacggtcgccggtcggcgctacccttggacgcgacggacggggagctcgccgccggactccgcccctgcatcggcgtcctcttctctcgcgataccatgctgggatggggnggaacggnncancggcggggagggaggacgctgcgaggaggaggagagccggagtcggagtggggccacctggtcgtcgtgggggccggtgaggtcgccgtcgatagggaaggccccaagcggagagcgcggcggaaagggagggccccgagcggcgacggcgttggggataggaggggatcccggcggcggngtcggngnnnggcccccaccttttcccgcctccccttcc

SEQ ID NO: 62777 - DNA, 1491 bp, Oryza sativa
  Clone ID: PAT_MRT4530_64083C.1
atgagcttccaggacctgctccgcgacatggaggccggcgtgctgcagccggcggcgccgccggcgcaggaggtggcgcacggcgtgttccagctcaacaccaaggtggaggccctccggtacatggccggcgcgctcggcacgcccagggacacgccctccctccgcggccgcctccgcggcacgcgcgccgggatcaagcggctggcgacgagcacgtcccaggcgctcaggcaggccgccgccgccgccgacgacgacgagtcggtatcctcctgctccaagctggccatggacttcgaggccgccgtgaacgagtaccagaagatcgagcgacgcattgcggcggtcgagcggcaagaaaccgccgccgccgctcgccgctcgccgccgccaccaactccgggcttcaatcacataaacaacaatggcgatcacacattccccgaacagaagcagacgcagctcgccgtgctacgagacatcaacctgctcgacagcgagatcgagctccacgaagccatcatcgcggagagggagcaggggatactggaggtgcagcaggagatcgccgacatccacgagatcttcagggacctcgcggtgctcgtccacgaccagggtgagtgcatcgagatcgtcaccgccaacatcgagatgaccgaggcggcgacgagccaggcggaggtgcagatctccaaagccgcggggattcgaggggagaaggaggagctcctgaccggcgcaggaaccgaggacaactcgccgtcgaaatgcttgctgctggctgttcttggattgtttctcttcatagttggacgccgtaagctctacagctcgggctgtccatcaaaacgtgggattactgacaaccagaccaagaatacggcggcgccggcgccggagaagaagtacaagggcgtgcggctgcggcaatgggggaagtgggtggcggagatccggctgcccaacagccgcgagagggtgtggctgggatcctacgacacgccggagaaggcggcgcgggcattcgacgctgccttcgtcttcctccgcggcgccggagccgccgacgccgcggggctcaacttccccgactcgccgctgccagttgtcgcgcgcactagagatctgcgcgaggtgtatgccttcgcggtctcgcatgccaacaggccgccgccggtggctggagaaacggctgccacggctctggctgcgatggcggcgctggagcacaatgaggtcagggaaaatattgcgccgtcgtcgccgctgtcggcagtgcaggtggcggcgccgccagctgggagctttgattggtcgcagctgatggcgaactcgccgccgctctactcgccaatagtgataggaagccatgcgtacgacgacctggcggtgtggcccacgacgcagccggtggaggaattcagtgaggaggataacgaaaatgaaggtgctacgagtgatgagctttggagcttcgatgtctga

SEQ ID NO: 62778 - DNA, 249 bp, Oryza sativa
  Clone ID: PAT_MRT4530_64084C.1
atggcgaccagggtttcccttaccgctggttaccgcggttaccgggcttaccgcggggtttttcacggttaccgcgtggtaaccccggtcccggcagtttgggaaaccctgatggcgtcttgctgctttggttggtctacttttatgagcatgcatggaatagcgtttaatattggatttttattgaaatggataagtttggagtcattgagtcaacttaatgtatattctctatcctatccattctag

SEQ ID NO: 62779 - DNA, 725 bp, Oryza sativa
  Clone ID: PAT_MRT4530_64085C.1
cccgtgcactccaccgccctagcgccgtcgccctcctttccgccgccgtcgccaccgctcggccgccgctagccatcgctagtcgctgcgccgagccgcgccgtcgacgccgtcgcattcgccgtcgtgcgggccaccccgtccacccatctcccgtcggattccgacgtcggaacccactctgcaccatgcgccggtgagcaccgccatggccgccgcttccggccggcgtcctcgcccccttccatcttcctctctctctaaccccattcatcatgttcgctaggtggttccggagctcgtcccgttgccgtcatcgccctccgtcgctcgcgtcgtcaatcgccgtcggtgagacacctcctccccctcctctttctctcccgcgctgcttagccgccgcgccgccgcctagccgcttagctgccgccctctgcccccggccggtcgctgccggtcgccgccgctgcgtcgagccgcgtcgccgcgcgccatggtcgctgggccggtttgagccgtgcccgtgcgcgccggctgcgagccgcctccgccgtccgatctatcgggcggtagatcggggccatctaaccccaccgcccgtgtggctgccacgtggccgccgcgtgtgcgccacgtcagcgccacgtgtgcaccacgtggtgcactgcctctttcccggtccgtggacccagtccacctcggaccgccacccgagtcactgccat

SEQ ID NO: 62780 - DNA, 341 bp, Oryza sativa
  unsure (1)..(341): unsure at all n locations
  Clone ID: PAT_MRT4530_64086C.1
tgaccgacccacgcgtgcgcgacgccaaggcatggacccgccgactacaaggccatcacggcgccgtgcgagctgccgacctcgtgcggcgcgtactgcctgtgggtccggggcggcggctaggccaagtgccagtgcctcaccaacagcaccgtgacctccccaccgtgcagagcctatgtacccttttatctttgcngctacagnnactgttactgctgtcatgtgtttgactatgttcggtttaattttttgnncntgcgtacaaggagcggctgccgttcgaggcgaacgcgacggctgaccatttctagcaggcttgcgctcgcaactgcagctgc

SEQ ID NO: 62781 - DNA, 352 bp, Oryza sativa
  Clone ID: PAT_MRT4530_64087C.1
cggacgcgtgggcggacgcgtgggcggacgcgtgggcggacgcgtgggcggacgcgtgggcggacgcgtggggccgaaatgaacagcaagatggttggcagcaaaccgctctacgttgcgcttgcacagcgcaaggaagacaggaaagcaaggctgcaggcacaattttcacaactgaggcctgtcccacttgctccttcagttggtcctcgcatgcccatgtttccacctggtgttcctggagttggacagcaactgttctatggtcaggccccttcagcgtttataaacacacaaagctgggtttgggttccagcagcctcttatgcctgggatgaggtcaggtgcaagt

SEQ ID NO: 62782 - DNA, 302 bp, Oryza sativa
  Clone ID: PAT_MRT4530_64088C.1
ggtgattaataagttcaacataagactatatgctgcctgacaaaagaaggcactagttatgtaaaaacaacacaaagtgatacacccagcttgctttattagtctactgacctgtttttagtgggcctaggataacctagccggaagcaaacaacaactgttccattggggatgtccaccttgcagaacgccggggggcatcgtcgaaaacgctccaaggcccgtctccggcagccggggaacacctctgtgatggggggggaaacatagggggtggggggctcctttttgaggccgccaac

SEQ ID NO: 62783 - DNA, 764 bp, Oryza sativa
  Clone ID: PAT_MRT4530_64089C.1
ggggaagcaaaagggcttgaatttaacttaccttatcgcttgaaaaacaatcaattagactttggtttaaaacaacctattaatttaaaaattgcttatctaaatgttggcttaccgattacaaatattcgagcaaaagtctttggacattatccttatacgccacaacacccattaaaattagaacaactatcaatgaatttattagatggcgctttgcggatagaacattttgccttaccacaaactaaagtcgcttatcttcatttatcacaaattaattttgaacaaattttagctttgcttaaatatcaacaaattgagttgaaaggacgtgctaatgcaacttttcctttttggattgaaggaaaaccttgttatgtatgtaatggatcaatggcacaagcggttagttctaggctaaaaattgcccctgaattgatgcaagctatttcacagagtaatggttattctgaacgtttattagcatatttgctacacgacacacgcattactgatttaactagcaaggtaaatattaattctgaaggcgaaatggcattacaagccaagttaaatatgcaattaaatcaacaagcacagacgaaaattaactttaactaccatcatcaagaaaatgtatttaaactatggcggacactaaatgctggcacttacgttgaacaaaattttgaaaattcaatttatcaaaaactggatcgcacaaatgaataaaatactgttattaatgggtaccgagctcg

SEQ ID NO: 62784 - DNA, 2925 bp, Oryza sativa
  Clone ID: PAT_MRT4530_6408C.1
atggacgacgcttcatggtgcggtctcaccgccgacgtcctccgcctcgtccacaagcgcctcccgtgcctcgtcgaccggcgccgcatggcccgcgtatgccgcacctggcgcgccgccgtcaagggggagcagcacccgccggagagcccgctcccgtggatcctcgtcccgcgcgacgcagacgggccttccttctcgtgccccattgccggctgccgcgggcacggccatttcgtttgtaaatatgtctaggcaagcggcgccttgcgcttggggacaaggcggagcggcacgcgcagcggcgtggtcagcccgggcgcctcgctcatgtccagctccgccgcgcgcaggccggcggggagctcccagtcgaagtggtgcaggagggcgagcagcgccatctacaccaccggcgcggtggagctcacgacgcggccgacgcgccggcaggccccgaacgggatgagctcctagtcgttcccccgccaggccaccttgcggtgccccggcgatgaagcactccggcgcgaactcatgcggattgccccacgcccgggcggccctcccgctcgcgcacgcgtagacgaacagcgtgtcatacaccacgagggagccctctatctccgcacccgccaagggcgcctccaggtggttgaggtaggagagttgtacgaacagcgcgatggccatctgaagatagcacccatggtgtttcgtcgcttctcgcgcggtgggcgagattacggcggagccatcgctgttcgctacctggtggagtccggcgagaatctcctcatggtcgtcaggctcgttcctcatcctccccgactgccgccaaggacgtcggcgttcaaggtgttcgagatggtggagccgccgctggaaactcccatcaacaacgacgaggcaccatacggttggaacgagctggagtcgctgggtgggcggatgctgttcgtcgcgcgaggctgctccagatcgtacgacgcgaacaagtatccgggcgccgagttcaacgagggagtctacttcctggacgacgggaggctgtactgcgaggcggcggtgttcgtggatcaggctgccgccgccgccgccgatgagccgcgatgcccctgctggccctgcacagacagcggaaagtggctggcggccgccggggaggttccccgcgtggacaagttcttgccggagcaaggcccgtcgaaccactactcaccgccggcttggtttctccaccatacaggagacaattgcgttaatcctgaaaagttcatacaagaacaccgcattgcagtggagcaggcggcggccaccaatgcaatccaagtcatgaacaccaaccattctacattgagtcatcatgaagttcatgatccaaagttctttaggcccatgaagaaatgctcaacaaagtgcagctatcaaaacttcaggcccaagcaaaccgtcacgataaactgggcccaagcccaacttcttgctcggctggcaaaaggctggccttctctgcttcttcttccaaaccaaaccaccccaagcttcccctgcttccagaagccaagttcaaacatggcgcacaacgacgaagcgtcctcgtcgcgttccaccacctcctccgccgcccaaccctcgccaccgccacctccacgcctcgcctccgcctcctcctctcccatggacgcggtagcgcccgcgcgcgatttcatggcggaatccctccgcctcgtccacaaccgcctcacgtgcctcgtcgaccgccgcaccatggcccgcgtctgccacgcctggcgcgccgccgtcaagccgctgcatcctccgccggaggagaggcctctcccgtacatcctcctcccgggagatggggagcgctccttctcgtgcgctctccgcggctgcgccacccaccgcttccacattccggacatcccgcgcgacgcgcgctgcttcggcgcccaccccggcggctggctcttcttcgccgtcgcccagacaaccaagaacgcgatcctccgcgacgagttcccctcgggcatccccgacgtcctccacctcgacgatcggccgccggacaaggacacggacgtggtcatgttcgcggcgaccatctcgtcgcatccggaggaccaacgctgcatcggcgcggccatcctctcccacttccccgacgtcaccaacccgtccatctacgcgttcttccgcatgggagtcttgcccgcgatggtggcgaacggcgatgacgccagcaacgcggggtcggcatcaggcctggaggatctcatacactacgacgatgccttctacttcctcaccggagaagaaggcctcctcgtgtttcgagtatccgagttccacgacttcaaggacgaggagcttgacatagcccccatcgagattcgccgcttccctcgccgcgggcgcggccactacggcgaggacgacgtcgccgttgtccgctacctggtggagtcccgcgggcgcctcctcatggtggccaggatcgctgctggcgctggtcctctccgcccctcgccgccgtcgccgacgacgacgtcggagttcagggtgttcgagatggcgaggcgatcgacggcattcgccgccaccaacaacgatggcgccgagtacgactgggtggagctggactcgctgggaggccgcatgctgttcgtcgcacgaggctgctcgacatcgtacgaggtggcgaggcatccggggttcgaggagggcgtctacttcctggacgacgggaggctctacggcgaggtggcaatgttcagggatccaaatctgcggcaatacccctgcagagacagcggcaggtggctggcgtcggcgccggaggcggttccacgcgtggacaacttcttgccggagcaagccccgtcgaactactcaccgccggcttggtttcttccctga

SEQ ID NO: 62785 - DNA, 369 bp, Oryza sativa
  Clone ID: PAT_MRT4530_64090C.1
ggcaagcgagcgagcgaatcgacagcgatgtagtgacggtagcacggcaaggcagcgcgcgcgtgcgacagctagcgccgtaacgtctccacctcggttggatggggggcgcaccaaagggcggcgccaagccgagtgctactgcatcagctgtcccgcgaggcggcgcactagcgacggcaagcgtatatgcagccggacctcgtcagcgggggtgcatgagcccgaaggcaaccgtcaagccgacgcttccagtgccaggtgagggaccgtggagagacaagctacaaggcggtgcgcgcacaggggtcaaccggctcggacccgaggagaccggaaagctcctacaagcagaaggacactaaatcc

SEQ ID NO: 62786 - DNA, 2834 bp, Oryza sativa
  Clone ID: PAT_MRT4530_64091C.1
atggatgatgcactggtgtttctaaagcattatgacccagggaaagcacagctaaggtatgttggattgctgtccgtgaaagttgcatcgaggccttcagaaattcttccaaaactaagaagtctagctggtttctgtttaagcgaaatgatagaattgtacgagagtaccacatcgcgccaccgtgtttgtcatgaagaatatgctgtaggccgagcagggagtgtattatccatttggtgcccacttccagattgtctcatcttcctccccatcttgaagttgcaccccctggaccgcgtcccaaatctgaaagtattccccaattgcgtgattggagggtacccccttgatgtctcgtacccacctgtggttcagaagccctcgtgccaccgtcaagcccgagcgctcgacatggctgaagatcaaggggaatctcgactttatgctccccaccggcaaccagtccgccagccaaaatttggtgttcttcccatcacccaacacttgtctcgttcatgcgaggtagaggtcttgcaagtctttcgactgatctattggaaccgtggcccacagccactccggttgggaacactgcaaccaaagccaacgtgttcacattgcaatgcccattctgccaagattgacaatgcccagaccgccattctcaattggcaagaagagtttttcctaagcaacaaggctgcatccccccccgcgacgcatcctcatcctctttccacaaaaaagccgcaacattttttctctattgccttaaccgcccacacctgtaattccaaaaccgataaaagatagagtgggatagccatcagaacatgtttgatcagagcgagccgagcgtccggtgagagcaggcatgatttccagcctgctagattcttcgccatcctatccaacataagcagcagctgggcctttgacagcttacgagtagacatggggagccctagataggtgatggggaggtccttaaccagacatccaagcacctctattacctccaagattttagtctcggaacaattgattggcgtaaaggagttcttggcgaggttggaaatgaggcccgttgcctcgcccatgagcttaagaatgaattggatcacttcgacatcctgcctggagggatggaggatgataatagcatcatccgcatacaaggacgcccgtggtagccaagagagatgcgacacagtcctgccaatggttgccgaaacccagaaattgcatcagctcaagaaggaaatcccagcagactatatcaaacgctttggcaatgtcaatcttcaacaacatagctggctttttggtacggtgcaaaagcttgactgctccttggacataaagaaagttctcatggattcttcttttccggataaatgccgtctgagattgcctgatgatctcatccattctagcagatagcctagaggccatgatcttcgtgaggattttgagtttttgacaaagctatggataaggctgatcggtctatactccccaaaatgagtcggctcttccttctttggcagcagcacaatggaggccatgttcaagaggtggagatgacgtgcattcactctccaagtaagtttcatggcggcaaccacatcatccttgatcacctcccaacatctcttgaaaaaaccccgctaaaaccatcgggtcctagagctttctcactcggcatagcaaaattgatctgtctagcctcctctgagatgtctgtttcaagttccaacaggtcaaaagcatgcatgccggcctgcgcgaagtcgattgctgctgacctctggaagataatttcataggccaccaccaactggagacgtagcttgctgattcgacgttccccccatttcctgagggcagctgcagtagcgcacaactcccaagtttccttaacaaaatcatcaaaacctaagtaaaactccagccgagtctagaaagattcaaacttaaatcttcgcggccgatgcatcataatgtcgcaggccaacagaagcggagagtgatatgaggccgaagaactaagagcttgcaagtgagcatcacgaaacaaatcctcccagccagcattcaccaacactttatcaatcttagtgagtgtcgggttttcctgctcactgctccaagagtatcgcctcccaaagagataaacctcctgaacctcaagcgagtccatcatgttccgaaatctgccaatcaatcttttgttaacattgctgttgttcttgtccgaatcagccgacagcaggttgaaatctcccacgacacaccacggcccagtcaccaattgttggccgaccaggagcagttcatccaagaaaaggatcttgttagcagcgtcttgtggcccgtagacatttgttaataaccagcagccacctccttctaggttggtgatgcttagggtgagcgaccaatgacccttgtgggtgcaagagaccataaagcgatcacttctccaagccgtgaaaacaccacccctcgaaccatcgctggaaaaacaaaatcgaaaccatcaagagatgcaccacaagtttgagcaactagctgctggtctaaaaccgccagcttggattcttgacaacagaagagagggaggcacgggaggaagacacaacattcgctatgagggacctttttccactgttattaaggccccttacattccaaactaagactgatatactgaccagtgtcggtctgactgggctaggctccatctgatcagtgggttgtgagccagttggacggcccctcaactggcgatacagagccgccagaggactctgaaataaacagattta

SEQ ID NO: 62787 - DNA, 339 bp, Oryza sativa
  Clone ID: PAT_MRT4530_64092C.1
tcccactcgtgcgcaattacagataaataaactattaccacttacttaaataattagagtgggacaattcataccacaggggaaacacaaacgcaaaatgaacaatatatcaaaattaattattatgataaaaaaaacaataaagcgcttacggtattcatgattcaagcttacactcaccatcatgcaacaattaactactatatatttgtccccataattaataacatcaaccctgatatacatcccaaccactgggacatcctctaacttactttacattaattcattgaatactatccgcacatcttcacttattatattacaagaacacccctt

SEQ ID NO: 62788 - DNA, 328 bp, Oryza sativa
  unsure (1)..(328): unsure at all n locations
  Clone ID: PAT_MRT4530_64093C.1
gggggggcaaaacccccgaaaggttgtcngaatttccggaaggaaaaagggccatccaaataggccataattccttcccaagttcccaggccaacccaagtccctaactggctaaccctagggaggagagggatagatccagagggggtgtggcggagcggcccatccaggggtcgagcgcgccaccaatgggcgccaaccttaggtaggcgggtcctaaagacctaccccccgccatgtaaacgcccttcctttctcgctgcatcctgggccccaccattttcgtcgtcgccaccaccacattccccgaccacaccaccacatacga

SEQ ID NO: 62789 - DNA, 222 bp, Oryza sativa
  Clone ID: PAT_MRT4530_64094C.1
tttcgatttcatgagacagaccgaactacaatttcatgagagtgtcagaacgttttgggcatactcttatgcaggaacccggaatggcctgggtgggcgtgcgttggacaggaccttctcaaggcggactgcgggcatatcgaaacacccgtattcaagatcaactatccgaggctccgggtctggagcgcctagagagggctggcccaactgctatgggga

SEQ ID NO: 62790 - DNA, 810 bp, Oryza sativa
  Clone ID: PAT_MRT4530_64095C.1
atgggcggcggcgagtgcaggagcaacgactacggcgccgccgcctactgggacgcccgctactcctccccttccccctcctccaccgccaccaccggcggcggcggcggcgcgttcttcgactggtaccaggcgtacccggcgctgcggccgctgctccgcgcccgcctccccgcctcctcccgggtcctcatgctcgggtgcggcaactcccttttgtcggaggacatggtgaaggatgggtacgaggaggtagtaaacgtggacatttcatccgtagtcattgagcagatgagggagaaacacgttgatattccacagcttacatatttccagatggatgttagggacatgagtttgtttggtgatggaacattcgattgtgtccttgataaaggtacattggacgctatgatgtgtggcgatgatgctcctcttggtgcttccaaaatgctagcagaagtggcaaggattcttaggcctggtgggatctacatgttggtacatcctctaaatctaaacaatacaaaggaaacactgaataatggggagattcagttggaccctgataaaatttactgttatcattttgcagccacacctggataccagttgaaatggagcaaaggtgtttcacttgcacaacctatcatggaggaagtttcattgacagtggatggtcaattaccacctgactatgttcttaaagatccagagtcacattttatttatatttgcaaaaagccagatgccgctaatgaagctaattctgtggttgctaatgaaggggaaaccataacttcaaaatga

SEQ ID NO: 62791 - DNA, 334 bp, Oryza sativa
  Clone ID: PAT_MRT4530_64096C.1
gggggataagatcagattaacattgtgggggcaattggctcgattttttagcgaagatgtaattggcaaccaaacagttgtcattgttacatcaacaacagtgcaagaatatataggtttatctctaaggtcaagcagtgccacgagaatatatacaaatctacacatacgtgagacatggacacttattgacagacaattctccgaagaaacaataccaaaaatgatggaagtagataagagcacacaaggaacaagggaggagcaaatgttctacaacagaaaaacactcaaggatataacagaaatgcggcatggcaacccaggaagtcag

SEQ ID NO: 62792 - DNA, 506 bp, Oryza sativa
  Clone ID: PAT_MRT4530_64097C.1
gcactattgctggtcatctcaatttcaaagaacgggcctgaaaccacagcttacaacgattattgtggcaaaaagaaaaggcatatgtacatgattgcatccatatggtgaaaagcaactcctggggtcctgaacacaacaaacctgtactactcgaaaccaacccgtgaacatgagacactttggcactttcttcaccagtgatgtataaacatcaggatgcaatcacgaagcatcaaactagaccaagtactttgaacttgaattaacttagtgtaccacagcatcagcatgtgttctccagaaaatgtttaggtctcttggtcagtgaattcagaaaattccaagcatatgaagtatttgactagattggttcctggggaataatggcctagttggtacctcccagacaatgattaaaccagacactaacagatctattatcttcttgaactaagttttaccgaagagccaaagtttccgtatgaaggtcaactgcagagagt

SEQ ID NO: 62793 - DNA, 114 bp, Oryza sativa
  Clone ID: PAT_MRT4530_64098C.1
gggggggacccctggacggacgcgtgggcggacccttggtcggacccttggcgcacacttgggcgaacccttgggcggacccttgggcgaacccctgggaatacccgtgggtta

SEQ ID NO: 62794 - DNA, 285 bp, Oryza sativa
  Clone ID: PAT_MRT4530_64099C.1
atggccatcaagaaatgtcgcggtgcgccagagatccaaggacgacgagaggaaggggtaggtgaaattgacaacattgcgagcagtggtgggttgttgatggcgcgtatccgatggaggaaggagggctcagtgatgacgcagcgaaagccggtgcaggcggtggcggtgcggcagcgaagaatcaaaggaaaaaagaatgaggtgcttgtgaggcaatggatggatggatcgatagagattagcaagaaggagaaggataagaagttttggaaggggaggtag

SEQ ID NO: 62795 - DNA, 117 bp, Oryza sativa
  Clone ID: PAT_MRT4530_6409C.1
atggcgtggcgcgcaagtggagtgcggggtttctcttaccgcgcggttaccgggcttaccgcggggggttaccgcggttaccgcgcggtaaccgtgcttaccgccggggcacggtaa

SEQ ID NO: 62796 - DNA, 168 bp, Oryza sativa
  Clone ID: PAT_MRT4530_640C.1
accgcgggagcagaccgcgaccgaggtgtgctagatccccggtcgcgccaccgacgcgatatgccacgccagctagggcaggatgctatcacggatagccactaggcacaagtgcgagacaatagcgacccagaccaagtgcgccatgaagagccagacacactgctg

SEQ ID NO: 62797 - DNA, 133 bp, Oryza sativa
  Clone ID: PAT_MRT4530_64100C.1
tttccctccctccacgggccatcagcttgctggccttgggtgcctccatgcagtgcagctccactccccttcactttgctgttgctgctccactgccctgctttcccagtctgggcaccacctgtctgttgcc

SEQ ID NO: 62798 - DNA, 358 bp, Oryza sativa
  Clone ID: PAT_MRT4530_64101C.1
gcagcacaaggagaggaccaatcattgacttatctgatgcaatgttcgaccgcacgttactggggacgaggctgtcacacccctcaccagagagcgggaggatcgagacgagcctcgtgttccgcggcgataagaaggcgccagcaaagaaagctgcaaggccgtcggcgccgacaacagacaggccgctgtggttccccgacccgctggtgctgcactacctggacgggccgctcgtgaagtaatacagcatccgaacactcggcctcggcgagccacctaccttacctagagcacaagctagactagctataccagagcctgtcgagtaacagctcattatagatcatttaaaccc

SEQ ID NO: 62799 - DNA, 300 bp, Oryza sativa
  Clone ID: PAT_MRT4530_64102C.1
atggctgacatgagggtctttggtggtgatgttaggcaccggttttgccaactgccggcgaaaccgttgagggagccagattataccggtttcaatatatccggccggccgacgggtcacgccatgcacgacggcgacgctggcgtcgcgcgagacgggcgggtgcgctacgaggagggaggggacgaggcccacgagggttcgtcgacccgcgtcgccgccgccgtggccgcggacgacgtcgacgtcgacctcggcatactcggcggcggaatgaactactcagatagcttcaccggg

SEQ ID NO: 62800 - DNA, 2817 bp, Oryza sativa
  Clone ID: PAT_MRT4530_64103C.1
atggcagagtctgtggtgtttggaatcctatgcaaaattggatcaatattggggtcacatctgacgcaggcattagtttcacatctggggaaggaggtatcagttttaattgaggttgaaagcattgtaaagcaaattagaagtgagtttaggttgatgcaatctttcctgcaagatggccaagaaaaagaaagctccagcaggcaggctgaaacctttctgcaggaagttcagcagatagcatttgaagttgaagacatcctggatgaatttgtctattattttggcagaaaagaaaccccatctgtggaattgttgaagaacttcttcagaaaatctgaaagtgtgatgccattgcgcagaatagcagcagaactcaaagaagtgcagaatcgtctccaaaatattcgaaacttgaaacttcagtacaatattgacttatctgaagaaagtgccagctccatcaggtatgaagatagcaaaggtcacacactccaccacataatgcataataagaaacttgtcggttttgtaaatgagcgacagaagctgcaagagttgctaatggcaaatgaaagatcatgctcaataatttccatatggggtatgggaggttccggtaaaactactcttgtcaaaactgtttccgaaagcaaagctagcaagaaccgttttgattgccagatctgggttaccgtgtctcaaacatatgacattactgaaataatgaggaagattatacagtgtgcattgaaggatacatgctcagctgacttaggaagcatgagtagtgaaggcgtagtgctgatgctccaggagactttgcagggaaggacatacatgatggtcttggatgatgtgtgggatacaaatgtttggttcagcttggaaggctttctagatgaaagcagcatcagaagtaaggtggtaattactactcgcataaatgatgttgcttctttggcagaagacaagcgccgtcttcaactacgaggattagatgaggcagagtcttgggacctcttttgcatgtgggctttccggcacggtgaagatcaaacatgtcctcctgcaatggaccgagtagcaagacagattgttggcaggtgtgaaggtctaccgttggctataacggcagtaggcaacttgctatccttcaaacggctggatttgatggagtgggagaaattctataatcaactgaactgggagttgcacaatcgcttggataaccaaggactcagcatggtgactcgactccttggtttaagctacaagcatctaccggtccacttgaagaactgtttccttttatgcagtatcttcccagaggactatatgatacgcgggaagcggctatgtaaactattagtagtagaaggtcttgttgaaccaagaaaaaacatgacactggaggagattgcaatggagtacatagaaaagctagtagatcgctgcctgcttcaagttgctcggagaaataagcttggaagagtatgggaactccagatgcatgacattatcagggagctggcaatttcaatatccgaaaaggaaggattctgcatgatacataataaagctcagagatcggtggttgagtgcgagcctcgtcggttatcaattcatgagaattcagtcagagtccagctaagtataaatgcttcacgtgttcgttctttctatcaatttgatatcgattgttcctccgtgtcaaaagtgcaatgggtatcaaggactgctaggtacctgaaggttctggaactaggtagtgttccaatcagaaaactgccgagagacattgggaacttgttcaatttacattatttaggattaagacgaaccaagatcaagcaacttcctgaatcgattgacaggctccaaaatctccgaactttggacatcttccttactgaaatagcaagtcttccacgtggcgtaaccaggctaaggatgctacgccatctgattgctggaaaggctgttgcttcttattttggcctcgaagatgtcttcacaggtgtcaaagtccccaatggattatggcgatcactggatctaaatgtcctcacaggcatttctgcaagcagcaatttggtggaacaattggccagctttacacagctgagatcattgaagttgacagacgtaaaaaatatccactatacaaagctatttgcatccatcagaaagatgcagcttctaaagaaccttcttattggaactgccaatagtgatgagtatgtcagcttagaagccctagatcctgcacctcagaaccttgaaatactctttgtgaaaggtagactccatgatagggttataggctctgacctatttgaggcaaataggctaaccctcatggagttgactcttgaaaatagcaggctgagcatagatccacttccatcactatctaatttctgtaacctgacccttcttggtctgttcaaccattatattggagaaaccttgctctttcaggcagagtggtttcctaagcttcatacacttactttggctgagctgcaaaatgtcagttcaatagtgattgaaaagcatagcatgccaaatctctataactttgctctcatctgcttgacaaatttagaggatttgcctgagggcatggaattccttgggtctgttgaagagctcagtttggtgggcatgcaccaaaaattcatggaacatgtacaaggttcctcaaatgtaaaagtcaaacacattcctgtagttgactactttgatcaaaccaaagggaggtgggatcgactttctccactttatttcgaagacgaaggcactaagaattga

SEQ ID NO: 62801 - DNA, 1713 bp, Oryza sativa
  Clone ID: PAT_MRT4530_64104C.1
atggaggatatgctctccttcttctctagtggccttcatgtcatgctcgtcgatgatgacacgaagaacacgagaactgcaaccaaaacgctttctatgctgcactgcccagtggtgtcaacgcacaccactgcatgtgctggcctgcgcaccctctccggcgacaacatgttagacgtccagactgtcctctgcgacgtcagcaaggtggtctcgtccggcttcgacttccgccgtgtcaacgagaccgaacaccaaatccccgtcatctaccaagaaagggttcctggtgactccatggacgacatagctgcccatgccggcgctggtggtgaagacggcaatgacgacgacgtcgtcgtcatcgaggagccacaagtgcacttcaagttggtgaggtcccgtggcagccggaagagacagctgaccatcaatgtcgatagtggcagcagcgacagcgcagcttttaaatatgccgtatggcttattatcagcatacggtccaccgatatcgaccttagcgatgccaaccaaagaaagaagatagagcacatgaacgacgcgaaagggccggtggggcagcatgttgctagccacttgcagctgccagcgcaggaatactgcacaaagcaacagaaggaccttgatgagcgccgcctcatctcatcggactccttgttcctcaaagccatctttccgacgctcaatgtctcgccgagcagccctctgatcctcgccggcggcgccggtccaagctgcatccccacaacgaccatcgctggcagcagaactgcagcaccatttcaagttccggttttccagcagcaaccctccggcactacggtgatctccttcagcaacactgccgtgcaggcacccatcggcaatgcttttatctccttcaacaacgctgcttcgccggcggccaccggcaatacagttatctccttcaacaacattgctgcaccagcagccatgcaggttccggcgatgcgacagcgactgtccggcggtgtccagccagatgctccccagcagaggctgtacatggggcccttctcctaccaaggccctccgccaccacctaccatgcgtaatcacatcaacatagtcccgacggccttcatacctcgggtcgggatgaccgtgaatataggaaaggctcctatgatcgaacttccatttggagtacctgtggatgacttcctcgtcggagaaaccgcatatggcggtgccggaccatccataggagcccctagcaacgacgccgctgtcgcgtacgcctacacaggtgcactgaacaacaacacagctgttggttctctcatggcgccaccaattgatgagccaacattcaccctcaccgatccaatcgttgggaccaagggtgaaggagttgtccacattgtcatcacgtcagaggatcagaatgcgttggcagcagtcgaagcaggagcgcctaacaacgccgagccattcatgatgcctgatcaggttgatcttgaagaagacatcatgttctctctggaatccctcctggggttggacgaggacatgatacctatggaagacgctggcggtgaggcagctgaagggtcactgaacataggggaaggtggcatggagatcgggtgggacctggacctggatgacatcctcatgaacaacaccaacgaatttgccttcctggacgacctggcctggatcgagtag

SEQ ID NO: 62802 - DNA, 2262 bp, Oryza sativa
  Clone ID: PAT_MRT4530_64105C.1
atgggcaccggaggcggcgagggggacaagtcggccgtgctgccgctggaggcgctgctggcgctggggctcgaccagcgcacggcggagaacgctctggtcaacagcaaggtcaccgccaacctcgccgccgtcatagccgagcttgcattggcttatagtgcccaagctgtggcatgctatgttcttctttcaactaatggacttgccaatgaacaggctggtataagtggatgtgataagacggttgggaacctcctgtacacggttgccactaaatacccaaccaatgcgcttgtccatcgtcctgtactcattgactatattgtgtcaacgaagataaagaatcctgcacaactagatgctgctctgtcattccttactaatactggccctgactctttagatactgggaagtttgaagaagcctgtggtgtaggtgtggttgtttcaattgaagagattaaatcaacagtcaatgaggttaggaagaggcacccctggggtgatgctaaggcgaccaaggatgaaattgacaagaagcttgcagagatattaggtccaaagacagatgctgacaatgtaaaaccagtgaaaaagaaaaaggaaaaagcagcaaaagttgaggagaaaaaagctgcagtagtcactgctgcaccgccatctgaggaggaattgaatccatactctatatttcctcagccagaggaaaattttaaggttcatacagaaatattctatagtgatgggaacatatggagagcgcataacagtaaggagattttagagaaacaccttaaggcaaccggtggaaaagtgatgacccgtttcccaccagaacctaatggatatcttcatattggtcatgccaaggctatgtttattgattttggactggcgaaagagagaaatggtcattgttaccttaggtttgatgacacaaatccagaagccgaaaagaaagagtatattgaccacattcaggaaatcgtacactggatgggatgggagccctacaaagttacatatacaagtgattatttccaggctttatatgagcatgcagttgagttaatacgaaaagggctagcctatgtggatcaccagaccgcagaagaaatcaaggaatacagggaaaagaaaatgaatagtccatggagggatagacccattgaagaatcactgaaactatttgaagacatgagacgtgggttgattgctgaaggtgcagcaacactccgaatgaaacaagatatgcagaatgataacaagaatatgtctgatttaatagcatatagaataaaattcactcctcatccacatgctggtgataagtggtgcatctatccaagctatgactatgctcactgcatggtggattctcttgagaacattacacattcgttgaatcgacttgtgacagaaaagtgggtagatgggtgggatgaccctcgtttgttgacactagcaggattgcggcgacgtggagtgtcatcaactgcaattaattcgtttatttgtggaattggaataacaagaagtgacaatagcttaattcgggttgaccgtcttgaatatcatatcagagaagagcttaataaaacagcttcccgtgccatggttgtgttgaatcctctaaaggttgtaataactaacttggaggatgaaaaagtcatagaccttgatggaaaaatgtggcctgatgctcctgcagacgatgcttcatcctactacaaggttcctttctcaagaatcgtttacatcgaaaaaactgattttcgtctaaaggactcgaaagattactacgggctagctcctggtaaatctgccctgctaagatatgcattccccattaaatgtaccgaggttgtttatggtgacaatccagatgacatcattgaaattcgagctgaatatgacccttcaaagactactaaacctaagggtgttctgcactgggttgctcagccagcacctggagttgaaccacttaaggtggaagtaagattatttgataaattattcctctctgagaatcctgctgaactggaggattggctgggtgatcttaacccgaactcaaaagaggtgatcaagggtgcctacgccgtgccatcgcttgcgactgcggttcttggtgacaagttccagttcgagcggctaggctacttcgcagtggacacagactcgacacctgagaacattgtgttcaacaggacggttaccctgcgtgattcgtatgggaaagctgggccaaagtga

SEQ ID NO: 62803 - DNA, 2794 bp, Oryza sativa
  Clone ID: PAT_MRT4530_64106C.1
ccggccgataaaaaaaaggaaaaaaatccgcacacagcaaaagcctctccactacctctccctccacctgtcgcctaaaccctagctcgcatctcgaggcatctcgcttcacctcgtcgtcgcggtcgccggagccggagccggaggcggcggaggagatgggcaccggaggcggcgagggggacaagtcggccgcgctgccgctggaggcgctgctggcgctggggctcgaccagcgcacggcggagaacgctctggtcaacagcaaggtcaccgccaacctcgccgccgtcatagccgaggctggtataagtggatgtgataagacggttgggaacctcctgtacacggttgccactaaatacccaaccaatgcgcttgtccatcgtcctgtactcattgactatattgtgtcaacgaagataaagaatcctgcacaactagatgctgctctgtcattccttactaatactggccctgactctttagatactgggaagtttgaagaagcctgtggtgtaggtgtggttgtttcaattgaagagattaaatcaacagtcaatgaggtattaaagcataatatggaggctatattggagcagcgatatcatattaatgttggtaacctatgcggacaggttaggaagaaggcacccctggggtgatgctaagttgaccaaggggtgagattattaggtagattctcactgatatagaatcctaaggaagaggaggactagctaggatgatcttaaacccgaactcaaaagaggtgatcaagggtgcctacgccgtgccatcgcttgcgactgcggttcttggtgacaagttccagttcgagcggctaggctacttcgcagtggacacagactcgacacctgagaacattgtgttcaacaggacggttaccctgcgtgattcgtatgggaaagctgggccaaagtgattgccaacttactgaatttccagtaagtttctttacctgggtgcgctgaggttacacagtgggaagaaaacagcaatgtgatacagaaccatagtgaaaaaaaagggccctttcttgtaaaatggacttgtttgacttgttatatgtttccatcaaattgtgcatgattgggtatgttctcatgtcaatgaggtttggtgatatgaattctagcatatataaatgtgcacaatcaacagctttataaatatttccaggatttatatgagcttgcagtttggttgataaaaaaaggactagcctatgtcgatcaccagacagcagaagagatcaaggagtatagagaaagcaaatgaatagtccatggagggataggcctatagaagagtcactagaactgtttgaagatatgaggcatgggttggttgctgagggaaaggcaactcttaggatgaaacagacatgcagaatgatacaagaacatggctgacttaatagcatatagaataaagtttacacctcatccccatgctggcgacaagtggtttatctatccaagctatgactatgctcattgtttggttgactctcttgaaaacattacccattcgttgtgcacactagaatttgacatacgtcgtccttcatactactggctgctcgtatccctggaccagtaccagccatatgtttgggaatattcaaggttaaacatatcaaacaatgttatgtccaagcgaaagctaaataaacttgtgacagagaagtgggtagatgggtgggatgatcctcgcctgttgacacttgcaggactacggcggagaggagtatcatcaacagcaattaactcctttattcgtggaatgggcataacaaggagtgacaacagtttgatacgcttagaacgccttgagtatcatattagagaagagctcaacaaagtagctcctcgtgctatggttgttttgcatcccctaaaggttgttataaataatttagactatggaacaataatagaccttgatgcaaaaaagtggcccgatgctccaggagatgatgcttcggcctattacaaggttccattctcaagaactgtctacatcgagcagtctgattttcgtgtaaaggattcaaaagattattatgggcttgctcctggtaaaacagtactactaaggtatgcattcccaataaaatgtacggaagttatctatggtgataattcagataatatcattgaaatccgagctgagtatgacccttcgaaggctacaaaaccaaagggtgtgttgcactgggttgccgaaccttcaccaggtgttaacccgctcaaagtggaaatcagattgttcgagaaattatttctttcagagaatcctgtggagcttgaggattggctgggtgatctcaacccacgatcaaaggaagtgataaagggtgcctatgccgtgccttcgcttgcaactgcagcgctgggggacaaatttcagtttgaacgcctcggttactttgctgtggattccgactcgacggctgaggaacttgtgttcaacagaaccgttactctacgggattcctatggaaaagctggacccaagtgatcgttttgtttgtggttgaaaagattggtgtaacagcatcattgctggtcttttgtattgcaccagcggtaaaatacaccagtgggtatacccctcaaattttgtttacaatcatctggaaccgccttttgtattagccagtcaaactctgtttacttgacagttgcaatagaaaccaaaattctgtggcagctgtgcacagttgcaatagaaaccaaaattctgtggcaaaaaaaaaaaaaaaaaa

SEQ ID NO: 62804 - DNA, 674 bp, Oryza sativa
  Clone ID: PAT_MRT4530_64107C.1
acgaagataaagaatcctgcacaactagatgctgctctgtcattccttactaatactggccctgactctttagatactgggaagtttgaagaagcctgtggtgtaggtgtggttgtttcaattgaagagattaaatcaacagtcaatgaggtattaaagcataatatggaggctatattggagcagcgatatcatattaatgttggtaacctatgcggacaggttaggaagaggcacccctggggtgatgctaaggcgaccaaggatgaaattgacaagaagcttgcagagatattaggtccaaagacagatgctgacaatgtaaaaccagtgaaaaagaaaaaggaaaaagcagcaaaagttgaggagaaaaaagctgcagtagtcactgctgcaccgccatctgaggaggaattgaatccatactctatatttcctcagccagaggaaaattttaaggttcatacagaaatattctatagtgatgggaacatatggagagcgcataacagtaaggagattttagagaaacaccttaaggcaaccggtggaaaagtgatgacccgtttcccaccagaacctaatggatatcttcatattggtcatgccaaggctatgtttattgattttggactggcgaaagagagaaatggccattgctaccttaggtttgt

SEQ ID NO: 62805 - DNA, 2880 bp, Oryza sativa
  Clone ID: PAT_MRT4530_64108C.1
atggcggccaccgcggcttccacgatgtccgcagcggcggcagtgactcgccggatcaacgctgccctccgcgtggacgccaccagcggtgacgtcgcggccggcgccgacgggcagaacgggcgccggtcgcccgtggccaagcgggtgaacgacggcggtggcggcaaggatgacgtgtgggtggccgtcgacgaaaaggacgtgtgcggggcccgcggcggcgatggcgccgcccggccgccgctgttccggacgtacaaggtcaagggcagcatccttcatccttacaggttcctgatccttcttcgactgatcgccatcgtcgccttcttcgcgtggcgcgtacgtcacaagaaccgcgacggcgtgtggctgtggacaatgtccatggtcggcgacgtctggttcggcttctcgtgggtgctcaaccagctcccgaagctgagccccatcaagcgcgtcccggacctcgccgccctcgccgaccggcactccggcgacctacccggcgtcgacgtcttcgtcaccaccgtcgaccccgtcgacgagccgatactctacaccgtgaacaccatcctctccatcctcgccgccgactacccggtggacaggtacgcctgctacctgtccgacgacggcgggacgctggtccactacgaggccatggtggaggtcgccaagttcgccgagctgtgggtgcccttctgccggaagcactgcgtcgagccgaggtcgccggagaactacttcgcgatgaagacgcaggcgtacaaaggcggcgtccccggcgagctgatgagcgatcaccggcgtgtgcggcgagagtacgaggagttcaaggtcaggatcgactccctctcgagcaccattcgccagcgatcagatgtgtacaacgccaaacatgccggcgaaaatgcgacatggatggctgatggcacacattggcccggcacatggtttgagccggctgacaaccaccagagagggaaacatgctggaattgttcaggttttactgaaccatccaagctgtaaaccgaggcttggattggcggcgagtgctgagaatccggttgatttcagcggtgtcgacgtgcggctccccatgctggtgtacatctcgcgcgagaagaggcccggatacaaccaccagaagaaggccggcgccatgaacgtgatgctccgcgtgtccgcgctgctgtcgaacgcgccgttcgtcatcaacttcgacggcgaccactacgtcaacaactcgcaggcgttcagggcgccgatgtgcttcatgctcgacggccgcggccgcggcggcgagaacacggcgttcgtccagttcccgcagcggttcgacgacgttgacccgacggaccggtacgcgaaccataaccgcgtcttcttcgacggcaccatgctctccctcaacggcctccaggggccctcctacctcggcaccggcaccatgttccgccgcgtcgcgctctacggcgtggagccgccgcgctggggagcggcggcgagccagatcaaggctatggacatcgccaacaagttcggcagctcgacgtcgttcgtcggcacgatgctggacggcgccaaccaagaacggtcgatcacgccgctggcggtgctcgacgagtcggtcgctggcgatctcgccgccctgacggcgtgcgcatacgaggatgggacgtcgtgggggagagacgtcgggtgggtgtacaacatcgcgacggaggacgtggtgaccgggttccgcatgcaccggcaggggtggcgctccgtgtacgcctcagtggagcccgccgcgttccgcggcacggcgccgatcaacctcaccgagcgcctctaccagatcctccggtggtcgggcggctcgctggagatgttcttctcccacagcaacgcgctcctcgccggccgccgcctccacccgctgcagcgcgtcgcctacctcaacatgtccacctacccgatcgtgaccgtgttcatcttcttctacaacctcttcccggtgatgtggctcatctccgagcagtactacatccagcggccgttcggcgagtacctcctctacctcgtcgccgtcatcgccatgatccacgtgatcggcatgttcgaggtgaagtgggctggcatcacgctgctcgactggtgccgcaacgagcagttctacatgatcggctccacgggggtgtacccgacggcggtgctgtacatggcgctcaagctcgtcaccgggaagggcatctacttccggctcacgtcgaagcagacgacggccagctccggcgacaagttcgccgacctgtacaccgtgcggtgggtgccgctgctgataccgaccatcgtcatcattgtcgtgaacgtcgccgccgtcggggtggcggtcggcaaggcggcggcgtgggggccgctcaccgagccggggtggctcgccgtgctcgggatggtgttcaacgtgtggatcctggtgctcctctacccgttcgcgctcggggtcatgggtcaatgggggaagcggccggccgtgctgttcgtggcgatggcgatggccgtcgccgccgtggcggccatgtacgtcgccttcggtgcaccgtaccaagctgagttgtcaggtggtgctgcttctctcggaaaagcggcggcgtcgctgaccgggccatccgggtagggacagttcgatcgcgtttgatttgatttgaatatttgattattttcttggtgcaataattggttgttacttctgttatgtcgttacgtcataggagcggctgactatattgctagtctgctctatacgagtgagacttggattgttcttctttaaaaatgacaagatttgaatttctccagcgtgatttgtcgtaaaaaaaaaaaaaaa

SEQ ID NO: 62806 - DNA, 351 bp, Oryza sativa
  Clone ID: PAT_MRT4530_64109C.1
ccccaaacaagagcagttgcaggctgcatccccatttttaataaaacatatgggcctagcaagggtcccattacaggataggcccttttttaggggaacatagggccaacccgccccagggtttcaacttaagcccgggggggattgttcataaaaaaggggcccccttgcaccacccatttgagggcccccacgggggggggctccttttttccaacccaatcatgcccccaagttccacaagagtatttgttgggccccccactgacatggcccgttcaaaaaaacaggtgggggcccaagcagccccagagcataggggcgggcttttacccattcactttgggggcc

SEQ ID NO: 62807 - DNA, 331 bp, Oryza sativa
  Clone ID: PAT_MRT4530_6410C.1
atggcggcgcgggaggagcctggcacggtgcgaggaggcggggcgggcagtgatgagggggggcacggtgggagaagtatcggcggtggggtgcagtgcgatctacagcgcacgaaggccagccggtggagggcactggtgcagtggtcgcacatgtcggcagaggttggacggtggtggagcatcggggcacccgccgtggactccgatgatgctcgaagcgtcattcccctcctgagggcattgtcgtgccgtctcatccttcatgtgtggatgccaggtgaaagcccagcctcggttctctttgagaccttcacggacggcagcggcg

SEQ ID NO: 62808 - DNA, 538 bp, Oryza sativa
  Clone ID: PAT_MRT4530_64110C.1
gacatgagaacatacccaatcatgcacaatttgatggaaacatataacaagtcaaacaagtccattttacaagaaagggcccttttttttcactatggttatgtatcacattgctgttttcttcccactgtgtaacctcagtgcacccaggtaaagaaacttactgaaaattcagtaagttggcaatcactttggcccagctttcccatacgaatcacgcagggtaaccgtcctgttgaacacaatgttctcaggtgtcgagtctgtgtccactgcgaagtagcctagccgttcgaactggaacttgtcaccaagaaccgcagtcgcaagcgatggcacggcgtaggcacccttgatcacctcttttgagttcgggttaagatcacccagccaatcctccagttcagcaggattctcagagaggaataatttatcaaataatcttacttccaccttaagtggttcaactccaggtgctggctgagcaacccagtgcagaacacccttaggtttagtagtctttgaagggtcatattca

SEQ ID NO: 62809 - DNA, 440 bp, Oryza sativa
  Clone ID: PAT_MRT4530_64111C.1
acgagggaacaatacaacgtatgcttaaattccagtgacccccccctccccaccacccaccagcaaataaataaataaaactgacggattaagcttctagggcaagcgatcgacaaggagttcatgaagagcgtaggcgcgggcgtaacaccaaaggctgctctccgctgcaatagactgcagaacggcttgtacattggggcgcaccctcaaaagcacaagcatgtcagtgcttccatttctcccagcttactagaatgaacagagagttgatccccccttccttaggtctttaggagtaccttacgtaactttgcaccatcagttgaaaagacgcgcggtagattgagactccatcataatattacaaaagcattacgcaaaaaacatgtctagttcagcctctcacaagttcttgggaactactccctccatcccaa

SEQ ID NO: 62810 - DNA, 303 bp, Oryza sativa
  Clone ID: PAT_MRT4530_64112C.1
gtcgtttgaagatttggttggtggactcaaagggggggggtgttgtctatacgaaaaactgtgttcagacattcaaaaaaccttgggcacatgagcatgagcccttgacaaccttgtacgatgctggtcagtccatcaaacctacagttttgattgggacgtctggagttggaagaacattcacaaaagaagttgttgagggcatggcttccttcaatgagaggcctatcatctttgcactggcaaattcaacctttcattctgaatgtactgctgaagaagcatataactggactcaggggc

SEQ ID NO: 62811 - DNA, 1311 bp, Oryza sativa
  Clone ID: PAT_MRT4530_64113C.1
cactttctagctagtgtgtaacacacctactagctagggagctacccgtctctgctaaccaccaagctcgagcaaattaagcaagtgacacagttcagaacaccagcattcgccatggcctcctccccctgcggcggcttcctcgagaaggccaagccctacttcgccatgatctgcctgcagttcggctacgccggcatgaacgtgatcaccaaggtctccctcaaccacggcatgagccactacgtgctcgtcgtctaccgccacgccttcgccaccatctccatcgcacccttcgccctcctcctcgagaggaaggtgaggcccaagatgacgtggtcggtgttcctccagatcttcgtcctggcactgctcgggcctgtgatcgatcagaacttctactacgccggcctcaagttcaccgggccaaccttcgcatgcgccatgagcaacatcctccccgccatgaccttcgtgatggccgtaatcttcaggatggagaaggttgacctgaagaaggtgaggtgccaggcgaaggtggccgggacgctggtgacggtggccggcgcgatgatgatgacgctgtacaagggcccgctgatgcagatggcgtggacgagccacgtgcaggcgccgcacggccacggcgcggaggcgcccgccgccgccgccgccgtcgacccgtcgggcagggagtggttcctcggctcgctgttcgtcatcatcgccaccctcgcctgggcctcgctcttcatcctgcaggcgcacaccctcaagaagtactcggcgccgctctccctcaccacgctcatctgcttcgtcggcaccctccaggccatcgtcgtcaccttcgccatggagcaccgcccctccgtctgggccatcggcttcgacatgaacctcctcgccgccgcttacgccggcatcgtgacgtcgagcatcgcgtactacgtgcaggggctggtgatccagaagacagggccggtgttcgcatcggcgttcagtccgctgatgatgatcatcgtggccggcatgggctccttcatcctcgccgagaagatatacctcggcggcgtcctcggcgccgtcctgatcgtggtcgggctctactccgtgctctggggcaagcacaaggagacccaggagcaggacgcggccatgatggagcttccagtggcctctaagggaaacgacgccgagttcaccgccgccaccgttgttggagacgacgacgacgcggcggactgcaagaaagcaaatggagtgaaaaagtcgtcatcctccaacgagcaaggagctagtgcagtttga

SEQ ID NO: 62812 - DNA, 514 bp, Oryza sativa
  Clone ID: PAT_MRT4530_64114C.1
attcagaagaacattgaagttcatcgtttattcaccatatgtatatatgcttactgacaaatgaaagcgctctttattgagcaagcccacagagtcgtacacacagcatagctttagtatgcctagtgaccaggtggtaggggttctaggataacctaacaagtatgagacaccaactgtacgattggggatgtacacgttgcaaaacgccggaaggctcgctcgacgggcgcttcagagttccctttcaggcagtcgaggaacacctaggacatggggtgcccaacatgggtggcgccgattctactggagatgcctccaaccctgtggatgagagccgagcacctgctcgaggtgttgaagaccgtggctagctgccgggagcattcctgtcggagctgatcgttcacggcgccatctgatagcgccgtggccacatgcactggggcttcacctacgtacgacatcgtggtattgattactggggatactacattcctgtatgacaacgctc

SEQ ID NO: 62813 - DNA, 585 bp, Oryza sativa
  unsure (1)..(585): unsure at all n locations
  Clone ID: PAT_MRT4530_64115C.1
gcaatctccccctcctcccgtctcgtcgtcgtcaccgccgccggctcaccccccacccgtcgccgccggcgcggaggccaagccctagccccagcgcggccgatcgcctcgatcccccggcgagccgatgggcgtgcgccgctgaagcatgccagcgcgccgaggccgtggaaagcggaagcagcagcagccgccgccgccgccgacgggcccagcggacgcgaggcagccggaggggaagcagcgggaggaggagcggaaggggatggaagggtccgacaaggggggcgccggcgacgacgggagccccgcgccgctcccggagacggtacaaatcggaaattcaccaacgtataagcttgagaggaagcttggaaagggaggatttggacaagtatacgttggccggcgtatttcctctcctactcatggtaacagaaattctggtgcaaatgcattagaggttgcgctaaaattcgaacatcgaaccagcaaaggttgcagctatggagctccctatgaatggcaagtctacaatactcttagtggaaatcatggtgtnccacgggtacactacaaaggaaa

SEQ ID NO: 62814 - DNA, 346 bp, Oryza sativa
  Clone ID: PAT_MRT4530_64116C.1
ccttggttacaagacatcttgtgggggagtggacaccagaagcaacatctcgtaccgattcagcagctactacatcaccgactactaccagaagaacgatcaagacaatgtcgcctgcgggttctcgaacctcgcaacgatcactggccgagaccacagcaccggaacatgcagattcggtatcatgatcgaggtcgactcggccttctcgtggaagctgcagcatgttagaagcagcaacctcttgatgcttctgcaagatgagaaaagtccagagaaagctcgccgccgctgcggcctctcagaactgcatctccaatccccgacaacgaccaagcggttgtag

SEQ ID NO: 62815 - DNA, 271 bp, Oryza sativa
  Clone ID: PAT_MRT4530_64117C.1
ggtgttttttttggggggaaacctcttacttttatgttgagagagttcagcatatacctatccagactgcagttacagtaaaacaataccttgaaaactcgactccaacttatatgtgacatactatagattgctgaaccaaactgatttattatgtgggctaccatcaatgttgttgaatccaatatcgcgtttggcatcacctatcggacccagtttgccaagttgcatttaccagccagttggaatttgaccaccagtcggcatagat

SEQ ID NO: 62816 - DNA, 358 bp, Oryza sativa
  unsure (1)..(358): unsure at all n locations
  Clone ID: PAT_MRT4530_64118C.1
ccctcgaggncggccgggacaaatagccttcccttcattaggactacaacaacagtggatgcataaatcgccccatggtgttgttcgcagtttgcttgttcctcttgtgcgatggntcgatttccacgcagatatcacgcaagaggactaggcgatgacgcagttctccacgtggtacccggagaggatagagatgtagacagatcgagagcatctggatcatcccggagcgcgagctctgaagctaccacatctgaggtcttcaacgcctccaatgatgtgtttccatgtaccgagaggatacgttaggccacgagttattgaatctagaggactactactagcccactacactatg

SEQ ID NO: 62817 - DNA, 192 bp, Oryza sativa
  Clone ID: PAT_MRT4530_64119C.1
atggcaaagagcgaatattattgtggctgtatgtatcagcggccttatcacctttggcgtcttgtcgaagattttacagtgctcccctcgcgtccggtctccgtcgtcgaccatcaccgtccggctcgatacagagcgatcagcgagaattttcaaaaaaaatttgacgcagatatgaattccaaacagctc

SEQ ID NO: 62818 - DNA, 1257 bp, Oryza sativa
  unsure (1)..(1257): unsure at all n locations
  Clone ID: PAT_MRT4530_6411C.1
tgctgggtcatggcatatttagtggtcatgtgcatgcatccacacatgaaggatgagacggcacgacaatgccctcaggaggggaatgacgcttcgagcatcatcgctgccggcccggccgaggccgggctaggttctcacccgccgctcaccacctacgagtccacggcgggtgccccgatgctccaccaccgtccaacctctgccgacatgtgcgaccactgcaccagtgccctccaccggctggccttcgtgcgctgtagatcgcactgcaccccaccgccgatacttctcccaccgtgccccccctcatcactgcccgccccgcctcctcgcaccgtgccaggctcctcccgcgccgccatgcctnacccgccccggctagcctcatccaatgcccgccgcgcctcatcgcgccaagccggcctcccaccaccggccacgcctcctcgcgccatgccgatctccgccaccaccggtcgtgcctctacgcgccgagctagcctctgagcactcctcccgccactgacccactgccaccacgaccagaaccaccgccgccccactcaatcccgccacaagccatcaccccaccgccaccgtgccggcctccacctgccgtgtaccgccgccaccatgccggcctctgccggctgcgaaccgccgccaccgtgccggccttacctcctcacgcgcgccgcgccgcgccgccctgccactgtcgcgccagctgttgccgccgccatcgcatgggctccgcgtgcgcctccatcgatcgcggattcgggcctcgcccgccgccgcaccaccatgcgccgccctcactgtcgccaccagcaagcgtcgtagccagcagctcctccttccccatcgccggtcacctccttcctggcccactgcgtcctcctccccatcggatccggcgctgggggagccagatccggtttcgctctgtgccggcgagcccaccgccgcgacctctgccccgccgccaactccgcctccttcgcccctccactgccactacatcctctgccccgccgccgcctcctccaccctgcctccttcaccttgccagccggccgagcaggccggcgccaccttcttcgcgccccatgccgcgtcggtgccccaaccttagcgccgctcttggggaagaagaagagcgcccggccgccgctgtccttgctgtcgtatggctttgccgacggccgctcctgggccggcgtacggcagcggctagggcagcggcggcgc

SEQ ID NO: 62819 - DNA, 243 bp, Oryza sativa
  Clone ID: PAT_MRT4530_64120C.1
atggagggcgaggcggcatcggacaatctcacactgctgccacctagactgctcgagagtgggtgtgcgacggaagtggaggttgaggacgacgtacagggtgcgggaaggctggttggggatggcacggtcggtgtggtcgaggaggatgacggctgctcagaacagcccgagaatgcaaccgacgacacgaacgaggaaacaccaacaacagcagcagcagcagcggaaccaacgaactaa

SEQ ID NO: 62820 - DNA, 777 bp, Oryza sativa
  Clone ID: PAT_MRT4530_64121C.1
atggtgccgaccggcaacgaggaagacaacccaccgccgccagctcccttagcactaccatctcgccgccggtggcgggggcggtcgctgcgtcctgggctgctgccgggcggccaggtcgagctggggcgctgctaccgagccgctgctgccgcgtcgggcaggctgcgctgccagccgggcacaccactgccgcctccgtgcgcgggtcggccacgccgagttgcggccgtccgccgccacagcgcccgggctggcctcgccgagccacaaccagccgcctcgcccccggccaaaagccgctgccaccacgcccgcacgccgccgcgctgccgagccgccgctgccaggttgagcgggggcgccgctgccgagctgccgctgccgccttgggcagccggccacgccaccgccgcctctgcgcgcgggtcggccacgccgagccgtcgccgagccgcgaccgtccgccgctttagcgcccgggccggcctcgccgagccaccgcccgccgccgactccgcgcccgagccgggccggccgagccgcagctgcctgccgtctcgccgccggccacatgccgccgccaccatgcccgcacgccgctgcgccaccctaagccctcgcgccgccgccgcgcagatccagttcgcgctgaggaaggaaacaccacgaagaaaaaggcctcaccgccgccttccctactcgctgccggcttcaccgccggcgagctccagcggtggcgaggaccagggatggagaagaggcgtgggcagctag

SEQ ID NO: 62821 - DNA, 273 bp, Oryza sativa
  Clone ID: PAT_MRT4530_64122C.1
atgaagaacaggcaaactcgtatcacctgggtcgccgccgagatgaccggagccaccggcggaggccatttctccggcgagacggccggcggccgcgccgccgcgggggccaaacccggggcgaactcgcacaccggcggcgagagtgctccgagggtgtgtcagttgcgccgcgttcaatccggccgtagaccatcgaaacggcggcggatcggcgaggttccaggctcgccggattcccctgctagcctgctacatcttgaccccggctag

SEQ ID NO: 62822 - DNA, 1650 bp, Oryza sativa
  Clone ID: PAT_MRT4530_64123C.1
atggagaggatgagcagggtggcggtggctgtgctgctgctgctctgcttgcagcttcagcttgggatcagcggcggcggcggcggcggccatggtgctcggcgagatgatcagcttgtccaagaatgttctggtttctgtttagctgatttgtgcgtgcgccctgcagctcggttgatccatgccaagaagtcatcatcatcttcgcagcagcagcagcagcagcagcggagcaggcaggccggcagcaaggccggatggccgtcgacgtcgtcgacgccgtcgaacccgttcggactcccgatgctgctgccgccgccgccgccgctcaaggactggccgccatggctcgacatgccgccggtccagggcccgtcgagctcgccctcgccttcgccttcccctgcgccttcgccagcgtcgtcggccgcggtcgccgagcacgcggccccgccgcggcgcggcgaggaacacgcgcgcccccgcagcatcgcgttgccgccggcgtctagctccggcgacgccggcgaaaccagccggccggaggtgacggacgggagcgcaacgaggcgcggcggcggcggcggcaagacgaactacgttcttgtggcggcggcgggggcgtcggtgcttcttgcggcgtcggcggcggcgttcgcggcgtgctaccggtcgagcaaggtggtgaggagcgtgcggccgtgggcgacggggctgagcgggcagctgcagagggcgttcgtgacgggggtgccggcgttgaggagggcggagctggaggcggcgtgcgaggacttcagcaacgtcatcggctcgctgccggagtacaccatgtacaaggggacgctctccagcggcgtcgagatcgccgtcgtctccaccaccaagacgtcgcccaaggactggtccaagaagtgcgaggcacacttcagaaagaagataacgagcctgtcgagggtgaaccacaagaactttgtgaaccttcttggctactgcgaggaggagcagccgttcacgaggatgatggtgttcgagtacgccccaaacggcacactattcgagcatctccacgcgagggacgaggggcacctggactggccgacgcggctgcgcgtggcggtcggcgtcgcctactgcctggagcacatgcaccagctcgccccgccggagatcgtccggacgctggacgcctccaccgtctacctcaccgacgacttcgccgccaagatctccgacgtgggcttctgcgaggaggagatggcggcggcggcggcggcgccggcgatggcggacagggagagcgtggtgcacgggtacgggatgctgctgctggagatgatggcggggcggctcgcggcgtcggagggcgggctggtgcaggggtgggcggcggcgctcctccgcggggagcggcggctgcgggacgtcatggacccggcgctgcggggcgccttccacgccgagaccgtcgaccgcctggacgccgtcgtccggtcctgcgccgaccgcgacccgaggcggcgcccctccatggccgacgtcgcggcccggctcagggagatcaccgccatgccgcccgacgccgccacccccaaggtgtcgccgctctggtgggccgagctcgagatcatctccaccgaggcagcctga

SEQ ID NO: 62823 - DNA, 799 bp, Oryza sativa
  unsure (1)..(799): unsure at all n locations
  Clone ID: PAT_MRT4530_64124C.1
tcatcagaagaacacctcaggttcaaagcaaaaaggtctatacaccaaaacagcaaaggccattcatccagtcatggtccagagtcatcgtctcctatcaatcacaggatcaacaaatcagcgaacaccaaacccaagtttgcagatgatatctaagcgcagatactgggagccccttcaaccaccatgatccttcacagatcgacagaccatcgttgcaaacctaaaaaacagatggacaaatttcgccctcaacaatggcataaagctccacacagtatgcattttccatttttaagactacccatcgaggagcaaccgtcgatatcttctgaatatgctatcaatgtagtctgatctcatgcttttgttagcggcaaagctcggtgtctccatacagtctgctgtttatgtaatatactgcccatgttataatcgttacccctgtgcactatagacacgctgtgggcactgcacttatcactctattatggcacttccatatgtagctactgatgcagacaccgattaacctccatgcctatgtatgcactattcactgccttagctgtagagtcccggtatccctccctcgatgcttattacctttttgggatcattagctatacatactgtcctgtatttaaaaaaaaaaaaaaaagggcactgcacttatcactctattatggcacttccatatgtagctactgatgcagacaccgattaacctccatgcctatgtatgcactattcactgncttagctgtagagtcccggtatccgtccctcgatgcttatt

SEQ ID NO: 62824 - DNA, 328 bp, Oryza sativa
  Clone ID: PAT_MRT4530_64125C.1
ccgggctgcaggaatcggagaggataagcccaaaacaaaaaggaagaagagcccagcccatgtcgtgtcgtcttccccggtccgcacccaacccaaacaaggaagagaaagcaactccgccttccgccgccgccgccgcaacaccaagaagatggcggcggactcgctggacatgtccctcgacgactcatcaccaacaagtacaagccgtcccgtccagatccagcgccctctgcccgccgcttcctcccgcgccgcacccgcgctgctgccgtccctatcacgccatcacctttcaggcgccgccacggctacacccacccgacgc

SEQ ID NO: 62825 - DNA, 287 bp, Oryza sativa
  Clone ID: PAT_MRT4530_64126C.1
tgggtttttttttttttttggtttggtgcacaaacgcgcagattaaaagtgacagagccggctgacccaaaagagggcacacaggttaccacaacctgggttggaaggctgttaagcccctagcataatatcgcccccaggaaacgggtttaagacacactgacatgggaaacagggaaacgtgcccactggccgaataatgggggagcagacagttcttaataagggtcttgacaaaaacaaaattgagggcttagacgcccacccctactggagaacatgacacg

SEQ ID NO: 62826 - DNA, 556 bp, Oryza sativa
  unsure (1)..(556): unsure at all n locations
  Clone ID: PAT_MRT4530_64127C.1
atcaccatgaagagccccccaaagntgataccgtagtncccccagtttgtgtctcggcccgcgcaatgttcgggttcccagtataatgttcccacgngtagggaaacccctggggaaagtgtttcgttgtaagtggaaggtgtcataatgtatattaaaccgggatacgcacccggacgggatgggaccatcagggcctnagaagtgaccgaggatgcctncatgggcgtcccgttgggtcgtgncacagtggaccaatgatggcgcacctgttgctgtgtgcttcgagaaggantctgcgggatgctgttgctttgctgtgtgcttggaggaaggaggtgtgcaatgtgtggctgactgaggtgtggactgtgtgattgaggactgacactgagactgagaagagtgataggatggagtgaattttgggccattaaaggatagtgagaagagaagaatggactgaaatggtttgtttgtctgttattgatcacttgtatttttggtatattgatcgatgatgccattaaagcatcgtaaaaaaaaaaaaaaaaaa

SEQ ID NO: 62827 - DNA, 511 bp, Oryza sativa
  Clone ID: PAT_MRT4530_64128C.1
actagtggatccccgggctccaggctcttcacaaccccaacaccaccaagctagcgacaaagcccggcgatctcagctcaccctaagctcgccgcgccgccgccgcacgcttctgcgtctaccggcgagagctagttgtcgtcgtcgtcgttcagtggcggcttgcttgttcagtgacgacggctgcagtagtgcagggccggccgacctcccgcgcacccgtcgtcgtggaggcgtgatggctgcccgtgcggcggcggcggcgagggggggaggtggcgcgccggcgaggaggggcggtggtctccgcgcgaagcaggccggccgcgccagctgccgcggcgcctagagcgcgtggcgggggggaggcgaaaccgcctagagcgcttcgtctgcggtgctcgcctcgcctggtggtggtgtgcttcgtctgcgtgcgcggcgggcggggtcgccggagccagggtttgtagcggcggcgaggcggggcggggatggccgtcggggatgc

SEQ ID NO: 62828 - DNA, 916 bp, Oryza sativa
  Clone ID: PAT_MRT4530_64129C.1
ctgagacaagtagcgctggatagccgatatagctctttgcccaatttgttctacttcttcaatgaattgggcatcctgagcatcggttccagggatgacttttagggacttggtcatatcagcgacgttcttgatagccgattttagccttgccttttgttcttcgccagactatgggagatcggctagcttcttgtgttccagaaccacttcggcattgcattcttggaattgtgccaagagctcaatctttcgagcttcaagccgatcaatattagacctgatcgggccctcagatagttgatcaagttttgacttctcttcatgcacgagttgccgattggcctggatggtagcctcaatctctttgcgttctcggcgttcgactagtctttgcttggctttctccagtttgaattgatgttgttcaaaataagcagctggagtgaggacatcggttagttcttcaggaattaaagcttgaacttcgtgtagccgggccctaattgatccacagtcgaccaccaaactgtctagtgatgatgcctctagccgataagagatatcttcaagagttttcttcacatcatcggataaaggggccaaggcttcgcttgtggtatcctcttctgtctcatcgagatagtccttaatgtcaaaagagaacagatcggctaagactgggatagcaagagcagctggttgttcttcttcttcaacatgatggctccctgtagccgatggggtttggttacttggtgattgttgtacaggggaaggaggaggaggaggaggaggctgcaaaaagagataagtgttaacataagattggctatgatcggctaatgagaaattaagaacatcttactagttgagccagtttgagagttgttgttggcgatttcttctacacagc

SEQ ID NO: 62829 - DNA, 1321 bp, Oryza sativa
  Clone ID: PAT_MRT4530_6412C.1
atgggctcgctccccgtgtcgtcgccggaatgcgcgccggggcggcgggtgacggtggcggcgtcggacctggcgccgctgttcggggcgcagcggcggcacctggaccacttcttcgaccggctcgacctctcgcaagcggcggcgttcgcgcaggcgctggtcgacgcccccggcgcggtgttcttcacgggcgtcggcaagtccgggatcgtggcgcggaagctggcgcagacgctggcgtcgctcgggttcacccgcgcggggttcctgtcccccgtcgacgcgctccacggcgacatcggctcggtcttccccggcgacctcctcgtcctgctctccaagtccggcgcctccgacgagctcctcgccctcgcgccctgcgcccgcgccaagggcgcccacctcatctccctcacctccgccgcatccggcgccgactgcccgctcgccgccgtgtgcgatctcaacgtgcaccttccgctgcaggccgaggtgtgccccttcggcctcgctccggtgacctccaccgccatacagatggtgttcggcgacaccgtcgtcgccgccatcatggaggctcgccgcctctccagggaccagtacgcctccaaccaccccgccggcaagattggcaaatccctcatcttcaaggttaaggatgttatgaagaagcaaaatgagcttccattgtgcaaggagggagatatgatcatggatcaactcactgaactcactagtaaaggctgtgggtgtctacttgtggttgatgatgagtaccatttgatcggaactttcactgatggtgatctccggcgtacactcaaggcaagtgggcaagcaattttcaatctgacagttggagagatgtgcaacaggcacccaagaacaatcaccgctgatgcaatggcagtacaggccatggagaagatggaatcgcccccttctccggtgcagttcttgccagttgttgatagcaacaacgttgtctgtgggatcatcacattgcacggattggtctcagctggactataatcttttcgcctcatctccttggcgattctttgcaagtatttggtccagtacatcatcacgctggttgcatggattcttgtcaaatggtgacgccttatctttgtactagtacgtgtagcctagagtgttaaagaggcattgtttaccagtgtctcctacgtctagtgttctaaaagagcaatgtgacagttgctcgctggatgaatgtacccttccctctgtaaatgaatgtgagtttaagatgcagtggaataaaaagtttaagcctaaaaaaaaaaaaaaaaaa

SEQ ID NO: 62830 - DNA, 2295 bp, Oryza sativa
  Clone ID: PAT_MRT4530_64130C.1
atgtcgacctccgccagcccgtctgccgcgccatcagtcgaatatgctgatgacgagattggaatcggccaagcactcgccctcaccatagcaaattcggctaaggatgaacccttaatggctgccgccacgtacttctggtccaataccatcaacgcttttctgttcaaccaaggtccgatgaccccaactctgattgatatcaccatgatcattggtctagatgtgacctcatcggctaaccctatgagtctgaacaccaataatcaatacgactttaggaccaagagcataggtggttggtctggttatgtggcggcatatatgggccaaggatctgttactcctcgagaacatgtggcctttttgctcatgtggctagaaaagttccttttctgtggatctagttgtggtcgtacaaccaactgccagtttgcagccgaggctctggaatcaaaaagagaatttcctctaggcaagatcctcctcggctacttataccaaatgctgaacaatgcatcggccaagatagtcgtcggctcagtggttggagcaggtggaccatggtggctgctacagtcttggctcaacctgatggtcatgacagtcgtcaatcggccatttgtgacagaagccgaattcccaagactggagccgattgtagaagatgataaagaagaccgcacccatcgcagatgcatgtcatatggagaatatgcatccacaccagccgatgcaggagcaaaattaagagccgaattgctcaaggattggttctgcagcttctatgaaggttttcagaaagatgctcgagtttggtttccttatgaagactcagtgcatttggatctcccattggactttagattcaaagacatcaatcatgagagattccaaaagtctagagaagtcttctcagctgcaatcagcccatgcattcttcctgtcggtattcatcaagggagaaacattcaagtctcctatgaattctatcacccaaagaattcggccaggcaatttggaatttgccaactccccatcggcttgttctttgctgacaaaattcaatgccgcggagaaatttcatcaaccctgatgatggatcggctactcaacatccaaggtcctcccttgggcagcattgagaatatagaactagcaagattcaggagcagaaattttgatagatggtggggagaatggaagcagcatctattccatcagtcggcctctatgtatatgacagatctattccctgatgttgtccctcagatgagagaaccagccgatgcaggcaggaaaaggaaaaccaaagtgccagcaattgatccatcggttctggctctcaagaagaaggccaaaaaacagaaacccaagccaaccgatgatctgcctgcccttgatccatccattgaacaagctttggatgaagaggaaatcggagaagatgttgatcaagccgcagccgaacctcctcctccttctccccctgtacagcaatcatccagtgaccaaactccatcggctatagggagtcaccgcgttgaggaagaagaacaaccagccgctcctgctatcccactcctaactctcttgaaattgttcttacgggtcttagccgatctattctctattgacatcaaggactactttgatgagacagaagaggataccacaagcaaagccttagcccccttatccgatgatgtgaagaaaactcttgaagatatctctcatcggctagaggcatcttctctaggcagcttggtggtcgactgtggatcaattaggacccggctacacgaagttcaagctctaattcctgaagaactagccaatgtccttactccagctacttatcttgaacagcatcaattcaagctggagaaagccaagcagaaactagccgaacgccgagaacgcaaagagattgaagctaccatccaagccaatcggcaactcgtgcatgaagaaaagtccaaacttgatcaactatctgaaggcccgatcaggtctaatattgatcggcttgaagctcggaagattgagctcttggcacaactccaagaatgcaatgccgatctggatctggaacacaagaagctagtcgatctcccacaatctgtcgaagaacaaaaggcaaggctgaaatcggctatcaagaatgtcgctgatatgaccaagtccctaagattcatctctgaaaccgatgctcaagatgcccaagccattgaagaagtagaacaaattaggcaaagagctatatcggctatccagcgctacttgtctcagtga

SEQ ID NO: 62831 - DNA, 3181 bp, Oryza sativa
  Clone ID: PAT_MRT4530_64131C.1
cacgagatttgcatgaagggggtgaagcagctgagcctcaagtccaagagcagcagcagcaagaaggcgcgggggagacgcactgtgatccacaccgagccggtggacctgcacaacctgctgctccactgcgcgcaggcggtggccacggacgaccgccggagcgcgcacgagctgctgaggcagatcaagcagcactcgtcggcgtggggagacgccggacagaggctggcgcactgcttcgcgcaagggctggaggcccggctcgccggcacggggagccaggtgtaccagtcgctcatgtcgcagcgcacctccgtggtcgacttcctcaaggcgtaccggctgtacatggaagcctgctgctgcaagaaggtggccttcgtcttctccaacaagaccatctacgacgccgtcgccgggaggcgcaagctgcatatcgtcgactacggcctcagctacgggttccagtggcctgggttgctgcgcgagctcgcggcacggagaggcggcccaccggaggtgaggatcaccggcattgacctacctcagccgggattccgccctgaccaacacatcgaggagaccgggcggcggctgagcaggtacgccgacgagctcggcgtgccgttcaagttccacggcatcgcggcgacgaagaaggagagcgtgaggcgggaggagctgggcgaggcggaggaagacgaggtggtggtggtgatcagcctgtgccatttcaggaacgtgatggacgagagcctgcaggaggacagcagcaggagccccagggacgaggtgctggggaacatccgcaggatgcgccccgacgtgttcatccatggcatcatgaacggagcctacggcgcgacctacttcctgacacgcttccgggaggctctctactactacgcggcgcagttcgacctgctggatgttacgtttgggctggttttggggaaaaaataaatgaaacaatatattttcaaatttaattcgggttgaggcaggtgcccttgaacagggagaaagttatgatggttaagaaccactaccacaaagagtttgtcatggaggaggatcaatagtggcttcttcagggctggaagggccgcatcctcttgtgcccactcaacatgggtagcacatgactagtccagttccccctgtcagcattccctctacaacggcggatatatccccttgaagggactcttgatctaatcctggtgtactcgggttgcccaacaccagcttttaggtaaattaatgttgaaaaatataatgacgattcttttttctcagaaatacttaggattctatcatgttgggacaaatataaactcatgatatgacgagcaagagcaaaggctaccaccattgaatgattatcagcatggccaacccagaggatttcttttgggaggccctcctcaaggagaacgaagcaccatccccaccacctgtcttctttgacctccccgcaacacccctcgccaacagtgatggcagtacagatccctcgtcattgttggacaaccaacttctctcctacgtcactcgtatgctcatggaggatgagatgggttcttctgctgctgtcaccaacttgcagtgtgtcaacaggggcagcacagaggaggccaacaatatgttgccgggcagtgaagtggttagggcgttctcgaagggcatgggagaggccagcaagttgctgcccagaaacaacagcttcagaacgctggagacggtggatcaagtatcaagtgatggtcattgtaggggaggaaagaagaaaaaccatgacagggacgagcagcagctggaggaggaactggggaggagcagtaaattagctgccatgacgaatgcagggacggaggaggctggtgctcgcgagttgctggacgaactgatgctgcacgcgcacgagacatgcatcaaagacatggagaagctgcgcatcgacatggacaatgaggcagagaagacgatcaacaagaagggcaagaaaggcagtagtagcaaggtggtggacttacggttgctgctgatccagtgtgcacaggccatggcgacagacaaccagcaatctgcaggcgagctgctgaagaagatcaagcagcacgctttggcaacaggcgacgccatgcagcgagtggctcactacttcgccaaggggcttgaggcacggctagctggcagagggaagcatctgtatcagaatcagatgcgcatgtcgttggtggagtacctcaaggtgtacaagctctacatggcagcctgctgcttcacgaaggtggcactcatgtttgccgccatgacaatcatgcaagctgtgcaagggaagaagaggctgcacatagttgattacggcccgcgctgtgggctgcactggccagacctgctccgccggctgggaagcagggaagacgggccgccggaggtgaggatcaccatcgttgacatcccccagccggcgtttcgtccatttcagcgtattgaggaggcagggcattgcctgagcagctgtgccaatgagttccgcgtgccattcagattccaagctgttgtagcagcaaagtgggagacggttggtgccgaggacctgcacatcgagcctgatgaggtgcttgtggtgaatgacctctggagtttcagtgctctgatggacgagagtatcttctgcgatgggccaaaccccagggatgttgccctccgtaacatcagcaagatgcagccagacgtgttcatccaaggcatcatcaatggtggctatggtgcctccttcctgtcacgctttcgtggagcgctcttgtattactcggctctgtttgacatgctggacgcgaccaccccaagggatagtgggctgcggctggcgctggagcagaacgttctggggccttacgccctcaacgccatcgcctgtgagggtgcagacctggtggagcgccctgagaagtacaaacagtggcaggccaggaaccaccgtgcaggcatgcagcagctgaaactgagaccagatatcgttgatacaatcagggacgaggtgaacaagtaccatcacaaggactttctgctgggagaggacgggcagtggctgctgcagggatggatgggacgaatcctctttgctcactccgcatgggtgcgccaatcacaagacacttcctccggatga

SEQ ID NO: 62832 - DNA, 1973 bp, Oryza sativa
  Clone ID: PAT_MRT4530_64132C.1
acgttctcatctccggccagatttccgcttgcaacgatgttgtcttccgccagcccgtctgccgtatcatcaaccgacatctctccaacctggttgcaattccaagcctatcccatgaaaaccattactttctcggcccaatcggcaaccttgatcctactgagttcatcattggccagaccaatagaattcctttcagattagccaacccaaatctagaaagatgctcgaatttggttccctacgaagactcagcacttctagagcatccatcggactttagatttgaagacatcaaccatgaaagataccaaaagtccagagaagtcttctcggctgcaatcagcccatgcatccttcctgttggcattcatcaagggaggaatattcaagtctcttatgagttctatcatccgatgagtgctgccagacaacttgggatgggtcaactaccaatcggtctgttctttgccgataaaattcaatgccgaggggaaatttcatcgaccctaatgatggataggctgctcaatcttcacggacctcctttgggcagtattgaaaacatagagttggcaacctttaggagcagatcatttgacaaatggtggggcgaatggaagctgcatctgttccatcaatcggcttctatgtacatgacagatctcttcccgaacattgtccctcagacaacagaatcttcccctccacaccaaagcaatagtggcagagacatcgaatatgttccaggtctaattccaaatggaggtgggccatctacccccgtcatcggctatcatgcccccaagacttcaactcttctccaagggcttattagagaaccagccgataccggcaaaaagagaaaaaccagagcatcggctgtagacacatcggctctagccccaaagaagaaagctaagtcaaagaagaccaagccaaccgatgacttgcctgccctagatccatccattgaacaagctctggatgaagaagagattggagaagatgttgatcaagctgcagccgaagtgagcgatacagagaaaacaccatcggcttcgcccaagcagacccctccaactccttctgccccagctcatttctcgaggttgcagaaaaagagaattgctatgaagaagaaatcggcagcaacaactctcaaaccggctccaccacctcctcctcctccttcttcccctgtacagcaatcatccagtgaccaaactccatcggctatagggagtcaccatgttgaggaagaagaacaaccagccgctcctgctatcccagtcttagccgatctattctcttttgacatcaaggacaactttgatgagacagaagaggacaccacaagcaaagccatagcccccttatccaatgatgtgaagaaaactcttgaagatatctctcatcggctagaggcatcttctttagacagcttggtggtcgactgtggatcaattagggctcggctacacgaagttcaaactctgattcctgaagaactagccgatgtccttactccagctgcttatcttgaacagcatcaattcaaactggagaaagccaagcagagattagtcgaacgccgagaacgcaaagagattgaaactaccttccaggccaatcagcaactcgtgcatgaagagaagtccaaacttgatcaactatctgaaggcccgatcatgtctaatattgatcggcttgaagctcggaagattgagctcttggcacaactccaagaatgcaatgccgaactggatctggaacacaagaagctagccgatctcccatagtttgtcgaagaacagaaggcaaggctgaaatcggctatcaagaatgtcgcagatatgaccaagtctctaaaagtcatctctggaaccgatgctcaagatgctcaatccattgaagaagtagaacaaattaggcaaagagctatatcggctatccagtgttacttgtctctg

SEQ ID NO: 62833 - DNA, 571 bp, Oryza sativa
  Clone ID: PAT_MRT4530_64133C.1
gttgtggcgcacggatcctggcggcggggaactcgtgcggcaggccgaccgtgtgtcgtcgagcttctccgcctgcccgaccacgatggtggccgtgctcgccctcctctccaccggcctctccctctccctctcccgcgcggacctcgccgccgtcgtcgtcgcggagccgcggctgctctgcgcgcaaggccgaccgtgcgtcgtcgcgcttctccacccgcccgaccgcgatggtggtcacctcgccgccgtcgtcatcgccgagccgcggctgctctgcgcgaaggccgacaccatcgccgccagcgctcggttgggtcatctcgtccgtcgtcgtcgccgagcccaccgccaccgacgtcgcccgagcccgccgccgccgctgtcgcccgagccgtctaccgccgccgtcgccgagccccccgcagccgctcatcgacgccatcaaggaggccggtggcaaccacgtccggaggtgagggcagaggcggcgtcggccatggttgttgcaaacggcgttgtcggtggttgcaaatggcgctcatcccatccctccctcgttccttga

SEQ ID NO: 62834 - DNA, 1240 bp, Oryza sativa
  Clone ID: PAT_MRT4530_64134C.1
tggatcctcgcggttcccctccacgcgctccccgcttccctcctccattttgagatctaaatccaaatccctccccctttttcttctcaccctcaccacctcatcctccaccaccaccattccctcttcttctcctcctccttgcttctcccgccccttaacccctactgctccctcccagtagccggtgctaaccctagcttgctagctagattgctctctctggtagtagtagatccgtggagtggagatctgcccgcggatcgagcggcggcggcagagcaccagccgtgtctgcggcgcggtgtgcgcgggtgttgcggagcggcggctaagcggaggtgtgggaggagggggagtgctgcggcttccggggtgttagatccgccgatcctggcgccggagatggattcctcgtcggtcgagaaggggagtgggtcgatagatccggacgagcgcacggcctccggcgagcccaaggcgtgcaccgactgccacaccaccaagactccgctctggcgcggcggcccctccggccccaagtcgctgtgcaacgcgtgcgggatccggtaccggaagaagagacgggaggcgctggggctcgacgccggcgagggcggcgcggagcggcaggagaagaagaagagcaagagggagagaggggaggaggtgaccatggagctccgcatggtggggttcgggaaggaggtggtcctgaagcagcggcggcggatgcggcggaggagacgcctcggcgaggaggagaaggcggccatcctcctcatggccctctcctccggagtcatctacgcctgaaccaccaccctacctacctacccacctagcaacagcaagagagagagaagcagaggaaaggaggcagccatgggaaagagtgatttgcttgcttaacatgcatgatctcaaccgggagagactagacagatctctacccttttttttcttctcccctgcttagtttttccagctaattagttcgatcaaagtggaagccaagttaataatgatgatgatgatgtagtagctgctgttcttcctgttactgttacttgttcttgcctagctgtaatgttactagtagtgtttttagtagagcgtgtaacgttgcaatgtaagaaagagcttatgatccatcttctttctcttgttctttgcaagagattagctcctggatctgcaccaagtaatgcagtttttcagctgaaaaaaaaaaaaaaaa

SEQ ID NO: 62835 - DNA, 207 bp, Oryza sativa
  Clone ID: PAT_MRT4530_64135C.1
atggggatcaggttgcgtcctgccgctttttgggaggggaaggccgcggggcgtgacgcgtcacgaactcacgcgtgcgttgtggggtgggcactgggcagtgtaaaactgggcgacaaagtggctggcgccgtcgtccaactggacgacggcggcctctttggcgccgtccccctgccgacgtggcggggcgatgatgagacttag

SEQ ID NO: 62836 - DNA, 459 bp, Oryza sativa
  unsure (1)..(459): unsure at all n locations
  Clone ID: PAT_MRT4530_64136C.1
gcaggggcgtgatttcatttgcttctctgttttctaatttctaaagcttaatttgaatgttgttttggttctgaattctatttttttacaacaaatttgattttgaattctgatcgacgcagttcgctgggcacatttttcgccagttgcttcgtgcggcctgaatgactgaatgctcagctaaaattaccatattccctccatttcatttcatattataagtcatttttattttttgtaatgttaaatttcttctggtccccttcctctgtcttgttcagttctgttcatcttgcagggcggttttgctttcctagttctgttcatctgagcttattgtctttacgctgcatatgcgtgtttaccgatcagccccaanaagtgtcgacgtctttttagcaagtccgttactggaatttgcactgcatgtttggcttggattagctgattaatatccgg

SEQ ID NO: 62837 - DNA, 474 bp, Oryza sativa
  Clone ID: PAT_MRT4530_64137C.1
aggtaatttttgttacttcttttatattacagtccagcataaaaatttgaagtgattcatacaggtacagctcttcaatactggctgactccatggcctaatagtgtttatctaaggtggatgcacaagatagctggtactacaagctcaacaacagttgctggtgagcgtagctgccgtgccaataaagaaactgaatggatcatatgagatttaaaatgaagatcatacaaaacatttttatggtcagaggtgacggatgacataagtaaaaatcaattggtcgttgcctgaactttgttcaagatttgacatatgagacgaatcatgcaaagttaattcctgtctatgagctcattgcttctttttatcgaagtaagaaagcattgtatctaggatgcgaggcattgttgtactctttttggtcatgctaggggggtgcttaacacaaatgtgtgcccatacttgtggaga

SEQ ID NO: 62838 - DNA, 549 bp, Oryza sativa
  unsure (1)..(549): unsure at all n locations
  Clone ID: PAT_MRT4530_64138C.1
gcccacgcgtnnccggtcagagaaccctccttttatagnnntccctctatttgtctttcaagctcaaactccttccccatttacctccaaagtttggcttgaaaaactattcatcatatagtgaacctcgtatggtgtgtctccttaacactaatagcaaagtaatactcacgacatctatatgccatgggagagcaacacgacctatgtgttcctaaaaactcagctgaaggcatttttcattggatattgtctggtaaggatgaagctaatcagcaaatataattgattagcagagtatctgcaaaattatcttgagctttttttgtgctggtaagttatatatctcaaaacaattttcacatgtacgataagtgatgctgcttctgttttttttttttggaatgattatgcaatttggagtttaaactctttttattaactacaaaatgcaactgggtgcatgaagcttatttgcatttgtgtgttttccctttttaggtttgaccatcttctggaaaatatttcttcgcatattgggttaccaac

SEQ ID NO: 62839 - DNA, 1551 bp, Oryza sativa
  Clone ID: PAT_MRT4530_64139C.1
atgacggagatggatagacttgttcgtgtttactacggtggtagagtggtggaaccttatgttggtggacatgttgagtttgaggatatgtcattgaagaccattttgtttcccacccacccaactctagatgaactaaggtcacgagtgaaagaagttcttggatggaccaaggataatgtggagattcgtttttatgggagatacgatgttggtcaagggcataagtatatattaaatgtgataggtcagttggaatgggaagtttactttgatttgatgtggatgtggttaagactaccggttggaaggcctaagtggaggcaaagcttcactccttggccctacaatgagccagacatggagaagacagtggcctacctttttgagagtactgccactacacatgctcaccgggatgtggcatacaagcattatgtcaatgagatggactgcttgcagcctcaacatattgagtggttaccataccacacaaatgaggcttcaagcctgaccctgaactcgatgtgcaatcgagactctgactatttcatgtaccagtgcccattgatttgtttctgggcagttcagtaccaccttccgcaccgtgtcatgcgacagttcgggaagaaacaagattggccagttgaggacatctcaactggagttgaattacacaagtatgacagggtgagaacaaagaaggtgaaagactgggggctagagcataatagatacattgatgaatggagaacagccggaaggaacgataggtacatcgagactatacaccaaaatcatcttttctcagagtaccttcgttggctgcataggacatatagactgttcctccgccctacttggacggaagccgacaaagaggatgaccgcgactccgatgagaggcggaatccctatgatgtccggactagagttggatatcaaatggagcacgccccacttagagacagagtctcgagagagctcctcaggagtgtgaatgaaatagggcatgccctccaagctccgaggggtggtgaggacacggagaacacgctccgcaatgttttagagaaagttcgtcaaaggtgccggaaacttgcagcaagattaggttgcaggtcggttggattggacgacgtgtaccaaccggggagactaccaccaccactacctcaatccgcgcgtccaagtactgctcgacactccatcaggatagaagtgcgtgaaggagttggtggctcgtcgtcgtcacgcattaagcaagggaggggaaaggggaaggcgccggctccacctagcgacgacgatgacgacgaggacgaggaggatgaggactacgtcgcatcagacgccgaggagatagacatgtcacagcttcccgatgcgcctcaggggacgcaacccacgcaatacaacttgcgatccactcgggcagcgaaaaagaggtacactccgggctcgcaagcaattcggcgccaacggaaaaaggaggcagagggcagcgccaaccaccctggcgccacggttgggaagggcggcgccagctag

SEQ ID NO: 62840 - DNA, 561 bp, Oryza sativa
  Clone ID: PAT_MRT4530_6413C.1
tcatgctcgcatcgagccagcgccgccgcgcgtcctggtgctcgcgtacccatggcgaggagcttctgctgcctggtgctcatgttgagaagccgccgtctccgcctcgcgtcgtcgtgccgacgagccgccgatgctgcttgctactcgcgtagccgcgccgcctgaggagttgtcgccaccgccgccgcttgctcgcatagccgcgtggcgcgagctaggagtcgccgccgccgcttggtggtcgtgtcccgcgctgagtagctgttgcctgttgccaccgcgtagcactcgtcgccacgccggctcgtcggagccaccgccgccgccggcccctgtagtcccggttggggaatccatcaccaaccaggacggctcgccgcaccagccggccggccctccgcgccccgccgccctcgcgccggccgccgcctctccgcgcctggccgccctcgcgccggcctggccttcacgcctcgccgccctcgcaccggccgccgccgccgcgccggcgcaggcacgcggcttccgtcttgcatttgcaggcagcgatgccgccat

SEQ ID NO: 62841 - DNA, 1887 bp, Oryza sativa
  Clone ID: PAT_MRT4530_64140C.1
atggcgataggatggcataggtcacagagcctggcgtctgcagggctcgggctgcacgtcctcctctgctcgtcgttgctgctcaacgccgtcttcatcgcgcaccaattcctcggggcctcaccgccggcaacgccggagcggctcggcgacgggctgagctgggcactgcaggcggccaaggaggccgaggacgtggccgccgtcgactgctccggccacgggagcgtgttcctggatggcgtcaccggcgaggacgggcggcccgggtgcgagtgcaacagctgcttctccggtccggactgctccgtccgaatccccaactgcgccgccgacggtcaaggcggggacccgttgttcctggagccgtattggaagcgccacgccgcggccagcgccgtggtgttctccgggtggcatcgcttgagctacatcaccaccgatggccacttaaagtccgttgagctcgatcgccagatccggcggctccacagggccgtcggcaacgcggtcgtcgacgacaagtacttggtcttcgggaccggctccacccacctgatcaacgcgctggtgtacgcgctctccccggaaggcaacgccgcctcgccgccggccagcgtcgtcgccaccgtgccgtatttcgcgatgtacaagtcacagaccgtcatgttcgacggccgggagtacagatgggacgggacaaccgctgcgtgggcaaacaacaacagctcacggaaccccaccaggggtttcattgagttcgtcacctcgccgaacaaccccgacagcacgttgcacgagcccatcctcgccggctcgtcggcgatcgtcgaccacgcgtactactggcctcacctgacgcacatcccggcgcccgccgacgaggacgtcatgctcttcaccacgtccaagctctccggccacgccggcagcagattcgggtacacacgggccacagagttcccagctgcatgccatttgcaagcaagacacgtacacaacgacaccaaagctgatcgatatacgccgtgccgtgcattacgcaggtgggcgctggtaagggacgagaaggtcgcgagcagggcgatatcctacatcgaggagagcaccgtgggcacgtcccgggagacccagctccgggtgctgaagatcctcaaggtgatactggccaacctgcacggcaaggaggacatcttcgccttcggctacgacgtgatgagcagccgatggcgaaggctcaacgccgtcgtgtcgcggtccacccggatctcgctgcagaagatgccaccgcagtactgcacttacttcaaccggatcaaagaaccatcgccagcctacgcttgggtgaaatgcgagtgggtggaagacgacgactgctacgagacgctgctggcggcggggatcaactcgcttaccggcactgttaacgaggccggcactcggtacacgcggctgagcctcatcaagacgcaggacgacttcgacatgctcctggagaggatcaccgaatttgtcgatgccgagaagcacggcagagctcccgctgcctccagctccatgtgagaaatcgtgaattgagagggtgccaagcttcgtctagctggcttcgatgggcgctgtgccggaacgatcagctctactatctgattgttcttgggtaagttcatgggtacaataatcaaggggaatgatcagctagacgttgattgttccccgtcaatatttggacgaacaggtagatattgatttgtgtgtattgacgaatgatgtagatatacacaagcaattatgtgtttcagtgatcaacaattgaatatgtaattaaatgaatatcatacatgttacatttactacttaaggcagaacactaatttgtgtgcatactcc

SEQ ID NO: 62842 - DNA, 244 bp, Oryza sativa
  unsure (1)..(244): unsure at all n locations
  Clone ID: PAT_MRT4530_64141C.1
cggccggaatttccgggctcttcacccacccaatacctaccccagcgccngcgaaccgcgaagcggagcttattaacggangccggggagcgcgccgcnggcgcagggccaggacacggcgggggcgcaagggcccagggacaaccggagccccaaccaccaggagcngaagcgcgacccggagacggcggccaccggccagacctacgaccgcgccagcaacgagacgaggggggccccaagg

SEQ ID NO: 62843 - DNA, 2826 bp, Oryza sativa
  Clone ID: PAT_MRT4530_64142C.1
atggcactgctccacgcgaccaccggcgctagagagctcggttgggctaaccgaggacaccaacgcgaagaggacgacgacgcgaactcaccggtgcaaagaacaacgacggacgacgacgaacgacggccggcgacgaggttcaacggcggctcgacttgggtcaacaatggcgacggcgctccggcggtcttcggcggctgcgaaggggcggacggggttcctctcctccgatgtgacaatgaccgtccattccctccactaactaacaatgacaagttagcattagaggaatggcgtgcatttgagaaggtgtttgagaggaagccggatattcctgagtttagggacctaacacatgcccatggtgcaatactagatggcggcatcaacctagatcagttgccagaaccattccaggtggatggtctcataaagagtttagagttcccatccatggtcacattgaagctatggctccaggagtacgccatcgtgcaccatcgtccataccgtgttgtcaattctgccgcaaataggaagtacactgttaaatgtgaaaaaccatggtgcaaatggaaggtccatgcaactaagaggtctagtggcacgtggaggatatcacgggttggtaaggcacatagctgtgctactgccgaaggttcagggagccaccggcagctgacatctaacttcatagcaaatagtttatgcaatgccataaaactgcaacctacactctctgcttctgcattagctttgtatatatttgaggttttccagtatagggtgaagtatggcaaggcttggagggcacgagaggaggctatgaagctcatttacggtgaatggggtgaagcgtacgtccgtttgcccactttgctacaagccattaagcagagaaatcccagtatggtctaccacatcgatactcatcctgatagggttgtcaacgttgatggagtgaccaagaaaatttttatgcgtgcattctggtgcgttggtccttccattgaggcttttaagcattgcaggccagtactagctataaatgcaaccttcctaactggaaaatacggtggtgccttgatgactgcattatcagctgatgcggaggaccaacttgtacctttagcttttgccttggtggagaaagagaattcacgagactggtgctggtttatcgatcttgtccgacgggttgtggttgggcagcacagggaggtttgtattatctcagatcgacatactggtataatgaatgccatgaggactcctgttccaggattgccaccggttcaccaccgatggtgcatgaggcacttcagtgctaatttccacaaggccggtgcagataagcatcagacaaaagagctcctaaggatatgtcagattgacgagaagtggatatttgagagggatgttgaggcactaaggcagcgtattcccgaaggtcctcgtaaatggcttgatagaaatggccgccggtggggttacttgacaaccaacatggccaaacagttcaatagcgtgctagttggtgttagtaagcatccagtgacggccatagtatcatttaccttcatgaagttcaatgattactttgtgaacagacatgatgaagcaatgaagcgagtccagttatgggagcgttggtccaccaaggttgctagtaagatgaagttgccaccatacgatggtgaagaatttgttgctgacccaaatttgaagattaaaacaagagggaagaggagatcgaagcgattcaagaacgaaatggactcgggtcttggtggttctagaaggaaaccaccttcatgtgttcaactagatgctgcgccggtgcaaaatagatgctcgttgtgtaaccaggagggtcacaagaaacctaattgtcctaagcgtccaaaaaagaagaagtccaaaaataaaatagaagtgttagggaggatggccaaggagggacaaccgccgacttacccagccttggaggagtactatgaggcccgtcatcgcggggctgcgatcgaggcggggaggatacttcaaccgctccgagttagaactcatgcccccccagtgtttgacaaaaggtacatcccgtacctaagggcggtcgggttgctcggggtggccttggtcatgagcagaggaatgccagtgttcaacgctcctgcattgacagcacttgtggacagatggaggcctgagacacacagtttgtggatgtggttaagactaccggttggaaggcctaagtggaggcaaagcttcactccttggccctacaatgagccagacatggagaagacagtggcctacctgtttgagagtactgccactgcacatgctcaccgggatgtggcatacaagcattatgtcaatgagatggactgcttacagcctcaacatattgagtggttaccataccacacaaatgaggcttcaagcctgaccctgaactcgatgtgcaatcgagactctgactacttcatgtatgacagggtgagaacaaagaaggtgaaagactgggggctagagcataacagatacattgatgaatggaggacagccggaaggaacgacaggacatatagactattcctccgccctacttggacggaagccgacatagagaaggaccgcgactccgatgagaggcggaatccctatgatgtccggactagagttggatatcaaatggagcacgccccatttagagacagagtctcgagagagctcctcaggagtgtgaatgaaatggggcatgccctccaagctccgaggggtggtgaggacacggagaacacactccgcaatgtttga

SEQ ID NO: 62844 - DNA, 2904 bp, Oryza sativa
  Clone ID: PAT_MRT4530_64143C.1
atggatagaattgttcgtgtttactacggtggtagagtggtggaaccttatgttggtgcacatgttgagtttgaggatatgtcattgaagaccattttgtttcccacccacccaactctagatgaactaaggtcacgagtgaaagaagttcttggatggaccgaggataatgtggagattcgtttttatgggagatacgatgttggtcaagggcataagtatatactaaatgtgataggtcagttggaatgggaagtttactttgatttggtaaaagaatctcagtttagatctctagaggtgtttgcatcaaagttggtacgtaccgtagaaaatttggatctaaacaaatctccttcttatcattacgttgagaagaattttgtgacatattcttctcgtcgtggagggggtgcaagtaagactgagttggtacgagaagacttggagggggaaggaaataagaagagacctttgcttggaaatgatttaggggaggcaggaccatcaaagagacattgcggtagtgatgatgtggatgcagcgagggagatgaaaagggagttagtacaagaggggcttcatctaagtgaacatttgtcggagagtgtgcattggtcgttgtacggaggcaaccctgaatacacgatgaaagtagcaagccaatatgtgaatccagatgattactttgatgtcgaattgagtggtggtcacgattctgtctcagtagaagtcaatagagaggaggttgacgaggacgcaagtgttgagcaatatgatgttgaatttgctgaagactctgatgatgaccgtccattccctccactaactaacaatgacaagttagcattagaggaatgtcgtgcgtttgagaaggtgtttgggaggaagccggacattcctgagtttagggacctaacacatgcccatggtgcaatactagatggcggcatcaacctagatcagttgccagaaccattccaggtggatggtctcaaaaagggtttagagttcccatccatggtcgcattgaagctatggcttcaggagtacgccatcgtgcaccatcgtccataccgtgttgtcaattctgccgcaaataggaggtacactgttaaatgtgaaaacccatggtgcaaatggaaggtctatgcaactaagaggtctagtggcacgtggaggatatcacgggttgctttgtatatatttgaggatttccagtatagggtgaagtatgtcaaggcttggagggcacgagaggaggctatgaagctcatttacggtgaatggggtgaagcgtacgtccgtttgcccactttgctgcaagccattaagcagagaaatcccagtatggtctaccacatcgatactcatcctgattgggttgtcaacgttgatggagtgaccaagaaaatttttatgcgtgcattctggtgctttggtccttccatagaggcttttaagcattgcaggccagtactagctatagatgcaaccttcctaactgggaaatacggtggtgccttgatgactgcattatcagctgatgcggaggaccaacttgtacctttagccttttgccttggtggagaaagagaattcacgagactggccggtgtggacaagcatcaaacaaaagagctcctaaggatatgtcagattgacgagaagtggatatttgagagggatgttgaggcactaaggcagcgtattcccgaaggtccccgtaaatggcttgaagatgagttgttggataaagataagtggtctcgtgcatacgatagaaatggccgccggtggggttacatgacaaccaacatggccgaacagttcaatagcgtgctagttggtgttcgtaagcttccagtgacggctatagtatcatttacatttatgaagtgcaatgattactttgtgaacagacatgatgaagcagtgaagcgagtccagttaggggagcgttggtccaccaaggttgctagtaagatgagggtgcaaaaaagtaagccgaacaaacacacttcaaggtgtttcgataagcagaaaaagacatacgaggtcacagagaggggagctgacatagaggatgaccgcgattccgatgaggggcggaatccctatgatgtccggactagagttggatatcaaatggagcacgccccacttagagacagagtttcgagagagctcctcgggagtgtgaataaaatggggcatgccctccaagctccgaggggtggtgaggacacagagaacaaactccgcaatgttttagagaaagttcgtcaaaggtgccggaaacttgcagcaagattaggttgcagtacactccgggctcgcaagctattcggcgccaacggaagaagtgatttgtatgaagttaatctatttgttggtagtatgacatatgtgggaggcagagggcggcgcgcaatcaccctggcgccgcgggtcggggagggcggcgccagcttagccccggaggctgaagggtttctgtgtggggggagggcggcgccagcactcctggcgccgcggttggggagggcggcgccagcaagcgcccggaggcaaaagcggtttcggtggggggaggagggcggcgccagacaccctggcgccgtagtccaagagggcggcgccaccggggcccggaggcagaagggtgtcgggcggggaaggagggccgcgccagccaccctggcgccgcggtctgccggggggggcgccacttttgcccggaggcagaacagactttgcaaaaaaattggtggggggggagaaagttggtggggcccgcagaggaggggcacgccagccgtgctggcacggtggtatgaggggcggcgccaatttggctggcgccccccttctgcccagtcagcacctccggacaggccctag

SEQ ID NO: 62845 - DNA, 230 bp, Oryza sativa
  Clone ID: PAT_MRT4530_64144C.1
cccggtcccaggttttgggagggcgcaaagcgccccacgtcccgccttgtgtcaggcgaaatggggcaggtccgcccggtcctgtcagtaatctgccaggggtgcccccggacgtggcgggggacgcccatgggccccaccaaagaccgcacacccactttgcttccggttaaaggccagaatggcggtctaatcaaggcagggtgggttcctctcccctggaggagtag

SEQ ID NO: 62846 - DNA, 396 bp, Oryza sativa
  Clone ID: PAT_MRT4530_64145C.1
ttggtgttttaatatttttgggggtttttttttttttatttttgttttttccttgttaatttttggaccggtaccagtaggggaaccaaccccccctaaagcgagacgaaaaaaaaccgggcgaaaaaaaggccaaagcaaaacccggggaaaaaggggaaagcgggggaacaaggggacacaacaaacaagccggaagaaaaaagagaaaaggcgggggggccaaaagagggggggaacaaaaaagaaaggaaaagggctaaaagcccgctagccagccgggaaacctgacaggccagaaacaagaaagaaccggccaacccacgaaaagaggaaagacgcgaaaggggcgccagggcggatgggctcctcaccaggcagacgggaaacaaacga

SEQ ID NO: 62847 - DNA, 189 bp, Oryza sativa
  Clone ID: PAT_MRT4530_64146C.1
atggcggattccccgctgcgcgcgcgccacctcaccggaccaccatcgctgctgctcgcttgctcgaacgtgccagagagaaggggattagggagaagagaatgggatttgggttttgtccctcggcaatcgaccgaagaggaaggtgaagccagagctataactgcccccgtttgtgaaaatttgtga

SEQ ID NO: 62848 - DNA, 4383 bp, Oryza sativa
  Clone ID: PAT_MRT4530_64147C.1
atgtcgatgtccataccgctcaatgttctagaggacgacaaacatagtatttttcaaggtgtcttagtgcctcaggagagtattgtcgatgatggatcgggagtcaatttggagataagatcttcaatttttgtttgctcgggttcggcggtcgtacctgcgatcagatcagcggtggtgcggcggtcagaccggtggttattaaggcgtgatcgtaaacgtaaaattaaagtcaactgcgttattggaaaaccgcaagaagtattgggcaaaaggacattgcaggggcaagcagacaggcagaagagggacaggcggatgaaaaagcaaggggatgggctgatggatagacttgttcgtgtttactacggtggtagagtggtggaaccttatgttggtgcacatgttgagtttgaggatatgtcattgaagaccattttgtttcccacccacccaactctagatgaactaaggtcacgagtgaaagaagttcttggatggaccgaggataatgtggagattcgtttttatgggagatacgatgttggtcaagggcataagtatatattaaatgtgataggtcagttggaatgggaagtttactttgatttgaagaattttgtgacatattattctcgtcgtggagggggtgcaagtaagagtgagttggtacgagaagacttggagggtgaaggagagaagaagagacctttgcttggaaatgatttatgggaggcaggaccatcaaagagatattgcggtactgatgatgtggatgcagcgagggtgatgaaaagggagttagtacaagaggggcttgatctaagtgaacatttgtcggcgagtgttcattggtcgtcgtacggagtcaaccctgaatacccgacagaagtagcaggccaatatgtgaatccagatgattacttttatgtcgaattgagtggtggtcacgattctgtctctgtagaagtcaatagagatgatgttgacgaggaggcaagtgttgagcaatatgatgttgaacttgctgaagactctgatgatgaccgtccattccctccacttactaataatgacaagttagcattagaggaatgtcgtgcgtttgagaaggtgtttgggaggaagccggacattcctgagtttagggacctaacacatgcccatggtgcactactagatggcggcatcaacctagatcagttgctagaaccattccaggtggatggtctcagaaagggtttagagttcccatccatggtcgcattgaagctatggctccaggagtacgccatcgtgcaccatcgtccataccgtgttgtcaattctgccgcaaataggaggtacactattaaatgtgaaaacccacggtgcaaatggaaggtccatgcaactaagaggtctagtggcacgtggaggatatcacgggtaggtaagaaacatagttgtgctactgccgaaggttcagggagccaccggcagctgacatcaaagttcatagcaaataggttattcaatgccataaaactgcaacctacactctctgcttctgcgttagctttgtatatatttgaggttttccagtatagggtgaagtatggcaaggcttggagggcacgagaggaggctatgaagctcatttacggtgaatggggtgaagcgtatgttcgtttgcccactttgctgcaagccattaagcagaggaatcccagtatgatctaccacatcgatactcatcctgacagggttgtcaacgttgatgttgtgaccaagaaaatttttatgcgtgcattctggtgctttggtccttccattgaggcttttaagcattgtaggccagtactagctatagatgcaaccttcctaactgggaaatacggtggtgccttgatgactgcattatcagctgatgcggaggaccaacttgtacctttagcttttgccttggtggaaaaagagaattcacgagactgggaggtttgtattatctcagatcgacatgctggtataatgaatgccatgacgactcctattccaggattgccaccggttcaccaccggtggtgcatgaggcacttcagtgctaatttccacaaggccggtgcggacaagtatcagacaaaagagctcctaaggatatgtcagattgacgagaagtggatatttgagagggatgttgaggcactaaggcagcgtattcccgaaggtcctcgtaaatggcttgaagatgagttgttggataaagataagtggtctcgtgcatacgatagaaatggccgccggtggggttacatgacaaccaacatggccgaacagttcaatagcgtgctagttggtgttcataagcttccagtgacggccatagtatcatttacgttcatgaagtgcaatgactactttgtgaacagacatgatgaagctttgaagcgagtccagttagggcagcgttggtccaccaaggttgatagtaagatgaaggtgcaaaaaagtaaggcgaacaaacacactgcaaggtgttttgataagcagaaaaagacatacgaggtcacagagaggggtggtataacgcgtggtggtgttagattcggcgcaagagccttcaaagttgaaggtgaggggaactcatgttcttgccaaaggccattgctctaccatatgccttgctcacatcttatacacgtttatatgattcatgcaattgatgaggaatctcccaaccgaatgccgtatcagttctcttcaagagccgttgtgaacacatgggcaagtcgctttgagccatacctcgaccccacacagtggccaccgtacgatggtgaagaatttgttgctgacccaaatttgaagattaaaacaagagggaagaggagatcgaaacgattcaagaacgaaatggactcgggtctgggtggttctggaaggaaaccaccttcatgcgttcaacttgatgctgcgccggtgcaaaatgatgctcgttgtgtcaccaggagggtacttcaaccgctccgagtcagagctcatgcccccccagtgttcgacgatagaggaatgccagtgttcaacgctcctgcgttgacagcacttgtggacagatggaggcctgagacacacagcttccacctccccagtggtgagatgaccatcactctacaggatgtggctatgatcttggccctcccattacaggggcatgccgtgacgggcaggacagagactcctggatggcatgcacaaatgtggatgtggttaagactaccggttggaaggcctaagtggaggcaaagcttcactccttggccctacaatgagccagacatggagaagacagtggcctacctttttgagagtactgccactgcacatgctcaccagaatgtggcatacaagcattatgtcaatgagatggactgcttacagcctcaacattgcccattgatttgtttctgggcagttgagtaccaccttccgcaccgtgtcatgcgacagttcgggaagaaacaagattggccggttgaggacatctcaactggagttgaattacacaagtatgacagggtgagaacaaagaaggtgaaagactgggggctagagcataatagatacattgatgaatggaggacagccggaaggaacgacaggacatatagactgttcctccgccctacttggacggaagccgacatagaggatgaccgcgactccgatgaggggcggaatccctatgatgtccgaactagagttggatatcaaatggagcacgccccacttagagacagagtctcgagagagctcctcaggagtgtgaatgaaatggggcataccctccaagctccgaggggtggtgaggacacggagaacacactccgcaatgttttagagaaagttcgtcaaaggtgccggaaacttgcagcaagattaggttgcaggtcggttggattggacgacgtgtaccaaccggggagactaccaccaccactacctcaatccgcgcgtccaagtatcgctcgacactccatcaggatagaagagcgtgaaggagttggtggctcgtcgtcgtcacgcattaagcaagggaggggaaaggggaaggcgccggctccacctagcgacgacgatgacgacgaggacgaggaggatgaggactacgtcgcaccagacgccgaggagatagacatgtcacagcttcccgacgcgcctcaggggacgcaacccacgcaatacaacttgcgatccactcgggcagcgaaaaagagggaggcagagggcggcgccaaccaccctggcgccgcggttggggagggcggcgccagccagtgccgcgaggcagaagggtttcgggctgggggagggcggcgccagctaccctggcgccgtggtccatga

SEQ ID NO: 62849 - DNA, 1617 bp, Oryza sativa
  Clone ID: PAT_MRT4530_64148C.1
atgggggtgctgggggacgggtcggggtggtgcttctgctccggcggggcgaagctggagcggatcaagaactccgtcctcgccgccaagggcgccgccgtcgccgccgtctccttccccgccggaggtggaggagggggcagaggtgggagtgggttcctcatccaccgcgccctcctgctcaccacgcacggcaccatcccctccgccgccgccgccgccgccgccgaggtccgcctcagccacggccgcctcccggctcgcctcgtgccgcagagattctttatcactagccccattttggaccttacaatagtgggtcttgatgtggtgaacgatgaattaaattcacacgggcaacagcctcatttcctaaagacctgcctgaaccccagcttggaccttggcagtacagttttgctcctgggccacacaaagagaaaagacctgacaataggcgaggggaaggttataattacaacagacaaccttataaagttctcaactgatgaagtcgcatggtatcctggatctgctggttttgatatgcacggaaatttagctttcatggtttgtgatccaatgaagcttgcaccttctacacctactggatacgcttctgcatcttcagccgcactcctttcagcaaagaaggatgtgccaacacagtttgggatgcccattcctgcagtctgtggttggttgaagcagcattggaatggtaacttagaagatgttagcaagccaatgatgcctcctgcacgattaatatccactgggcaacgaagtgagtgttcttctgttggtcgtcttaactacatcaagaccatggagcgagagggtggtgatgggatgtcatcatcacaaataccacctaggctgacacagcatcatggatcatgcagttcagcttctgcgaagatttcatgcggtgaaaatgattctgttgactcgcactctattcatgaacaacaagatctgacctcacaaatgcatgaatctaagattgagcaatctgcttcacttatggataataactttcctccagggcatccaagatcaattcgcctgccacttcctctaaagcacatgatgtcccatgagaataagataaaaccgaacccatcattttcacatgaagcacagctagctaatgtgaggatcaattgtggcactcttcacaatgttgcttaccaggaaaattgctggagtgaggctcagtccagttcctctccaccagatatatcagagttgggggatgagaggggcggttttagcagtggagaggagacaatgtactctgctgaaactagggaaagcagaaacatccctagcccaaaggaaaagaatcccaagatggttgggagatcacagagttttgtgaatcatagcaagtgggattccccaaaaagtgttgaatcttcgaaaggggccccctcaaagtcacacaccttcattcctttgagaaaaccacatttgcaggctgcagccatttcgcagaaaagccaagattttttcagtcctactgtctcctcaagcatgaaaaagaggaatttatcacaaattcccatgaaacctcggcaaagtgctcaagttacctccaagtggatcatctga

SEQ ID NO: 62850 - DNA, 4017 bp, Oryza sativa
  Clone ID: PAT_MRT4530_64149C.1
atggcgccgccgctctatctcctcctcctcctcccgctcctcgcctgcgccgacgaggtccctgaccgctacgccgtcctccgcgccccgcagggcccgggtgccagcgcggcggccaaggagtacctcgacccgaccttcccgctccccgcgcccccgccggcggcgccgtcctgcaccgtgccggtcctctcctactccttcggcgacacctacgacgtcgggcccggcgtgttcgacggcgtccccccctggctcgtccacgcccacctgcacctctgcgtggaccccagcaccgcggacgtccccggcgcgctgggcgactacctagacgccgcgcgtgaaaacctcaccccactcctccgcgcggctgctggagggccggttcaagatcgagtccaaggggacgtccgccttcatcggctccgtcaagtcgtcgtccggcacctcccgcacggaggtggacgccggatctgaaggcagccagccttcagcgattcaccggcgacggccggaagcaacacccttgtcgctgggagccaaagcaggcagccgaacacccccgtcccggcaggcgactcccggaatggcgtcgcaagcaacgatcccaaggaacctatgctgccggagtcatacttccagccggcggatctcatcgtcccgatctcggatgtcgccggcaacggcaagggcgggttctggttccgcatccagaacgcgtcggactcgcactccaggctcgtaaccattccgtcgagcacctaccgtgcggtgctcgaggtgttcgtgtcccctcactccaacgaagagtactggtgctgaaacccgccgggcatcgatttaagggagaacaacctcaacacggggaggggcaacgaggtgtaccgcgaggtcgtcgtcagcgtggaccaccgcttagaggtttcagtgccgctgttccgcctcctgcagaggacggtcgccgcccgccggttccacgcccgggtggccgcgctcggcgcgttcgacctgcccacctacgacgtcgagctcaccccattcctcggcctcctggtcgacagcaacgcccacgagatcggcctcagcgtgttcgacggcatcgccgagtggctcgtcgacgccaacctgcacctctggctggaccccagcacgtcggacgtgcacgccgcgctcggcgcgtaccagacgccgcgcctgaaaatctcacgccactactcgacgcggctgctcgagggcaggttcaagatcaaggccaagaggaagtcctccttcagcggctgggtcaagtcctcgttcggcaacttcaccacggaggtggaggcggagctgaaggcgaccagcctggtggagttcaccggcgacggccggaacaagaccgtgtcgctggaggcgaagcaggagacgaagacgctgatccgggcgggcgacacgcggaaggtgatcggcagggtggagagggaggccaagtacccgctgtcgctcttcgcggagaccgaggacggcgagaacggcacgtccgtcgtcacggtgagcctcacccacggcctcagcgtggagacggaggtcgagacgaaggccctcgagagcaaggagaagctcgatgacgcgcaggccgcgcaagggtggatggtgctcctggaccacgacgtgctcaacgggtcggtgacgacgacccaggcgtaccggttcagcgacgacgagcgggagtacgagcgggcgatcgacgtcgtggacggcgccgtgctcagcgacaacgtcaccgagagcttcagcgccctggccgccgcagcggcggacgctcgccgccgccggttccacgccggcattgctgcgttgattcgtttccgaccgcatcgacgtgaccaagactattgcttttcttcagagggggaggggaaggtgagcacgggggatgatctcctggacgccctcctcgaggtgttcccgcagttgaatttcttaacactggtagaagtttgcatggaatataagaatgatatagatggtgctgcggattatattatccataatgtccttccaagtatcccggacaacaatgatgcacatgcaaacgaagggcctgcttcggtggataatgatgcagattcagtgcagtcttacttagcgaacaaatacacagctgagcaggaggaggaggaagaggaagaggaagaggaagaagaagaggaagaagaggaggaggaagatgaagatgatgatgaggaggaggaagatgaagatgatgaggaggaagatgaagatgacgaggaggaggatagacttatggaagaaaattctgattgtttggttgctattgatctgaattcaaaacctggaacttcagcttttgatgatgatttggtaacccatgacgatggattacctgctatgaacatacagtcaagctaccctgttagacttgagttgcttgacaatgcaattgctgatgaaattgacaagaaggttactttgatgtcaaacgtaacagcgataaaccaaatgctagaggacataaagttaaaagaagaaaaaacaaaacaagctgtgttggaagcaactcaagctggcaatgatatttttgtgaaggttgcaggggaggttttcgctgagcaatctattctagcatcagaagcacatgggcttcaagctcggttgtctaacatttctgaagaaaggaacaactgtgccttaattattgacgagatgcgctatactcttcaaaacagatttgctgaagctgaagtggagactgtagcagctgagaagaagaaggttgaaagggaaacattggctgagaaaatgttgaatgaacaagaactcatacttgatgctacaaaggaaagatccaagatgctggaacagcaagtgcgggagaatgcaaagctgagggagttactaatggaccgaggccaaattgtggatgcattgcagggggaaatgctgggaatcttcgataaaatttcacaacttcaactcagggttgataagcaacttcctgaacccctgctatcaagcatgtcctcctcagtcaactcagctgataacattgcacagctccagtgcagagttgatgacccacagcattctgttgatgattcattgcaactagcttcacctagattgtccagctcattcaaatcaacagatagcactgcgcaagcccattgtagagttgatgagccacaaatttctgttgatgaatcgctgcttcctgttgacgagtgtgagcagctgaaactgattttaccaaggttatctagctcagtcatgtctgcacaatcccaatatagagttgatgaaccgctacttcctgttgatgaggtgttgcaactagcttcatcaagcttatccagttcgctcaaatcaggagataacatcgctcaacttttgggagtacttgatgtgcatttacctgttgatgagttactgcaactaccttcattgatcttatctagctcagtgaaatcatcagacagcattgcgcagttccaacaaaaggctgatgctgatgagatgctgcaatcatctagcttagccagctcagagaaaccagcaactttcaagaattggtcatctgcttcagacaccattacacagttccagcaaagggctaatgctgatgagtcgctgccgcttccttcatctagcttggccagctcagagaaaccagcaacattcaagagtacttggtcatctgctgcagaatcaaattcagttttcagtggtgatgaagagattgatgatgcttccttccatgacagtattgatttggatgatagctgggatttagttgacgatgaagccatctatatgtgtgctaactagccgtatgaatactacacatatggtgctgaattcgtgaatggcgtgttttataagaagtaaaaccaaatctaggatcttgctatgaacttggtccttcttattatttgaattcgcaaatctgcttacctgtttaaatgtcgctatgcattatcttgatgttggtgaaatatttggcatgttcttggcgataat

SEQ ID NO: 62851 - DNA, 223 bp, Oryza sativa
  Clone ID: PAT_MRT4530_6414C.1
acacttaagaacatattgatttctcggagaggttccatattgagatatgaccccctccaaactaaactcctactttcataccactctactgtttaaactcattacaagacaccgccgagggtggtaatgatactctgtgcaccatagtacctctggtcaataccatatatacatggttccttaaaagacaacaaagcttgagattgacccatattccgctcaa

SEQ ID NO: 62852 - DNA, 3389 bp, Oryza sativa
  unsure (1)..(3389): unsure at all n locations
  Clone ID: PAT_MRT4530_64150C.1
atgtcattgaagaccattttgtttcccacccacccaactctagatgaactaaggtcacgagtgaaagaagttcttggatggaccgaggataatgtggagattcgtttttatgggagatacgatgttggtcaagggcataagtatatattaaatgtgataggtcagttggaatgggaagtttactttgatttggtaanagagtctcagtttagatctctagaggtgtttgcatcanagttagttcgtaccgtagaaaatttggatctaaacaattctcccttcttatcattacgttgagaagaattttgtgacatattattctcgtcgtggagggggtgcaagtaagagtgagttggtacgagaagacttggagggggaaggagagaagaagagacctttgcttggaaatgatttatgggaggcaggaccatcaaagagacattgcggtactgatgatgtggatgcagcgagggtgatgaaaagggagttagtacaagaggggcttgatctaagtgaacatttgtcggcgagtgttcattggtcgtcgtacggagtcaaccctgaatacccgacagaagtagcaggccaatatatgaatccagatgattactttgatgtcgaattgagtggtggtcacgattctgtctcagtagaagtcaatagagatgatgttgacgaggaggcaagtgttgagcaatatgatgttgaatttgctgaagactctgatgatgaccgtccattccctccacttactaataatgacaagttagcattagaggaatgtcgtgcgtttgagaaggtgtttgggaggaagccggacattcctgagtttagagacctaacacatgcccatggtgcactactagatggcggtatcaacctagatcagttgccagaaccattccaggtggatggtctcagaaagggtttagagttcccatccatggtcgcattgaagctatggctccaggagtacgccatcgtgcaccatcgtccataccgtgttgtcaattctgccgcaaataggaggtacactgttaaatgtgaaaacccacggtgcaaatggaaggtccatgcaactaagaggtctagtggcacgtggaggatatcacgggtaggtaaggaacatagttgtgctactgccgaaggttcagggagccaccggcagctgacatcaaagttcatagcaaataggttatgcaatgccataaaactgcaacctacactctctgcttctgcattagctttgtatatatttaaggttttccagtatagggtgaagtatggcaaggcttggagggcacgagaggaggctatgaagctcatttacggtgaatagggtgaagcgtatgtccgtttgcccaccttgctgcaagccattaagcagaggaatcccagtatggtctaccacgtcgatactcatcctgatagggttgtcaacgttgatggagtgaccaagaaaatttttatgcgtgcattctggtgctttggtccttccattgaggcttttaagcattgtaggccagtactagctatagatgcaaccttcctaactgggaaatacggtggtgccttgatgactgcattatcagctgatgcagaggaccaacttgtacctttagcttttgccttggtggagaaagagaattcacgagactggtgctggtttatcgatcttgtccgacgggttgttgttgggccgcatagggaggtttgtattatctcagatcgacatgctggtataatgaatgccatgatgactcctgttccaggattgccatcggtttaccaccggtggtgcatgaggcacttcagtgctaatttccacaaggccggtgcggacaagcatcagacaaaagagctcctaaggatatgtcagattgacgagaagtagatatttgagagggatgttgaggcactaaagcagcgtattcccgaaggtcctcgtaaatggcttgaagatgagttgttggataaagataagtggtctcgtgcatacgatagaaatggccgccggtggggttacatgacaaccaacatggccgaacagttcaatagcgtgctagttggtgttcgtaagcttccagtgacagccatcgtatcatttacgttcatgaatgcaatgactactctgtgaacagacatgatgaagctttgaagcgagtccagttagggcagcgttggtccaccaaggttgacagtaagatgaaggtgcaaaaaagtaaggcgaacaaagcttcaatgagccggttggaaggcctaagtggagacaaagcttcactccttggccctacaatgagccagacatggagaagacagtggcctacctttttgagagtactgccactgcacatgctcaccgggatgtggcatacaagcattatgtcaatgagatggactgcttgcagcctcaacattctcttcaacttttgcagattgagtggttaccataccacacaaatgaggcttcaagcctgaccctgaactcgatgtgcaatcgagactctgactatttcatgtaccagtgcccattgatttgtttctgggcagttgagtaccaccttccgcaccgtgtcatgcgacagttcggaaagaaacaagattggccggttgaggacatctcaattggagttgaattacacaagtatgacagggtgagaacaaagaaggtgaaagactgggggctagagcataatagatacattgatgaatggagaacagccggaaggaacgataggtacatcgagactatacaccaaaatcatcttttctcagagtaccttcgttggctgtataggacatatagactgttcctccgccctacttggacggaagccgacatagaggatgaccgcgactccgatgaggggcggaatccctatgatgtccggactagagttggatatcaaatggagcacgtcccacttagagacagagtctcgagagagctcctcaggagtgtgaatgaaatggggcatgccctccaagctccgaggggtggtgaggacacggagaacacgctccgcaatgttttagagaaagttcgtcaaaggtgccggaaacttgcagcaagattaggttgcaggtcggttggattggacgacgtgtaccaaccggggagactaccaccaccactacctcaatccgcgcgtccaagtactgctcgacactccatcagaatagaagagcgtgaaggagttggtggctcgtcgtcgtcacgcattaagcaagggaggggaaaggggaaggcgccggctccacctagcgacgacgatgacgacgaggacgaggaggatgaggactacgtcgcaccagacgccgaggagatagacatgtcacagcttcccgacgcgccctcaggggacgcaacccacgcaatacaacttgcg

SEQ ID NO: 62853 - DNA, 326 bp, Oryza sativa
  Clone ID: PAT_MRT4530_64151C.1
aaaaacaaaggggcagggatatttttgaactttcgcttacccatagatggcaggcagtctaggaggggaccaatccggccttttgcccccatacaggcactcacacgctactacgctttttttacagggggaacatatacctatatggggacaaaaaagggcatttgacatataattggggggcacatgggggcatgctgctgctgcatgccgcgctagattattcgttcgcagcaggtagccaaagtgggggaccagttttggcagggggggcccggttcaccaggaagagccgcgggaaccttagggggggccgggaattcctg

SEQ ID NO: 62854 - DNA, 676 bp, Oryza sativa
  Clone ID: PAT_MRT4530_64152C.1
cgctcttcgcggataccgaggactgcgagaacggcacgtccgtcgtcacggtgagcctcacccacggcctcagcgtggagacggaggtcgagacgaaggccctcgagagcaaggagaagctcgatgacgcgcaggccgcgcaagggtggatggtgctcctggaccacgacgtgctcaacgggtcggtgacgacgacccaggcgtaccggttcagcgacgacgagcgggagtacgagcgggcgatcgacgtcgtggacggcgccgtgctcagcgacaacgtcaccgagagcttcagcgccctggccgccgcagcggcggacgctcgccgccgccggttccacgccggcattgctgcgttgtaaggctaccttggattgccgtgggagttgagctgtttcgtgtcatcgatggctacggaatccaggtgaaattcgtcagttcgaagaattcttatgtgcaggattcgtttccgaccgcatcgacgtgaccaagactattgcttttcttcagaggtaaattgtgcactgtaatttgtatttagcgtatagtttctgtaatctgtattatgtatgcaattttgtcggtgtgaatcgtcgtttctgcttttgcagttcaaattttggttgtgtttgtcttaataaaaacgaaataaagctggaaattgcagattactact

SEQ ID NO: 62855 - DNA, 2697 bp, Oryza sativa
  Clone ID: PAT_MRT4530_64153C.1
atggcggcgccagccacactggcgtcgtgcccgtgccaccgtggcactagggctgtcgtggagatggatagacttgttcatgtttactacggtggtagagtggtggaaccttatgttggtggacatgttgagtttgaggatatgtcattgaaaaccattttgtttcccacccacccaactctagatgaactaaggggtgcaagtaagagtgagttggtacgagaagacttggagggggaaggagagaagaagagacctttgcttggaaatgatttatgggaggcaggaccatcaaagagacattgcggtactgatgatgtggatgcagcgagggtgatgaaaagggagttagtacaagaggggcttgatctaagtgaacatttgtcggcgagtgttcattggtcgtcgtacggagtcaaccctgaatacccgacagaagtagcaggccaatatgtgaatccagatgattactttgatgtcgaattgagtggtggtcacgattctgtctcagtaaaagtcaatagagatgatgttgacgaggaggcaagtgttgagcaatatgatgttgaatttgctgaagactctgatgatgaccgtccattccctccacttactaataatgacaagttagcattagaggaatgtcgtgcgtttgagaaggtgtttgggaggaagccggacattcctgagtttagggacctaacacatgcccatggtgcactactagatggcggcatcaacctagatcagttgccagaaccattccaggtggatggtctcagaaagggtttagagttcccatccatggtcgcattgaagctatggctccaggagtacgccatcgtgcaccatcgtccataccgtgttgtcaattctgccgcaaataggaggtacactgttaaatgtgaaaacccacggtgcaaatggaaggtccatgcaactaagaggtctagtggcacgtggaggatatcacgggtaggtaaggaacatagttgtgctactgccgaaggttcagggagccaccggcaactgacatcaaagttcatagcaaataggttatgcaatgccataaaactgcaacctacactctctgcttctgcgttagctttgtatatatttgaggttttccagtatagggtgaagtatggcaaggcttggagggcacgagaggaggctatgaagctcatttacggtgaatggggtgaagcgtatgtctgtttgcccactttgctgcaagccattaagcagaggaatcccagtatggtctaccacatcgatactcatcctgatagggttgtcaacgttgatggagtgactaagaaaatttttatgcgtgcattctggtgctttggtccttccattgaggcttttaagcattgtaggccagtactagctatagatgcaaccttcctaactgggaaatacggtggtgccttgatgactgcattatcagctgatgcggaggaccaacttgtacctttagcttttgccttggtggagaaagagaattcacgagactggtgctggtttatcgatcttgtccgacgggttgtggttgggccgcatagggaggtttgtattatctcagatcgacatgctggtataatgaatgccatgatgactcctgttccaggattgccatcggttcaccaccggtggtgcatgaggcacttcagtgctaatttccacaaggccggtgcggacaagcatcagacaaaagagctcctaaggatatgtcagattgacgagaagtggatatttgagagggatgttgaggcactaaggcagcgtattcccgaaggtcctcgtaaatggcttgaagatgagttgttggataaagataagtggtctcgtgcatacgatagaaatggccgccggtggggttacatgacaaccaacatggccgaacagttcaatagcgtgctagttggtgttcgtaagcttccagtgacggccatcgtatcatttacgttcatgaagtgcaatgactactttgtgaacagacatgatgaagctttgaagcgagtccagttagggcagcgttggtccaccaaggttgacagtaagatgaaggtgcaaaaaagtaaggcgaacaaacacactgcaaggtgtttcgataagcagaaaaagacatacgaggtcacagagaggggtggtataacgcgtggtggtgttagattcggcgcaagagccttcaaagttgaaggaatctcccaaccgaatgccgtatcagttctcttcaagagccgttgtgaacacgtgtaccaaccggggagactaccaccaccactacctcaatccgcgcgtccaagtactgctcgacactccatcaggatagaagtgcgtgaaagagttggtggctcgtcgtcgtcacgcattaagcaagggaggggaaaggggaaggcgccggctccacctagcgacgacgatgacgacgaggacgaggaggatgaggactacgtcgcaccagacgccgaggagatagacatgtcacagcttcccgacgcgcctcaggggacgcaacccacgcaatacaacttgcgatccactcgggcagcgaaaaagagggaggcaaagggcggcgccaaccaccctggcgccgcggttgggaagggcggcgccagccagtgccgcgaggcagaagggtttcgggctgggggagggcggcgccagctaccctggcgccgtagtccatga

SEQ ID NO: 62856 - DNA, 198 bp, Oryza sativa
  Clone ID: PAT_MRT4530_64154C.1
atgatgcgtagcgaggaagcagaagacggtgaccggtgcccggtgggtggacgtgcaccaaacacgcataaagccccggagaaaagccacccccacccccatcctcctcacaaacggatcgatgctgagaatcagagcgcgctggattttgtggtgcctaggccaagaggaattgggacccagctggttttaggctag

SEQ ID NO: 62857 - DNA, 388 bp, Oryza sativa
  Clone ID: PAT_MRT4530_64155C.1
acgcggaggggcaacgcggcgtaccgcgaggtcgtcgtcagcgtggaccaccgcttcgtcggctcgttcgtgccgttcccggtcatctacacgggcggcatcaacccgctcttctggcagccggtggccgcgctcggcgcgttcgacctgcccacctacgacgtcgagctcaccccattcctcggcctcctggtcgacagcaacgcccacgagatcggcctcagcgtgttcgacggcatcgccgagtggctcgtcgacgccaacctgcacctctggctggaccccagcacgtcggacgtgcacgccgcgctcggcgcgtaccagacgccgcgcctgaaaatctcacgccactactcgacgcggctgctcgagggcaggttcaagatca

SEQ ID NO: 62858 - DNA, 2037 bp, Oryza sativa
  Clone ID: PAT_MRT4530_64156C.1
atggcggcgccagccacactggcgccgtgcccgtgccaccgtggcactagggctgtcgtagagatggatagacttgttcgtgtttactacggtggtagagtggtggaaccttatgttggtgcacatgttgagtttgaggatatgtcattgaagaccattttgtttcccacctacccaactctagatgaactaaggtcacgagtgaaagaagttcttggatggaccgaggataatgtggagattcgtttttatgggagatacgatgttggtcaagggcataagtatatattaaatgtgataggtcagttggaatgggaagtttactttgatttggtaaaagagtctcagtttagatctctagaggtgttagcatcaaagttagttcgtaccgtagaaaatttggatctaaacaaatctccttcttatcattacgttgagaagaattttgtgacatattattctcgtcgtggagggggtgcaagtaagactgagttggtacgagaagacttggagggggaaggagagaagaagagacctttgcttggaaatgatttatgggaggcaggaccatcaaagagacattgcggtagtgatgatgtggatgcagcgagggagatgaaaagggagttagtacaagaggggcttgatctaagtgaacatttgtcggcgagtgttcattggtcatcgtacggagtcaaccctgaatacccgacagaagtagcaggccaatatgtgaatccagatgattactttgatgtcgaattgagtggtggtcacgattctgtctcagtagaagtcaatagaaatgatgttgacgaggaggcaagtgttgagcaatatgatattgaatttgctgaagactctgatgatgaccgtccattccctccacttactaataatgacaagttagcattagaggaatgtcgtgcgtttgagaagttcgggaagaaacaagactggccggttgaggacatctcaactggagttgaattacacaagtatgacagggtgagaacaaagaaggtgaaagactgggggctagagcataatagatacattgatgaatggaggacagccgaaaggaacgacaggacatatagattgttcctccgccctacttggacggaagccgacatagaggatgaccgcgacttcgatgagggacggaatccctatgatatccggactagagttggatatcaaatggagcacgccccacttagagacagagtctcgagagagctcctcaggagtgtgaatgaaatggggcatgccctccaagctccgaggggtggtgaggacacggagaacacactccgcaatgttttagagaaagttcgtcaaaggtgccggaaacttgcagcaagattaggttgcaagtcggttggattggacgacgtgtaccaaccgcggagactaccaccaccactacctcactccgcgcgtccaagtaccgctcgacactccatcaggacagaagagcgtgaagaagttggtggctcgtcgtcgtcacgcattccgcaagggaggggaaaggggaaggcgccggctccacctagcgatgacgatgacgacgacgacgacgaggatgaggactacgtcgcaccagacgctgaggagatagacatgtcgcagcttcccgacgcgcctcaggggacgcaacccacgcaatacaacttgcgatccactcgggcagcgaaaaagagggaggcagagggcggcgccaaccaccctagcgccgcggttggggagggcggcgccagccagtgccgcgaggcagaagggtttcgggctggggggagggcggcgccaactaccctggcgccgtggtccatgagggcggcgccagccgaggtccggaggcagaagggcttcgatgggaggaggaggggggcaccagccaccctggcgccgcggtctgggggggggggcgccagccgttgcctggaggcagaagcgaaaattttgagggggaggagaaagttggtggggcccgcagaggaggggcgtgccagccatgctggcgccgtggtatga

SEQ ID NO: 62859 - DNA, 328 bp, Oryza sativa
  Clone ID: PAT_MRT4530_64157C.1
tcgtccagcaccgccggttcgtcttcgtcggccaagggggaggggaaggtgagcacgggggatgatctcctggacgccctcctcgaggtgttcccgcagttgaatttcttaacactggtagaagtttgcatggaatataagaatgatatagatggtgctgcggattatattatccataatgtccttccaagtatcccggacaacaatgatgcacatgcaaacgaagggcctgcttcggtggataatgatgcagattcagtgcagtcttacttagcgaacaaatacacagctgagcaggaggaggaggacgaggaagaggcagaggaag

SEQ ID NO: 62860 - DNA, 3594 bp, Oryza sativa
  Clone ID: PAT_MRT4530_64158C.1
atggcggcgccagccacactggcgccgtgcccgtgccaccgtggcactagggctgtcgtggagatggatagacttgttcgtgtttactacggtggtagagtggtggaaccttatgttggtgcacatgttgagtttgaggatatgtcattgaagaccattttgtttcccacccacccaactctagatgaactaaggtcacgagtgaaagaagttcttggatggaccgaggatatgtggagattcgtttttatgggagatacgatgttggtcaagggcataaggggtgcaagtaagactgagttggtacaagaagacttggagggggaaggagagaagaagagacctttgcttggaaatgatttatgggagacaggaccatcaaagagacattgcggtactgatgatgtggatgcagtgagggagatgaaaagggagttagtacaagagaggcttgatctaagtgaacatttgtcggcgagtgttcattggtcgtcgtatggaggcaaccctgaatacccgacagaagtagcaggccaatatgtgaatccagatgattactttgatgtcgaattgagtggtggtcacgattctgtctcagtagaagtcaatagagatgatgttgatgaggaggcaagtgttgagcaatatgatgttgaatttgctgaagactctgatgatgaccgtccattccctccacttactaataatgacaagttagcattagaggaatgtcatgcgtttgagaaggtgtttgggaggaagccagacattcctgagtttagagacctaacacatgcccatggtgcactactagatggcggcatcaacttaaatcagttgccagaaccattccaggtggatggtctcagaaagggtttagagttcctatccatggtcgcattgaagctatggctccaggagtacgccatcgtgcaccatcgtccataccgtgttgtcaattctgccgcaaataggagggtgaagtatggcaaggcttggagggcacaagaggaggctatgaagctcatttacggtgaatggggtgaagcgtatgtccgtttgcccactttgctgcaagccattaagcagaggaatcccagtatggtctaccacatcgatactcatcttgatagggttgtcaacgttgatggagtgaccaagaaaatttttatgcgtgtattctggtgctttggtccttccattgaggcttttaagcattgtaggccagtactagctatagatgcaaccttcctaactgggaaatacggtggtgccttgatgactgcattatcagctgatgcggaggaccaacttgtacctttagcttttgccttggtggagaaagagaattcacgagactggtgctggtttatcgatcttgtccgacgggttgtggttgggccgcatagggagggatgcgttgaggcactaaggcagcgtattcccgaaggtcctcgtaaatggcttgaagatgagttgttggataaagataattggtcccgtgcatacgatagaaatggccgccggtggggttacatgacaaccaacatggccgaacagttcaatagcgtgctagttggtgttcgtaagcttccagtgacggccatagtatcatttacgttcatgaagtgcaatgactactttgtgaacagacatgatgaagctttgaagcgagtccaggtagggcagcgttggtccaccaaggttgatagtaagatgaaggtgcaaaaaagtaaggtgaacaaacacactgcaaggtgtttcgataagcagaaaaagacatacgaggtcacagagaggggtggtataacgcgtggtggtgttagatttggcgcaagagctttcaaagttgaaggtgaggtgaactcatgttcttgccaaaggccattgctctaccatatgccttgctcacatcttatccacgtttatctaattcatgcaattgatgaggaatctcccaaccgaatgccgtatcagttctcttcaagagccgttgtgaacacatgggcaagtcgctttgagccatacctcgaccccacacagtggccatcgtacgatggtgaagaatttgttgctgacccaaatttgaagattaaaaaaatagggaagaggagatcgaaacgattcaagaacgaaatggactcgggtctgggtggttctggaaggaaaccaccttcatgcattcaacttgatgctgcgccggtgcaaaatagatgctcgttgtgtcaccaggagggtcacaagaaaactaagtgtcctaagcgtccaaaaaagaagaagtccaaaaaaaatataagtgttagggaggtacttcaaccgctccgagttagagctcatgccccccagtgttcgacgataggggttctgtttcctaatgctgggggtgacattgcttcggcgatatggattcctttggtcgccaaccttggtgatctgggccgtttcagttggggctcagcagtgttggcatggacatatggacaactctgtgaggcctgttgtcgtcaggcactatcatccaacatgagtggttgtgtgctattgattcagctgtggatgtggttaagattaccggttggaaggcctaagtggaggcaaagcttcactccttggccctacaatgagccagacatggagaagagagtggcctacctttttgagagtactgccactgcacatgctcaccgggatgtggcatacaagcattatgtcaatgagatggactgcttacagcctcaacattgcccattgatttgtttctgggcagttgagtaccatcttccgcaccgtgtcatgcgacagttcgggaagaaacaagactggccggttgaggacatctcaactggagttgaattacgcaagtatgacagggtgagaacaaagaagtcgagagagctcctcaggagtgtgaatgaaatggggcatgccctccaagctccgaggggtggtgaggacacggagaacacactccgcactgttttagagaaagttcgtcaaaggtgccggaaacttgcagcaagattaggttgcaggtcggttggattagacgacgtgtaccaaccgcggagactaccaccaccactacctcaatccgcgcgtccaagtaccgctcgacactccatcagaatagaagagcgtgaaggagttggtggctcgtcgtcgtcacgcattccgcaagggaggggaaaggggaaggcgccggctccacctagtgacgacgatgacgacgaggacgaggaggatgaggactacgtcgcaccagacgccgaggagatagacatgtcgcagcttcccgacgcgcctcaggggacgcaacccacgcaatacaacttgcgatccactcgggcagcgaaaaagagggaggcagagggcggcgccaaccaccctggcgccgcggttgaggagggcggcgccagccagtgccgcgaggcagaagggtttcgggctggggggagggcggcgccagctaccctggcgccgtggtccatgagggcggcgccagccgaggcccggaggcagaagggcttcgattgggggaggagggcggcgccagccaccgtggcgccgcgaacattaaaagttcgaaagaattaa

SEQ ID NO: 62861 - DNA, 294 bp, Oryza sativa
  Clone ID: PAT_MRT4530_64159C.1
atggccgccgccgccgtcatgcagccgaatcctcgtgggggtggccgccgcctccggatccgcgcgtggggtggccaccgctggatcggacgcagccgtcgcgtgccacctcgtcgtcgccgctgcccaccatatcccgtgcttccacggcagatgcgcgctgccgacgctgtcgccgcgcaccaccgcagtcgcctatgcccaccgcacgctgtctcgtcgctgtcgctgagggaggagaggagggaggaggcctatttggcacagctccagctcaacctccacctctcctag

SEQ ID NO: 62862 - DNA, 199 bp, Oryza sativa
  unsure (1)..(199): unsure at all n locations
  Clone ID: PAT_MRT4530_6415C.1
tggtatactaccctgaggttactattggttgcactccagttaccatttaccactccttgtgtctggtgtcttcgtaatggagttcttaacatgtatatgtgggttcgtgaagttacaaaatatagctcagnatatcaactcatatgtgacatgatgattcntttggtgtgatantaaataggaaaaaaagatttttaat

SEQ ID NO: 62863 - DNA, 1818 bp, Oryza sativa
  Clone ID: PAT_MRT4530_64160C.1
atgtcattgaagaccattttgtttcccacccacccaactctagatgaactaaggtcacgagtgaaagaagttcttggatggaccgaggataatgtggagattcgtttttatgggagatacgatgttggtcaagggcataagtatatattaaatgtcataggtcagttggaatgggaagtttactttgatttggtaaaagagtctcagtttagatctctagaggtgtttgcatcaaagttggtacgtaccgtagaaaatttgaatctaaacaaatctccttcttatcattacgttgagaagaattttgtgacatattcttctcatcgtgaagggggtgcaagtaagactgagttggtacgagaagacttggagggggaaggagataagaagagacctttgcttggaaatgatttaggggaggcaggatcatcaaagagacattgcggtactgatgatatggatgcagcgagggagatgaaaagggagttagtacaaaaggggcttgatctaagtgaacatttgtcggagagtgttcattggttgtcgtacggaggcaaccctgaatacccgacggaagtagcaggccaatatgtgaatccagatgattactttgatgtcgaattgagtggtggtcacgattctgtctcagtagaagtcaatagagaggaggttgacgaggaggcaagtgttgagcaatatgatgttgaatttgctgaagactctgatgatgaccgtccattacgggggcatgccgtgacgggcaggacagagaatcctggatggcgtgcacaagtggagcagctgtttggcattccactgaacattgagcaggggcaagggggcaagaagaagcagaatggaatacccctgtcttggctgagtcagaacttctcacatcttgacgacgacgctgagccatggcgtgttgagtgttatgcccgtgcatacatcttgcacttgttgggaggggttctgtttcctgatgctggaggtgacattgcttcggtgatatggattcctttggtcgccaaccttggtgatctgggccattttagttggggctcagcagtgttggcgtggacatatagacagctctgtgaggcctgttgtcgtcaggcacgatcatccaacatgagtggttgtgtgctattgattcagctgtggatgtggttaagactaccggttggaaggcctaagtggaggcaaagctttactccttgcccctacaatgagccagacatggagaagacagtggcctacctttttgagagtactaccactgcacatgctcaccgggatgtggcatacaagcatcatgtcaatgagatggactgcttacagcctcaacattcgagagagctcctcaagagtgtgaatgaaatggggcatgccctccaagctccgaggggtggtgaggacacggagaacacactccgtagagcaagattaggttgcaggtcggttggattggacgacgtgtaccaaccgcggagactaccaccaccactacctcaatccgcacgtccaagtaccgctcgacactccatcaggatagaagagcgtgaagaagttggtggctcgtcgtcgtcacgcattccgcaagggaggggaaaggagaaggcgccggctccacctagcgacgacgatgacgacgacgaggaggaggatgagaactacgtcgcactagacgctgaggagatagacatgtcgcagcttcccgacgcgcctcaggggacacaatccacgcaatacaacttgcgatccactcggacagcgaaaaagaggtacactccgggctcgcaagcaattcggcgctaa

SEQ ID NO: 62864 - DNA, 189 bp, Oryza sativa
  Clone ID: PAT_MRT4530_64161C.1
atgtcgcacctgaacaccgagaaccccttcgccggcatgtgcacaacattgcgtgccaaatccaattggtacgacgaagcagccacacgtaccttccaagatggcttcgcgcacttgctcttgctccttgcaaatactgaatgctcccaccagcatcccaatgccatggcacctcggagcacccagtaa

SEQ ID NO: 62865 - DNA, 339 bp, Oryza sativa
  Clone ID: PAT_MRT4530_64162C.1
gcccctaaccctatacggatggaccaactaataacatatgtatgcaaaagagtaaagtccatcaccggtccctaaattgtactgttgtgtcattccggtccctaaactcgcaaatcgaccgttcaggtcctcaaacttgttcgactgtgtcatcccggtctctaaacttgcagattactcatttaggtcctccaacttgttcagttgtgtcaccccggtccctaaacagtacggtctaaaaactttatatcaaaaatttagagaccggggtgacacaactgaacaagttggaggacctaaacgagtgatctgcaagtttagggaccgagatttgcgagt

SEQ ID NO: 62866 - DNA, 3318 bp, Oryza sativa
  Clone ID: PAT_MRT4530_64163C.1
atggcggcgccagccacactggcgccgtgcccgtgccaccgtggcactccccctcacctccccacctcaaatccactccatttgaactcgtttttcgcgggattttttgtggaaatcaaagagaaagaggaatgtcgtgcgtttgagaaggtgtttgggaggaagccggacattcctgagtttagggacctaacacatgcccatggtgcactactagatggcggcatcaacttagatcagttgccagaaccattccaggtggatggtctcagaaaggatttagagttcccatccatggtcgcattgaagctatggctccaggagtacgccatcgtgcaccatcgtccataccgtgttgtcaattctgccacaaataggaggtacactgttaaatgtgaaaacccacggtgcaaatggaaggtccatgcaactaagaggtctagtggcacatggaggatatcacgggtacttcaaccgctccgagtcagagctcatgcccccccagtgttcgacgataggtacatcccgtacctaagggcggccgggttgcttggggtggccttggtcgtgagcagaggaatgccagtgttcaacgctcctgcgttgacagcacttgtggacagatggaggcctgagacacacagcttccacctccccagtggtgagatgaccatcactctacaggatgtggctatgatcttggccctcccattacaggggcatgtcgtgacgggcaggacagagactcctggatggcgtgcacaagtggagcagctgtttggcattccactgaacattgagcaggggcaaggggggaagaagaagcagaatggaatacccctgtcttggctgagtcagaacttctcacatcttgacgacgacgctgagccatggcgtgttgagtgttatgcccgtgcatacatcttgcacttgttgggaggggttctgtttcctaatgctgggggtgacattgcttcggcgatatggattcctttggtcgccaaccttggtgatctgggccgtttcagttggggctcagcagtgttggcgtggacatatagacagctctgtgaggcctgttgtcgtcaggcactatcatccaacatgagtggttgtgtgctattgattcagctgtggatggggttaagactaccggttggaaggcctaagtggaggcaaagcttcactccttggccctacaatgagccagacatggagaagacagtggcctacctttttgagagtactgccactgcacatgctcaccgggatgtggcatacaagcattatgtcaatgagatggactgcttacagcctcaacatattgagtggttaccataccacacaaatgaggcttcaagcctgtccttgaactcgatgtgcaatcgagactctgactatttcatgtaccagtgcccattggtttgtttctgggcagttgagtaccaccttccgcaccgtgtcatgcgacagttcgggaagaaacaagattggccggttgaggacatctcaactggagttaaattacacaaggtgagaacaaagaaggtgaaagactgggggctagagcataatagatacattgatgaatggaggacagccggaaggaacgataggtacatcgagactatacaccaaaatcatcttttctcagagtatcttcgttggctgcataggacatatagactgttcctccgccctacttggacggaagccgacatagaggatgaccacgactccgatgaggggcggaatccctatgatgtccggactagagttggatatcaaatggagcacgccccacttagagacagagtctcgagagagctcctcaggaatgtgaatgaaatggggcatgccctccaagctccgaggggtggtgaggacacggagaacacactccacaatgttttagaggaggtagagggcggcaccaaccaccctggcaccgtggttggggagggcggcgccagccagtgccgcgaggcagaagggtttcgggctggggggagggcggtgccagctaccctggcgccgtggtccatgagggcggcgccagccgaggcctggaggcagaagggcttcgatgggggaggaggggggcgccagccaccctggcgtcgcggtctgggggggcgccagccgttgcccggaggcagaacagacttggcgaaaattttgaggggggagaaagttggtggggcccgcagaggaggggcacgccagccatgctggcgccgtggtatgaggggcggcgccactctggctggcgcccccttcggcctagtcagcacctccacgacagccctactgccacggtggcacgggcacggcgccagtgtggctggcgccaccatgttgggcggcaacggcggccgacttgcggtggctgtgactgtggaggcagtggcgacgtcggtggatgcggggaaggattcaggtgcaagccttggacggcaagccgagggcatggtagatggctgcatctggccggcgcagcatcgtttggaggtggggtcggagatcggcttggcgcagagaggcgcagccgatggcagcggaggccggctcatcctgagaggcgcggacggcggagatggaggccggtttggcgcgagagacgcggccggcggtggaggaggggacctcggtgtgaagaggagctgccgacgtggattcgcaggtggtgagcggcaggtgaaaactcagaccggccttggccggtccgacaacgatggttcattccccctcttgagggtgttggcgtgctgtctcaccccctcaagggctagcccgttttgtggcaagcctaatgaggatgccaatgctcatctgcaacagttcctggagatctgtagcacgtacaccatcaagggcgtcagtcccgacaccgtcaggctgcggctgtttccgttctcccttctcgggagagtgaagaagtggttctatgccaaccgtgctgctgtcaatacctgggacaaatgctctacggcattcctctcgatattatttctgatgggaaaaaccaatgcccttcgtggacgaatttccagtttccaacagacgagggacaagtctattcctgaagcatgggaacgactgcaggagtacgtggccgcctgccctcatcatgggatgtacgactggctgatcctacaaaacttttacaatggactcaccccaatgtcccgcgatcacctagacgtggtagctagaggagctttcttctctaaaatggttcaaggagccgttgatctaatacagaagatggtctccaacatgggttggagcgaggaacgactccagacccgtcagtga

SEQ ID NO: 62867 - DNA, 282 bp, Oryza sativa
  unsure (1)..(282): unsure at all n locations
  Clone ID: PAT_MRT4530_64164C.1
ctgtgcgaaatttgcacgagagcctgcgggcccctacgcttactcggcctaccctaagactctgtacagcttgcagctcgaacagggcagtggggtcactcactggtggctttcatgattgcctcacgccctgctccatggagaagaacgtccttctttttgctgaagaacaacctcatcaagtacatctagctctacctactgcncagggttcctttttcacatcggtttcaattcctnaccataaaggactgcccagaattcgactgaaggctcatagag

SEQ ID NO: 62868 - DNA, 195 bp, Oryza sativa
  Clone ID: PAT_MRT4530_64165C.1
atggcggtggcatggagtccggagtccactatgaggaaagaaagctgtaaagggagagcaagcaaggactgccatggcagcggagaaggaaaatacgggtcggagatccgaattccgaccctcctgggggaatggcaaggatgcggcggctgtgctgctccggcgagggacggcccaataatggcccgtatctag

SEQ ID NO: 62869 - DNA, 593 bp, Oryza sativa
  Clone ID: PAT_MRT4530_64166C.1
cgagctaaaattaccccactaaagggaatagcttgccgccgccacttgaacaccatgttcgtgttcagcccgtaccgcagcgctagcttcgccaccgacaccccgggctcgcaagcttccacggccaatcggcgcttgaattcaagcggataattcggccggccacgccgtccgccgctaacaacctctgctgtctccaaaatgatccccgctactttgtttggcgggcaccactttctctctgtttcaaactattcgccagacggccatgaaaggacgcttaccttgaagaagcggttttcagaagagcagatcatcggttttttgcagcaggcggaagccggcgtggcgatcaaggaactgtgccggcaacacggcttcagtgacgcctcgttctacaactggcgggcgaaattcggcggcatgtcagttccggatgcgaagcgcctgaaggaactggaagccgagaacgccaagctcaaacgcctactggccgaatcgatccttgatgccgaagctctcaaagcggccttgggccgaaagcgctgagcccccagcaaaagcgtgagtcagtcatggtgatgcggaaagcg

SEQ ID NO: 62870 - DNA, 462 bp, Oryza sativa
  Clone ID: PAT_MRT4530_64167C.1
gcggtggtcgtgggtggtgatgactccatgcaatggtcgtggacggcacttgctgctccgcgcctatcccttcctccatggcgaggctgcggccagaagacggctgccttcgactatgacgaggcggaggtggaagtgctcctccacgcggcgcagcagatccccttgatgctgaactcatcggctgcttcgacacgctcatgtcccaaccatcggatccgaagccgaagcggcctgatgctctccccaccgccaaggcgggatggacgaaatggaggcgtgttttgcagcgttgaagggggcggcatggctggagaaggaggagacaagatcatggttggcaagctcgggaaggaactctgcatgcgggacaccgagctccgcgctatgcacacactagaggagcacgtccagccgaggagcactctcgccgcgctcaacggcctccacctagatctctag

SEQ ID NO: 62871 - DNA, 653 bp, Oryza sativa
  Clone ID: PAT_MRT4530_64168C.1
tttttttttttttttttttttttttttttttttttttttttttttttttttttttttttttttttttttttttttttttttttaagccggaggggtggcacaccattttggattttaaccgggttttcgttaatttaaaggtttaaaccgaacccgggcaaaaaaaaaaaaaaaaagggggggacaaaaaaaccggacggggaaaacccaatttttccctggttatgggacccaaaccccggggggtaaaaaaaaaaagagcaggacaggcataaaaaggggacccatcttttaataaaggcccacaaaaaaagggggggggggaaaaatttcggttttaaggggaccccaaaaaaaaatccggaaggcgggggaaaaaactaaaaagggtaaaaagccgattttgacccccgaactaaccaaaatttatttcttgggcaaaagggagcccgcttccaaaggggaacgaaaaaggggcccccctaaaggacgggttccaaaaaaaaatccctggttttgggccaccaacaaaagttttttttccaccaaaagccccaccaatttcaacaccattggggggaaaatttaaattaacaaggccccaggcactaccagggggcccaaaccacttgaaaaaaaatcggggcttttgg

SEQ ID NO: 62872 - DNA, 279 bp, Oryza sativa
  Clone ID: PAT_MRT4530_64169C.1
atggatggtgctaaccacagaacagtccagcatgtgcggacgtgcggcgactgcatcagcgttggcatcgaacccagattcttcgatgagacttacatcgaggtaaaaaaggtgtgcctcggcggctgcggcggcaacaatttgggagggatggacgaggacgcaggcaccgggatccccatgcttccctccctggtgctggctgaaatccgccccaaatgcatagcctccatctccatggcgttcccatccggcacacatggcagtcctcttctttga

SEQ ID NO: 62873 - DNA, 1323 bp, Oryza sativa
  Clone ID: PAT_MRT4530_6416C.1
atggcgccgactcggcgaattcttggggcgtcccctccttcttatgatcagataattatttacaatttgacaaatcagaatgatttgtcttgtgatgtaggctgcaaggatgaacagttcacaactgaactacatcatggtggttttttctctggagttggtagtagcagaatttatttggatgaaaaggtggattggtttgattattgtgacagtgacacatggtcttcattatggcttgatgattttattgagcaactaggatatgatatgtctgagaaggccaaggtttattggttattgcctgggaagacattcagtgatgggctaaggagaattaactctgatgcaagcaccaacagcatggttgcattagcaccaaggtttaggacattgcttttgtatgtggatccccaagacattctggaatccatcaattgggatgatgttgctctttctacccctgcttctatacctatcgtggctagccgtgagaggtctacaatgaatcgaaaagattcagatgttaaacctatagaaggtcatgacattgacgatgacgatgacatcgatgtagatcctgactttgttgacagtgattatgaggctgacaagggggatgatgatgcttttgacaactgtgtcgagatagaagaagtggctagcagcaagatggttgttaagcttcctgaacatgactctgatgatgaaggcttgttgcttccagagtcatctgatgaagataatgaaggcattaagttgaaatttaagaactttgtggctgctgtggacatggagtcaccaatctttaaggttgggatgttgttctctgatgctattgaagttaggcaagcaataaaacaatacagtgtgaagaatagagtcgcaattaaatttacaagaaataccaagaaaaaaattgaggctaaagtggagagtagagctagttggggttggtttttgaatactttgaaagaagatctccttatcgacaacactggaccttatactatcatgacagacagacagaagggattggtaccagctgtgagggataaattctcagattcagaacaaagattttgcgttaggcatttgtaccaaaattttcatgttctatacaaaggggagactctaaagaatcagttgtgggcaattgcaaggtcaagtactataccagagtgggaatttaacatggaaaagatgaagtctcttagcaaagatgcttatgcctacctggaggaaataccacccaaccagtggtgcagagcattctttagtgatttccccaagtgtgatattctactcaacaacaattccgag

SEQ ID NO: 62874 - DNA, 354 bp, Oryza sativa
  Clone ID: PAT_MRT4530_64170C.1
caactacggcgggagcgtggaggtggtcgccgtcgacggcgaggactgcctggtgaggtacgaaggccccgagtccatcgggagcgggatcaaggcggccatcaaggagaagttcccggacatcaccaatgtggtgttcttgcagtgagctatccagaaaatttttacctcattggcatgcatgagttaaaatgcaccagttttcgatggctgttcatgtgctagtgaacttgttccgatgtatgttcaggtgcaatctttacagtgttcgcagatacaatacacaaacagggaaacggaatgatacttgcctattgtcacctcacttgaaatagtatttggatttaggggaat

SEQ ID NO: 62875 - DNA, 243 bp, Oryza sativa
  Clone ID: PAT_MRT4530_64171C.1
tgataaaccaacatggatctcccagaaccaagattatgaaaatttgtatataaatgctatcccagacaaatacccttcaggcaactagcaaactctgcgtcatacttgatcttcatatgtggagtaaacttgctatcctcatcaactactgaactgctatttcatttgtcttgggtccaatttctagcaatgctagttcgttagtcagtttcctgtacattcatggacttgcagaaaaataaa

SEQ ID NO: 62876 - DNA, 804 bp, Oryza sativa
  Clone ID: PAT_MRT4530_64172C.1
gtctaaagtcaaaacatcttataacatgaacggagggagtataagacaagctttgaactcttagcttgtaatgaacctatacaattacaaaaccactcatatatattgactcatatgtgctaattcatttaaaaccgacaaattcttcctcctccgtggaatgaaaatatatggaatcaacacctttgagtaacttgtagtcggtaagtacacggtaagcgcaattaagatcgtgtgcaagaacttgtagtcgatcttctacacgctgaggtacaagtcgatctgcaggacggcgttgttggtggtggcgttgaaggagtgcgtcctgaggaggccgtacccggcggcgccgcggagcacgccggcgccgccgaccaccggcagctccctcacctcgtcgaggatggcgtccctggcgagcaccgacacggcgccgccgcggtgcacccccgccgtgaactccatggtggcgctgaacagcagcgccgagtccgtccgcgacgagaacatgtagaaccccctggcgcgccccacggcggcggacgacgccgcgtcggcgccgtccgtcagcgggtcgtcgatggcgtacaggtctccgaaccggttcaccgcgtcgcccggcagcgccgccgccgccacgcccctcaccacgcgcaccgccgtcgccgccggcccgccccctgacgccgacgcggtcaccgtgtcgtgcatgtagaaccgcgtgtgcgtcgtcgtcgtcgttgccgtgccgaccatggcgacggcgacggcgacggcgagcgccagctgcagcaggaggggcat

SEQ ID NO: 62877 - DNA, 269 bp, Oryza sativa
  Clone ID: PAT_MRT4530_64173C.1
ttcgaagctgacattacggtcgacggaggagagattcataaaacgattaacggttaccgacactacttgaacattacgtgcacacggacacttgaactggataaacgtcactgttacatcggacggggtggagaattcataaaacgatcattccgacgatacttggtcattataacgagtacatacagacatgacaacatacgtatacaactcggacttttgactttaataccttacgtagttactagagaaaacgacttttttttttt

SEQ ID NO: 62878 - DNA, 1430 bp, Oryza sativa
  Clone ID: PAT_MRT4530_64174C.1
gaagccatcggcgtcacccaccacatcgacgcgaccacactccacacaagccatggaggcgtcactcaccgtcgccggcgccggcgcggccgccttgtctctgcggccgcaaatccgccttcgaatcacccaagcgacccctctgatgccccctcggcggctccaatccggaccctccaagatccagacctccggcgcccgggcccaccttgcggcggcccccgcgtccacgccaccggcggcgggaggcggcctgtactcggcggagacctacgagctgacggcggagaacgtcgaccgcgtcctggacgacgtgcgcccctacctcatcgccgacggcggcgacgtcaccgtcgcgtccgtcgaggacggcgtcatctccctcaagctcgaaggagcgtgcggcagctgccccagctcgacgacgacgatgaagatgggcatcgagcgcgtgctcaaggagaagttcggcgacgccgtaaaagatatccgccaggtgttcgacgacgatcagcagccggcggagccaacgccccaggcggtgaacggccacctggacatactgcggccggcgatcgccaactacggcgggagcgtggaggtggtctccgtcgacggcgaggactgcctggtgaggtacgaaggccccgagtccatcgggagcgggatcaaggcggccatcaaggagaagttcccggacatcaccaatgtggtgttactttggttcgtgactgaaagccaaatggaagatacggatcaggagctatgcaccgttgcggtggagatgatgagttcaggaaaactcaagccatgtagacacttgttgttctatcaagactcccttcaccgagaagcatccataaaaatggttcatgtttagcaatagcacggtgttatcctaactgagcttttcttctagccaccgtccacatccttcttcaaaacctcaacatcactttgtgtgggaattaaaaggaattggtcttcttgaccttgcaagaccttttcttgaccttgtaagacccaacatcgttgtgttgtttttcttgtttcttatttttcaatttcatccacctcttctttctacctcccatctttctcctagttcttgccttctctctcggtctatccctcctgagctgtattgatccccttctatgttattttctcgatgtttaaaaaaaaattaattttgtttagcaataaacgaagagattgaagtgagctatccagaaaatttttacctcattggcatgcatgagttaaaatgcaccagttttcgatggctgttcatgtgctagtgaacttgttccgatgtatgttcaggtgcaatctttacagtgttcgcagatacaatacacaaacagggaaacggaatgatacttgcctattgtcacctcacttcaaatagtatttggatttaggggaat

SEQ ID NO: 62879 - DNA, 2289 bp, Oryza sativa
  Clone ID: PAT_MRT4530_64175C.1
atggcactgcatcaaacccttctcctcctcctcttcgtctccatcgccatccaccgcgccgtcgcccagaccaccacctccaccgctgtccgcggcgacggcaaccggttcgtgacctactccttccccagcttcgccaacgcgctgctccacctgcaggccaacctcacggtgctcaacaacgccagcatcagccagggcgccctccagatcacccccgatagcagcaacagcgccgacggctacctcgtcaaccagaccggccgcgtcttcttctccacccccttcaccctctggtcgccggcggctggtggtgggggcaatggcaatggcaatggcacctatgtcgcgtcgttcaacatggtgttcagggtgaacatattccggacgaacaccagcgaccccggcgagggcgtcgcgttcgtcgtggcgtccgggctcgacccgccgcctcccggcagctacagcggcttcctcggcctcacgaacgcgtccaccgacggcgacgacgcgaaccggttcgtggccttggagctcgacacggtgaagcaggggtacgaccccgacgacaaccatgtcggcctcgacgtcaacggcgtccggtcggtgaaggccgtgccgctggcgccgttcggcatcaagctcggcgccgccaacgccagcaacttcttcgtctgggtcgactacgatggcacgtctcgccacgtgtggatgtacatggccaggtccgacgacggcgtgcccagccccaagccgccgtcgccggtgctcgacgcgccgctcgacctctccgcgttcgtcgccgagaaggcctacttcggcttctccgcgtcgacgggcacgcggttccagctcaactgcctgcacatgtggaacatgacggtggagctgctcgacgacggcagccgctcctccggcggcggccagacgcggcggaagctggggctgggcgtcggcgtgccgtgcggcgtcgccgcgctcgccaccggcgctgtggtggcgttcctgtacatcaagaagaggaggcgcagagtcggcgacgatccggagtcgctgtcgtcgacggcggcgttcaagttcaacaagagcagcatcaacctgaggagcctcgccgggacgcccaaggagttcgagtacacggagctgaggaaggggacggaggacttcgccgcgaagaacaagctcggccagggtggctacggcgtggtgtacaaggccgtcgtcgccggcgacagcgacggcgagagcgtggaggtggccgtcaagcagttctcggcggccaacaccaagggccaggaggacttcctcgccgagctcagcatcatcaaccgcctccgccaccgcaacctcgtccgccttcgcgggtggtgccatcagaacggcgtgctgctgctggtgtacgactacatgccgaacggcagcctggacaagcacctcttcggcggcgcggcggtggcgccggtgctgagctgggagcagaggtacaacatcgtcgccggcgtggcggcggcgctgaactacctccaccacgagtacgaccagcgggtaatccaccgcgacatcaagccgtcgaacatcatgctcgactccgccttcggcgcccgcctcggcgacttcggcctcgcccgcgccctcgactccgacaagacctcctacaccgagatggtgggcgtgccggggacgatgggctacatcgcgccggagtgcttccacaccggccgcgccacgcgggagtccgacgtgttcggcctcggcgccgtgctcctcgaggtcgcctgcggccgccgcgtctcgttcggcgccggcggcgacggcggcgccatcggcgggtgcagccagctgctggagtgggtgtggaggctccacggggccggccgcatcctcgacgccgtggacccgaagctcgccggcggcgcgttcgacgcggacgacgccgaccggctcctcctcctggggctcgcgtgcagccacccggaccccggggcgcggcccaccgcgaaggccgtcgtgcaggtgctcgcgcgcgccgtgcccgcgccggccgtgccgccgtccaagccggcgttcatgtggcccgcgctgtcgggggcggactgtgacgacagcgacggcggcggcgccggcgagatgtcgtcgaggcactcggccaggacgaccagcacggaacagaccagctcgacgtactacgcgtcgtcgtcgtcctactcgtcccacggttgcacacgcacgcaggtgacgagcagcggtgacgccattgctgacgagacgaggtacatgtccattggttga

SEQ ID NO: 62880 - DNA, 606 bp, Oryza sativa
  Clone ID: PAT_MRT4530_64176C.1
tttcttaagacaggagatcaactgctccgctatcaaaggtgatgttgatggtgctaaatacagagctacttgagcccccgcaaaaaagtagagagtggatgtcacttttgacttctgcatgatatatcaggtgcaggtgctctagcctcttaaggcaactactccaaatctaaatcgaagtatttcgagaagcaagccaatttcgacatgagatcactcttttctatctgcaaaatttctcatgcagtactcgaccaggcgtgtttctccatgggttccacacctccacgcttgcgccataggtccggtggttgatgctccaagctccatcatggccttgttggaaaatgcgatgaatggcctctgattgcttccattttttttctagtgctgatctactccgtgtttcactttggttttcgatttcatgatttgtcttgcatgtatccaatagccatgattggcacacttgattttttcgggaatacgcgagacgcccatttttgtattaaggaggagtaaatgtaattacaggagggccaaacaatttaaaagagaaaaaaaaaaactcgagactagttctccccgcagcccggggatccacta

SEQ ID NO: 62881 - DNA, 271 bp, Oryza sativa
  Clone ID: PAT_MRT4530_64177C.1
gccgggactccgcctttcctacactcctcctcttctccgtatcatcatcatcgactacgcttgtgattttttttataatatttctcgactgaaccgcttgataaatccgatcgccactatggtatctgatggcattctccttcttcatgatccagcatgcaaggagtttagagaggtttgaccggcgacaccacccgcactctcgacaggaaaggatcctacctgaccgcccatgaagctcctgcccgccccgaggacctatgcacagcag

SEQ ID NO: 62882 - DNA, 461 bp, Oryza sativa
  Clone ID: PAT_MRT4530_64178C.1
gcttctagctgctgcagctacagccagagacagaaggtcccccaaacagaccagctatcgggccacattctgagaagctggcatggaaaatccaggaaatgaactatgaagccagaagctggaaaacccagctacatcagatgctgagaagctggctaccaaccagctagatctcagagtgaaaagctacccgaaactactggctagagttggactcgaaaacacgggctctggcctcaggcaacaaaacaggctagagaaactggggacgaatctcaataagatatgacaggtggggaaggagatattgcacaattatgaaagatgtgaaacgcggattcgagctcatatgtaagataaaggatattacatgcccagccagagaaaatgaggacgaacttgaatactgttggggatagcatatgaccatctgtactgtgggagcagctaaaagccggacg

SEQ ID NO: 62883 - DNA, 4770 bp, Oryza sativa
  Clone ID: PAT_MRT4530_64179C.1
acatttgattttttggtgtagatggatagacttgttcgtgtttactatggtggtagagtggtggaaccttatgttggtggacatgttgagtttgaggatatgtcattgaagactattttgtttcccacccacccaactctagatgaactaaggtcacgagtgaaagaagttcttggatggaccgaggataatgtggagattcgtttttatgggagatacgatgttggtcaagggcataagtatatattaaatgtgataggtcagttggaatgggaagtttactttgatttggtaaaagagtctcagtttagatctctagaggtgtttgcatcaaagttagttcgtaccgtagaaaatttggatctaaacaaatctcattcttatcattacgttgagaagaattttgtgacatattattctcgtcgtggagggggtgcaagtaagagtgagttggtacgagaagacttggagggtgaaggagagaagaagagacctttgcttggaaatgatttatgggaggcaggaccatcaaagagacattgcggtactgatgatgtggatgcagcgagggtgatgaaaagggagttagtacaagaggggcttgatctaagtgaacatttgtcggcgagtgttcattggtcgtcgtacggagtcaaccctgaatacccgacagaagtagcaggccaatatgtgaatccagatgattacttttatgtcgaattgagtggtggtcacgattctgtctcagtagaagtcaatagagatgatgttgacgaggaggcaagtgttgagcaatatgatgttgaatttgctgaagactctgatgatgaccgtccattccctccacttactaataatgacaagttagcattagaggaatgtcgtgcgtttgagaaggtgtttgggaggaagccggacattcctgagtttagggacctaacacatgcccatggtgcactagtagatggcggcatcaacctagatcagttgccagaaccattccagttggatggtctcagaaagggtttagagttcccatccatggtcgcattgaagctatggctccaggagtacgccatcgtgcaccatcgtccataccgtgttgtcaattctgccgcaaataggaggtacactgttaaatgtgaaaacccacggtgcaaatggaaggtccatgcaactaagaggtctagtggcacgtggaggatatcacgggttttccagtatagggtgaagtatggcaaggcttggagggcacgagaggaggctatgaagctcatttacggtgaatggggtgaagcgtatgtccgtttgcccactttgctgcaagccattaagcagaggaatcccagtatggtctaccatatcgatactcatcctgatagggttgtcaacgttgatggagtgaccaagaaaatttttatgcgtgcattctggtgctttggtccttccattgaggcttttaaacattgtaggccagtactagctatagatgcaaccttcctaactgggaaatacggtggtgccttgatgactgcattatcagctgatgcggaggaccaacttgtacctttagcttttgccttggtggagaaagagaattcacgagactggtgctggtttatcgatcttgtccgacgggttgtggttgggccgcatagggaggtttgtattatctcagatcgacatgctggtataatgaatgccatgatgactcctgttccaggattgccatcggttcaccaccggtggtacatgaggcacttcagtgctaatttccacaaggccggtgcggacaagcatcagacaaaagagctcttcccccttaaaaaagatattaatggtcagattgacgagaagtggatatttgagagggatgttgaggcactaaggcagcgtattcccgaaggtcctcgtaaatggcttgaagatgagttgttggataaagataagtggtctcgtgcatacgatagaaatgaccgccggtggggttacatgacaaccaacatggccgaacagttcaatagcgtgctagttggtgttcgtaagcttccagtgacggccatcgtatcatttacgttcatgaagtgtaatgactactttgtgaacagacatgatgaagctttgaagcgagtccagttagggcagcgttggtccaccaaggttgacagtaagatgaaggtgcaagaaagtaaggcgaacaaacacactgcaaggtgtttcgataagcagaaaaagacatacgaggtcacagagaggggtggtataacgcgtggtggtgttagattcggcgcaagagccttcaaagttgaaggtgaggggaactcatgttcttgccaaaggccattgctctaccatatgccttgctcacatcttatacacgtttatctgattcatgcaattgataaggaatctcccaaccgaatgccgtatcagttctcttcaagagccgttgtgaacacatgggcaagtcgctttgagccatacctcgaccccacacagtggccatcgtacgatggtgaagaatttgttgctgacccaaatttgaagattaaaacaagagggaagaggagatcgaaacgattcaagaacgaaatggactcaggtctgggtggttctggaaggaaaccaccttcatgcgttcaacttgatgctgcgccggtgcaaaatagatgctcgttgtgtcaccaggagggtcacaagaaaactaagtgtcctaagcgtccaaaaaagaagaagtccaaaaaaaatttaagtgttagggaggtacttcaaccgctccgagtcagagctcatgcccccccagtgttcgacgataggtacatcccgtacctaagggctgccgggttgctcggggtggccttggtcgtgagcagaggaatgccagtgttcaacgctcctgcgttgacagcacttgtggacagatggaggcctgagacacacagcttccacctccccagtggtgagatgaccatcactctacaggatgtggctatgatcttggccctcccattacgggggcatgccgtgacgggcaagacagatactcctggatggcatgcacaagtgcagcagctgtttggcattccactgaacattgagcaggggcaaggggggaagaagaagcagaatggaatacccctgtcttggctgagtcagaacttctcacatcttgacgacgatgctgagccatggcgtgttgagtgttatgcccgtgcatacatcttgcacttgttgggaggggttctgtttcctgatgctgggggtgacattgcttcggcgatatggattcctttggtcgccaaccttggtgatctgggccgtttcagttgggggtcagcagtgttagtgtggacatatagacagctctgtgaggcctgttgtcgtcaggcaccatcatccaacatgagtggttgtgtgctattgattcagatgtggatgtggttaagactaccggttggaaggcctaagtggaggcaaagcttcactccttggccctacaatgagccagacatggagaagacagtggcctacctttttgagagtactgccactgcacatgctcaccgggatgtggcatacaagcattatgtcaatgagatggactgcttgcagcctcaacatattgagtggttaccataccacacaaatgaggcttcaagcctgaccctgaactcgatgtgcaatcgagactctgactatttcatgtaccagtgcccattgatttgtttctgggcagttgagtaccaccttccgcaccgtgtcatgcgacagttcgggaagaaacaagattggccggttgaggacatctcaactggagttgaattacacaagtatgacagggtgagaacaaagaaggtgaaagactgggggctagagcataatagatacattgatgaatggagaacagccggaaggaacgataggtacatcgaaactatacaccaaaatcatcttttctcagagtaccttcgttggctgcataggacatatagactgttcctccgccctacttggacggaagccgacatagaggatgaccgcgactccgatgaggggcggaatccctatgatgtccggactagagttggatatcaaatggagcacgccccacttagagacaaagtctcgagagagctcctcaggagtgtgaatgaaatggggcatgccctccaagctccgaggggtggtgaggacacggagaacacgctccgcaatgttttagagaaagttcgtcaaaggtgccggaaacttgcagcaagattaggttgcaggtcggttggattggacgacgtgtaccaaccggggagactaccaccaccactacctcaatccgcgcgtccaagtactgctcgacactccatcaggatagaagagcgtgaaggagttggtggctcgtcgtcgtcacgcattaagcaagggaggggaaaggggaaggcgccggctccacctagcgacgacgatgacgatgaggacgaggaggatgaggactacgtcgcaccagatgccgaggagatagacatgtcacagcttcccgacgcgcctcaggggacgcaacccacgcaatacaacttgcgatccactcgggcagcgaaaaagaggtactctccgggctcgcaagcaattcggcgccaacggaagaaggaggcagagggcggcgccaaccaccctggcgccgaggttgagaagggcagcgccagccagtgccgcgtggcagaagggtttcgggctgggggagggcggcgccagctacccaggcgccgtggtccatga

SEQ ID NO: 62884 - DNA, 923 bp, Oryza sativa
  Clone ID: PAT_MRT4530_6417C.1
gctgcgaggatgaacagttcacaactgaactacatcatggtggttttttctctggagttggtagtagcaaaatttatttgaatgaaaaggtggattggtttgattattgtgacagtgacacatggtcttcattatggcttgatgattttattgagcaactaggatatgatatgtctgagaaggccaaggtttattggttattgcctgggaagacattcagtgatgggctaaggagaattaactttgatgcaagcactaacagcatggttgtattagcccccagccgtgagaggtttacaatgaatcaaaaagattcaggtgttatacctatagaaggtcatgacattgacgatgacgatgacatcgatgtagatcctgactttgttgacagtgattatgaggctaacaagggggatgatgatgtttttgacaactgtgttgagatagaagaagtggctagcagcaagatggttgttaagcttcctgaacatgactctgatgatgaaggcttgttgcttccagagtcatctgatgaagataatgaaggcattaagttgaaatttaagaactttgtggctgctgtggacatggagtcaccaatctttaaggttgggatgttgttctctgatgctattgaagttaggcaagcaataaaacaatacagtgtgaagaatagagtcgcaattaaatttacaagaaataccaagaaaaaaattgaggctaaatgtaaagaagagtgctcatggatgttggatgtagctgaggacagcaggacgaattgtcttatggtaaaaagatatatagatggccacaaatgtcagaaggagtgggagttgaattatgtaactgctaggtatcttgcaaatagatatgttgaaagctttagggataatgataggatgacactcaagagtttctctaag

SEQ ID NO: 62885 - DNA, 4056 bp, Oryza sativa
  Clone ID: PAT_MRT4530_64180C.1
atgtcattgaagatcattttgtttcccacccacccaactctagatgaactaaggtcacgagtgaaagaagttcttggatggaccgaggataatgtggagattcgtttttatgggagatacgatgttggtcaagggcataagtatatattaaatgtgatagggggtgcaagtaagagtgagttggtacgagaagacttggagggggaaggagagaagaagagacttttgcttggaaatgatttatgggaggcaggaccatcaaagagacattgcggtactgatgatgtggatgcagcgagggtgatgaaaagggagttagtacaagaggggcttgatctaagtgaacatttgtcggcgagtgttcattggtcgtcgtacggagtcaaccctgaatacccgacagaagtagcaggccaatatgtgaatccagataattactttgatgtcgaattgagtggtggtcacgattctgtctcagtagaagtcaatagagatgatgttgacgaggaggcaagtgttgagcaatatgatgttgaatttgctgaagactctgatgatgaccgtccattccctccacttactaataatgacaagttagcattagaggaatgtcgtgcgtttgagaaggtgtttgggaggaagccggacattcctgagtttagggacctaacacatgcccatggtgcactactagatggcggcatcaacctagatcagttgccagaaccattccaggtggatggtctcagaaagggtttagagttcccatccatggtcgcattgaagctatggctccaggagtacgccatcgtgcaccatcgtccataccgtgttgtcaattctgccgcaaataggaggtacactgttaaatgtgaaaacccacggtgcaaatggaaggtccatgcaactaagaggtctagtggcacgtggaggatatcacgggtagccattaagcagaggaatcccagtatggtctaccacatcgatactcatcctgatagggttgtcaacgttgatggagtgaccaagaaaatttttatgcgtgcattctggtgctttggtcattccattgaggcttttaagcattgtaggccagtactagctatagatgcaaccttcctaactgggaaaaacggtggtgccttgatgactgcattatcagctgatgcggaggaccaacttgtacctttagcttttgccttggtggagaaagagaattcacgagactggtgctggtttatcgatcttgtccgacgggttgtggttgggccgcatagggaggtttgtattatctcagatcgacatgctggtataatgaatgccatgatgactcctgttccaggattgccatcggttcaccaccggtggtgcatgaggcacttcagtgctaatttccacaaggccggtgcggacaagcatcagacaaaagagctcctaaggatatgtcagattgacgagaagtggatatttgagagggatgttgaggcactaaggcagcgtattcccgaaggtcctcgtaaatggcttgaagatgagttgttggataaagataagtggtctcgtgcatacgatagaaatggccgctggtggggttacatgacaaccaacatggccgaacagttcaatagcgtgctagttggtgttcgtaagcttccagtgacggccatcgtatcatttacgttcatgaagtgcaatgactactttgtgaacaaacatgatgaagctttgaagcgagtccagttagggcagcgttggtccaccaaggttgacagtaagatgaaggtgcaaaaaagtaaggcgaacaaacacactacaaggtgtttcgataagcagaaaaagacatacgaggtcacagagaggggtggtataacgcgtggtggtgttagattcggcgcaagagccttcaaagttgaaggtgaggggaactcatgttcttgccaaaggccattgctctaccatatgccttgctcatatcttatacacgtttatctgattcatgcaattgatgaggaatctcccaaccgaatgccgtatcagttctcttcaagagccgttgtgaacacatgggcaagtcgctttgagccatacctcgaccccacacagtggccatcgtacgatggtgaagaatttgttgctgacccaaatttgaagattaaaacaagagggaagaggagatcgaaacgatttaagaacgaaatagactcgggtctgggtggttctggaaggaaaccaccttcatgcgttcaacttgatgctgcgccggtgcaaaatagatgctcgttgtgtcaccaggagggtcacaagaaaaccaagtgtcctaagcgtccaaaaaagaagaagatggccgaggagggacaaccgccgacttacccagccttggaggcgtactacgaggcccgtcatcgcggggctgcgatcgaggcggggagggtacttcaaccgctccgagtcagagctcatgcctccccagtgttcgacgataggtacatcccgtacctaagggctgccgggttgctcggggtggccttggtcgtgagcagaggaatgccagtgttcaacgctcctgtgttgacagcacttgtggatagatggaggcctgagacacacaacttccacctccccagtggtgagatgaccatcactctacaggatgtggctatgatcttggccctcccattacgggggcatgccgtgacgggcaggacagagactcctggatggcatgcacaagtgcagcagctgtttggcattccactgaacattgagcaggggcaaggggggaagaagaagcagaatggaatacccctgtcttggctgagtcagaacttctcacatcttgacgacgatgctgagccatggcgtgttgagtgttatgcccgtgcatacatcttgcacttgttgggagagatgtggatgtggttaagactaccggttggaaggcctaagtggaggcaaagcttcactccttggccctacaatgagccagacatggagaagacagtggcctacctttttgagagtactgccactgcacatgctcaccgggatgtggcatacaagcattatgtcaatgagatggactgcttgcagcctcaacatttcgggaagaaacaggattggccggttgaggacatctcaactggagttgaattacacaagtatgacagggtgagaacaaagaatgtgaaagactgggggctagagcataatagatacattgatgaatggagaacagccggaaggaacgataggtacatcgagactatacaccaaaatcatcttttctcagagtaccttcgttggctgcataggacatatagactgttcctccgccctacttggacggaagccgacatagaggatgaccgcgactccgatgaggggcggaatccctatgatgtctggactagagttggatatcaaatggagcacgccccacttagagacagagtcttgagagagctcctcaggagtgtgaatgaaatggggcatgccctccaatctccgaggggtggtgaggacacggagaacacgctccgcaatgttttagagaaagttcgtcaaaggtaccggaaacttgcagcaagattaggttgcaggtcggttggattggacgacgtgtaccaaccggggagactaccaccaccactacctcaatccgcgcgtccaagtactgctcgacactccatcaggatagaagagcgtgaaggagttggtggcttgtcgtcgtcacgcattaagcaagggaggggaaaggggaaggcgccggctccacctagcgacgatgatgacgacgaggacgaggaggatgaggactacgtcgcaccagacgccgaggagatagacatgtcacagcttcccgacgcgcctcaggggacgcaacccacgcaatacaatttgcgatccactcgggcagcgaaaaagagggaggcagagggcggcgccaaccaccctggcgccgcggttgggaagggcggcgccagccagtgccgcgaggcagaagggtttcgggctgggggagggcggggccagctaccctggcgccgtggtccatga

SEQ ID NO: 62886 - DNA, 255 bp, Oryza sativa
  Clone ID: PAT_MRT4530_64181C.1
tgcccccaccctatctacgctggcagaactgcttagctggccacgctggatagatggggattcgctgacgaagtggactactttatactatggcagaaaacatgaagttagttgcaggaaggcagtccgtagctaataagatcactggagagctgggggagtcccaacatgtggacgatgatctatgagagatgtctggcagcaagcctatggtgcacataacactatctgacactgggcgaaccgtttacacta

SEQ ID NO: 62887 - DNA, 3369 bp, Oryza sativa
  Clone ID: PAT_MRT4530_64182C.1
agtggtggaaccttatgttggtacacatgttgagtttgaggatatgttattgaagaccattttgtttcccacccacccaactctagatgaactaaggtcacgagtgaaagaagttcttggatggaccgaggataatgtggagattcgtttttatgggagatacgatgttggtcaagggcataagtatatattaaatgtgataggtcagttggaatgggaagtttactttgatttggtaaaagagtctcagtttagatctctagaggtgtttgcatcaaagttagttcgtaccgtagaaaatttggatctaaacaaatctccttcttatcattgcgttgagaagaattttgtgacatattattctcgtcgtggagggggtgcaagtaagactgagttggtacgagaagacttggagggggaaggagagaagaagagacctttgcttggaaatgatttatgggaggcaggaccatcaaagagacattgtggtagtcatgatgtggatgcagcgagggagatgaaaagggagttagtacaagaggggcttgatctaagtgaacatttgtcggcgagtgttcattggtcatcgtacggagtcaaccctgaatacccgacagaagtagcaggccaatatgtgaatccagatgattactttgatgtcgaattgagtagtggtcacgattctgtctcagtagaagtcaatagagatgatgttgacgaggaggcaagtgttgagcaatatgatgttgaatttgctgaagactctgatgatgaccgtccattccctccacttactaataatgacaagttagcattagaggaatgtcgtgcgtttgagaagggtttaaaagttccatacatggtcgcattgaagctatgggttcaggattacgtcatcgtgcaccatcgtccataccgagttgtcaattctgccgcaaataggaggtacactgttaaatgtgaaaacccacggtgcaaatggaaggtccatgcaactaaaaagtctagtggaacgtggaggatatcacgggttttccagtatagggtgaagtatggcaaggcttggagggcacgagaggaggctatgaagctcatttacggtgaatggggtgaagcgtatgtccgtttgcccactttgctgcaagccattaagcagaggaatcccagtatggtctaccacatcgatactcattctgatagggttgtcaacgttgatggagtgaccaagaaaatttttatgcgtgcattctggtgctttggtccttccattgaggcttttaagcattgtaggccagtactagctatagatgcaacctttctaactgagaaatacggtggtgccttgatgactgcattatcagctgatgcggaggaccaacttgtacctttagcttttgccttggtggagaaagagaattcacgagactggtgctgggaggtttgtattatcttagatcgacatgctggtataatgaatgccatgacgactcctgttccaggattgccaccggttcaccaccgatggtgcatgaggcacttcaatgctaatttccacaagggcggtgcggacaagcaccagacaaaagagctcctaaggatatgtcagattgacgagaagtggatatttgagagggatgttgaggcactaaggcagcgtattcccgaaggtcctcgtaaatggcttgaagatgagttgttggataaagataagtggtctcgtgcatacgatagaaatggccgccggtggggttacatgacaaccaacatggccgaacagttcaatagcgtgctagttggtgttcgtaagctttcagtgacggccatagtatcatttacgttcatgaagtgcaatgactactttgtgaacagacgtgatgaagctttgaagcgagtccagttagggcagcgttggtccaccaaggttgatagtaagatgaaggtgcaaaaaagtaaggcgaacaaacacactgcaaggtgtttcgataagcagaaaaagacatacgaggtcacagagaggggtagtataacgcgtggtggtgttagattcggcgcaagagccttcaaagttgaaggtgaggggaactcatgttcttgccaaaggccattgctctaccatatgccttgctcacatcttatacacgtttatctgattcatgcaattgatgagaaatcttccaaccgaatgccgtatcaattctcttcaagagccgttgtgaacacatgggcaagtcgctttgagccatacctcgaccccacacagtggccacctatggccgaggagagacaaccgccgacttacccagccttggaggcgtactacgaggcccatcatcgcggggctgcgatcgaggcggggagggtacttcaaccgctccgagtcagagctcatgcccccccactgttcgacgataggtacatcccgtacctaagggcggccgggttgctcggggtggccttggtcgtgagcagaggaatgccagtgttcaacgctcctgcgttgacagcacttgtggacagatggaggcctgagacacacagcttccacctccctaatggtgagatgaccatcactctacaggatgtggctatgatcttggccctcccattacgggggcatgccgtgacgggcaggacagagactcctggatggcgtgcacaagtggagcagctgtttggcattccactgaacattgagcaggggcaaggggggaagaagaagcagaatggaatacccctgtcttggctgagtcagaacttctcacatcttgacgacgacgctgagccatggcgtgttgagtgttatgcccgtgcatacatcttgcacttgttgggaggggttctgtttcctgatgctggggatgacattgcttcggcgatatggattcctttggtcgccaaccttggtgatctaggccgtttcagttggggctcagcagtgttggcgtggacatatagacagctctgtgaggcctgttgtcgtcaggcaccatcatccaacatgagtggttgtgtgctattgattcagctgtggatgtggttaagactaccggttggaaggcctaagtggaggcaaagcttcactccttggccctacaatgagccagacatggagaagacagtggcctacctttttgagagtactgccactgcacatgctcaccgggatgtggcatacaagcattatgtcaatgagatggactgcttacagtctcaacatttcgggaagaaacaagactggccggttgaggacatctcaactggagttgaattacacaagtatgacagggtgagaacaaagaaggtgaaagactgggggctagagcataatagatacattgatgaatggaggacagccggaaggaactacag

SEQ ID NO: 62888 - DNA, 3969 bp, Oryza sativa
  Clone ID: PAT_MRT4530_64183C.1
atggcggcgccagccacactggcgccgtgcccgtgccaccgtggcactagggctgtcgtggagatggatagacttgttcgtgtttactacggtggtagagtggtggaaccttatgttggtggacatgttgagtttgaggatatgtcattgaagaccattttgtttcccacccacccaactctagatgaactaaggtcacgagtgaaagaagttcttggatggaccgaggataatgtggagattcgtttttatggaagatacgatgttggtcaagggcataagtatatattaaatgtgataggtcagttggaatgggaagtttactttgatttggtaaaagagtctcagtttagatcaatagaggtgtttgcatcaaagttagttcgtaccgtagaaaatttggatctaaacaaatctccttcttatcattacgttgagaagaattttgtgacatattattctcgtcgtggagggggtgcaagtaagagtgagttggtacgagaagacttggagggggaaggagagaagaagagacctttgcttggaaaagatttatgggaggcaggaccatcaaagagacattgcggtactgatgatgtggatgcagcgagggtgatgaaaagggagttagtacaagaggggcttgatctaagtgaacatttgtcggcgagtgttcattggtcgtcgtacggagtcaaccctgaatacccgacagaagtagcatgccaatatgtgaatccagatgattactttgatgtcgaattgagtggtggtcacgattctgtctcagtagaagtcaatagagatgatgttgacgaggaggcaagtgttgagcaatatgatgttgaatttgctgaagactctgatgatgaccgtccattccctccacttactaataatgacaagttagcattagaggaatgtcgtgcgtttgagaaggtgtttgggaggaagccggacattcctgagtttagggacctaacacatgcccatggtgcactactagatggcggcatcaacctagatcagttgccagaaccattccaggtggatggtctcagaaagggtttagagttcccatccatggtcgcattgaagctatggctccaggagtacgccatcgtgcaccatcgtccataccgtgttgtcaattctgccgcaaataggaggtacactgttaaatgtgaaaacccacggtgcaaatggaaggtccatgcaactaagaggtctagtggcacgtggaggatatcacgggtaggtaaggaacatagttgtgctactgccgaaggttcagggagccaccggcaactgacatcaaagttcatagcaaataggttatgcaatgccataaaactgcaacctacactctctgcttctgtgttagctttgtatatatttgaggttttccagtatagggtgaagtatggcaaggcttggagggcacgagaggaggctatgaagctcatttacggtgaatggggtgaagcgtatgtccgtttgcccactttgctgcaagccattaagcagaggaatcccagtatggtctaccacatcgatactcatcctgatagggttgtcaacgttgatggagtgaccaagaaaatttttatgcgtgcattctggtgctttggtccttccattgaggcttttaagcattgtaggccagtactagctatagatgcaaccttcctaactgggaaatacggtggtgccttgatgactgcattatcagctgatgcggaggaccaacttgtacctttagcttttgccttggtggagaaagagaattcacgagattggtgctggtttatcgatcttgtccgacgggttgtggttgggccgcatagggaggtttgtattatctcagatcgacatgctggattgccatcggttcaccaccggtggtgcatgaggcacttcagtgctaatttccacaaggccggtgcggacaagcatcagacaaaagagctcctaagaatatgtcagattgacgagaagtggatatttgagagggatgttgaggcactaaggcagcgtattcccgaaggtcctcgtaaatggcttgaagatgagttgttggataaagataagtggtctcgtgcatacgatagaaatggccgctggtggggttacatgacaaccaacatggccgaacagttcaatagcgtgctagttggtgttcgtaagcttccagtgacggccatcgtatcatttacgttcatgaagtgcaatgactacattgtgaacagacatgatgaagctttgaagcgagtccagttagggcagcgttggtccaccaaggttgacagtaagatgaaggtgcaagaaagtaaggcgaacaaacacactgcaaggtgtttcgataagcagaaaaagacatacgaggtcacagagaggggtggtataacgtgtggtggtgttagattcggcgcaagagccttcaaagttaaaggtgaggggaactcatgttcttgccaaaggccattgctctaccatatgccttgctcacatcttatacacgtttatctgaagattaaaacaagagggaagaggagatcgaaacgattcaagaacgaaatggactcgggtctaggtggttctggaaggaaaccaccttcatgcgttcaacttgatgctgcgccggtgcaaaatagatgctcgttgattcagatgtggatgtggttaagactaccggttggaaggcctaagtggaggcaaagcttcactccttggccctacaatgagccagacatggagaagacagtggcctacctttttgagagtactgacactgcacatgctcaccgggatgtggcatacaagcattatgtcaatgagatggactgcttgcagcctcaacatattaagtggttaccataccacacaaatgaggcttcaagcctgaccctgaactcgatgtgcaatcgagactctgactatttcatgtaccagtgcccattgatttgtttctgggcagttgagtaccaccttccacaccgtgtcatgcgacagttcgggaagaaacaagattggccggttgaggacatctcaactggagttgaattacacaagtatgacagggtgagaacaaagaaggtgaaagactgggggctagagcataatagatacattgatgaatggagaacagccggaaggaacgataggtacatcgagactatacaccaaaatcatcttttctcagagtaccttcgttggctgcataggacatatagactgttcctccgccctacttggacggaagccgacatagaggatgaccgcgactccgatgagggacggaatccctatgatgtccggactagagttggatatcaaatggagcacgccccacttagagacagagtctcgagagagctcctcaggagtgtgaatgaaatggggcatgccctccaagctccgaggggtgatgaggacacggagaacacgctccgcaatgttttagagaaagttcgtcaaaggtgccggaaacttgcagcaagattaggttgcaggtcggttggattggacgacgtgtaccaaccggggagactaccaccaccactacctcaatccgcgcgtccaagtactgctcgacactctatcaggatagaagagcgtgaaggagttggtggctcgtcgtcgtcacgcattaagcaagggaggggaaaggggaaggcgccggctccacctagcgacgacgatgacgatgaggacgaggaggatgaggactacgtcgcaccagacgccgagaagatagacatgtcacagcttcccgacgcgcctcaggggacgcaacccacgcaatacaacttgcgatccactcgggcagcgaaaaagagggaggcagagggcggcgccaaccaccctggcgccgaggttgggaagggcggcgccagccagtgccgcgaggcagaagggtttcgggctgggggagggcggcgccagctaccctggcgccgtggtccatga

SEQ ID NO: 62889 - DNA, 375 bp, Oryza sativa
  Clone ID: PAT_MRT4530_64184C.1
atgggagccggaggggagagaggagaggccgccgagctgcttcgatctggatctggacaacagaggagaaaagaaggggacgtccaacagaggagaaaagaaagggacagcggtgtcaatgccgaggaagctctccaggagcgtggcgtcgacgcgctccatgctcgccgtcatggcatccttccggccgaggggcacgccgcggatgcgggggctgccacaaacaggagctcgggagaaaggatttgtggaagtgataccaaccagaagcgacgtctctcactctcttggatgctatggtatcagtcccaacctcccaatctgacatcgattgctcatcaaacagtatgctttaagaactcaaaagtatggtaa

SEQ ID NO: 62890 - DNA, 4500 bp, Oryza sativa
  Clone ID: PAT_MRT4530_64185C.1
atggcggcgccagccacactggcgccgtgctcgtgccaccgtggcactagggctgtcgtggagatggatagacttgttcgtgtttactacggtggtagagtggtggaaccttatgttggtgcacatgttgagtttgaggatatgtcattgaagaccattttgtttcccacccacccaactctagatgaactaaggtcacgagtgaaagaagttcttggatggaccgaggataatgtggagattcgtttttatgggagatacgatgttggtcaagggcataagtatatattaaatgtgataggtcagttggaatgggaagtttactttgatttggtaaaagagtctcagtttagatctctagaggtgtttgcatcaaagttagttcgtaccgtagaaaatttggatctaaacaaatcttcttcttatcattacgttgagaagaattttgtgacatattattctcgtcgtggagggggtgcaagtaagactgagttgtcgtcgtacggagtcaaccctgaatacccgacagaagtagcaggccaatatgtgaatccagatgattactttgatgtcgaattgagtggtggtcacgattctgtctcagtagaagtcaatagagatgatgttgacgaggaggcaagtgttgagcaatatgatgttgaatttgctgaagactctgatgatgaccgtccattccctccacttactaataatgacaagttagcattagaagaatgtcgtgcgtttgagaaggtgtttgggaggaagccggacattcctgagtttagggacctaacacatgcccatggtacactactagatggcggcatcaacctatatcagttgccaaaaccattccaggtggatggtctcagaaagggtttagagttcccatccatggtcgcattgaagctatggttccaggattacgccatcgtgcaccatcgtccataccgtgttgtcaattctgccgcaaataggaggtacactgttaaatgtgaaaacccacggtgcaaatggaaggtccatgcaactaagaggtctagtggcacgtggaggatatcacggtgctttcgtccttccattgaggcttttaagcattgtaggccagtactagctatagatgcaaccttcctaactgggaaatacggtggtgccttgatgactgcattatcagctgatgcggaggaccaacttgtacctttagcttttgccttggtggagaaagagaattcacgagactggtgctggtttatcaatcttgtccgacgggttgtggttgggccgcatagggaggtttgtattatctcagatcgacatgctagtataatgaatgccatgacgactcctgttccaggattgccaccggttcaccaccgatggtgcatgaggcacttcagtgctaattttcacaaggccggtgcggacaagcaccagacaaaagagctcctaaggatatgtcagattgacgagaagtggatatttgagagggatgttgaggcactaaggcagcgtattcccgaaggtcctcgtaaatggcttgaagatgagttgttggataaagataagtggtctcgtgcatacgatagaaatggccgccggtggggttacatgacaaccaacatggccgaacagttcaatagcgtgctagttggtgttcgtaagcttccagtgacggccatagtatcatttacgttcatgaagtgcaatgactactttgtgaacagacatgatgaagctttgaagcgagtccagttagggcagcgttggtccaccaaggttgatagtaagatgaagaaaaagacatacgaggtcacagagaggggtggtataacgcgtggtggtgttagattcggcgtaagagccttcaaagttgaaggtgaggggaactcatgttcttgccaaaggccattgctctaccatatgccttgctcacatcttatacacgtttatctgattcatgcaattgatgaggaatctcccaaccgaatgccgtatcagttctcttcaagagccgttgtgaacacatgggcaagtcgctttgagccatacctcgaccccacacagtggccaccgtacgatggtgaagaatttgttgctgacccaaatttgaagattaaaacaagagggaagaggagatcgaaatggactcgggtctgggtggttctggaaggaaaccaccttcatgcgttcaacttgatgctgcgccggatggccgaggagagacaaccgccgacttacccagccttggaggcgtactacgaggcccgtcatcgcggggctgcgatcgaggcggggagggtacttcaaccgctccgagtcagagctcatgcccccccagtgttcgacgataggtacatcccatacctaagggcagccgggttgctcggggtggccttggtcgtgagcagaggaatgccagtgttcaacgctcctgcgttgacagcaattgtggacagatggaggccggagacacacagcttccacctccctagtggtgagatgaccatcactctacaggatgtggctatgatcttggccctcccattacgggggcatgccgtgacgggcaggacagagactcctggatggcgtgcacaagtggagcagctgtttggcattccactgaacattgagcaggggcaaggggggaagaagaagcagaatggaatacccctgtcttggctgagtcagaacttctcacatcttgacgacgacgctgagccatggcgtgttgagtgttatgcccgtgcatacatcttgcacttgttaggaggggttctgtttcctgatgctgggggtgacattgcttcggcgatatggattcctttggtcaccaaccttggtgatctaggccgtttcagttggtgctcagcagtgttggcgtggacatgtagacagctctgtgaggcctgttgtcgtcaggcaccatcatccaacatgagtggttgtgtgctattgattcagctgtggatatggttaagactaccggttggaaggcctaagtggaggcaaagcttcattccttggccctacaatgagccagacatggagaagacagtggcctacctttttgagagtactgccactgcacatgctcaccgggatgtggcatacaagcattatgtcaatgagatggactgcttacagcctcaacatattgaatggttaccataccacacaaatgaggcttcaagcctgaccctgaactcgatgtgcaatcgagactctgactatttcatgtatgacagggtgagaacaaagaaggtgaaagactgggggctagagcataatagatacattgatgaatggaggacagccggaaggaacgacaggacatatagactgttcctccaccctacttggacggaagccgacatagatgatgaccgcgactccgatgagggacggaatccctatgatgtccggactagagttggatatcaaatggagcacgccccacttagagacagagtctcgagagagctcctcaggagtgtgaatgaaatggggcatgccctccaagctccgaggggtgaaagttcgtcaaaggtgccggaaacttgcagcaagattaggttgcaagtcggttggattggacgacgtgtaccaaccgcggagactaccaccactactacctcactccgcacgtccaagtaccgctcgacactgatagaagagcgtgaagaaattggtggctcgttgtcgtcacgcattccgcaagggaggggaaaggggaaggcgccggctccacctagcgacgacgatgacgacgacgacgaggaggatgaggactacgtcgcaccagacgctgaggagatagacatgtcgcagcttcccgacgcgcctcaggggacgcaacccacgcaatacaacttgcgatccactcgggcagcgaaaaagagggaggcagagggcggcgccaaccaccctggcgccgcggttggggagggcggcgccagccagtgccgcgaggcagaagggtttcgggctgggggagggcggcgccagccgaggcccggaggcagaagggcttcgatggggggaggaggggggcaccagccaccctggcgctgcggtctgggggggcgccagccgttgcccggaggcagaagcgaaaattttgagggggggggggagaaagttggtggggcccgcagaggaggggcgcgccagccatgctggcgccgtggtatgaggggcggcgccactctggctggcgcccccttcggcctagtcagcacctctacgacagccctactgccacggtggcacaggcacgacgccagtgtggctggcgccgccatgttggggcgtagcgcggcaggcgtggtggggatgggccggtttggcaggcccggtacgatgctctggcactttctcgctggcccagcgaaggagctcctcgcgggccgagaacggatagcaattggacctgctagtttcggcgaactacggcctgtcaccgactcaccgtgcggtgcggacgcgactcgatga

SEQ ID NO: 62891 - DNA, 339 bp, Oryza sativa
  Clone ID: PAT_MRT4530_64186C.1
atgaacacatgcagctgtagatccaagcgccgtcatcttgtatgcagcctccaccaacggatcggaggtcatcccagtggcgctgcgaccaccaagggagttgcttggaaggaggtgccaccgcctcctcttgttgctgctgtccctcccgtcgtcatcttccatagtgatggcggtgccatcggtggccacagatccgatggcgtccctgccaacgaccaccacgccaccactgctccaccccaccaggtcgcgcagtcaccggccaccgcttgggatggcctcgcccgcatggctgccaccgccgcactgtcgccagatcagcgtaaatcgtggtag

SEQ ID NO: 62892 - DNA, 4038 bp, Oryza sativa
  Clone ID: PAT_MRT4530_64187C.1
atggatggaggcagcggcagcagcgcgtgcttgatcgtcctcttcgacggcggcggcgcaaatgccgtcgtgcatgagcttcgccttgagagctttggtggtgatgggcgttgtcagtgctatgcttcgaggagtgcaccgtatatacagatccatttacacgtgcgcacccggtgctcacacccatatatgcatgcactgctagagcagatggatagacttgttcgtgtttactacggtggtagagtggtggaaccttatgttggtgcacatgttgagtttgaggatatgtcattgaagaccattttgtttcccacccacccaactctagatgaactaagatcacgagtgaaagaagttcttggatggaccgaggataatgtggagattcgtttttatgggagatacgatgttggtcaagggcataagtatatattaaatgtgatagggggtgcaagtaagactgagttggtacgagaagacttggagggggaaggagagaagaagagacctttgcttggaaatgatttatgggaggcaggaccatcaaagagacattgcggtagtgatgatgtggatgtagcgagggagatgaaaagggagttagtacaagaggggcttgatctaagtgaacatttgtcggcgagtgttcattggtcatcgtacggagtcaaccctgaatacccgacagaagtagcaggccaatatgtgaatccagatgattactttgatgtcgaattgagtggtggtcacgattctgtctcagtagaagtcaatagagatgatgttgacgaggaggcaagtgttgagcaatatgatgttgaatttgctgaagactctgataatgaccgtccattccctccacttactaataatgacaagttagcattagaggaatgtcgtgcgtttgagaaggtgtttgggaggaagccggacattcctgagtttagggacttaacacatgcccatggtgcactactagatggcggcatcaacctagatcagttgccagaactattccggctccaggattacgccatcgtgcaccatcgtccataccgtgttgtcaattctgccgcaaataggaggtacactgttaaatgtgaaaacccacggtgcaaatggaaggtccatgcaactaagaggtctattggcacgtggaggatatcacgggtaggtaaggaacatagttgtgctactgccgaaggttcagggagccaccagcagctgacatcaaagttcatagcaaataggttatgcaatgccataaaactgcaacctacactctttgcttctgcgttagctttgtatatatttgaggttttccagtatagggtgaagtatggcaaggcttggaaggcacgagaggaggctatgaagctcatttacagtgaatggggtgaagcgtatgtccgtttgcccactttgctgcaagccattaagcagaggaatcccagtatggtctaccacatcgatactcatcctgatagggttgtcaacgttgatggagtgaccaagaaaatttttatgcgtgcattctggtgctttggtccgtccattgaggcttttaagcattgtaggccagtactaactatagatgcaaccttcctaactgggaaatacagtggtgccttgatgactgcattatcagctgatgcggaggaccaacttgtacctttagcttttgccttggtggagaaagagaattcacgagactggtgctggtttatcgatcttgtccgacgggttgtggttgggccgcatagggaggtttgtattatctcagatcgacatgctggtataatgaatgccatgacgactcctgtttcaggattgccaccggttcaccaccgatggtgcatgaggcacttcagtgctaatttccacaaggccggtgcggacaagcaccagacaaaagagctcctaaggatatgtcagattgacgagaagtggatatttgagagggatgttgaggcactaaggcagcgtattcccgaaggtcctcgtaaacggcttgaagatgagttgttggataaagataagtggtctcgtgcatacgatagaaatggccgccggtggggttacatgacaaccaacatagccgaacagttcaatagcgtgctagttggtgttcgtaagcttccagtgatggccatagtatcatttacgttcatgaagtgcaatgactactttgtgaacagacatgatgaagctttgaagtgtttcgataagcagaaaaagacatacgaggtcacagagaggggtggtataacacgtggtggtgttagattcggcgcaagagccttcaaagttgaaggtgaggggaactcatgttcttgccaaaggccattgctctaccatatgccttgctcacatcttatacacgtttatctgattcatgcaattgatgaggaatctcccaaccgaatgccgtatcagttctcttcaagagccgttgtgaacacatgggcaagtcgctttgagccatacctcgaccccacacagtggccaccgtacgatggtgaagaatttgttgctgacctaaagttgaagattaaaacaagagggaagaggagatcgaaacgattcaagaacgaaatggactcgggtctgggtggttctggaaggaaaccaccttcatgcgttcaacttgatgctgcgccggtgcaaaatagatgctcattgtgtcaccaggagggtcacaagaaaactaagtgtcctaagcgtccaaaaaagaagaagatggccgaggagagacaaccgccgacttacccagccttggaggcgtactacgaggcccgttatcgcggggctgcgatcgaggcagggagggtacttcaaccgctccgagtcagagctcatgctcccccagtgtttgacgataggtacatcccgtacctaaggacggaaggcctaagtggaggcaaagcttcactccttggccctacaatgagccaaacatggagaagacagtggcctacctttttgagaatactgccactgcacatgctcaccaggatgtggcatacaagcattatgtcaatgagatggactgcttacagccttaacatgtatgacagggtgagaacaaagaaggtgaaagactgggggctagagcataatagatacattgatgaatggaggacagccggaaggaacgacaggacatatagactgttcctccgccctacttggacggaagccgacatagaggatgaccgcgactccgatgagggacggaatccctatgatgtccggactagagttggatatcaaatggagcacgccccgcttagagacagagtctcgagagagctcctcaggagtgtgaatgaaatgggccatgccctccaagctccgaggggtggtgaggacacggagaatacactccgcaatgttttagagaaagttcgtcaaaggtgccggaaacttgcagcaagattaggttgcaagtcagttggattggacgacatgtaccaaccgcggagactaccaccaccactacctcactccgtgcgtccaagtaccgctcgacactccatcaggatagaagagcgtgaagaagttggtggctcgtcgtcgtcacgcattccgcaagggaggggaaaggggaaggcgccggctccacctagcgacgacgatgacgacgacgacgaggaggatgaggactacgtcgcaccagacgctgaggagatagacatgtcgcagcttcccgacgcgcctcagaggacgcaacccacgcaatacaacttgcgatccactcgggcagcgaaaaagagggaggcagagggcggcgccaaccaccctggcgccgcggttggggagggcggcgccagccagtgccgtgaggcagaagggtttcgggctggcgggagggcggtgccaactaccctggcaccgtggtccatgagggcggcgccagccgaggcccggaggcagaagggcttcgatggggggaggaggggggcaccagccaccctggcgccgcggtctgggggggcgccagccgttgcccggaggcagaagcgaaaattttga

SEQ ID NO: 62893 - DNA, 739 bp, Oryza sativa
  unsure (1)..(739): unsure at all n locations
  Clone ID: PAT_MRT4530_64188C.1
gtggccgtgtccgtgttcttggcgctggcgttcgcgttctacgtgttcttcgccccgttcgtcgggaagaaggtgttccaggacgtggccgtggggctctacacgcctctggtttcatttgtcttcttcatgtacatctggtgtgctgcaacagacccagctgacccaggtgtcttgaaatcaaagaagtacctaagattgtatggaagcggcaaacacaagcatccgaaggaattcagacatggcatttcagattcagggttgcaagtagagggaactggagaaaagcaagaacatgagtttgcagctgctagtgaaaagtcaacaactcgctacaaagacaataacccatcttgctgcagttcaacttcctctgtttttctcattattttctaccctctctatcttgttttttcctgctgccaaccacgggaatggtctgagcagcaagccagtgaggaaggaatgtttttctgcagcctctgtgaagttgaggtattgaagtacagtaagcactgcagagtttgtgacaaatgtgttgatggttttgatcatcactgcaggtggctcaacaattgcattggaaaaagaaactatatgaggttttttattctgatgacttcttccctattcttgcttatcctacaatcagcagttggagtattggtgctagtgttctgctttgntgagcgaaaggaattctccattcaaattgtgtcaaagcttggaagcagcttct

SEQ ID NO: 62894 - DNA, 4086 bp, Oryza sativa
  Clone ID: PAT_MRT4530_64189C.1
atggataaacttgttcgtgtttactacggtggtagagtggtggaaccttatgttggtgcacatgttgagtttgaggatatgtcattgaagaccattttgtttcccacccacccaactctagatgaactaaggtcacgagtgaaagaagttcttggatggaccgaggataatgtggagattcgtttctatgggagatacgatattggtcaagggcataagtatatattaaatgtgataggtcagttggaatgggaagtttactttgatttggtaaaagagtctcagtttagatctctagaggtgtttgcatcaaagttagttcgtaccgtagaaaatttggatctaaacaaatctccttcttatcattacgttgagaagaattttgtgacatattattctcgtcgtggagggggtgcaagtaagactgagttggtacgagaagacttggagggggaaggagagaagaagagacctttgcttggaaatgatttatgggaggcaggaccatcaaagagacattgcggtactgatgatgtggatgaagcgagggtgatgaaaagggagttagtacaagaggggcttgatctaagtgaacatttgtcggcgagttttcattggtcgtcgtacggagtcaaccctgaatacccgacagaagtagcaggccaatatatgaatccagatgattacttttatgtcgaattgagtggtggtcacgattctgtctcggtagaagtcaatagagatgatgttgacgaggaggcaagtgttgagcaatatgatgttgaatttgctgaagactctgatgatgaccgtccattccctccacttactaataatgacaagttagcattagaggaatgtcgtgcgtttgagaagctatggctccaggagtacgccatcgtgcaccatcgtccataccgtgttgtcaattctgccgcaaataggaggtacactgttaaatgtgaaaacccacggtgcaaatggaaggtccatgcaactaagaggtctagtggcatgtggaggatatcacgggtaggtaaggaacatagttgtgctactgccgaaggttcagggagccaccggcagctgacatcaaagttcatagcaaataggttatgcaatgccataaaactgcaacctacactctctgcttctgcgttagctttgtatatatttgaggttttccagtatagggtgaagtatggcaaggcttggagggcacgagaggaggctatgaagctcatttacggtgaatggggtgaagcgtatgtccgtttgcccactttgctgcaagccattaagcagaggaatcccagtatggtctaccacatcgatactcatcctgatagggttgtcaacgttgatgtagtgaccaagaaaatttttatgcgtgcattctggtgctttggtccttccattgaggcttttaagcattgtaggccagtactagctatagatgcaaccttcctaactaggaaatatggtggtgccttgatgactgcattatcagctgatgcggaggaccaacttgtacctttagcttttgccttggtggagaaagagaatttacgagactggtgctggtttatcgatcttgtccgacgggttgtggttgggccgcatagggaggtttgtattatctcagatcgacatgctggtataatgaatgccatgacgactcctgttccaggattgccactggttcaccaccggtggtgcatgaggcacttcagtgctaatttccacaaggccggtgcggacaagcatcagacaaaagagctcctaaggatatgtcagattgacgagaagtggatatttaagagggatgttgaggcactaaggcagcgtattcccgaaggtcctcgtaaatggcttgaagatgagttgttggataaagataagtggtctcgtgcatacgatagaaatggccgccggtggggttacatgacaaccaacatggccgaacagttcaatagcgtgctagttggtgttcgtaagcttccagtgacggccatagtatcatttacgttcatgaagtgcaatgactacttcgtgaacagacatgatgaagctttgaagcgagtccagttagggcagcgttggtccaccaaggttgacagtaagatgaaggtgcaagaaagtaaggcgaacaaacacactgcaaggtgtttcgataagcagaaaaagacatacgaggtcacagagaggggtggtataacgcgtggtggtgttagattcggcgcaagagccttcaaagttgaaggtgaggggaactcatgttcttgccaaaggccattgctctaccatatgccttgctcatatcttatacacgtttatctgattcatgcaattgataaggaatctcccaaccgaatgccgtatcagttctcttcaagagccgttgtgaaaacatgggcaagtcgctttgagccatacctcgaccccacacagtggccatcgtacaatggtgaagaatttgttgctgacccaaatttgaagattaaaacaagagggaagaggagatcgaaacgattcaagaacgaaatggactcgggtctgggtggttctggaaggaaaccaccttcatgcgttcaacttgatgctgcgccggtgcaaaatagatgctcgttgtgtcaccaggagggtcacaagaaaactaagtgtcctaagcgtccaaaaaagaagaagtccaaaaaaaatttaagtgttagggaggtacttcaaccgctccgagtcagagctcatgcccccccagtgttcgacgataggtacatcccgtacctaagggctgccgggttgctcggggtggccttggtcgtgagcagaggaatgccagtgttcaacgctcctacgttgacagcacttgtggacagatggaggcctgagacacacagcttccacctccccagtggtgagatgaccatcactctacaggatgtggctatgatcttggccctcccattacgggggcatgccgtgacgggcaggacagagactcctggatggcatgcacaaatgtggatgtggttaagactaccggttggaaggcctaagtggaggcatagcttcactccttggccctacaatgagccagacatggagaagacagtggcctacctttttgagagtactgccactgcacatgctcgggatgtggcatacaagcattatgtcaatgagatggactgcttgcagcctcaacatattgagtggttaccataccacacaaatgaggcttcaagcctgaccctgaactcgatgtgcaatcgagactctgactatttcatgtatgacagggtgagaacaaagaaggtgaaagactggaggctagagcataatagatacattgatgaatggagaacagccggaaggaccgataggtacatcgagactatacaccaaaatcatcttttctcagagtaccttcgttggctgcataggacatataaactgttcctccgccctacttggacggaagccgacatagaggatgaccgcgactccgatgaggggcggaatccctatgatgtccggactagagttggatatcaaatggagcacgccccacttagagacagagtcaaagttcgtcaaaggtgccgaaaacttgcagcaagattaggttgcaggtcggttggattggacgacgtgtaccaaccggggagactaccaccaccactacctcaatccgcgcgtccaagtactgctcgacactccatcaggatagaagagcgtgaaggagttggtggctcgtcgtcgtcacgcattaagcaagggaggggaaaggggaaggcgccggctccacctagcgacgacgatgacgatgaggacgaggaggatgaggactatgtcgcaccagacgccgaggagatagacatgtcacagcttcccgacgcgcctcaggggacgcaacccacgcaatacaacttgcgatccactcggacagcgaaaaagagagaggcagagggcggcgccaaccaccctggcgccgaggttgggaagggcggcgccagccagtgccgcgaggcagaagggtttcgggctgggggagggcggcgccagctaccctggcgccgtggtccatga

SEQ ID NO: 62895 - DNA, 705 bp, Oryza sativa
  Clone ID: PAT_MRT4530_6418C.1
aatcttttgattcatcaaccatcaaactatgataatcaccggctattttggcgttaacaagtttacatcttttcggatttagaacctcatgtagatgtggataaaacatgcaatttagagagacttgttattgcaaatcattatctcgagtttctctagttttgatttgaagaaacatgttgctttaaatgaactatgcgaagagcaccatatggaaaaaccgagaatggttttccgtgaagaaggggaggatgggtgtgaccatgaaaactatggatacaactgttgctcacatcatggatcaacaagaagacatcaagatggcctccaagtgttggaacccaattcgaccacctgctacattgccgacttcaaatggccgccaaagatccatacgagcttcattttaggtccatgagtacttgatggaaagattttagtgtcacctttctaatggatctagtcttgtcgccaaattccatctctatcggccacaattgaagaaacaaggtattgcgtcacctgtaataggcctatgggcttgtaacttcgtctgggaccccggcccatgtggggttgtttgcaggaataagtttgatctacacagacaagatcaacaacccatagagaggtgtatcaatcgctaaggtgcaacacaacgtcttgtacggttgtagtcgggtcgtcaacgtttctcccaaaacg

SEQ ID NO: 62896 - DNA, 2657 bp, Oryza sativa
  Clone ID: PAT_MRT4530_64190C.1
ttttttttttttttttttttggggattaacccaggagggtgaaaatatatcaacctctgattgattccattgtcatctgagagcaaaattacaaccattttggatgcaccacgaatgaatcaactttttttccctacctaacaattcagagttcaccaaaaacatccaaccaattcagaattcacgcagcatccaaccatctttgaaacaagatttgaaactatgggggaccagaaaccgatggaaaacgagacaatctacacggaccatttacaatttttcattcatctgaaagaagctgaggatggaattgatttggagtcaagacaacctgttcttcggcacgaggatgccagatgaagccacactttgatcagaactgaggatgatgcttgcccagttcgaagatcgatgaactatccgcgatgggatgcgatcactgtcttcgcctcctgatgcttcatacccgtcgctggtggatcttgacagctcaatcccttgctgtggagtgcttcctggggctgtaagagttgtcagctgcaggtcttcagctgcagatgaggagacagccgagactcggtacagatgaagatcaggggagtccaagctgctgtctggtgatgaaccaccaccattagcagaggatgcagctctacttggatgaaaagcgcttcgcgcctcaagctgcaatggtgctaaactggataatgtttcaggaaccaactcactgccatgactatcaagagcatctgcggaaatcttggcaacaggtttaagagagaaatcattgtgaggtcttgctcttctgcttgttctcctcttgttatcagggcctagatcaatcctactgctgcttgtgcctccatagctactgtccgtttcatggccaactgcatactcatcttttctgatgggcagtagaactttggacttctttcgtgcctctgcagcaactcttgaaacttcctccgcgttaagacgagcgagtgcccatgggctaatttttataccacctgaacccttcttcctccttacttcatcttctttcctcttggaagtagaattatgcgatgaaccagcctctgacggaataacatcgaactgatcttcaagaaataatcttggaggagtacaccatgaaccacgacgtcgtccaccaaaggaacttgtactgctaagtccagtgtaggagcttacacgagacatctgtggactctgctgcccaccaacctcttcttgttcttgctctcttatggcgatgatgtagtcatatgtactaattcccttcttgattagaagaatgtgaaaaaagagaagttgcgcaattggcagcaaagcaactatggctagaatggtacaagatgccaccacaataacataaggcaccacagagaagctgcttccaagctttgacacaatttgaatggagaattcctttcgctcaacaaagcagaacactagcaccaatactccaactgctgattgtaggataagctggcccaaagtgcacaaatcatgtagaccaagaatagggaagaagtcatcagaataaaaaacctcatatagtttctttttccaatgcaattgttgagccactgttgagattgaggagaaaaggagagttactaaatactcgctaatggatgaataagaaatgatctgtttcaggataaccttacccctgcagtgatgatcaaaaccatcaacacatttgtcacaaactctgcagtgcttactgtacttcaatacctcaacttcacagaggctgcagaaaaacattccttcctcactggcttgctgctcagaccattcccgtggttggcagcaggaaaaaacaagatagagagggtagaaaataatgagaaaaacagaggaagttgaactgcagcaagatgggttattgtctttgtagcgagttgttgacttttcactagcagctgcaaactcatgttcttgcttttctccagttccctctacttgcaaccctgaatctgaaatgccatgtctgaattccttcggatgcttgtgtttgccgcttccatacaatcttaggtacttctttgatttcaagacacctgggtcagctgggtctgttgcagcacaccagatgtacatgaagaagacaaatgaaaccagaggcgtgtagagccccacggccacgtcctggaacaccttcttcccgacgaacggggcgaagaacacgtagaacgcgaacgccagcgccaagaacacggacacggccaccacctggagagggtgatagggaagctgccacccatgccgcctcatggcgacgcgtcgccaagaaccaaacccccacaatcccaaacagaacgaagaaaccaagaaaagaacaacttttctcgcgatcaatgcgaggaggagcacggggtgattctcccaagaatcaagaactcgcgggtttcatctgccctccatcccctgctacccgcaaccgcatccgtcgtgggctacgagaggaggggaagagaaaaaaaaaaaaagggaaggaagaagagaagaggagagaccaaaggaggaggggggcattaaatgcagctctgctcagatttactggagagaagccagtagccagtagccagccagcgagggaaggaagcaagcaaagcgaggggggatttcgcttcacgtgaagc

SEQ ID NO: 62897 - DNA, 2883 bp, Oryza sativa
  Clone ID: PAT_MRT4530_64191C.1
atggcactgctccacgcgaccaccggcgctagagagctcggttgggctaaccgaggacaccaacgcgaagaggacgacgacgcgaactcaccggtgcaaagaacaacgacggacgacgacgaacgacggccggcgacgaggttcaacggcggctcgacttgggtcaacaatggcgacggcgctccggcggtcttcggcggctgcgaaggggcggacggggttcctctcctccgatgtgacaatgaccgtccattccctccactaactaacaatgacaagttagcattagaggaatggcgtgcatttgagaaggtgtttgagaggaagccggatattcctgagtttagggacctaacacatgcccatggtgcaatactagatggcggcatcaacctagatcagttgccagaaccattccaggtggatggtctcataaagagtttagagttcccatccatggtcacattgaagctatggctccaggagtacgccatcgtgcaccatcgtccataccgtgttgtcaattctgccgcaaataggaagtacactgttaaatgtgaaaaaccatggtgcaaatggaaggtccatgcaactaagaggtctagtggcacgtggaggatatcacgggttggtaaggcacatagctgtgctactgccgaaggttcagggagccaccggcagctgacatctaacttcatagcaaatagtttatgcaatgccataaaactgcaacctacactctctgcttctgcattagctttgtatatatttgaggttttccagtatagggtgaagtatggcaaggcttggagggcacgagaggaggctatgaagctcatttacggtgaatggggtgaagcgtacgtccgtttgcccactttgctacaagccattaagcagagaaatcccagtatggtctaccacatcgatactcatcctgatagggttgtcaacgttgatggagtgaccaagaaaatttttatgcgtgcattctggtgcgttggtccttccattgaggcttttaagcattgcaggccagtactagctataaatgcaaccttcctaactggaaaatacggtggtgccttgatgactgcattatcagctgatgcggaggaccaacttgtacctttagcttttgccttggtggagaaagagaattcacgagactggtgctggtttatcgatcttgtccgacgggttgtggttgggcagcacagggaggtttgtattatctcagatcgacatactggtataatgaatgccatgaggactcctgttccaggattgccaccggttcaccaccgatggtgcatgaggcacttcagtgctaatttccacaaggccggtgcagataagcatcagacaaaagagctcctaaggatatgtcagattgacgagaagtggatatttgagagggatgttgaggcactaaggcagcgtattcccgaaggtcctcgtaaatggcttgatagaaatggccgccggtggggttacttgacaaccaacatggccaaacagttcaatagcgtgctagttggtgttagtaagcatccagtgacggccatagtatcatttaccttcatgaagttcaatgattactttgtgaacagacatgatgaagcaatgaagcgagtccagttatgggagcgttggtccaccaaggttgctagtaagatgaagttgccaccatacgatggtgaagaatttgttgctgacccaaatttgaagattaaaacaagagggaagaggagatcgaagcgattcaagaacgaaatggactcgggtcttggtggttctagaaggaaaccaccttcatgtgttcaactagatgctgcgccggtgcaaaatagatgctcgttgtgtaaccaggagggtcacaagaaacctaattgtcctaagcgtccaaaaaagaagaagtccaaaaataaaatagaagtgttagggaggatggccaaggagggacaaccgccgacttacccagccttggaggagtactatgaggcccgtcatcgcggggctgcgatcgaggcggggaggatacttcaaccgctccgagttagaactcatgcccccccagtgtttgacaaaaggtacatcccgtacctaagggcggtcgggttgctcggggtggccttggtcatgagcagaggaatgccagtgttcaacgctcctgcattgacagcacttgtggacagatggaggcctgagacacacagcttccacccccccagtgttggggctcagcagtgttggcgtggacatatagacagctctttgtggatgtggttaagactaccggttggaaggcctaagtggaggcaaagcttcactccttggccctacaatgagccagacatggagaagacagtggcctacctgtttgagagtactgccactgcacatgctcaccgggatgtggcatacaagcattatgtcaatgagatggactgcttacagcctcaacatattgagtggttaccataccacacaaatgaggcttcaagcctgaccctgaactcgatgtgcaatcgagactctgactacttcatgtatgacagggtgagaacaaagaaggtgaaagactgggggctagagcataacagatacattgatgaatggaggacagccggaaggaacgacaggacatatagactattcctccgccctacttggacggaagccgacatagagaaggaccgcgactccgatgagaggcggaatccctatgatgtccggactagagttggatatcaaatggagcacgccccatttagagacagagtctcgagagagctcctcaggagtgtgaatgaaatggggcatgccctccaagctccgaggggtggtgaggacacggagaacacactccgcaatgtttga

SEQ ID NO: 62898 - DNA, 1500 bp, Oryza sativa
  Clone ID: PAT_MRT4530_64192C.1
atgacgcgggcgagggcgcggtcgctgcgccggagccttccgcagccgcagccgcagccgcagccccctacaggaggagcatccaaatccaaatccattgcccacgaatccgaagaaatgattatacgaacgcgccgccggaaggcagaagcggttcttgtcctccacgatccacaagactggagggactgggccaacttacttgctgaaatggtcggggagatcgccggtcggctgctcgccgtcgacgtcgccgagtacatccgcttccgcgccgtgtgcgggccgtggcgcgagcgcaccgccgacccgcgcgtacgacgcctggacgcccgcttccgcccgcgcaactgggcggtgctcaccatcaccccacccccaccacggcggctgcctcctcgccgccgcctcctcaacctcgcgacggcggcctccatcggcgtcgtcctcccggcgctctccacccactgccacctctgcgccgccgacggcctcctcgtcctcttcaacaaggccaccaacctcatctccctcctcgaccctctcaccaacaccatcaccgacttccccgccatcttcctcatggccgccaccgccaccgccgccgccgccgtgccctcctccctatccgcgatgtgccgggatcgccgcttcaacctccgaatcttcaacggcgccgggttcgacgacaccacctccccgcccaccctcgtgctctgcctgagggacacggtgaggagcatcatcgtcgccaagcctggcgattcgcactggacgctggtaaaccccggcgaggcgtcctaccgggagtacgactcccaaggccagctcctcttccactccgtgctctcctggcgcggccgctgctacgtcgcctcgccggagggctccatgtacgtgctggagctacggccgccgttgcctcggttggtggaaatcatcgaccaacgccgcatgtgcccaccagatacgcatcacctgaaccgtgtgctctccttcctcgtcggcagcgggacggcgatgctgatggtgcggtactggattgacatcaagcacttcggtggcgcggaagcctatgatccagcagagctattcacgacggtgggcggtttcaccggccgcctggaggtgttggagctggacgacatcgctaagcccaagagcgagaggagcctcctccccgtgcggagccttgggcgacacgcggcgttcgtgggcaacacgcactgcctgctcatgtccaccgagacgttcccgtctcttgctaccgatgcgatatacctgggctaccgtcttcagcgttacaggacatccaagttcagcgtctacactatcgacgacaggaggattgaaccgccgcaccagttctgcctcgatgaagagtggaggctccatccctctgccaggccttgcaaccttgaccagtacctcgtctgctatgttgaccgcttgcattcctggagcggtgattgtatcagtagcaaattgccccacccctag

SEQ ID NO: 62899 - DNA, 4347 bp, Oryza sativa
  Clone ID: PAT_MRT4530_64193C.1
atgggggcgccggccacactggcgccgccccttctttcacgagtggtggaaccttatgttggtacacatgttgagtttgaggatatgttattgaagaccattttgtttcccacccacccaactctagatgaactaaggtcacgagtgaaagaagttcttggatggaccgaggataatgtggagattcgtttttatgggagatacgatgttggtcaagggcataagtatatattaaatgtgataggtcagttggaatgggaagtttactttgatttggtaaaagagtctcagtttagatctctagaggtgtttgcatcaaagttagttcgtaccgtagaaaatttggatctaaacaaatctccttcttatcattgcgttgagaagaattttgtgacatattattctcgtcgtggagggggtgcaagtaagactgagttggtacgagaagacttggagggggaaggagagaagaagagacctttgcttggaaatgatttatgggaggcaggaccatcaaagagacattgtggtagtcatgatgtggatgcagcgagggagatgaaaagggagttagtacaagaggggcttgatctaagtgaacatttgtcggcgagtgttcattggtcatcgtacggagtcaaccctgaatacccgacagaagtagcaggccaatatgtgaatccagatgattactttgatgtcgaattgagtagtggtcacgattctgtctcagtagaagtcaatagagatgatgttgacgaggaggcaagtgttgagcaatatgatgttgaatttgctgaagactctgatgatgaccgtccattccctccacttactaataatgacaagttagcattagaggaatgtcgtgcgtttgagaagctatggctccaggattacgtcatcgtgcaccatcgtccataccgagttgtcaattctgccgcaaataggaggtacactgttaaatgtgaaaacccacggtgcaaatggaaggtccatgcaactaagaggtctagtggaacgtggaggatatcacgggttttccagtatagggtgaagtatggcaaggcttggagggcacgagaggaggctatgaagctcatttacggtgaatggggtgaagcgtatgtccgtttgcccactttgctgcaagccattaagcagaggaatcccagtatggtctaccacatcgatactcattctgatagggttgtcaacgttgatggagtgaccaagaaaatttttatgcgtgcattctggtgctttggtccttccattgaggcttttaagcattgtaggccagtactagctatagatgcaaccttcctaactgagaaatacggtggtgccttgatgactgcattatcagctgatgcggaggaccaacttgtacctttagcttttgccttggtggagaaagagaattcacgagactgggaggtttgtattatctcagatcgacatgctggtataatgaatgccatgacgactcctgttccaggattgccaccggttcaccaccgatggtgcatgaggcacttcaatgctaatttccacaaggccggtgcggacaagcaccagacaaaagagctcctaaggatatgtcagattgacgagaagtggatatttgagagggatgttgaggcactaaggcagcgtattcccgaaggtcctcgtaaatggcttgaagatgagttgttggataaagataagtggtctcgtgcatacgatagaaatggccgccggtggggttacatgacaaccaacatggccgaacagttcaatagcgtgctagttggtgttcgtaagcttccagtgacggccatagtatcatttacgttcatgaagtgcaatgactactttgtgaacagacgtgatgaagctttgaagcgagtccagttagggcagcgttggtccaccaaggttgatagtaagatgaaggtgcaaaaaagtaaggcgaacaaacacactgcaaggtgtttcgataagcagaaaaagacatacgaggtcacagagaggggtagtataacgcgtggtggtgttagattcggcgcaagagccttcaaagttgaaggtgaggggaactcatgttcttgccaaaggccattgctctaccatatgccttgctcacatcttatacacgtttatctgattcatgcaattgatgagaaatctcccaaccgaatgccgtatcaattctcttcaagagccgttgtgaacacatgggcaagtcgctttgagccatacctcgaccccacacagtggccaccgtacgatggtgaagaatttgttgctgaccgaaagttgaagattaaaacaagagggaagaggagatcgaaacgattcaagaacgaaatggactcgggtctgggtggttctggaaggaaaccaccttcatgcgttcaacttgatgctgcgccggtgcaaaatagatgctcgttgtgtcaccaggagagtcacaagaaaactaagtgtcctaagcgtccaaaaaagaagaagtccaaaaaaaatatatgtgttagggaggtacttcaaccgctccgagtcagagctcatgcccccccactgttcgacgataggtacatcccgtacctaagggcggccgggttgctcggggtggccttggtcgtgagcagaggaatgccagtgttcaacgctcctgcgttgacagcacttgtggacagatggaggcctgagacacacagcttccacctccctaatggtgagatgaccatcactctacaggatgtggctatgatcttggccctcccattacgggggcatgccgtgacgggcaggacagagactcctggatggcgtgcacaagtggagcagctgtttggcattccactgaacattgagcaggggcaaggggggaagaagaagcagaatggaatacccctgtcttggctgagtcagaacttctcacatcttgacgacgacgctgagccatggcgtgttgagtgttatgcccgtgcatacatcttgcacttgttgggaggggttctgtttcctgatgctggggatgacattgcttcggcgatatggattcctttggtcgccaaccttggtgatctaggccgtttcagttggggctcagcagtgttggcgtggacatatagacagctctgtgaggcctgttgtcgtcaggcaccatcatccaacatgagtggttgtgtgctattgattcagctgtggatgtggttaagactaccggttggaaggcctaagtggaggcaaagcttcactccttggccctacaatgagccagacatggagaagacagtggcctacctttttgagagtactgccactgcacatgctcaccgggatgtggcatacaagcattatgtcaatgagatggactgcttacagtctcaacatattgaatggttaccataccacacaaatgaggcttcaagcctgaccctgaactcgatgtgcaatcgagactttgactatttaatgtaccagtgcccattgatttgtttctgggcagttgagtaccaccttccgcaccgtgtcatgcgacagttcgggaagaaacaagactggccggttgaggacatctcaactggagttgaattacacaagtatgacagggtgagaacaaagaaggtgaaagactgggggctagagcataatagatacattgatgaatggaggacagccggaaggaactacaggacatatagactgttcctccgccctacttggacggaagccgacatagaggatgaccgcgactccgatgagggacggaatccctatgatgtccggactagagttggatatcaaatggagcacgccccacttagagacagagtctcgagagagctcctcaggagtgtgaatgaaatggggcatgccctccaagctccgaggggtggtgaggacacggagaacacactccgcaatgttttggagaaagttcgtcaaaggtgccggaaacttgcagcaagattaggttgcaagtcggttgaattggacgacgtgtaccaaccgcggagactaccaccaccactacctcactccgtgcgtccaagtaccgctcgacactccatcaggatagaagagcgtgaagaagttggtggctcgtcgtcgtcacgcattccgcaagggaggggaaaggggaaggcgccgactccacctagcgacgacgatgacgacgaggaggaggaggatgaggactacgtcgcaccagacgctgaggagatagacatgtcgcagcttcccgacgcgtctcaggggacgcaacccacgcaatacaacttgcgatccactcgggcagcgaaaaagaggtacactccgggctcgcaagctattcgacgccaacggaagaagtga

SEQ ID NO: 62900 - DNA, 3792 bp, Oryza sativa
  Clone ID: PAT_MRT4530_64194C.1
atggggccgccgccgcttcctcgagcccagaggcgcggcgcgcgcgcaccggcggcgctgctggtgctgctcacgctcgtcgccagggcgggtgatgcaggacgtggggctcggggatgtggcaccggaggagaccacagcggcggcggcgctcacagccgagctgggccagctcagggcgaagatgatggggttgcgatggccggaggtggagaagaagtaaaggggagctcagtcaggccacactacacggtgtcaggcctgttctactttcctggcatcgtcgggacgttcgactttcgagtaggcgcagcaggacttagggaggcgacgcggcggaggagaatggatagacttgttcgtgtttactacggtggtagagtgatggaaccttatgttggtgcacatgttgagtttgaggatatgtcattgaagaccattttgtttcccacccacccaactctagatgaattaagatctctagaggtgtttgcatcaaagttagtacgtaccgtagaaaatttggatctaaacaaatctccttcttatcattacgttgagaagaattttgtgacatattcttctcgtcgtggagggggtgcaagggaggtaggaccatcaaagagacattgcggtagtggtgatgtggatgcagcgagggagatgaaaagggagttagtacaagaggagcttgatctaagtgaacatttgtcggagagtgtgcattggtcatcgtacggaggcaaccctgaatacccgacgcaagtaatagcaagccaatatgtgaatccagatgattactttgttgtcaaattgagtggtggtcacgattctgtctcagtagaagtcaatagagaggaggttgacgaggaggcaagtgttgagcaatatgatgttgaatttgctaaagactctgatgatgaccgtccattccctccactaactaacaatgacaagttagcattagaggaatgtcgtgcgtttgaaaagctatggctccaggagtacgccatcgtgcaccatcgtccataccgtgttgtcaattctactgcaaataggaggtacactgttaaatgtgaaaacccacggtgcaaatggaagatccatgcaactaagaggtctagtggcatgcagaggatatcacgggttgccattaagcagagaaatcccagtatggtctaccacatcgatactcatcttgatagggttgtcaacgttgatggagtgaccaagaaaaattttatgcgtgcattctggtgctttggtccttccattgaggcttttaagcattgcaggccagtactagctatagatgcaaccttcctaactaggaaatacggtggtgccttgatgactgcattatcaattgatgcggagaaccaacttgtacctttagcttttgccttggtggagaaaaagaattcacgatactggtgctggtttatcgatcttgttctgacgggttgtggttgggccgcacagggaggattgcccccggttcccccccgatggtgcatgaggcacttcagtgctaatttccacaaggccggtgcggacaagcatcaaacagaagagctcctaaggatatgtcagattgacgagaagtggatatttgagagggatgttgaggcactaagacaacgtatttccgaaggtcctcgtaaatggcttgaagatgagttgttggataaagataagtcgtctcgtgcatacgatagaaatggccgccggtggggttacatgacaaccaacatggccgaacagttcaatagcgtgctagttggtgttcgtaagcttccagtgacggccatagtatcatttaccttcatgaagtgcaatgattactttgtgaacaaacatgatgaagtagtgaagcgagtccagtcagaggagcattggtccgccaaggtcgctagtaagatgaaggtgcaaaaaagtaaggcgaacaaacacacttcaaggtgtttcgataagcagaaaaagacatacgaggtcacagagaggggtggtataacgcgtggtggtgttagattcagcgcaagagccttcaaagttgaaggtgaggggaactcatgttcttgccaaaggccattgctctgccatatgccttgctcacatctcatccacatttatctgattcatgcaattgatgaggaatctcccaaccgaatgctgtatcagttctcttcaagggccgttgtgaacacatgggcaagtcgctttgagccatacctcgaccccacacagtggccaccatatgatggtgaagaatttgttgctgacccagatttgaagattaaaacaagagggaagaggagatcgaagcgattcaagaacgaaatggactcgggtcttggtggttctagaaggaaaccaccttcaggtgttcaacttgatgctgcgccggtgcaaaatagatgctcgttgtgtcaccaggagggtcacaagaaacctaagtgtcctaagcgtccaaaaaagaagaagatggccgaggagggacaaccgccgacttacccagccttggaggagtactacgaggcccgtcatcgcggggctgcgatcgaggcgggagggtacatcccgtacctaaggacgaccgggttgctcggggtggccttggtcgtgagcagaggaatgccagtgttcaatgctcctgcattgacagcacttgtggacagatggaggcctgagacacacagcttccacctcctagtgatgtggatgtggctaagactaccggttggcaggcctaagtggaggcaaagcttcactccttggccctacaatgagctggacatggagaagacagtggcctacctgtttgagagtactgccactgcacatgctcaccgggatgtggcatacaagcattatgtcaatgagatggactgcttacagcctcaacatttgagtaccaccttccgcaccgtgtcatgcgacagttcaggaagaaacaagattggtcggttgaggacatctcaactggagttgaattacataagtaatatttcttatctctgtttgtcttggacggaagccgatatagaggaagaccgcgactctgatgaggggcggaatccctacgatgtccggactagggttggatatcaaatggagcacaccccacttagagacagagtctcgagagagctcctcaggagtgtgaatgaaatggggcatgccctccaatctccaaggggtggtgaggacacggagaacacactccgcaatgtcttagagaaagttcgtcaaaggtgccggaaacttgcagcaagattaggttgtaggtcggttggattggacgatgtgtaccaaccgcggagagaaccaccaccactacctcaatccgcgtgtccaagtaccgctcgacactccatcaggatagaagagcatgaagaagttggtggttcgtcgtcatcacgcattccacaagggaggggaaaggggaaggcgccggctccacctagcgatgacgatgacgacgatgaggaggaggatgaggactacgtcgcaccagacgctgaggagatagacatgtcgcagcttcccgatgcgcctcaggggacgcaacccacccaatacaatttgcgatccactcggacagcgaaaaagagatcttcaatttgtagggaggcagagggcggcgccagccaccctagcaccgcggttgggaagggcggcgccagccagtgccacgaggcagaagggtttcaggggggggaggagggcggctccatccaccctatcgccgtggtccaagagggcaactctagccgcggcccggttgcttaa

SEQ ID NO: 62901 - DNA, 176 bp, Oryza sativa
  Clone ID: PAT_MRT4530_64195C.1
ttttctttttttttttagtcaccagagagagctcatactcccacgtctcggagtcgtgaagtgttgagcttgaggggcgcatataagcagacgtcgattacgaggtacacgaggaagacgatgaggtaggaatttcttcatgccccctatgtgactaagagcgtagccatgacaga

SEQ ID NO: 62902 - DNA, 827 bp, Oryza sativa
  Clone ID: PAT_MRT4530_64196C.1
gccgcctctccccgccacaccgacaccctgcgcagttgcgccgccgctccatcctccagcacctaacctcgccccgacaccgccacatgcttcgccgcatgtcctccacttcctctctcttcttgctgccgatgccgctgggctcgagctagcgagtaggtcgatctggctttcaatcagcggccagatctggcgaagagaggaggagcgcatggcggagcgggcctgaagtgtgtagctggcaacgtccccggtgtggtggtggttcactggttcaggtggacaatgcctcgagcttgctagaaatggcgttggcatggagttctccaaggtgaggtggcgaggtatatgtctggcggtgcatggcttgattttcgagtgatgtgggtgctccataagcagtggcaaagctcctatttttttctggccaccagatggaggagggagttgtctcccatcgcctagccgttctctggatgcagcaagccatctcccattagtatctgatttttgccgttctctggatgcagcaagccatcttccattggtatctgattttcgtttgtattccccacaaaaatttgaggtgtttgttttgtgtggtgtcctgcctacaaggtgttcgttgttttccctacaagcatgggaatgtggcaatcttacatgacctgttagtgtgtaagcctgaatggtttgttgggctttagatttggatcctagcttccacttaatttgccctaaacatttgaacctaccttaatgttagcagttaaaatatctaatgaaatgcatcattgaaaaaaaaaaaaaaaaaaaaaaaaaaaaaa

SEQ ID NO: 62903 - DNA, 342 bp, Oryza sativa
  Clone ID: PAT_MRT4530_64197C.1
tcgaactgaactttggagcatgatggattgatggatgatgatatgccttgtgcaccactcacactgtgatgacgtaaaacaccaacagcattattatccttgtgtgaatcggacatatgatgggaatggagtctctttaggacagtcgactgaacgggacaattgtactcagtgttacccgtgcttaggtcctctcctctcaccacgatgttacgggacaattactatacgccttatatcgcgcttaaattcggggacgtatggacgtatggtatatttcactgctgttttggagttttaattctcctttcagtattctttgtaaaaaaaaaaaaaaaaaaa

SEQ ID NO: 62904 - DNA, 405 bp, Oryza sativa
  unsure (1)..(405): unsure at all n locations
  Clone ID: PAT_MRT4530_64198C.1
tcttacggagacgccgactgcctaatctcctgggctcgatctttacttcccaggaggcggacgacgcaggaggaagaggagctattcgctatctcgctgacgcccgcaccaggacacggcgatagagacagaggtgggagatcggtgatgaggaaactggacccctagccgatcatgccgacggagactgtgctcgcggctacacctgagatggctgccgtagcgctggctctggcactgccgagttgccgggaggaggtgaacaggntccccgacggggcaagacagggactttttattcctatccgcgactacacgctcgatgctacggcacgctggcatatttgaacagaagtcaagggccagtgcctgaatttggtggtactacccaaaaagtcttccatc

SEQ ID NO: 62905 - DNA, 383 bp, Oryza sativa
  unsure (1)..(383): unsure at all n locations
  Clone ID: PAT_MRT4530_64199C.1
ctcttttttttatccaccccancaaatttattttttttggggggtttttttaattttttttctgggtttaaccaaaaaacgggcgatgggtgaatacaaatacgggggggaaaggaacactttggaaacaatatgcgcattacagaggctggtaaaggcgaagccccaaaaccgggggggcaggacgaacaaaaaaaaaggttacacaaaaaagccaaaatgcaaaccattcggaccgaccaaagaagaggggttttgaaccttccggggggggccatgcaaaaaaaaggccgaacaacaagatgggtgcccccaaaaataaaggaaaaggcctggataatgcacaaaagaagggtgaagaaaaccccaaaatgggacctttt

SEQ ID NO: 62906 - DNA, 3976 bp, Oryza sativa
  Clone ID: PAT_MRT4530_6419C.1
gcacgaggcatcgctcctgcagccctagccgccgcacctctgcgttctgccgccgccgctgctgttcctgtctccgccgacgccgccgctgccgccggttcagccgtcgtcatccttcgccatcccacctgctcatctccttgcgtggcttgctgcttgttgctgttgcatcgatcagagacgagaaggctccagacagcagagaaagcagttgaacaggagtaacaagggaaggaaaaggtgtggagggttccaacgttgaaggagttgagtcggagtatcgaaggagttaaagcaagtacaagacggacttgtgcgatggataaactgtgttgctttgtatggcactcaaagaatagatggtatattgattcatttttcatataaaagcaacatcttaaactaccattccaattccttctagtcaaattatctttagttaaaacgatccctttaaggagataccacataaaaatcttaatcttaataggcattttaagtttccaaataatcttatttctctctatgtaaccattattaattaaagctaagtacatagatcgaacagaaaattggccattttaatgaaaattccatctaaaaatttcatcctcgtctgttaagttaatatgcacaatggaagcacataaattatgccatctaattagattttgaccaactaaaactcctctaaaagaaacattaagcggaacagaacccataacattagcaattgaggcatttttccttctaactatagaaaacaacgaggggtacttttccttcaaagaatagttccctagtcacttatcctcccagaatcttactcccagaatcttacttgttcaccattattaataatccaggaagtcatatttaaaaatgaattcttaactttcataagacaaccaaagatagtagaatattgttcataaaagtcctttgccccattaatggtaccaacatctttagccctcttaattagtagagctagcatatcagccactatgttaaagagaataggagacaaaggatacccttgcctgaggcctttgtaagtttgaaaattattcccaatttgatcatttactttaataccaacatgaccaccctgaaaaaaagaagcattatgaaaatctttaaaaagatctaacaagtcggctttaataccattccaaaacacttggtaaaactcagctggaaatccatcagcacccggagccttgttgtgttccatttggaaaattgcctctttaatctcattttcggtaaattcttgagttaaagcctcattctctaattgagatacttgagggatatcatcaattttactctcatcaagctgaagatcataatcatctggaggaccaaataaaccatttgcaaccaaatgaaagtacttagtattagaatcaccctccaagatatctttagtcttagccctttgataccacttaatttcctcttctctcagaagcgtagataatctatttctataatacactctaatatcaatttcctcctctctaatcaaggaagacaatatggtattgtctaactggttgtagtttggctgactagttagaatactagtctgactattcagaataccaggcatgacctgcaaaggcacaacatcttcttgaacaggctgtagagaaggagcactggcctgctgctttccactttttatatcttccttcctcttcttgcggtcccttcttattgtgattaactccttggcagtagctacagtgtatttgcacaccatgtttcgatatttttgttcctccttcaagctcttgaggctgctttcttctacatctactaggctttcgactttcttttcataaactggtgggttgaccttcactccattcatcttcgcccaagtagttttgtctctaacaggcattatattaaatccatatgcttccataaatttctcagcaggcaagacatagcatgtatttgctatttctgcatttttctcaacctttttctttatttttgggcatatatttcccgaccacttctttgcgcactcctcctgcttattatgtatcctattcatgatctggctcctaatcttctcaagcatggacaagattggaagctctctagcttcaagaatatacttgttgaacacctcagaattgttgttcagcaaaatatcacacttgggaaaaccactaaagaatgctctgcaccactgatttggtggtatttcctccaagtatccataagcatcagtactaagatacttcatcttttccatgttggattcccattccggtattgaactggaccttgcaattgcccacaattggttctttagagtctcccctttatgcaaaacatggaagttttggtatagatgcctaacacaaaatctttgttttgaatctggaaatttatccctcacagctggcaccaatccattttgcctatctgtcataatagtatacggtgtcgtgttgtcaataaggagatcttctttcaaagtattcaagaaccaaccccaactagctctactctccacttcaacaattgccatggctataggatagatgcagtcattaggatcaatgcctactacagtcaacaaatgtcccccaaacttggttttgatgtggcatccatcaaggaatatgataggtctacaactacttaggaatcctcttttgcaagcatcaaatgacacatagcatgtatggaagcacatattttgtaggttcaagaaaaatttactacctggatttgaagtcctaagctcttgtccataatcccacaacatatcgtattgtgctatttcatcaccatatatcgctttcatagctagtttccttgctcgacctaatttatgtcttgatggtgttacatttagttccttttgaactaccttagagaaactcttgagtgtcatcctatcattatccctaaagctttcaacatatctatttgcaagatacctagcagttacataattcaactcccactccttctgacatttgtggccatctatatatctttttaccataagacaattcgtcctgctgtcctcagctacatccaacatccatgagcactcttctttacatttagcctcaatttttttcttggtatttcttgtaaatttaattgcgactctattcttcacactgtattgttttattgcttgcctaacttcaatagcatcagagaacaacatcccaaccttaaagattggtgactccatgtccacagcagccacaaagttcttaaatttcaacttaatgccttcattatcttcatcagatgactctggaagcaacaagccttcatcatcagagtcatgttcaggaagcttaacaaccatcttgctgctagccacttcttctatctcaacacagttgtcaaaaacatcatcatcccccttgttagcctcataatcactgtcaacaaagtcaggatctacatcgatgtcatcgtcatcgtcaatgtcatgaccttctataggtataacacctgaatctttttgattcattgtagacctctcacggctagccacgataggtatagaagcaggggtagaaagagcaacatcatcccaattgatggattcaagaatgtcttggtgatccacatacaaaagcaatgtcctaaaccttggtgctaatacaaccatgctgttagtgcttgcatcagagttaattctccttagcccatcactgaatgtcttcccaggcaataaccaataaaccttggccttctcagacatatcatatcctagttgctcaataaaatcatcaagccataatgaagaccatgtgtcactgtcacaataatcaaaccaatccaccttttcattcaaataaattttgctactaccaactccagagaaaaaaccaccatgatgtagttcagttgtgaactgttcatcctcgcagcctatattacaagacaaaccattctgatgtgtcaaatcgtaaataat

SEQ ID NO: 62907 - DNA, 2622 bp, Oryza sativa
  Clone ID: PAT_MRT4530_641C.1
atggtgagggtgaggatgggagcagcggttcttggggtggcagtggtggtgttggcgtgtgttttgggagcaagagcagatggctccgatcatagatacaaggatggagattatgtcccgctctacgccaacaaggtcggccctttccacaatccaagctcattattaatcgagttgcctactgtgtactgcagtgagacgtatcggtactatgacctacccttttgtgcaccagatcatccaaaggacaaaagggaagcccttggggaggttctaaatggtgatcgattggttgatgcaccatatgagttgaatttcaaggaagacaggaactccaaggttctttgccagaaatcattgtcgaaggtggaagttgcaaagcttcgagatgcagttgcaaaggattactacttccagatgtactacgatgacttgccattatggggattccttggtaaattggacaaggataaggagcagggcaatgcaaagtacctgctcttcaagcacatccactttgacataatgtacaacggtgatcgtgtcatagaaatcaatgttcagacagacccaaatgtggctgttgacatcacagaggacaaagaagtgcaagtagagttctcctattcagtgacatggaaaaagacagatattccttttgagaaaagaatggagaagtactccaagtcttcatctatgccacaacatctggagatccattggttttccataatcaattcatgcgtaacagtactactcctgactggtttcttggctacaatcctgatgcgtgtcctcaagaatgatttcatcaaatattcccatgaagatgagtccctcgaagaccaagaagaaactggatggaagtatatacatggtgatgtcttccgttttcctcagcaaaaatctctttttgcagcaattgttgggtctggaactcagctgcttgccctccacctccttctatctgcaactggagggaacaaactgggtaaggactgcttcaatggtgcagctatcaaggtcaggaatctgatattgactggctgcttattctgtggacctctcttcttgacattctgcttcctaaacactgttgcgatagcgtacagtgctacagcagctttgccttttggtactatcattgtcattattctcatctgggcccttgtaacctctcctctccttgtgttgggtggtattgctgggaaaaatagtaacacagaattccaagctccctgccgctcaacgaaataccctagggaaattcctcagctaccctggtaccgaagcaccattcctcagatggcaatggcagggttcctccctttcagtgctatttacatcgagctgtactacatatttgccagcatctgggggcataagatatacaccatctacagcatccttttcattgtgttcattatcctcatcatcgtcaccgcgtttgtcactgtggcacttacatacttccaacttgctgtcgaggatcatgagtggtggtggagatcggtcctttgtggaggttccactggtatattcattttcttctactgcatctactactaccatgcccgatcagacatgtcaggcttcatgcagacatccttcttcttcggctacatgacctgcgtctgctatggcttcttcctcatgctgggcaccgttggtttccgcgcatcgctgctgtttgtgcggcacatttaccgctccatcaaactcagagaaatgtttgcagcaagatcaatcaggttcgtcagccttgcacctggtctagacattccaggtgcgcgcactgtcgtcgccgcctccgactccgacgacgacgaacaactccgccacgtcggatttggcatggctgccgcgccgccggcgttcaccgggaacctcaagaaagcacttgcaggattgagaaggatcaatttagatgggttgagatggcgtgtatttgatgcaaagggtcaggtgcttggacggttggcatcccaaattgctgttgtgcttcaagggaaggacaagccaacttatgccccacatgtggaaaacggggacatgtgtgtcgtacttaacgcgaaagatatcagtgtcacgggaaggaaaatgactgataagatttactactggcacacagggtatattggccatttgaaggaaagaagactcaaggaccagatggaaaaggacccaaccgaggtgattcgcaaagctgtgatgcgcatgcttccccgcaatagattgcgtgatgatagggatcgcaaactgaggatattttctggaagtgagcatcccttccatgatcgccctcttgaaccttttgcgatgccaccgcgtcaggtgcgcgagatgcgcccccaggcaagacgggcacttattagggcgcagaagaaagagcaggacagagcagcagcatcaaccaaagatgacaaagatggtaagagtgccaatactgatgtcacttcataggcatcttgggattatttttggcatgtagcctgttgagctgaatatgcactacaagtctaggaccatgtaacttggaaatgagcagcccaatctggatatctttctatgttatatacagcatataatactcaaattacattgttgctaattcctccaagg

SEQ ID NO: 62908 - DNA, 247 bp, Oryza sativa
  Clone ID: PAT_MRT4530_64200C.1
tgttcaggaacagacaatactgccggggaagctgcgagagcaaacgacgccgaggcccccacaaatgggggccagaaagcgaaggcgaacaaagccgcacgagacccaggggaccccgccagagcgtgcggccacgacaaacgctaagaaaccaggagccaagacgaattggagccatggagagcgaaaaagcaaccagaattacaaagacccgagccaaccagagcaggaatactcccacaccaag

SEQ ID NO: 62909 - DNA, 2160 bp, Oryza sativa
  Clone ID: PAT_MRT4530_64201C.1
atggatgatccatccttctgcaacttcgagttgaggctattgggaatgcggggtgatgacgaagatgacttggaggaggaacgcgtggaggtgttcggcaacactgcctcgcctcggatcgatgggtcgcagccggagacgaagacggagccggacgatgacggtaccggtgctggtggcaacggcgcgccgtccggctcaagtgctagcaacaaacggtccagatctcagtctatgctccggtttaatgctgatggttctgttagtcaatgggaatataagacagatgttgctagaactgagttggttaagttgattgctagagaggatcttccactttgttttggtgaatctgctgcttttgaggagtatattcaaaaagctcataaccctagattttgttctgtctctagacaaactactagtagggatgtctttaaggtttttgacagtcagcgtgctatgcttattgagactttaaaatctattagctctgttgctttgacttctaatatttggtctggtaatgctaaggaggattatttaagtgttgttgctcactttgttaattctaattggcaattagggaagaggattttgggtcttgtgctgattgatgtgtcacacactgctgaaaatatttcggaacatattctttctgttgttcaagagtatggtttgactgataagattttctctgttactctggacaatgccgctgctaatactaaagcaatggatcatctaaaacatgctatctctggttatgttggtgatttatatttgcatcagcgttgtgcatgtcatatcatcaatttaattgttaaggctggtcttgagatcttcaaaaacatgctggctgattttagatctgctatttcttttgtgaatgcatctaatcagcgcattgctttatacaaaagcttctgcattgctaagggtgttcgccctcgtaaatttggtttggacatggatgttagatggaatgcaacttatttgatgcttaaaaatctcttgccacataagggtatcttttcagtgtttattgcaactaaccatccacctgttaatggtcatgcattgttgactgatttacactggacaattgctgagactgttctgttattccttgaacaattttatgattcaactattattatgtctggtgtttattatccaacatctccattaattatgcatcacattcttgagattgctggacatctaaatacatatgagaatgataggaaccttagaaatgttgttattcctatgaaatcaaagttcttattatactggtctgagattccatttctgtattcatttgcttttatcttggatcctagggctaagatcaggggttttagcaatgttctccaaattatgactggtaattattctgagtatttaactgaggttagggctgcattgtctgatatttataagaagtatgaagctaagtttggtgatgtaagattgcaaagggcaaccccaagcagttcttgtggtaagaaaaagacagcttgggggaaaatttttggatcatccgctagtggttccagtgttggtgctggacctggtgtaggtgatggatttgctagtgccagtccaggtgctggacttagtgctagtgctagtccaattcctggatttggtgctagtgccagtccaggtgctgggcttggtgctggtctatttagcaggagaacttctgctactgctttgattcaagctgtttattctactgctaacatgaatgcatctgagttgtttgcctattttgacagtgacacagtcaaccaattcgatgacgacttcaatatccttaactggtggcatgagcacaaacacacctatcctattctttccctcttagatagagatgttttgaatgttcctgtttctactatatcgttggaatatgcttttagcttaactggcaggatcatcgaggatcgacggcggtgtctaggtcctgccatggtgcaagctctggcattgatcaaagattgggagcaagcagaatcaaagaagcagcattcagcggagaataaagagcttattaagtcttttgaatacttgtatcttgatgatgaaaccactggggatggggatgggactgggactggagatggggctagggctgggactgggacttga

SEQ ID NO: 62910 - DNA, 378 bp, Oryza sativa
  Clone ID: PAT_MRT4530_64202C.1
ctgtcgcgtggacaaagaaggacaaaaatcgtagtaatagaacagatgaggaacgcgaacaggtcgaagtgagactctagcatctacgctccaatggcggacaaggtctacgtcgtgtattactctatgtttggtcatgtcgtcaaactagctgaggagatccagaacggtgcttgatgtgtcgaccgcgagcaagtggatatgatgtatgtctttgataccctgtcagaggaggcgcttgccaggatgggagcgatggatcatcatcattttctttagaatttgattctgaagttgacgaattgagaaaagacaatggttatatgtagtcctttttgtttttgaagaactaattgccctatttctaataatatcttt

SEQ ID NO: 62911 - DNA, 614 bp, Oryza sativa
  Clone ID: PAT_MRT4530_64203C.1
tcgatgttctgcggactgtggaaaatttcctggagtatgtcccagacttctggtcttctgaagagcttgctgattccgtcaaagacgatgaacaaaggcttcttaatttcttgagagctttggggaagttgatcaagctgaattcacagtgcaaggaaatggtgttcccatgctgttggcttgagggcagacaactttggcgcctcatgaatgatgaagaacaagaggaagaacaaggacagatgcaagagcttctgaagagcactaatcaattgactgatgctgatcattttgctctcatgaagggatttgtggatacagaacttccggacgcacttaaaatagaatttcgcaaggctgatgattacccattggtccaaaatgatgggaactcaattgcactagacagtgatgatgaggatctcataagaggtagccataaaaggagaaagagagatcggaagagaaagcgacggagatatgattctgacgaggacgatcttgatcagctgcttgaacttgattcatgcatttctggacgtgctagccgctgctacatgaccaaagtaccgtgctggttgattccattgaaaaattacaggctaggacactga

SEQ ID NO: 62912 - DNA, 201 bp, Oryza sativa
  Clone ID: PAT_MRT4530_64204C.1
ggaagaaaacccgtatgccaattttggttcccaatcaaaaatttaaaataacgaaaaaaaaaccattgacgggggaaagaaagattgtgttaagggaaaaagggcagcagcagattggacctaaatgtttaataaagtaggatttaaatgagagtcgttggggaaattgcttactacaccaaggaagttgtttttgttttg

SEQ ID NO: 62913 - DNA, 377 bp, Oryza sativa
  Clone ID: PAT_MRT4530_64205C.1
gggggaggtgctgccaaaatttcttgtgaatttgttttggtgataatatataaatttatggtgtctaaaaggttaatggatcggcaatgaatgtacaaagcggaccgacggtcgaaagagtttattgacggcgagcattattttttgagagtggccaatgttaacaagcataagggttttatctgttgcccattgaacaagtgcaaaaaccaaaaggagtattctacattaagaaccattcatttccacttgtttgagtcggggttcatgcctagctataattgttggaccttgcacggagagctaggggttcaaatggaagaagatgaagtagaagatgagaacatttcggattgggctcagtacgataattgggg

SEQ ID NO: 62914 - DNA, 1771 bp, Oryza sativa
  Clone ID: PAT_MRT4530_64206C.1
gaggtagaaaatctctcttgaagatggttcaactcttttttcaagggaccacagatggtggtagtgttgatacagatgctgtaaaagcaaggcgatctcttcttggcaaggtggagcctataatcaggtcggttataaagtctggaggtgggtatgaggctcggatgtggctctgcagtacggtctcatccattcatttgctcgacccatatggccagcgggacctgtttctcaatctcttggggatgaaaaattccaaacgggatgtcgctgcccgcttgctgcggatgatttttgacaaaaagcccaaaaaagcaggttctattatagcaaagaaatgccagatgctagaggacttcttccaagggaatccaaagcagataatgcagtggtttggtcactttgcggttactggtgaattgacacataagaagggtgctagggcactttctcaatttgcatttgtgaatcgtgatatttgttgggaagagcttgagtggaaaggcaagcatgggcagtctcctgctgttgttgctactaagccccattattttcgtgatctcgatgttctgcggactgtggaaaatttcctggagtatgtcccagacttctggtcttctgaagagcttgctgattccgtcaaagacggtgaaatactgcaaattgacacagaatattttgtagatcaattcgtttacttgatgtatgaggagaattccagagatgcatggcagttagttgatgaatttttgatggacgagcagttttcttctctttctcaacatcttcttattcatttagatgaacaaaggcttcttaatttcttgagagctttggggaagttgatcaagctgaattcacagtgcaaggaaatggtgttcccatgctgttggcttgaggttcttttgtcagcacacagtgatcacatatctcttgatgaacttgtgctattgaactgtgtcatttctaagggcagacaactttggcgcctcatgaatgatgaagaacaagaggaagaacaaggacagatgcaagagcttctgaagagcactaatcaattgactgatgctgatcattttgctctcatgaagggatttgtggatacagaacttccggacgcacttaagtggataggcatccagtcctggctagttttctgtgaattgtcaaaagggtgcaaatcagctgattcttgtgagcatctgttcacttgtaacagaatagaatttcgcaaggctgatgattacccattggtccaaaatgatgggaactcaattgcactagacagtgatgatgaggatctcataagaggtagccataaaaggagaaagagagatcggaagagaaagcgacggagatatgattctgacgaggacgatcttgatcagctgcttgaacttggtacctccaataggaggggcattgaatcgcaccatggatgttggtatctttcaactgatggcttttctgcttcatgggacattattcatgcatttctggacgtgctagccgctgctacatgacccaagtaccgtgctggttgattcccttgaaaaattacaggctaggaccctgaattggcacggtttcactggaaagcggaaagtgaaaatacatctgaatgttgtaagacttgactagagctgttaaaagttgtatgccccggtctgcggcccttaccccttatgctgtagttccagctggtgacttaagaattttgatcgacctttttctacatgaaaattggttgctgttaaaaaaaaaaaaaaaa

SEQ ID NO: 62915 - DNA, 531 bp, Oryza sativa
  Clone ID: PAT_MRT4530_64207C.1
atggagggagagagaagaaaagaaagaaggaagaaagaagaaagaaggaagaagaagaagaagaagaagaaaggaaaggagctatggcttgtagttgcggctgcacccgtgccgttcgcaatgcatgcgtcaagtccgtcgttcaacgcggcaaattcatgttggcagctacgcccattatgcgtcgacatcactgccccttccactagttttggattggaaggtgttgatgtgaaaaacacacactggcgaggtttgctttactctagtgcaggtccaaagatttgccttcaggttcagggcgtgctagttagtttgatcctgcaaccaacaagaaacaaagaatccaaagttaaatccataaacgatagccgatcggctggactgccgatgacatatcatttagcaccaagccgatgtaacgcaggtcagatcggcaatgaaaatatatttaagctaagcgattgggatagatcgggcagtgtgccgagacagtataaattacttgcgcttaaaagtgctttggagtaa

SEQ ID NO: 62916 - DNA, 376 bp, Oryza sativa
  Clone ID: PAT_MRT4530_64208C.1
gggaaaaaccaaaaccatgggggatacaggggttaaaaaaaactttaaaggtgccaattaggggtaaaaccccccccccacacccccaaaatattttcttaatttggggggggggccacctaaaaaaaagggccaaaaatgaaaacccccccaaaaaattaattgggggggggttaatgggtaatccgcttggaaacccaaaaacctttttgtttattaaaggggcctttaaaacccttcctgaaaaaggggggggttttttttaaaccaaaaagggggccccctaactggagggggggggcaaattttgcaaactggaaaaaatttttgttgttaaaaggttaaaaaaaaaaaaattttgggacaaacccctttt

SEQ ID NO: 62917 - DNA, 495 bp, Oryza sativa
  Clone ID: PAT_MRT4530_64209C.1
atgggcgcgggagacccggccaccattaatggcgccggcgagcggcccgaccatctgctgtcgcacctgcgccgcctgggagctcgtctgcaccggccatctggtgctcggcaggagcgcatcggggagggctccctcggcatctatagcgtcgccgcccgtcctcccgactgcagccgctccagctcccgtcctcccgactgtcgctgccaatgccggtgctccagcccttgcgcacccgccgtcgctgccgttccatcgcacatcggcgtggaccctgccagcaaagccatcttggtgcacgtggagatggagtcggcgcacgcgacggagcggcagccgaaggtggccccgaccccgccggtgcagttgatggagatgtggtccagcgactcgcgagccgtcggagaccacaccgataaccgtgaaggcaaggacgacgagcagcagcgcgggccaccgccgccgttcccctcgtcctctcattgccattag

SEQ ID NO: 62918 - DNA, 570 bp, Oryza sativa
  Clone ID: PAT_MRT4530_6420C.1
cacgaggaaacaggtggatcgctcctgcaagccctagccgccacatctcctgcgtcctaccaccgccgccgctgttcctgtctccgccggcgccgccgccgccgccggttcagccgtcgtcgtccttcgccaccccatccgctcgtctccttgcgtggcttgctgcttgacgctgctgcatcgatcagagacgagaaggctccagacagcacaggaagcagttgaacaggagtaacaagggaaggaaaaggtatgaagggttccaacgttgaaggagttgagtcggagtatcgaaggagttaaagcaagtacaagacggacttgtgcgatggataaactgtgttgctttgttggttttatttacccaattattattcgaagcttcctattatcaattgtgtggttttggtattatgttacatattcatatttcacttcatgttcaagttcacgacgttattcatgtttctttcttccggaagtttctgtttacgttattcaagtaccatgcgtagttatgggagtgcaatttggatctttattcatgatccttaagaagcgctgatcacg

SEQ ID NO: 62919 - DNA, 711 bp, Oryza sativa
  Clone ID: PAT_MRT4530_64210C.1
atggcctccccggagggctccacgtgggtcttcgactgccctctgatggacgacctcgccgccgccgccggcttcgacgccgcccccgccggaggcttctactggacgacgcccgctcctccgcaggcggcgctacagccgccgccgccgcagcagcagcccgtcgcccctgccaccgcggctccgaacgcctgtccgagatcagaaagtggcactcgaccaagctccaaagcatgcagggaaaaagtaagaagggacaagttgaacgagaggttcttggaactgggtgctgtcctggaaccagggaagacacccaaaatggacaaatcgtctatattgaacgatgctattcgtgtaatggctgagctgcgtagtgaggcacagaagttgaaggaatcaaatgagagtctccaagagaaaatcaaagagttgaaggctgagaaaaacgagctgcgtgatgagaagcaaaagctgaaggcagagaaagagagcctggagcagcagataaagttcctgaatgctcgaccaagcttcgtaccacaccctccggttatcccagccagtgcattcactgctcctcaagggcaagctgccgggcagaagctgatgatgcctgtgattggctacccaggatttccgatgtggcagttcatgccgccttctgatgttgataccacagatgacaccaagtcatgccctcctgttgcataa

SEQ ID NO: 62920 - DNA, 417 bp, Oryza sativa
  Clone ID: PAT_MRT4530_64211C.1
atggcaatgagaggacgaggggaacggcggcggtggcccgcgctgctgctcgtcgtccttgccttcacggttatcggtgtggtctccgacggctcgcgagtcgctggaccacatctccatcaactgcaccggcggggtcggggccaccttcggctgccgctccgtctactcgcgccgtttagcaccgacgaggagggcggcgaggaggccgaggctaggagggcaaggctcaccgcgtgcgccgactccatctccacgtgcaccaagatggctttgctggcagggtccacgccgatgtgcgatggaacggcagcgacggcgggtgcgcaagggctggagcaccggcattggcagcgacagtcgggaggacgggagctggagcggctgcagtcgggaggacgggcggcgacgctatag

SEQ ID NO: 62921 - DNA, 177 bp, Oryza sativa
  Clone ID: PAT_MRT4530_64212C.1
atggctgtagaccagaagatcaaatcaactggcacgctgacgaacctaaaggcgggattttggacctgcacagaagttaagcagatcttccagcctcatcctccactgcctccaccaagttacgccattgtcatgagccccgagatccgctgcctccactgtttcactccttgttga

SEQ ID NO: 62922 - DNA, 372 bp, Oryza sativa
  Clone ID: PAT_MRT4530_64213C.1
atgccgtgcaaaactcacgcccacaacgcatgcctgacgcagcaaatgcacagaacaaagaaacccactctgtttttcaagcttgacatcgccaaggcttttgactcagtatcctgggaatacatgctcactctgcttgagaagatgggatcgcagcgcgtgcttcagatgctccctgatgctacaatcttcatcaagccttcatgccaggatgtggacaacctgatttctatcctacacaacttcagtggagccaccggactgaaggtgaacctcagcaagagctctgtgaatctaatagaatgtgatgcaattaagctagatgaagtcctgcacaacttcactggcccgcggacaaccttccccatgtag

SEQ ID NO: 62923 - DNA, 531 bp, Oryza sativa
  unsure (1)..(531): unsure at all n locations
  Clone ID: PAT_MRT4530_64214C.1
tttttttttnttttttttttttttgagaggcaatgaacacagctgttgcaacttgcaagagacggttggtatacaatcatccggacatccagtacagaccatgcagtgtatttttacggatattttgagcacagcttcaggcatttacaaacatttcacagccagggacacaaaagcagttcttcattgggggtgtcactgcaaaatctggaaaaggaagaatctcacacggggagtcgttttccaatttcggataagcagggaagggaacatttaacgttactttccccgccaaaaaaaaaaaaaaacatttaacgtttcttgtaaccaaacaccgtgacagcgtatagtttgtttgtccaggggggaatgccccccccaccaagcaaaagatgggcgacaagaattcctgcagcggaagcagcttttcataacagctcaacacctgtgatctctgtggctaccggccaaggccatggtccatgggtgccttatgattgccaaacattaggctgattagggttcatgatt

SEQ ID NO: 62924 - DNA, 537 bp, Oryza sativa
  Clone ID: PAT_MRT4530_64215C.1
gctagctgcagaacagagctgcagttcccttaaattatgtcagataccaggatgtatattgacaatgcaagttcatcttacattatatttacatttactaaagactgcacaaaaggaaaacatgtagcatattcaagaatctacaacaactttgttggccccaatgcaagagataatgattccttcaaaactgaactgcaaactgaggtcctgtggaagtgctggttcttgaaacagaatgagaaaaattctgggggatcctatcctcttaccacatctagtaccagcagtggttttacattgtacagggatatgctccacttggtctcatgtatcttaccagcagcacttgggctgagttttttttatatgaagaagggtcaatatgttgagatttgcgtgtcgaaaagccatattattgtgcaccttccacagattgtgggagcaggcgggaaagcatacagacaagccaggttgaaggggatcctgagatgtttctgccaggttgaaggtggcaacatattggcggatattttt

SEQ ID NO: 62925 - DNA, 329 bp, Oryza sativa
  unsure (1)..(329): unsure at all n locations
  Clone ID: PAT_MRT4530_64216C.1
cggcgggcggcggcggncaaagggtgggtttgtgcgcgagcctgtgggagaggataaggtgggaggagtacaggggagggtgggtcgacgagcacgagggcgccggcgaggtggccggcggcgggtcggtgctggtggagaggttcgtcgtgaagcggatggacggcagcgtcgcggtcgccgtcgactttgtgcacttcaacaaggccagggagaagctggtgtaaattgtaatcgtgtcactctgtcactgtcaggttatacctatcaaatgcacagttgcgaatcttcaggttaaatccttcaaaaaccataaaaaaaaaaaaaaa

SEQ ID NO: 62926 - DNA, 945 bp, Oryza sativa
  Clone ID: PAT_MRT4530_64217C.1
ctaggtgacttgactactggtgcgcggagctctaggcaaaaagggggccagggctcggggtcccaaggcgacttggttgccaaggcgtggagcccctaggcgagtagggcgccaaggctcggggccccgaggtgacttggttgctaggacgcggagcccccaggcaagtaaggcgccagggctcggagccccaaggcaacctggctgcgagggcgcggagcccataggtgagtagggcgccagggctcggatccctaaggcggcttggttggttgtttcgaagtcggccacctcaaagaccacgttctcggtgcggaagttgtccgggctgccaaatgtcaccaacagggttacttgtccgagagggattgacgaggtgccgggtatgaccccatgaaagggtgacttgcttggctcaagtgctgaagctgggatgcccatgtccttgaaagtcttagagaagaggatgttgagggtgctatcgccgtcgacaagcacacttttcaggcgcaccccttggattactgggtcaaggacgagggggtaaatcttggttctcttcgttatatcaagcaagatgatttctcaagtgaagattacaagacattgctgggagacaaccttgatgaagtcatcgacaagcgtttgaaggctttggaagagataaagaaagagaagaagagggtggacaaggcgtacaacaaaagggtgaaagcaaagttgtttcaagttggagacttggtttggaagacaattttacctttgggtactcgatccagggagttcggtaagtggtctcctagttgggagggtccttatcgagtatgtggcattgttcgagggaacgcatattttttggagacacttcaaggagagcgttttcagcgagcaatcaacgggaaatacttgaagaaatacttcccgagcatttggcaagacgcttag

SEQ ID NO: 62927 - DNA, 154 bp, Oryza sativa
  Clone ID: PAT_MRT4530_64218C.1
aagctggtgcgccggctggtgccagctccggcattattgcgtcgtcccacgcgtccgcctgtgtgaacggactaggaggatctaaccagtgcatattttgtgtggcatgcttgacactcacatcgtggtggccgctgttggttgagttactagc

SEQ ID NO: 62928 - DNA, 1284 bp, Oryza sativa
  Clone ID: PAT_MRT4530_64219C.1
atgaggagaaggagggggcgatggctgctcgatctacgcggccggatccacggacacactatacaggtacacaagaacatcaagaatgcattagcagcaccaaccagcacgtatcttcagcaacagaaggcaagcatcttcgggagtggatctgtggagggacaagagaatacagccgagtcgggagatgcacgggcgcagtcggcactcgtgcggggaagccggggatgcgccggcgacggtcacctcctcggtccaggtctccgtcgggggatcgagatgagggagcgccgtagcggtgctgcggtgggtgcgctagatgcatccgtgtatgccgctatggctgggagtgtggaagttgtcttcccaaacgagaggcgatgtagaaagcaatggtggatccatcgcactgagttagcactctttttttggaaaaaaaaatctggtgcaaaccagatgcaaacagcagtccgtgcagccccgatgcggatgcatgacgcgtggatgaggcgctcatccgacggccggcccacacaagcgagtccgcatcctgcacggctcgactcaggacgaggagtccagcagaagagcacaggcgccgccgggcttctggtgccgtcgtctgatctggtgcagcctttgcctgccgtagcgcacgacatggcaggacaatcttcacatgaacacgatgtaatcgttggggatcgtggagccgatggcaagcagagaacgcagatctccgagtttatgaccatggaagaagatgttgccggcgctatcgatgccaacgctaatggtgatgacaacacactctgtcgcatagtacctgaagagatggcagataaagcaccaaatcaggccaatgataaagttgcacaaactttgatcttgcctcaagttggaatggcttttgattcaaagcagaaagcgtggacaaaatatgcgaaaaaaggatttaatattgataaacaaggaagtgagaaggaaactttgaaaacacatgctgcacgagaagatctaaataatgcatcagaagatgaagatgaagatgttggtgatgtgtgtgggcaatcttcgaccatggatgcaaatgatgtgtgtgggcaatcctcgaccatggctgcatatgatgtgtatgggcaatcctcgacaatggctgcatatgatgggtttgggcaatcctcgaccatggatgctcctttaatccaaggcggatttacaagtcttttatttggagttcagcaagattcggccatggctgctagaaagttacatttcaattaa

SEQ ID NO: 62929 - DNA, 1341 bp, Oryza sativa
  Clone ID: PAT_MRT4530_6421C.1
atggcgaacactacattattgtactactcgaaattgctcgtgaggtgctcggcctacgagaaagatggtagcggcggcggccgggtgagggtgaacggcgcggctcaccgcgtgccgctccaggtcggggctgcgctggagacgaaaatcaacaggtcgctggccgggctgatgaggccgccggtgctgtcacagccgccgacggaggaggaggccgagggcaggaggagccagcggcagaacatcccgagtgagaagcagacggtggacccgttccggcaggcggtgatcgtggaggggggcgtgcggtaccggcagacggtggtggtgcggtcgtacgaggtcgggccggacaggacggcgacgctcgagacggtgctcaacctcctccaggagacggcgctcaaccacgtgtggatgtcgggcctcctcggcgacggcttcggcgccacgcacgccatgatcacgaacaacctcatctgggtcgtctccaggatgcacgtccaagtcgaccactaccccatctggtatattatattagtatttgtgttcgtccatggcgtcctgttcgttcagagaggccggggcaagaaaatttatgctcatcagacagaggttggttgcaggggagaggtgctggagatcgacacgtgggtaggctcgtcggggaagaacggcatgcggcgcgactggctcgtccgcggccgcagctccggcgccatcttcgtccgagcaaccaggcggttttcgcacctcggtggtaagcgtacatgggtgatgatgaataaggtcaccaggaggctgtcgaagatgccgaaggaggtcagggacgaaatctcgccgtggttcatcgacaggcacgcgattgacgaggtggccaccgacaagatcatcaagctcgacaccaatgccacatatgtcgattccgacttgaagccgaagcgcagcgatttggatatgaaccatcatgtcaacaacgtcaaatatgtaaggtggatgcttgagactctgcctgaccaattcctgcagcagcaccagcttagtagcatcattctggaatacaggaaggaatgtgggagctcagatgttgtgcaatcaatttgccaacctgatgaagacacgattatgccgggagaaaatgttagcattgtgatgggaccttcactttcgcaagagatcatcaatggccaccatagcttagctggtgcgctccagcagtggccaacgaagtacactcatcttctgcaactaaaggcaaatgacaagtatgaggagattgtgagaggtagaactacatggaagaaaaagtcatatagtatatcaaacgtcttgaagttttaa

SEQ ID NO: 62930 - DNA, 614 bp, Oryza sativa
  unsure (1)..(614): unsure at all n locations
  Clone ID: PAT_MRT4530_64220C.1
tccatgcatccgctcaccgcaattggtatgtttgatggaacatcaatgggtaacatagggctgcttcttcctggcctggttaatggacaggcattgtaggccatataatgagcgcatatggccgagtcatagattagggtcaagcacatgcattggacagaggtaggtgcaagacagacaacaagacacgtgccgaacagtgctcgatcgggacgtaacagtccgactatagtgacattcacatttccgacgccatagcgcactaggtccgactatgcaatgctggcaatatctacttgactcgagccgtgagtcacgctgaacctccattcgctgttagggaggatctagaatagagtataccctacccctatagcagcgcctatcccattaccacccttagactactgttgcaatgagtcttaacagtgaacagggtactacggcaaggaggacctcagatgagggctactacgacgagcagcagcagcagccggggatgacccgcgtgaggctgaccagggcgaggcagtacgcggcgcagctgccgtcgatgtgccgggttgagcccccgcagtgcaacatcttcgccgccagccagnactaggcttaac

SEQ ID NO: 62931 - DNA, 355 bp, Oryza sativa
  Clone ID: PAT_MRT4530_64221C.1
cctccggctacaagcagcagcgagctcagtgagccgctaccgctgccgcaccctaccagcaagggctggcgcctccggccacgggctccgcgccctccctgcgcccgtccgcggccagcccacgcgccgccgccgatcggacggccgccgacccctcagggcctcgcaccgtcggcccgaggcgagacggaggccgcttcctcggagtccgtgctgccaaggctgtcagtgtcgtgcagagtgataccgtgcaggatgatggagtgcagagagcatggaagctcagcgaggctcggttcgctcttgaggatggatcagcttggaaggccaagccttttggtgctgtaggagcaca

SEQ ID NO: 62932 - DNA, 2372 bp, Oryza sativa
  unsure (1)..(2372): unsure at all n locations
  Clone ID: PAT_MRT4530_64222C.1
atgactgcattatcagctgatgcggaggaccaacttgtacctttagcttttgccttggtggagaaagagaattcacgagactggtgctggtttatcgatcttgtccgacgggttatggttgggccacatagggaggtttgtattatctcagatcgacatgctggtataatgaatgccatgacgactcctgttccaggattgccaccggttcaccaccgatggtgcatgaggcacttcagtgctaatttccacaaggccggtgcggacaagcatcagacaaaagagctcctaaggatatgtcagattgacgagaagtggatatttgagagggatgttgaggcactaaggcagcgtattcccgaaggtcctcgtaaatggcttgaagatgagttggtggataaagataagtggtctcgtgcatacgatagaaatggccgccggtggggttacatgacaaccaacatggccgaacagttcaatagcgtgctagttggtgttcgtaagcttccagcgacggccatagtatcatttacgttcatgaagtgcaatgactactttgtgaacagacatgatgaagctttgaagcgagtccagttagggcagcgttggtccaccaaggttgatagtaagatgaaggtgcaaaaaagtaaggcgaacaaacacactgcaaggtgtttcgataagcagaaaaagacatacgaggtcacagagaggggtggtgtaacgcgtggtggtgttagattcggcgcaagagccttcaaagttgaagttgaggggaactcatgttcttgccaaaggccattgctctaccatatgccttgctcacatcttatacacgtttatctgattcatgcaattgatgaggaatctcccaaccgaatgccgtatcagttctcttcaagagccgttgtgaacacatgggcaagtcgctttgagccatacctcgaccccacacagtggctaccgtacgatggtgaagaatttgttgctgacccaaatttgaagattaaaacaagagggaagaggagatcgaaacgattcaagaacgaaatggactcgggtctgggtggttctggaaggaaaccaccttcatgcgttaaacttgatgctgcgccggtacttcaaccgctccgagtcagagctcatgcccccctagtgttcgacgatagacagctctgtgaggcctgttgtcgtcaggcaccatcatccaacatgagtggttgtgtgctattgatgcagctgtggatgtggttaagactaccggttggaaggcctaagtggaggcaaagcttcactccttggccctacaatgagccagacatggagaagacagtggcctacctttttgagagtactgccactgcacatgctcaccgggatgtggcatacaagcattatgtcaatgagatggactgcttacagcctcaacatattgagtggttaccataccacacaaatgaggcttcaagcctgaccctgaactcgatgtgcaatcgagactctgactatttcatgtaccagtgcccattgatttgtttctgggcagttgagtaccaccttccgcaccgtgtcatacgacagttcgggaagaaacaagactggccggttgaggacatctcaactggagttgaattacacaagtatgacagggtgagaacaaagaaggtgaaagactggaggctagagcataatagatacattgatgaatggaggacagccggaaggaacgacaggacatatagactgttcctccgcgctacttggacggaagcggacatagagcgncccgcggacttcgatgaggggcggaatccctatgatgtccggactagagttggatatcagatggagcacgccccacttacagacagagtcgtaacttttcttgcatttgtcaaatcgagagagctcctcaggagtgtgaatcaaatggggcatgccctccaagctccgaggggtggtgaggacacggagaacacactccgcaatgttttagagaaagttcgtcaaaggtgccggaaacttgcagcaagattaggttacaggtcggttggattggacgacgtgtaccaaccgcggagactaccaccaccactacctcaatccgggcgtccaagtaccgctcgacactccatcaggatagaagagcgtgaaggagttggtggctcgtcgtcgtcacgcattacgcaaggaaggggaaagggaaaggcgccggctccacctagcgatgacgatgacgacgaggacgaggaggatgaggactacgtcgcaccagacgccgaggagatagacatgtcgcagcttcccgacgcgcctcaggggacgcaacccacgcaatacaacttgcgatccactcgggcagcgaaaaagag

SEQ ID NO: 62933 - DNA, 4125 bp, Oryza sativa
  Clone ID: PAT_MRT4530_64223C.1
atggcggcggcggggtcatctccctcggctccatctcgtcctggcgcgggcgtggcgatgacggcggcgggatggcgagattgcggcgacggcgcggtggtggggctctccgcggcgacggcggtcgggctttctacggctccggcgacgggcgacggcgtcgccatatccggtcgtcccgcttccagatctggccgaggtgaccggcgacaggctcggttgacgccggcaccgctcgggcgtaggcgggtggccggtgacgggcatctccggtgcgggttcgtcggcgacgacggcatcgggtcggtggtggctccaccggccagtggtgctctcggcggagcgcgctccagcaccggctgccgcgtggacctggccgggggcaacaggcctgctgtggtttttgccggcgacagggacggcgcttccatctccctccctcctgttcctccagatccgattctccccttcttcagtggttgttcttttggtgctcacaggcggcttcgctcagaaggtttctgcaccactagaggacgtttggtggttctggagacctcgttcgcattatgttgtcaaagttgcttgcctttgctagccagcgggtatggcttatatccattggaaataagaagtaagcgccatcaagagcttgttgtagtgctgtatgtgtgcaatgtactcattgctgagttggtacgggaagacttggaggggcaaggagagaagaagagacctttgtttgaaaatgatttatgggaggcaggaccatcaaatagacattgcggtagtgatgatgtggacgaagcgagggagatgaaaagggagttagtacaagaggggcttgatctaagtgaacatttgtcggagagtgtacattggtcgtcgtatggaggcaaccctgaatacccggcgcaagtagcaggccaatatgtgaatccagatgattactttgttgtcgaattgagtggtggtcacgattctgtttcagtagaagtcaatagggaggaggttgatgaggaggcaagtgttgagaaatatgatgttgaatttgctaaagactattatgatgaccgtccattccctccactaattaacaatgacaagttagcattagaggaatgtcgtgcgtttcagaaggtgtttgggagaaagccgaacattcatgagtttagggacctaacacatacccatggtgcaatactagatggcggaatcaacttagatcagttgttagaaccattccaggtggatggtctcaaaaaggatttagagttcccatccatggtaacattgaagctatggctccaggagtacgccatcgtgcaccatcgtccataccgtgttgtcaattctactacaaataggaggtatatgttaaatgtgaaaacccacggtgcaaatggaaggtccatgcaactaagaggtctagtggcacgtggaggatatcacgggttggttttccagtatagggtgaagtatggcaaggcttggagcgcacgagaggaggctatgaagctcatttatggagaatggggtgaagcgtacgtccgtttgcccactttgctacaagccattaagcagagaaatcctagtatggtctaccacatcgatactcatcctgatagcttttgccttagtggagaaagtgaattcacgagactggtgctggtctatcgatcttgtccgacgggttgtggttgggccgcacagggaggttgtattatctcagatcggcatgctggtataatgaatgccatgaggactcctgttccaggattgccaccagttcaccaccgatggtgcatgaggcacttcagtgctaatttccacaaggccggtgtggacaagcatcagacagaagagctcctaaggatatgtcagattgatgagaagtggatatttgagagggatgttgaggcactaagacagcgtattcctgaaggtcctcgtatatggcttgaatatgagttgctggacaaggataagtggtctcgtgcatacgatagaaacggctaccggtggggttacatgacaatcaacatggccgaacagttcaatagcgtgctagttggtgttcgtaagcttccagtgacggccatagtatcatttaccttcatgaagtgcaatgattactttgtgaacagacatgatgaagcagtgaagcgagtccagtcaggggagcgttggtccgccaagaaaaagacatacgaggtcacagagaggggtggtataacatgtgatggtgttagattcggcgcaagagccttcaaagttgaagttaaggggaactcatgttcttgccaaaggccattgctctaccatatgccttgctctcatctcatccacgtttatctgattcatgtaattgatgagaaatcttccaaccgaatgccgtatcagttctcttcaagagccgttgtgaacacatgggcaagtcgctttgagccatacctcgaccccacacagtggccaccatacgatggtgaagaatttgttgctaacccagatttgaaggttaaaacaagagggcagaggagatcgaagcgattcaagaacgaaatggactcgggtgttggtggttctagaaggaaactgccttcaggtgttcaacttgatgctgcgccggtgcaaaatagatgctggttatgtcaccaggagggtcacaagaaacctaagtgtcttaagcgtccaaaaaagaagaagtccaaaaaaatagtgttagggaggatggccgaggaggaacaaccgccgacttacccagccttggaggagtactacgaggcctgtcatcgcagggctgcgatcgaggcgggaagggtacatcccgtacctaagggcggcgggttgctcggggtgaccttggtcgtgaacggaatgctagtgtgcaacgctcctgcgttgacagcacttgtggacagatggaggtctgagacacacagcttccacctcccaagtggtgagatgaccatcactcttcaggatgtggctatgatcttggccctcccattacgggggcatgtggtgacgggcaggatagagaatcctggatggcgtgtacaagtggagcagctgtttggcattccactcaacattgagcaggggcaagggagcaagaagaagcataatggaatacccctgtcttggcagagccagaacttctcatatcttgatgacgacgctgagccttggcgtgttgagtgctatgcccgtgcatacatcctgcatttgttgggaggggttctgtttccagatgctgggggtgacattgcttctgcgatatggattcctttggtcgccagccttgatgatctaggccgtttcagttggggctcagcagtgttgatgtggatgtggttaagactaccggttggcaggcctaagtggaggcaaagcttcactccttggccctacaatgagccagatatggagaagacaacggcctacctgtttgagagtactgctactgcacatgctcaccgggatgtggcatacaagcattatgtcaatgagatggactacttacagcctcaacacattgagtggttaccataccacaccaatgaggcttcaagcctgaccctgaactcgttgtgcaatcgagactccgattacttcatgtacgacagggtgagaacaaagaaggtgaaggactggaggctagagcataacagatacattgataaatggaggacagtgggaaggaacaacaggaaatttagactgttcttacgccctaattggacggaaatcgacatagaggaagaccgcgactccgatgaggggcggaatccctacgacgtccggactagggttggatatcaaatgaagcacgccccacttatagacagagtctcgagagagctcctcaggagtatgaatgaaatggggcatgccctccaatctccgaggggtggtgaggacacggagaacacactccgcaatatcttagagaaagttcatcaaagataccggaaacttgcagcaagattaggttgcaagtcggttagattggacgacgtgtaccaaccgcggagagtaccaccaccactaccacaatccgcgtgtccaagtaccgctcgacactccatcaggatagaagagtgtgaagaagttggtggctag

SEQ ID NO: 62934 - DNA, 236 bp, Oryza sativa
  Clone ID: PAT_MRT4530_64224C.1
aaaaaaagaatagccggagattccatatatgggaataaaacatgcctgcgtgtacagcttataccccacgcataatcccctctcacataaagtaaaacagagatcatctggcacacaaacaacagcagagctaagccagcaaaatgaaaagacactgaacacactgtggacacactaaccacggtgggagaccatattttatcagacttgtacacgatatcacaggtttatatcac

SEQ ID NO: 62935 - DNA, 1005 bp, Oryza sativa
  Clone ID: PAT_MRT4530_64225C.1
atgccgacgacgtgcaagactttcactgcaatattatcagaagccgatcgaataattctgcagattccaggaaaatcgacggcggaggtggggatcaacgtggcggcggatcgatgtagcggtgctcagggtggccaagtagcaggcccggaggtggtggatcgatggatagacttgttcgtgtttactacggtggttcgtcgtccaagtatcgctcgacactccatcaggatagaagagcgtgaagaagttggtggtttgtcgtcgtcacgcattccacaagggaggggaaaggggaaggcgccggctccacctagcgacgacgatgacgaggaggatgaggactacgtcgcaccagacgctgaggagatagacatgtcgcagcttcccgatgcgcctcaggggacgcaacccacccaatacaacttgcgatccactcaggcagcgaaaaagagattttcgatttgcagggaggcagagggcggcgccaaccaccctggcgccgcagttggggagggcggcgccagccaatgccacgaggcagaagggtttcggggggaggaaggtggcgccagccaccctagcgccgcggtccgtgaggacggcgccagccgtggcccagaggcagaaggtcctaggggggagaggggcggcgccaggatggctggcgccgcggtctggggggcagcgccagccattgcccggaggcagaagctcgggctggagacttggcgaaaatgggagtgggaggagaaagttggtggggcccacagaggagggggtgcgccacccatgctggccccgtcgtatgcgaggcggcgccaaggtggctggcgccccgctctaccgagtcagcaatgccacgtagccctggtgccatggtggcacgggcacggtgccaatgtggctggcgccgccatgttgggggacggcgccagccactctggcgccccaaaaaggaccattttcggtttaagtttttctaggggtctatttgtaaaataa

SEQ ID NO: 62936 - DNA, 4351 bp, Oryza sativa
  Clone ID: PAT_MRT4530_64226C.1
atggacgaggataatgtggagattcgtttttatgggagatacgatgttggtcaagggcataagtatatattaaatgtgataggtcagttggaatgggaagtttactttgatttggtaaaagagtctcagtttagatctctagaggtgtttgcatcaaagttagttcgtaccgtagaaaatttggatctaaacaaatctccttcttatcattacgttgagaagaattttgtgacatattattctcgtcgtggagggggtacaagtaagactgagttggtacgggaagacttggagggggaaggagagaagaagagacctttgcttggaaatgatttatgggaggcaggaccatcaaagagacattgcggtagtgatgatgtggatgcagcgagggagatgaaaagggagttagtacaagaggggcttgatctaagtgaacatttgtcggtgagtgttcattggtcgtcgtacggagtcaaccctgaatacccgacagaagtagcaggccaatatgtgaatccagatgattactttgatgtcgaattgagtggtggtcacgattctgtctcagtagaagtcaatagagatgatgtggacgaggaggcaagtgttgagcaatatgatgttgaatttgctgaagactctgatgatgaccgtccattccctccacttactaataatgacaagttagcattagaggaatgtcgtgcgtttgagaaggtgtttgggaggaagccggacattcctgagtttagggacctaacacatgcccatggtgcactactagatggcggcatcaaccgagatcagttgccagaaccattccaagtggatggtctcagaaagggtttagagttcccatccatggtcgcattgaagctatggcttcaggagtacgccatcgtgcaccatcgtccataccgtgttgtcaattctgccgcaaataagaggtacactgttaaatgtgaaaacccacggtgcaaatggaaggtccatgcaactaagaggtctagtggcacgtggaggatatcacgggtaggtaaagaacatagttgtgctactgccgaaggttcagggagccaccggcagctgacatcaaagttcatagcaaataggttatgcaatgccataaaactacaacctacactctctgcttctgcgttagctttgtatatatttgaagttttccagtatagggtgaagtatggcaaggtttggagggcacgagaggaggctatgaagctcatttacggtgaatggagtgaagcgtatgtccgtttgcccactttgctgcaagccattaagcagaggaatcccagtatggtctaccacatcgatactcatcctgatagggttgtcaacgttgatggagtgaccaagaaaatttttatgcgtgcattctggtgctttggtccttccattgaggcttttaagcattgtaggccagtactagctatagatgcaaccttcctaactggaaaatacggtagtgccttgatgactgcattattagctgatgcggaggaccaacttgtacctttagcttttgccttggtggagaaagagaattcacgagactggtgctggtttatcgatcttgtccgacgggttgtggttgggccgcatagggaggtttgtattatctcagatcgacatgctggtataatgaatgccatgacgactcctgttccaggattgccaccggttcaccaccgatggtgcatgaggcacttcagtgctaatttccacaaggccggtgcggacaagcaccagacaaaagagctcctaaggatatgtcagattgacgagaagtggatatttgagagggatgttgaggcactaaggcagcgtattcccgaaggtcctcgtaaatggcttgaagatgagttgttggataaagataagtggtctcgtgcatacgatagaaatggcctccggtggggttacatgataaccaacatggccgaacagttcaatagcgtgctagttggtgttcctttgaagcgagtccagttagggcagcgttggtccaccaaggttgatagtaagatgaaggtgcaaaaaagtaaggcgaacaaacacactgcaaggtgtttcgataagcagaaaaagacatacgaggtcacagagaggggtggtataacgcgtggtggtgttagatttggcgcaagagccttcaaagttgaaggtgaggggaactcatgttcttgccaaaggccattgctctaccatatgccttgctcacatcttatacacgtttatctgattcatgcaattgatgaggaatctcccaaccgaatgccgtatcagttctcttcaagagccgttgtgaacacatgggcaagtcgctttgagccatacctcgaccccacacagtggccaccgatggccgaggagagacaaccgccgacttacccagccttggaggcgtactacgaggcccgtcatcgcggggctgcgatcgaggcggggagggtacttcaaccgctccgagtcagtgctcatgcccccccagtgttcgacgataggtacatcccgtacctaagggtggccgggttgctcggggtggccttggtcgtgagcagaggaatgccagtgttcaatgctcctgcgttgatagcacttgtggacagatggaggcctgagacacacagcttccacctccccagtggtgagatgaccatcactctacaggatgtggctatgatcttggccctcccattacgggggcatgccgtgacgggcaggacagagactcctggatggcgtgcacaagtggagcagctgtttggcattacactgaacattgagcaggggcaaggggggaagaagaagcagaatggaatacccctgtcttggctgagtcagaacttctcacatcttcacgacgacgctgagccatggcgtgttgagtgttatgcccgtgcatacatcttgcacttgttgggaggggttctgtttcctaatgctgggggtgacattgcttcggcgatatggattcctttggtcgccaaccttggtgatctaggccgttttagttggggctcagcagtgttggcgtggacatatagacagctctgtgaggcctgttgtcgtcaggcaccatcatccaacatgagtggttgtgtgctattgattcagctgtggatgtggttaagactaccgattgagtggttaccataccacacaaatgaggcttcaagcctgaccctgaactcgatgtgcaatcgagactctgactatttcatgtaccagtgcccattgatttgtttctgggcagttgagtaccaccttccgcaccgtgtcatgcgacagttcgggaagaaacaagactggccggttgaggacatctcaactggagttgaattacacaagacatatagactgttcctccgccctacttggacggaagccgacatagaggatgaccgcgactccgatgaggggcggaatccctatgatgtccggactagagttggatatcaaatggagcacgccccacttagagacagagtcagagaactcctcaggagtgtgaatgaaatggggcatgccctccaagctccgaggggtggtgaggacacggagaacacactccgcaatgttttagagaaagttcgtcaaaggtgccagaaacttgcagcaagattaggttgcaggtcggttggattggacgacgtgtaccaaccgcggagactaccaccaccactacctcaatccgcgcgtccaagtaccgctcgacactccatcaggatagaagagcgtgaagaagttggtgactcgtcgtcgtcacgcattccgcaagggaggggaaaggggaaggcgccggctccacctagcgacgacgatgacgacgacgacgaggaggatgaggactacgtcgcaccagacgctgaggagatagacatgtcacagcttcccgacgcgcctcaggggacgcaacccacgcaatacaacttgcgatccactcgggcagcgaaaaagagagaggcagagggcggcgccaaccaccctggcgccgcggttggggagggcggcgccagccagtgccgcgaggcagaagggtttcgggctggggggagggcggcgccagctaccctggcgccgtggtccatgagggcggcgccagccgaggcccggaggcagaagggcttcgatggggggaggaggggggcgccagccaccctggcgccgcggtctgtggggggcaccaagccgttgcccggaggcagaagcgaaaattttgaaggggggagaaagttggtggggcccgcagaggaggggcgcgccagccatgctggcgccgtggtatgaggggcgcgcgccactcctgggcgccccttcggcctag

SEQ ID NO: 62937 - DNA, 4794 bp, Oryza sativa
  Clone ID: PAT_MRT4530_64227C.1
atggcggcgccagccacactggcgccgtgcccgtgccaccgtggcactagggctatcgtggagatggatagacttgttcgtgtttactacggtggtagagtggtggaaccttatgttggtggacatgttgagtttgaggatatgtcattgaagaccattttttttcccacccacccaactctagatgaactaaggtcacgagtgaaagaagttcttggatggaccgaggataatgtagagattcgtttttatgggagatacgatgttggtcaagggcataagtatatattaaatgtgataggtcagttggaatgggaagtttactttgatttggtaaaagagtctcagtttagatctctagaggtgtttgcatcaaagttagttcgtaccgtagaaaatttggatctaaacaaatctccttcttatcattacgttgagaagaattttgtgacatattattctcgtcgtggagggggtgcaagtaagagtgagttggtacgagaagacttggagggggaaggagagaagaagagacctttgcttggaaatgatttatgggaggcaggaccatcaaagagacattgcggtactgatgatgtggatgcagtgagggtgatgaaaagggagttagtacaagaggggcttgatctaagtgaacatttgtcggcgagtgttcattggtcgtcgtacggagtcaaccctgaatacccgacagaagtagcaggccaatatgtgaatccagatgattactttgatgtcgaattgagtggtggtcacgattctgtctcagtagaagtcaatagagatgatgttgacgaggaggcaagtgttgagcaatatgatgttgaatttgctgaagactctgataatgaccgtccattccctccacttactaataatgacaagttagcattagaggaatgtcgtgcgtttgagaaggtgtttgggaggaagccggacattcatgagtttagggacctaacacatgcccatggtgcactactagatggcggcatcaacctagatcagttgccagaaccattccaggtggatggtctcagaaagggtttagagttcccatccatggtcgcattgaagctatggctccaggagtacgccatcgtgcaccatcgtccataccgtgttgtcaattctgccgcaaataggaggtacactgttaaatgtgaaaatccacggtggaaatggaaggtccatacaactaagaggtctagtggcacgtggaggatatcacgggtaggaaaggaacatagttgtgctactgccgaaggttcagggagccaccggcaactgacatcaaagttcatagcaaataggttatgcaatgccataaaactgcaacctacactctctgcttctgtgttagctttgtatatatttgaggttttccagtatagggtgaagtatggcaaggcttggagggcacgagaggaggctatgaagctcatttacgccattaagcagaggaatcccagtatggtctaccatatcgatactcatcctgatagggttgtcaacgttgatggagtgaccaagaaaatttttatgcgtgcattctggtgctttggtccttccattgaggcttttaaacattgtaggccagtactagctatagatgcaaccttcctaactgggaaatacggtggtgccttgatgactgcattatcagctgatgcagaggaccaacttgtacctttagcttttgccttggtggagaaagagaattcacgagactggtgctggtttatcgatcttgtccgacgggttgtggttgggccgcatagggaggtttgtattatctcagatcgacatgctggtataatgaatgccatgatgactcctgttccaggattgccatcggttcaccaccggtggtgcatgaggcacttcagtgctaatttccacaaggccggtgcggacaagcatcagacaaaagagctcctaaggatatgtcagattgacgagaagtggatatttgagagggatgttgaggcactaaggcagcgtattcccgaaggtcctcgtaaatggcttgaagatgagttgttggataaagataagtggtctcgtgcatacgatagaaatggccgccggtggggttacatgacaaccaacatggccgaacagttcaatagcgtgctagttggtgttcgtaagcttccagtgacggccatcgtatcatttacgttcatgaagtgcaatgactactttgtgaacagacatgatgaagcattgaagcgagtccagttagggcagcgttggtccaccaaggttgacagtaagatgaaggtgcaagaaagtaaggcgaacaaacacactgcaaggtgtttcgataagcagaaaaagacatacgaggtcacagagaggggtggtataacgcgtggtggtgttagattcggcgcaagagccttcaaagttgaaggtgaggggaactcatgttcttgccaaaggccattgctctaccatatgccttgctcacatcttatacacgtttatctgattcatgcaattgataaggaatctctcaaccgaatgccgtatcagttctcttcaagagccattgtgaacacatgggcaagtcgctttgagccatacctcgaccccacacagtggccatcgtacaatggtgaagaatttgttgctgacccaaatttgaagattaaaacaagagggaagaggagattgaaacgattcaagaacgaaatggactcgggtctgggtggttctggaaggaaaccaccttcatgcgttcaacttgatgctgcgccggtgcaaaatagatgctcgttgtgtcaccaggagggtcacaagaaaactaagtgtcctaagcgtccaaaaaagaagaagtccaaaaaaattttaagtgttagggaggtacttcaaccgctccgagtcagagctcatgcccccccagtgttcgacgataggtacatcccgtacctaagggctgccgggttgctcggggtggccttggtcgtgagcagaggaatgccagtgttcaacgctcctgcgttgacagcacttgtggacagatggaggcctgagacacacagcttccacctccccagtggacagactcctggatggcatgcacaagtgcagcagctgtttggcattccactgaacattgagcaagggcaaggggggaagaagaagcagaatggaatacccctgtcttggctgagtcagaacttctcacatcttgacgacgatgctgagccatggcgtgttgagtgttatgcccgtgcatacatcttgcacttgttgggaggggttctgtttcctgatgctaggggtgacattgcttcagcgatatggattcctttggtcgccaaccttggtgatctgggccgtttcaattgggggtcagcagtgttggcgtggacatatagacagctctgtgaggcctgttgtcgtcaggcaccatcatccaacatgagtggttgtgtgctattgattcagatgtggatgtggttaagactaccggttggaaggcctaagtggaggcaaagcttcactccttggccctacaatgagccagacatggagaagatagtggcctacctttttaagagtactgccactgcacatgctcaccgggatgtggcatacaagcattatgtcaatgagatggactgcttgcagcctcaacatattgagtggttaccataccacacaaatgaggcttcaagcctgaccctgaactcgatgtgcaatcgagactctgactatttcatgtaccagtgcccattgatttgtttctgggcagttgagtaccaccttccgcaccttgtcatgcgacagttcgggaagaaacaagattggccggttgaggacatctcaactggagttgaattacacaagtatgacagggtgagaacaaagaaggtgaaagactgggggctagagcataatagatacattgatgaatggagaacagccagaaggaatgataggtacatcgagactatacaccaaaatcatcttttctcagagtaccttcgttggctgcataggacatatagactgttcctccgccctacttggacggaagccgacatagaggatgatcgcgactccgatgagaggcggaatccctatgatgtccggactagagttggatatcaaatggagcacgccccacttagagacagagtctcgagaaagctcctcaggagtgtgaatgaaatggggcatgccctccaagctccgaggggtggtgaggacacggagaacacgctccgcaatgttttagagaaagttcgtcaaaggtgccggaaacttgcagcaagattaggttgcaggtcggttggattggacgacgtgtaccaaccggggagactaccaccaccactacctcaatccgcgcgtccaagtactgctcgacactctatcaggatagaagagcgtgaaggagttggtggctcgtcgtcgtcacgcattaagcaagggaggggaaaggggaaggcgccggctccacctagcgacgacgatgacgatgaggacgaggaggatgaggactacgtcgcaccagacgccgaggagatagacatgtcgcatatagacatgtcgcagcttcccgacgcgcctcaagggacgcaacccacgcaatacaacttgcgatccactcgggcagcgaaaaggagggaggcagagggcggcgccaaccaccctggcgccgaggttgggaagggcggcgccagccagtgccgcgaggcagaagggtttcgggctgggggagggcggcgccagctaccctggcgccgtggtccatga

SEQ ID NO: 62938 - DNA, 4771 bp, Oryza sativa
  Clone ID: PAT_MRT4530_64228C.1
atggcggcgccagccacactggcgccgtgcccgtgccaccgtggcactagggctgtcgtggagatggatagacttgttcgtgtttactacggtggtagagtggtggaaccttatgttggtggacatgttgagtttgaggatatgtcattgaagaccattttgtttcccacccacccaactctagatgaactaaggtcacgagtgaaagaagttcttggatggaccgaggataatgtggagattcgtttttatgggcgatacgatgttggtcaagggcataagtatatattaaatgtgataggtcagttggaatgggaagtttactttgatttggtaaaagagtctcagtttagatctctagaggtgtttgcatcaaagttagttcgtaccgtagaaaatttggatctaaacaaatctccttcttatcattacgttgagaagaattttgtgatatattattctcgtcgtggagggggtgcaagtaagagtgagttggtacgagaagacttggagggggaaggagagaagaagagacctttgcttggaaatgatttatgggaggcaggaccatcaaagagacattgcgtagaagtcaatagagatgatgttgacgaggaggcaagtgttgagcaatatgatgttgaatttgctgaagactctgatgatgaccgtccattccctccacttactaataatgacaagttagcattagaggaatgtcgtgcgtttgagaaggtgtttgggaggaagccggacattcctgagtttagggacctaacacatgcccatggtgcactactagatggcggcatcaacctagatcagttgccagaaccattccaggtggatggtctcagaaagggtttagagttcccatccatggtcgcattgaagctatggctccaggagtacgccatcgtgcaccatcgtccataccgtgttgtcaattctgccgcaaataggaggtacactgttaaatgtgaaaacccacggtgcaaatggaaggtccatgcaactaagaggtctagtggcacgtggaggatatcacgggtaggtaaggaacatagttgtgctactgccgaaggttcagggagccaccggcaactgacatcaaagttcatagcaaataggttatgcaatgccataaaactgcaacctacactctctgcttctgcgttagctttgtatatatttgaggtttttcagtatagggtgaagtatggcaaggcttggagggcacgagaggaggctatgaagctcatttacggtgaatcgggtgaagcgtatgtccgtttgcccactttgctgcaagccattaagcagaggaatcccagtatggtctaccacatcgatactcatcctgatagggttgtcaacgttgatggagtgaccaagaaaatttttatgcgtgcattctggtgctttggtccttccattgaggcttttaagcattgtaggccagtactagctatagatgcaaccttcctaactgggaaatacggtggtgccttgatgactgcattatcagctggtgcggaggaccaacttgtacctttagcttttgccttggtggagaaagagaactcacgagactggtgctggtttatcgatcttgtccgacgggttgtggttgggccgcatagggaggtttgtattatctcagatcgacatgctggtataatgaatgccatgatgactcctgttccaggattgccatcggttcatcaccggtggtgcatgaggcacttcagtgctaatttccacaaggccggtgcggacaagcatcagacaaaagaactcctaaggatatgtcagattgacgagaagtggatatttgagagggatgttgaggcactaaggcagcgtattcccgaaggtcctcgtaaatggcttgaagatgagttgttggataaagataagtggtctcgtgcatacgatagaaatggccgccggtggggttacatgacaaccaacatggccgaacagttcaatagcgtgctagttggtgttcgtaagcttccagtgacggccatcgtatcatttacgttcatgaagtgtaatgactactttgtgaacagacatgatgaagctttgaagcgagtccagttagggcagcgttggtccaccaaggttgacagtaagatgaaggtgcaagaaagtaaggcgaacaaacacactgcaaggtgtttcgataagcagaaaaagacatacgaggtcacagagaggggtggtataacgcgtggtggtgttagattcggcgcaagagccttcaaagttgaaggtgaggggaactcatgttcttgccaaaggccattgctctaccatatgccttgctcacatcttatacacgtttatctgattcatgcaattgataaggaatctcccaaccgaatgccgtatcagttctcttcaagagccgttgtgaacacatgggcaagtcgctttgagccatacctcgaccccacacagtggccatcgtacgatggtgaagaatttgttgctgacccaaatttgaagattaaaacaagagggaagaggagatcgaaacgattcaagaacgaaatggactcgggtctgggtggttatggaaggaaaccaccttcatgcgttcaacttgatgctgcgccggtgcaaaatagatgctcgttgtgtcaccaggagggtcacaagaaaactaagtgtcctaagcgtccaaaaaagaagaagtccaaaaaaaatttaagtgttagggaggatggccgaggagggacaaccgccgacttacccagccttggaggcgtactacgaggcccgtcatcgcggggctgcgatcggggcggggagggtacttcaaccgctccgagtcagagctcatgcccccccagtgtttgacgataggtacatcccgtacctaagggctgccgggttgctcggggtggccttggtcgtgagcagaggaatgccagtgttcaacgctcctgcgttgacagcacttgtggacagatggaggcctgagacacacagcttccacctccccagtggtgagatgaccatcactctacaggatgtggctatgatcttggccctcccattacgggggcatgccgtgacgggcaggacagagactcctggatggcatgcacaaatgcagcagctgtttggcattccactgaacattgagcaggggcaaggggggaagaagaagcagaatggaatacccctgtcttggctgagtcagaacttctcacatcttgatgacgatgctgagccatggcgtgttgagtgttatgcccgtgcatacatcttgcacttgttgggaggggttctgtttcctgatgctgggggtgacattgcttcggcgatatggattcctttggtcgccaaccttggtgatctgggccgtttcagttgggggtcagcagtgttggcgtggacatatagacagctctgtgaggcctgttgtcgtcaggcaccatcatccaacatgagtggttgtgtgctattgattcagatgtggatgtggttaagactaccggttggaaggcctaagtggaggcaaagcttcactccttggccctataatgagccagacatggagaagacagtggcctacctttttgagagtactgccactgcacatgctcaccgggatgtggcatacaagcattatgtcaatgagatggactgttgcagcctcaacatgtatgacagggtgagaacaaagaaggtgaaagactgggggctagagcataatagatacattgatgaatggagaacagccggaaggaacgataggtacatcgagactatacaccaaaatcatcttttctcagagtaccttcgttggctgcataggacatatagactgttcctccgccctacttggacggaagccgacatagaggatgaccgcgactccgatgaggggcggaatccctatgatgtccggactagagttggatatcaaatggagcacgccccacttagagacagagtctcgagagagctcctcaggagtgtgaatgaaatggggcatgccctccaagctccgaggggtggtgaggacacggagaacacgctccgcaatgttttagagaaagttcgtcaaaggtgccggaaacttgcagcaagattaggttgcaggtcggttggattggacgacgtgtaccaaccggggagactaccaccaccactacctcaatccgcgcgtccaagtactgctcgacactccatcaggatagaagagcgtgaaggagttggtggctcgtcgtcgtcacgcattaagcaagggaggggaaaggggaaggcgccggctccacctagcgacgacgatgacgatgaggacgaggaggatgaggactacgtcgcaccagacgccgaggagatagacatgtcacagtttcccgacgcgcctcaggggacgcaacccacgcaatacaacttgcgatccactcgggcagcgaaaaagagggaggcagagggcggcgccaaccaccctggcgccgaggttgggaagggcggcgccagcagtgccgcgaggcagaagggtttcgggctgggggagggcggcgccactaccctggcgccgtgcgagttcatcggggacaaactccgccgcccccgtctcccttgccaccctacctcgacgacgaactttgccaccgtcggcatctccactcctggcgacaagctccgcagttgccagcacctctcacatcctggcgacaagaagaagattgcggtggccgccgcctccctattcccccacctcggtgacaaacttcgccaatga

SEQ ID NO: 62939 - DNA, 778 bp, Oryza sativa
  Clone ID: PAT_MRT4530_64229C.1
cggacgcgtggggttcgcctcttctccaataaagcagccgccccagcactcacgaactcctggaatcatccggcggcggcggcgagaggggatgggtggagcatgctgtcccgcgcccgagtcctgctcgaggagggcaagccgtcgctcgcgctgcaggcgattctcttggccataagatcccaaggtggtgaacaggctctcatgcagacgctgaaccgtgcacgggaactctacaggcaaagatcacagcccagccctagtgttgatgatctcgcttctttgcttgcacaatgtgctatagcagagtcgcagtcaacaaacactaatcctcaacaagtacctggctctgaccctgtcatgatgctggattctgatgaagtctgcatacttgctgagagtggaaggaagcagataattttagatgcttttgctgacggcagcagcttcatttgcttgaaatgtggtgggctgtttagcacctcgcgcaaagatgagcacctggcctactggtgcgggactgcatgatcctggcgatgcccataatcatacctgtggccaccccagtcaatgatcatggtacccgtgagattttgatcttctgttacaccgaggcaagagcattgccaatgttggacattgtgtggataaagcttgccatatccctgtaatctgttcatcctgtacttttttccctggtgaagtggaaaaaaatctctataaaaaaaaaaaaaaaaaaaaaaaaaaaaccctcgtgccaaaaaaaaaaaaaaaaaaa

SEQ ID NO: 62940 - DNA, 131 bp, Oryza sativa
  Clone ID: PAT_MRT4530_6422C.1
atgccgtcatcggtgagtcatccggccgcggctcgtcacaggtatcccctcacctatgacgggccgaaaggaaaacccgtcacaggtgagggaataccagtgacgggcaactcaattgaagcccgtcaaag

SEQ ID NO: 62941 - DNA, 4505 bp, Oryza sativa
  Clone ID: PAT_MRT4530_64230C.1
atggcggcgccagcaacactgttgctgatggatagacttgttcgtgtttactacggtggtagagtggtggaaccttatgttggtgcacatgttgagtttgaggatatgtcattgaagaccattttgtttcctacccacccaactctagatgaactaaggtcacgagtgaaagaagttcttggatggaccgaggataatgtggagattcgtttttatgggagatacgatgttggtcaagggcataagtatatattaaatgtgataggtcagttggaatgggaagtttactttgatttggtaaaagagtctcagtttagatctctagaggtgtttacatcaaagttggtacgtaccgtagaaaatttggatctaaacaaatctccttcttatcattacgttgagaagaattttgtgacatattcttctcgtcgtgaaaggggtgcaagtaagactgagttggtacgagaagacttggaggaggaaggagagaagaagagacctttgtttggaaatgaattaggggaggcaggaccatcaaagagacattgcggtagtgatgatatggatgcagcgagaaagatgaaaagggagttagtacaagaggggcttgatctaagtgaacatttgtcggagagtgtgcattggtcgttgtacggaggcaaccctgaatacccgacgcaattgttaacaggtggtcacgattctgtctcagtagaagtcaatagagaggaggttgacgaggaggcaagtgttgagcaatatgatgttgaatttgctaaagactctgatgatgaccgtccattccctccactaactaacaatgacaagttagcattagagaaatgtcgtgcgtttgagaaggagtacgccatcgtgcaccatcgtccataccgagttgtcaattctgccgcaaataggaggtacactgttaaatgtgaaaacccacggtgcaaatggaaggtccatgcaactaagaggtctagtggaacgtggaggatatcacaggttggtaaggcacatagttgtgctactgccaaaggttcagggagccaccggcagctgacatccaagttcatagcaaataggttatgcaatgccataaaactacaacctacactctctgcttctacgttagctttgtatatatttgaagttttccagtatagggttaagtatggcaaggcttggagggcacgagaggaggctatgaagctcatttacgccattaagcagagaaatcccagtatggtctaccacatcgatactcatcctgatagggttgtcaacgttgatggagtgaccaagaaaatttttatgcgtgcattctggtgcgttggtccttccattgaggcttttaagcattgcaggccagtactagctataaatgcaaccttcctaactggaaaatacggtggtgccttgatgactgcattatcagctgatgcggaggaccaacttgtacctttagcttttgccttggtggagaaagagaattcacgagactggtgctggtttatcgatcttgtccgacgggttgtggttgggcagcacagggaggtttgtattatctcagatcgacatactggtataatgaatgccatgaggactcctgttccaggattgccaccggttcaccaccgatggtgcatgaggcacttcagtgctaatttccacaaggccggtgcagataagcatcagacaaaagagctcctaaggatatgtcagattgacgagaagtggatatttgagagggatgttgaggcactaaggcagcgtattcccgaaggtcctcgtaaatggcttgatagaaatggccgccggtggggttacttgacaaccaacatggccaaacagttcaatagcgtgctagttggtgttagtaagcatccagtgacggccatagtatcatttaccttcatgaagttcaatgattactttgtgaacagacatgatgaagcaatgaagcgagtccagttatgggagcgttggtccaccaaggttgctagtaagatgaaggtgcaaaaaagtaaggctaacaaacacacttcaaggtgtttcgataagtagaaaaagacatacgaggtcacagagaggggtggtataacgcgtggtggtgttagattcggtgcaagagccttcaaagatgaaggtgaggggaactcatgttcttaccaaaggccattgctctaccatatgcttgctcacatctcatccacgtttatctgattcatgcaattgatgaggaatctcccaaccgaatgccgtatcagttctcttcaagagccgttgtgaacacataggcaagtcgctttgagccatacctcaaccccacatagttgccaccatacgatggtgaagaatttgttgctgacccaaatttgaagattaaaacaagagggaagaggagatcgaagcgattcaagaacgaaatggactcgggtcttggtggttctagaaggaaaccaccttcatgtgttcaactagatgctgcgccggtgcaaaatagatgctcgttgtgtaaccaggagggtcacaagaaacctaattgtcctaagcgtccaaaaaagaagaagtccaaaaataaaatagaagtgttagggagatacttcaaccgctccgagttagaactcatgcccccccagtgtttgacaaaaggtacatcccgtacctaagggcggtcgggttgctcggggtggccttggtcatgagcagaggaatgccagtgttcaacgctcctgcattgacagcacttgtggacagatggaggcctgagacacacagcttccacccccccagtggtgagaatcctggatggcgtgcacaagtggagcacctgtttggcattccactcaacattaagtaggggcaagggggcaagaagaagcagaatggaatacccctgtcttagctgagtcagaacttctcacatcttgacgacgacgctgagccatggcgtgttgagtgttatgctcgtgcatacatcttgcacttgttgagtgtggttctgtttcctgatgctgggggtgacattgcttcggtgatatggattcctttggtcgccaaccttggtgatctgggccatttcagttggggctcagcagtgttggcgtggacatatagacagctctgtgaggcctgttgtcgtcaggcaccatcatccaacatgagtggttgtgtgctatcgattcagttgtggatgtggttaacactaccggttggaaggcctaagtggaggcaaaaccttcactccttggccctacaatgagccagacatggagaagacagtggcctacctgtttgagagtactgccactgcacatgctcaccgggatgtggcatacaagcattatgtcaatgagatggactgcttacagcctcaacatattgagtggttaccataccacacaaatgaggcttcaagcctgaccctgaactcgatgtgcaatcgagactctgactacttcatgtaccagtgcccattgatttgtttctgagcagttgagtaccactttccgcaccgtgtcatgcgacagttcgggaagaaacaagactgtctggttgaggacatctcaactggagttgaattacacaagtatgacagggtgagaacaaagaaggtgaaagactgggggctagagcataacagatacattgatgaatggaggacagccggaaggaacgacaggtacatcaagacaatacaccaaaatcatcttttctcagagtagcttagttggctgtataggacatatagactattcctccgccctacttggacggaagccgacatagagaaggaccgcgactccgatgagaggcggaatccctatgatgtccggactagagttggatatcaaatggagcacgccccatttagagacagagtctcgagagagctcctcaggagtgtgaatgaaatggggcatgccctccaagctccgaggggtggtgaggacacggagaacacactccgcaatgtttgaggtaaaattttggcattgtgccgggatcgatccatccaaaacggacggccgagatcgatcggtctacgaccggctcacggaagagggcgacgatgacgtcagcgatgacgtcaccaccggcggcggcggctcggcggctcgggcttgcatgctcgccggcgaacggcggcgcttcggcacgaacggagagcaccaacgggtagagcgcgacgcggcgaactcaccggtgaccaaaggagcagcggaagatcaacggacggtgacggcgacgacgaagaaacggcggcggtcttcgggtcgacggcggcgatggtgctccggcgatcttcggcgacggcgaaggggcggacgaggacggcgacgcgacgacgaccacgacggcggtcttcccgaagggaggcagagggcggtgctagccaccctggtgccgcagttggggagggcggcgccagccagtgccgcgaggcagaagggtttcgggggggaggagggcggcgccagccaccctggcgctgtggtctg

SEQ ID NO: 62942 - DNA, 4728 bp, Oryza sativa
  Clone ID: PAT_MRT4530_64231C.1
atgacgatgcgaccggtggtgccgaaagctgcgtggccaatgtccggttttactgaatcttatcctaaacatcttggatggaccgaggataatgtggagattcgtttttatgggagatacgatgttggtcaagggcataagtatatattaaatgtgataggtcagttggaatgggaagtttactttgatttggtaaaagagtctcagtttagatctctagaggtgtttgcatcaaagttagttcgtaccgtagaaaatttggatctaaacaaatctccttcttatcattacgttgagaagaattttgtgacatattattctcgccgtggagggggtgcaagtaagagtgagttggtacgagaagacttggagggtgaaggagagaagaagagacctttgcttggaaatgatttatgggaggcaggaccatcaaagagacattgcggtactgatgatgtggatgcagcgagggtgatgaaaagggagttagtacaagaggggcttgatctaagtgaacatttgtcggcgagtattcattggtcgtcgtacggagtcaaccctgaatacccgacagaagtagcaggccaatatgtgaatccagatgattacttttatgtcgaattgagtggtggtcacgattctgtctcagtagaagtcaatagagatgatgttgacgaggaggcaagtgttgagcaatatgatgttgaatttgctgaagactctgatgatgaccgtccattccctccacttactaataatgacaagttagcattagaggaatgtcgtgcgtttgagaaggtgtttgggaggaagccggacattcctgagtttagggacctaacacatgcccatggtgcactagtagatggcggcatcaacctagatcagttgccagaaccattccaggtggatggtctcagaaagggtttagagttcccatccatggtcgcattgaagctatggctccaggagtacgccatcgtgcaccatcgtccataccgtgttgtcaattctgccgcaaataggaggtacactgttaaatgtgaaaacccacggtgcaaatggaaggtccatgcaactaagaggtctagtggcacgtggaggatatcacgggtaggtaaggaacatagttgtgctactgccgaaggttcagggagccaccggcaactgacatcaaagttcatagcaaataggttatgcaatgccataaaactgcaacctacactctctgcttctgcgttagctttgtatatatttgaggttttccagtatagggtgaagtatggcaaggcttggagggcacgagaggaggctatgaagctcatttacggtgaatggggtgaagcgtatgtccgtttgcccactttgctgcaagccattaagcagaggaatcccagtatggtctaccacatcgatactcatcctgatagggttgtcaacgttgatggagtgaccaagaaaatttttatgcgtgcattctggtgctttggtccttccattgaggcttttaagcattgtaggccagtactagctatagatgcaaccttcctaactgggaaatacggtggtgccttgatgactgcattatcagctgatgcggaggaccaacttgtacctttagcttttgccttggtggagaaagagaattcacgagactggtgctggtttatcgatcttgtccgacgggttgtggttgggccgcatagagaggtttgtattatctcagatcgacatgctggattgccatcggttcaccaccggtggtgcatgaggcacttcagtgctaatttccacaaggccggtgcggacaagcatcagacaaaagagctcctaaggatatgtcagattgacgagaagtggatatttgagagggatgttgaggcactaaggcagcgtattcccgaaggtcctcgtaaatggcttgaagatgagttgttggataaagataagtggtctcgtgcatacgatagaaatggccgccggtggggttacatgacaaccaacatggccgaacagttcaatagcgtgctagttggtgttcgtaagcttccagtgacggccatcgtatcatttacgttcatgaagtgtaatgactactttgtgaacagacatgatgaagctttgaagcgagtccagttagggcagcgttggtccaccaaggttgacagtaagatgaaggtgcaagaaagtaaggcgaacaaacacactgcaaggtgtttcgataagcagaaaaagacatacgaggtcacagagaggggtggtataacgcgtggtggtgttagattcggcgcaagagccttcaaagttgaaggtgaggggaactcatgttcttgccaaaggccattgctctaccatatgccttgctcacatcttatacacgtttatctgattcatgcaattgataaggaatctcccaaccgaatgccgtatcagttctcttcaagagccgttgtgaacacatgggcaagtcgctttgagccatacctcgaccccacacagtggccatcgtacgatggtgaagaatttgttgctgacccaaatttgaagattaaaacaagagggaagaggagatcgaaacgattcaagaacgaaatggactcaggtctgggtggttctggaaggaaaccaccttcatgcgttcaacttgatgctgcgccggtgcaaaatagatgctcgttgtgtcaccaggagggtcacaagaaaactaagtgtcctaagcgtccaaaaaagaagaagtccaaaaaaaatttaagtgttagggaggtacttcaaccgctccgagtcagagctcatgcccccccagtgttcgacgataggtacatcccgtacctaagggctgccgggttgctcggggtggccttggtcgtgagcagaggaatgccagtgttcaacgctcctgcgttgacagcacttgtggacagatggaggcctgagacacacagcttccacctccccagtggtgagatgaccatcactctacaggatgtggctatgatcttggccctcccattacgggggcatgccgtgacgggcaggacagatactcctggatggcatgcacaagtgcagcagctgtttggcattccactgaacattgagcaggggcaaggggggaagaagaagcagaatggaatacccctgtcttggctgagtcagaacttctcacatcttgacgacgatgctgagccatggcgtgttgagtgttatgcccgtgcatacatcttgcacttgttgggagaggttctgtttcctgatgctgggggtgacattgcttcggcgatatggattcctttggtcgccaaccttggtgatctgggccgtttcagttgggggtcagcagtgttggcgtggacatatagacagctctgtgaggcctgttgtcgtcaggcaccatcatccaacatgagtggttgtgtgctattgattcagatgtggatgtggttaagactaccggttggaaggcctaagtggaggcaaagcttcactccttggccctacaatgagccagacatggagaagacagtggcctacctttttgagagtactgccactgcacatgctcaccgggatgtggcatacaagcattatgtcaatgagatggactgcttgcagcctcaacatattgagtggttaccataccacacaaatgaggcttcaagcctgaccctgaactcgatgtgcaatcgagactctgactatttcatgtaccagtgcccattgatttgtttctgggcagttgagtaccaccttccgcaccgtgtcatgcgacagttcgggaagaaacaagattggccggttgaggacatctcaactggagttgaattacacaagtatgacagggtgagaacaaagaaggtgaaagactgggggctagagcataatagatacattgatgaatggagaatagccggaaggaacgataggtacatcgaaactatacaccaaaatcatcttttctcagagtaccttcgttggctgcataggacatatagactgttcctccgccctacttggacggaagccgacatagaggatgaccgcgactccgatgaggggcggaatccctatgatgtccggactagagttggatatcaaatggagcacgccccacttagagacagagtctcgagagagctcctcaggagtgtgaatgaaatggggcatgccctccaagctccgaggggtggtgaggacacggagaacacgctccgcaatgttttagagaaagttcgtcaaaggtgccggaaacttgcagcaagattaggttgcaggtcggttggattggacgacgtgtaccaaccggggagactaccaccaccactacctcaatccgcgcgtccaagtactgctcgacactccatcaggatagaagagcgtgacggagttggtggctcgtcgtcgtcacgcattaagcaagggaggggaaaggggaaggcgccggctccacctagcgacgacgatgacgatgaggacgaggaggatgaggactacgtcgcaccagacgccgaggagatagacatgtcacagcttcccgacgcgcctcaggggacgcaacccacgcaatacaacttgcgatccactcgggcagcgaaaaagagggaggcagagggcggcgccaaccaccctagcgccgaggttgagaagggcggcgccagccagtgccgcgaggcagaagggtttcgggctgggggagggcggcgccagctaccctggcgccgtggtccatga

SEQ ID NO: 62943 - DNA, 470 bp, Oryza sativa
  Clone ID: PAT_MRT4530_64232C.1
agcaaaccaaatgcactaaaattctcatgaatatagtccaaaatctccaacagcaccaatttatccccactaaatccctaacaaacccatatatttgaaccgtctagcttcactataagtctactactacaactcagcaaatgcatcacaagaaattcccccaaaatttccctagtaagtgtgcacgaccaggcaattgaactttcgatatatgagatcacctgtcgaagcatgcgacgttgctgaggtcgcagccggagatcaggagcacggccggctgtaatccctgtaacccgagcaccggcacggcacccgcggcgcgagcactgacgagcaccagatcgggtcaagcccaagcgcccccaagcagccgctaaaacgatgcgaggcgcggggacgcggcggagttacggcatgggtcggcggcggcggcggcggcggcggtggggctggagaggaggaggcagagg

SEQ ID NO: 62944 - DNA, 4113 bp, Oryza sativa
  Clone ID: PAT_MRT4530_64233C.1
atggcggcgccagccacactggcgccgtgcccgtgccaccgtggcacttgggctgtcgtggcgatggatagacttgttcgtgtttactacagtggtagagtggtggaatcttatgttggtgcacatattgagtttgaggatatgtcattaagaccattttgtttcccacccacccagctctagatgaactaaggtcacgagtgaaagaagttcttggatggaccgaggataatgtggagattcgtttttatgggagatacaatgttggtcaagggcataagtatatattaaatgtgataggtcagttggaatgggaagtttactttgatttggtaaaagagtcttcagtttagatctctagtggtgtttgcatcaaagttggtaagtaccgtagaaaatttggatctaaacaaatctccttatcattacgttgagaagaattttgtgacatattcttctcgtcatggaggggatgcaagtaagactgagttggtacgagaagacttggagggggaaggagagaagaagagacctttgcttggaaatgatttaggggaggcaggaccatcaaagagacattgcggtagtgatgatgtgcatgcagtgagggagatgaaaagggagttagtacaagaggggcttgatctaagtgaacatttgtcggagagtgtgcattggttgtcgtacggaggcaaccctgaatacccgacggaagtagcaggccaatatgtgaatccagatgattactttgttgtcgaattgagtggtggtcacgattctgtctcagtagaagtcaatagagaggaggttgacaaggaggcaagtgttgagcaatatgatgttgaatttgctgaagactctgataatgaccgtccattccctccactaactaacaatgacaagttagcattagaggaatggcgtgcatttgagaaggtgtttgagaggaagccggatattcctgagtttagggacctaacacatgcccatggtgcaatactagatggcggcatcaacctagatcagttgccagaaccattccaggtggatggtctcataaagagtttagagttcccatccatggtcacattgaagctatggctccaggagtacgccatcgtgcaccatcgtccataccgtgttgtcaattctgccgcaaataggaagtacactgttaaatgtgaaaaaccatggtgcaaatggaagagaaatcccagtatggtctaccacatcgatactcatcctgatagggttgtcaacgttgatggagtgaccaagaaaatttttatgcgtgcattctggtgcgttggtccttccattgaggcttttaagcattgcaggccagtactagctataaatgcaaccttcctaactggaaaatacggtggtgccttgatgactgcattatcagctgatgcggaggaccaacttgtacctttagcttttgccttggtggagaaagagaattcacgagactggtgctggtttatcgatcttgtccgacgggttgtggttgggcagcacagggaggtttgtattatctcagatcgacatactggtataatgaatgccatgaggactcctgttccaggattgccaccggttcaccaccgatggtgcatgaggcacttcagtgctaatttccacaaggccggtgcagataagcatcagacaaaagagctcctaaggatatgtcagattgacgagaagtggatatttgagagggatgttgaggcactaaggcagcgtattcccgaaggtcctcgtaaatggcttgatagaaatggccgccggtggggttacttgacaaccaacatggccaaacagttcaatagcgtgctagttggtgttagtaagcatccagtgacggccatagtatcatttaccttcatgaagttcaatgattactttgtgaacagacatgatgaagcaatgaagcgagtccagttatgggagcgttggtccaccaaggttgctagtaagatgaaggtgcaaaaaagtaaggctaacaaacacacttcaaggatggccaaggagggacaaccgccgacttacccagccttggaggagtactatgaggcccgtcatcgcggggctgcgatcgaggcggggaggatacttcaaccgctccgagttagaactcatgcccccccagtgtttgacaaaaggtacatcccgtacctaagggcggtcgggttgctcggggtggccttggtcatgagcagaggaatgccagtgttcaacgctcctgcattgacagcacttgtggacagatggaggcctgagacacacagcttccacccccccagtggtgagaggggcaagaagaagcagaatggaatacccctgtcttagctgagtcagaacttctcacatcttgacgacgacgctgagccatggcgtgttgagtgttatgctcgtgcatacatcttgcacttgttgagtgtggttctgtttcctgatgctgggggtgacattgcttcggtgatatggattcctttggtcgccaaccttggtgatctgggccatttcagttggggctcagcagtgttggcgtggacatatagacagctctgtgaggcctgttgtcgtcaggcaccatcatccaacatgagtggttgtgtgctattgattcagttgtggatgtggttaagactaccggttggaaggcctaagtggaggcaaagcttcactccttggccctacaatgagccagacatggagaagacagtggcctacctgtttgagagtactgccactgcacatgctcaccgggatgtggcatacaagcattatgtcaatgagatggactgcttacagcctcaacatattgagtggttaccataccacacaaatgaggcttcaagcctgaccctgaactcgatgtgcaatcgagactctgactacttcatgtaccagtgcccattgatttgtttctgagcagttgagtaccactttccgcaccgtgtcatgcgacagttcgggaagaaacaagactgtctggttgaggacatctcaactggagttgaattacacaagtatgacagggtgagaacaaagaaggtgaaagactgggggctagagcataacagatacattgatgaatggaggacagccggaaggaacgacagactattcctccgccctacttggacggaagccgacatagagaaggaccgcgactccgatgagaggcggaatccctatgatgtccggactagagttggatatcaaatggagcacgccccatttagagacagagtctcgagagagctcctcaggagtgtgaatgaaatggggcatgccctccaagctccgaggggtggtgaggacacggagaacacactccgcaatgttttagagaaagttcgtcaaaggtgccgaaaacttgcagcaagattaggttgcaggtcggttgcattggacgacgtgtaccaaccgcggagactaccaccaccactacctcaatccgcgcgtccaagtaccgctcgacactccttcaggatagaagagcatgaagaagttggtggctcgtcgtcgtcacgcattccgcaagggaggggaaaggggaaggcgttggctccacctagcgacgacgatgatgacgaggaggaggatgaggactatgtcgcaccaaacgctgaggagatagacatgtcgcagcttcccgacgcgcctcagaggacgcaacccacccaatacaacttgcgatccactcgggcagcgaaaaagagggaggcaaagggcggcgccagccaccctggcgccacggttgaggagcgcggcgccagccagtgccgtgaagcagaagggtttccgggggggaggaggagggcggcgctagccaccctggcgccgtggtccgtgaggacggcgccagccgcggcccggaggcaaaaggtcctcgggtgggggagggtggcggcgctaggatggctggggggggcgccagccgttgcccggaggcagaagagacttggcgaaaatttggggggggagaaagttggtggggcccgcaaaggaggggcgcgcctgccatgctggcgccgtggtatgaggggcggcgccagtgtggctggcgccccgctctgccgagtcagcaagcccatgtag

SEQ ID NO: 62945 - DNA, 2539 bp, Oryza sativa
  Clone ID: PAT_MRT4530_64234C.1
agcgctaacttgacgtccttttagatttccaaccggtaaaagcatacagcttcttcctgatatatatgccaaactaattatacagagagattcaaggagaacagataaaaaactaaggaacggggggtgaaacattggacccttttatgattgacgcaattaactacaaggaaagaacaaagaataatggggactaaagtagaattttccatatgttttttttctccccaagcagcttactcgactctcatcgtcgctcggcgagctggaacgtgcgcttcagaaactggctggcgacctcgtcgtcgcggtggcagagcacgcggaggatcgtgttcgggtcggcggcgtcccaccgcctcgatgtcggcggcaccggcgccacgccgccgtagccgccgttgccgtcgtcaccgtgccccaccaacgtcctgctcgacaaggacggcgccgcctgtgtcgccaacttcaacctggcactccttagcccgcgcacgccactgcccgcctcggaggctacatggcgccggagcaggaggacaacaagcggcggcaaggtgccggcgcagtacctgcagtcgtcgccggtcgctgcctcctcctgcacgccgccgcccctccagcccccgccgcctattcggcgcccgctcccaccgcccctataggggtgggtccccggccccacaagggaaatcgccacccctagttgcacgcttgggccttcaacaagctgggcatctagcctgaagtctagaaaagtggacattggggacctgataccatcaccaccgaagcagagaatagaatgtgacgtagatcgaagatttccaagcattccagctcttttgccatgtgaaaaattaggggtgagtatagagctagatattgagctgtttcccctgtgcgcatcacattttttagcattaagctgaacactatatctcttgattgcgaccatggcatttaagcagcaggctatgagcccaacaaaagcagcaaacgttaaggagaaacccgtatcgcttttgcggcttctacgcctcctaatcacatccaattcacgttgcatttgctgattttgctgcagcatgttatctctttcatctttcaagcgttgtattgtctgtatctcttcaatgcttgcattcttcagcatcgtgaaatcgtcagacaacgatttgaagctcctgcttcctaaagatgtaataccagagtcgtcggaacttccactaggcactgtataaacaaccttaagctttatttcctcaatcaccttatcaacttccttgttgaacgtatcaggaggaatctcgtccatgtcagtactggcagctaccctagtgctctgaatcaagaacttatccttgcattgcatatcttgtgggtactctttctgcgcctggagcgtaattgttattgtgcaagaatcccatggctggacgatgttcgcgttcggccggacgaaatacttccttggtgatgttgttttgacaggacggggattttccggcccaatcacagggatcccaaggaaaagtatcctgaatgtccgtgatccatcttgatttaatgaaccatagtcggtccaaaccttgtttgacaggagctgaccgccgacgtggcattccacgtagacaatacatttatagctaaccttgaatgcaacatgatgctcgctgttgttcaccaccttgagattgcaatagcacggtttgtccagctcaaataggaaagtgaggtcctcggggtagatggagatcagcgttccgccgccacccattgccacacctttcccttcgttgtcttcgttcagagtaaaatccggcctttctttccaggaactggcagatgaggttccaatcattttgcccactatgagacatggaataactttcttgtgcctgattactttaatttccttgatcctgggtgaatatctcaaaatagggaaggtaatctcaactccgacaccagcaataatccttctgacacggattgtggtgtgaacaccagatttgtgttttgctataattatgcccttaaagagcgacaatctcctcttgttgggccgttgcattctaagctcaatgatgtcaccaggcctaagatctggtaaagtcttcaccttttcagcctcctcaatgaactgtttgttcagaatcccaatgatctccccgaacttaaccgggggcttgctcggcggcggaggctcatcttcttcctcctgctcttcctccgccaccgcgacagccgcctccgcctcaccctcctccacctcagcgtcagtcgaggcagcaacagcctcagcctcagcctcagcggcgggctccggttctcccgcttctgcgctggcgtccgcgcgagggaccaggcggctggcccggcgaggggaggcggtcagggagaggcggcggaatgaggaggacaccgcgaggagctgcggccgcggcggcaagcggtggcatgcgacggcgtgggggagtaacgcaccggagatggcggcggtggcggaggcggcggcggcggcggcggcggccat

SEQ ID NO: 62946 - DNA, 4614 bp, Oryza sativa
  Clone ID: PAT_MRT4530_64235C.1
atggtggcgccagccaccatggcgtcatgcccgtgccaccgtgacactaggactgtcgtggcgatggatagacttattcgtgtttactacggtggtagagtggtggaaccttacgttggtgcacatgttgagtttgaggatatgtcattgaagaccattttgttttccacccacccaactctagatgaactaaggtcacgagtgaaagaagttcttggatggaccgaggataatgtggagattcgtttttatggaagatatgatgttggtcaagggcataagtatatattaaatgtgataggtcagttggaatgagaagtttactttgatttggtaaaagagtctcagtttaaatctctagaggtgtttgcatcaaagttggtacgtaccgtagaaaaattggatctaaacaaatctccttcttatcattacattgagaagaattttgtgacatattcttctcgtcgttgagggggtgcaagtaagactgagttggtacgagaagatttggagggggaaggagagaagaaaagacctttgtttagaaatgatttaggggaggcaggaccatcaaagagacattgtgatagtgatgatgtggacgtagcgacggagatgaaaagggagttagtacaagaggggcttgatctaagtgaatatttgtcggagagtgtacattggtcgtcgtacggaggcaaccctgaatacccgacgcaagtagcaggctaatatgtgaatccaaataattactttgttgtcaaattgagtggtggtcacgattctgtcttagtagaagtcaatagagaggaggttgacgaggaggcaagtgttgagcaatatgatgtttaatttgctgaagactctgatgatgaccgtccattccctccactaactaacaatgacaagttagcattagaggaatgtcatgcgtttgagaaggtgtttgggaggaaatcagacattcctgagtttagggacctaacacatgcccagggtgctatactagatggcggcatcaacctacatcagttgccagaaccattccaggtggatggtctcaaaaagggtttagagttcccatccatggtcgcattgaagctatggctcaaggagtatgccatcgtgcaccatcgtccatatcgtgttgtcaattctgccgcaaataggaggtacactgttaaatgtgaaaacccacggtgcaaatggaaggtccatgcaactaagaggtctagtggcacgtggaggatatcacaggttggtaaggcacatagttgtgctgctgccgaaggttcaaggagccaccggcagctgacatctaagttcatagcaaatagattatgcaatgccataaaattgcaacatacactctctgcttctgcgttagctttgtatatatttgaggttttccagtatagggtgaagtatggcaaggcttggagggcacgagaagaggctatgaagctcatttacgccattaagcagagaaatcccagtatggtctaccacatcgatactcatcctgatagggttgtcaacattgatggagtgaccaaaaaaatttttatgcgtgcattctggtgcttcggtccttccattgaggcttttaagcattgcaggccagtactagctatagatgcaaccttcctaactgggaaatacagtgatgcctttatgactgcattatcagctgatgcggaggaccaacttgtacctttagcttttgcctcggtagagaaagagaattcacgagactggtgctggtttatcgatcttgtccgacaggttgtggttgggccgcacagggaggtttgtattatctcagatcgacatgctggtataatgaatgccatgagggctcctgttccaggattgtcaccgattcaccaccgatggtgcatgaggcacttcagtgctaattttcacaaggccggtgcggataagcatcagacagaagagctcctaaggatatgtaagattgacaagaagtggatatttgagagggatgttgaggcactaagacagcgtattcctgaaggtcctcgtaaatggcttgaagatgagttgttggacaaagataagtggtctcgtgcatatgatagaaatagctgccggtggggttacatgacaaccaacatggccgaacagttcaatagcgtgctagttggtgttcgtaagcttccagtgacggccatagtggcatttaccttcatgaagtgcaatcattactttgtgaacagacaaaatgaagcagtgaagcgagtccagtcaggggagcgctggtctgccaaggtcgctagtaagatgaaggtgcaaaaaagcaaggcgaacaaacacacttcaaggtgtttcgataagcagaaaaagacatacgaggtcacagagaagggtggtataacgcgtagtggtgttagattcggcgcaagagccttcaaagttgaaggtgaggggaactcatgttcttgccaaaggccattgctctaccatatgccttgctcacatctcgtccacgtttatctaattcatgcaattgatgaggaatctcccaaccgaatatcgtatcagttctcttcaagagccgttgtgaacacatgggcaagtcgctttgagccatacctcgaccccacacagtggccaccgtacgatggtgaagaatttgttgctgacccagatttgaagattaaaacaagagggaagaggagattgaagcgattcaagaacgaatggactcgggtcttggtggttctagaaggaaaccaccttcaggtgttcaacttgatgctgtgctagtgcaaaatagatgctcgttatgtcaccaggagggtcacaagaaacctaagtgtcctaagcatccaaaaaagaagaagtccaaaaaaaatagaagtgttagggaggtacttcaaccgctccgagttagagctcatgcccccccagtgttcgacgataggtacatcccgtacctaagggcggccgggttgctcggggtggccttggtcatgaacagaggaatgccagtgttcaacactcctgcgttgacaacacttgtgggcagatggaggcctgagacacacagcttccacctcaccagtggtgagaatcctggatggcgtgcacaagtggagcagctgcttggcatttcactcaacattgagcaggggcaagggggcaagaagaagcagaatggaatacccctgtcttggctgagccagaacttctcacatcgtgacgacaacgctgagccatggcgtgttgagtgctatgcccgtgcatacatcttgctcttgttgggaggagttctgtttccagatgctaggggtgacattgcttcggcgatatggattcctttggtcgccaaccttggcatacaagcattatgtcaatgagatggactgcttacaacctcaacatgtaagtacttccaatatcacttctagttagacatttacttctataattgagatactaacctacgacatctcttcaacttttgtagattgggtggttaccataccacacaatgaggcttcaagtctgaccctgaactcgctgtgcaatcgagactccgattacttcatgtaccagtgcccattgatttgtttctgggcagttgagtaccaccttccgcaccgtgtcatgcgacagttcgggaagaaacaagattggccggttgagaacatctcaactagagttgaattggacaagtacgacagggtgagaacaaagaaagtgaaagactgggggctagagcataatagatacattgatgaatggaggacagcgggaaggaacgacaggtacatcgagacaatacaccaaatcatcttttctcagagtaccttcattggctgcataggacatatagactattcctatgccctacatggacggaagccgacatagaggaagaccgcgattctaatgaggggcggaatccctacgacgtctagactagggtcggttatcaaatggagcacgccccacttagagatagagtctccagagagctctttaggagtgtgaacaaaatggggcatgccctccaatcttcgaggggtggtgaggaaacggagaacacactccgcaatatcttagagaaagttcgtcaaagatgccggaaacttgttgcaagattaggttgcgggtcggttggattggaagacgtgtaccaaccgcggagagtaccaccaccactacctcaatccgcacctatctccgcgcgtacaagtatcgctcgacactccatcaggatagaagagcgtgaagaagttggtggttcgtcgtcgtcacgcattccacaagggaggggaaaggggaaggcgccggctccacctagcgacgacaatgacgacgacaatgactcgacgaggaggatgaggactacgtcgcaccagacgctgaggagatagacatgtcgcagcttcccgatgcgcctcaggggacgcaacccacccaatacaacttgcgatccactcaggcagcgaaaaagagggaggcagagggtggtgccagccaccctagcgccacagtacgtgagggcggcgccagccgcggcccggaggtagaaggtcctcggaggagagggggcggcgctagccgttgcccggaggtagaagagac

SEQ ID NO: 62947 - DNA, 1178 bp, Oryza sativa
  Clone ID: PAT_MRT4530_64236C.1
ccaaccggtaaaagcatacagcttcttcctgatatatatgccaaactaattatacagagagattacataggaggaacagataaaaaactaaggaacgtgggggtgaaacattgcgacccttttatgattttgacgcatattaactacaatggaaagaacaaaagaataattgtggagactaaagtagaattttccatatgttttttttctccccagagcagctcactcgactcttaacctagctaagcttgtttgactgatattgacctgtgcgcatcacattttttagcattaagctgaacactatatctcttgattgcgaccatggcatttaagcagcaggctgcggggaagagaagattaggctcatcagaagcccaaccaagagacctatgagcccaacaaaagcagcaaacgttaaggagaaacccgtatcgcttttgcggcttctacgcctcctaatcacatccaattcacgttgcatttgctgattttgctgcagcatgttatctctttcatctttcaagcgttgtattggctgtatctcttcaatgctggcattcttcagcatcgtgaaatcgtcagacaacgatttgaagctcctgcttcctaaagatgtaataccagagtcgtcggaacttccactaggcactgtataaacaaccttaagctttatttcctcaatcaccttatcaacttccttgttgaacgtatcaggaggaatctcgtccatgtcagtactggcagctaccctagtgctctgaatcaagaacttatccttgcattgcatatcttgtgggtactctttctgcgcctggagcgtaattgttattgtgcaagaatcccatggctggacgatgttcgcgttcggccggacgaaatacttccttggtgatgttgttttgaccttgaatgcaacatgatgctcgctgttgttcaccaccttgagattgcaatagcacggtttgtccagctcaaataggaaagtgaggtcctcggggtagatggagatcagcgttccgccgccacccattgccacacctttcccttcgttgtcttcgttcagagtaaaatccggcctttctttccaggaactgaattgaactgaaagaaatttgcatgaggaattggaagagcaggagctaggagcgaaggaagagaaagagagagaaacgaat

SEQ ID NO: 62948 - DNA, 439 bp, Oryza sativa
  Clone ID: PAT_MRT4530_64238C.1
tatatggagaaagctggtcacgcgtgcagtgagctggtgatgctatagagcggtcgacctacgcgttcgtttaaatatttttttaaaaaaaaaaaaaattttttattattatgaaaagaaaaaaatattttattttttaaaaaaaaaaaaaatttaatatatattaaaaaaaaaaaaaaaaaaaagggggggggggtttaaagaatcaaaatttccgtaccctgaaatgcaaattattattttttttatgggggaactaaaattaaattaattggcggggattttaaaaatttcgggattgaaaaaacctggggttaaccaaattaaaaaaattttggagaaaaaccctttttgccaaaattggggaaataaaaaaaaggcccatacctaatttttttgggaggggttgcaaggcttaaattgaaaagggaaaacccct

SEQ ID NO: 62949 - DNA, 463 bp, Oryza sativa
  Clone ID: PAT_MRT4530_64239C.1
gttattattagctatctagcttagctactcgatcgtgagatcatcgatcatccgacggtcaaatcagtaatcttgaatatggcggctttgaacggtaaggtggtggtggcggtgatggtggtggcgatggtggcggtgatattcaactctttcgtcttttgccagggtttcaatgaaataaattgtagggagatggaaacgatcaatgtcctccaagggatctttagaaactggatctttgttggtatattgacagctactgtcatattccaagtgatcatagtagaatttcttggcacttttgcaaacactgtaccattgagcggggagctgtggctgctcagcgtcgtcattggcttaattagcatgaacatctttggtttcctaaggggattccagttgatttaatagaccaatctaaccccatggtatgagtgattctgaggccagagatttatgcagt

SEQ ID NO: 62950 - DNA, 602 bp, Oryza sativa
  Clone ID: PAT_MRT4530_6423C.1
catctttatttcagaaatcaaaatgaaattcaaattatcagtaactcttgcactagaactctaatcaatcgtccgttttatatgtcatagaaattcaataaatccccactgttttcatttctatttttaaagtaatttaaaatttcaaggctcctttaaaatgcaggaattttattgtagtagttcatttcccagaagaagcaggaatatttcccaatatccaaaggagcacttaaaaattcttttatcatctttaatttgaaatgggttcatttcatggattagacaatgccattttctggattacatttgaaagatataaattatgaaagaacataggtgaagtgcaaaagctgatggattttacaagctcatcagtgagtacaacaacagataagatggatgcagtagacttgtttatagaactactaggatataattatgctgaagaacatattgtattcttcaaattatttggagcctgtagtatcttcataactgaaaacaactagtagcacattgatctttctgctgtgttatcctgattatagccaaagctcatcacagatttatgacacgaaatgggtatgtctttactaacc

SEQ ID NO: 62951 - DNA, 139 bp, Oryza sativa
  Clone ID: PAT_MRT4530_64240C.1
gttgtcttgctcgccacggggctgtgggtcctactagtgctgtccccggcgtcccacacgaggggcccatccgcggggctgacgaaggccgcggacgcataggcgtttgcggtgacagtcggaggaagcagaggctgct

SEQ ID NO: 62952 - DNA, 467 bp, Oryza sativa
  Clone ID: PAT_MRT4530_64241C.1
aacttaaatgctccgttatgaataaatgatggtgagtagggccagaggtatggtacagttgccatgtattttcaccggccataatttacagatgaagaaataaacaacaagaactttcctgtggcaggaattcaggaccaccatacgtccctacaactgtcctcgcctcctcggcattcaagaggagcaaccagtggcaaaatcatgaaatagacaagaaaaggaagcaacatcacaactgcaccacattggcactcatgaagctaccaccaacacaacagaagcagccaaataatcatttacagggacgccttttattgacgacgaagaagagtgaacatttacatggacgagtttgatactactattgtacagcattggctagcgctatacagaaacctatatttcaataaatcttcagcatttacagggtcgtcagttcaaggctatctgagacgcagatgtga

SEQ ID NO: 62953 - DNA, 736 bp, Oryza sativa
  unsure (1)..(736): unsure at all n locations
  Clone ID: PAT_MRT4530_64242C.1
tttatgaatggctttggtaagtaatgtagcattccttcactatttataataccatcattgaagagatgatcttctttacgttttttttctttcatgtgccctttactactaaaaaagaattgaaagtacaacctgaataattggaggggatcttacttgaccagttggcatgtctctacttcacattagtggggatctcacttggctaattggccagttgtcatgtatctgcttcacattggaggggatctcacttggccaattggcatgtctctgcttcacttcatttcagctcctcagaaacgagcaaccaagttcttattgcccagggatggccaagctctccaaaaacaactgatataatgaaatattctttcgttcctcccacaaagcttcagagctggactatcgcaaaaaaaaaaaaaaaacttcagagctggagggtgaggttgctgccatgcaaagctgaaatttcatttttgaatattcctactgtactattctgttttataatcgacgagcttttgtttgtagagtatgcttaattagtcatagaaccagatttacagtataaattcgtgaaagcagctgtaagctttttcatactattgcttattttcaaaanagataaaatggaaggacacgcctaaaacaacatatttgctttgcttccagacttaatgcctgtcgtgagagtatgctgttatgcttcaagttatggcctagttattttaat

SEQ ID NO: 62954 - DNA, 624 bp, Oryza sativa
  Clone ID: PAT_MRT4530_64243C.1
atggatatagatggaatccctctcctccccaccgactgtggttgtgcctatgaacacccagaccaccctagacctagaggcggtggcggtggtgcaggcatgcgcaaggcggtggcgagcgtcggacagcgctccgtcgagacagcagccaggtggcggccgtggggcgggagcaaggcggtggcagttctagcgtgcgcggcgagcagcggccaggcactggcggttctggcatgtgcgatgatggctcgagtcgacgacaggtttccggcggggcgggcggcggccacgggggttctggcacagcgaaggcagacggcggcagggcttccggtgcgggacgccaggccgccgcagctcccctcccgttggatccggcagaggggaggggcaccgccgccgctggacgccagcgggccaccgacgcctccccgagcgctaccgcccccgccgccgccagtggtaggggaggacgccgccgcgccgctggtggtggtgaagccgccgtcgccgctcgtggagggagggcgccgccgccgccgctgctcgaggggagggcgccgccactgccgcttgggctctgggggagaggcgccgccgctgccgcttgggcacgggggttga

SEQ ID NO: 62955 - DNA, 657 bp, Oryza sativa
  Clone ID: PAT_MRT4530_64244C.1
aggccgcaacctggggttgggccggaaaagtggcctcgctctcgatccctcttgggccgattttgacccggccaacgccggccgtccgatctctagggttttgatcggacggccaagcgtcgagatcagggaaacaaaaccccctccctctccgcagccaccgaaaaccctagcccatttgcttctctcccttctctctcttcgacgccctccctccgcgcccccgatgctcccgtgcccaagcggcggcggcggcacctctctccccaagcgactgcggcggcggcgacgcctctctccccgagcgactgcggcggcggcgacgcctcaacccccgtgcccaagcggcagcggcggcgcctctcccccagagcccaagcggcagtggcggcgccctcccctcgagcagcggcggcggcggcgccctccctccacgagcggcgacggcggcttcaccaccaccagcggcgcggcggcgtcctcccctaccactggcggcggcgggggcggtagcgctcggggaggcgtcggtggcccgctggcgtccagcggcggcggtgcccctcccctctgccggatccaacgggaggggagctgcggcggcctggcgtccctgcgacggcggcggcggctgcggttcgacggtgacctctcctt

SEQ ID NO: 62956 - DNA, 1353 bp, Oryza sativa
  Clone ID: PAT_MRT4530_64245C.1
atggtccaactacagaacttcttctttttcattacttccatggtcgtgccccgtggcacggcagcacccgtactattgaaatggttcgtcagtagagatgttcccactggtgcctcttcttccaatggtactataattcctattcctatctctttattcccttttttggtctatctacattcaaggaaattcatacgctccatggacagagcaaaaagtggagtgttggtcaaagcaagccgccctattctattaccagacaaaatagggagaagctcatccgctagaaatgctttatttcgtttcgttcccgttcttcatttccttattatcgaatccatgggggacttgtcatatttagaatctttctgcggtctgctctgtttacaattctttcgtactctcttctctttaccacgcgataggtcagcgaagcgtgagcgggcgctccgaagtaaaggccaaacacttcggcctaaggggaatgagcaacaaaatgacaagatgaggtgccccgggcacccccatatagaaagaagggtcgaaggttttgggcctgtagctttccccgctcccccctcgtcgagtggtgcttgtttggggccacctgaaatcgggcttgaagctctcgccttaccaacgagccgactgctgatggctgttggtcacgactactacaaaaaagtgaagatgaatctttctatttcacatggaggagtgtgcatctttatgttgggtgttcttctgtctaatacgaataagatacagttcactcaacgattgcctttgggttccgaactccatatggggaaggaacgttgttgtttgcgaggtctcgatcatttacatggacccacttctcattccatttgtgggaatttgatgatttataaaccgtccccaacgagcgaaaggttcatgtttgaacatgatgaatcacttcgtgccgacctgttgcccataaactttcctgcctcatatgagaatggaaaactggaagattttctgcatcggtggatgaagaatcacgaacataagaatttcaggtttagcatgttcccagaaagaagatactttttttccattcgagaaacgaggagcacgactgaagtggctatacatacaaatccatttacggatctatatgcttcgattggaactggaagttccagaactggcggctggtataccaccataatgaaattgccttttctttttagtattcggataggatttctgttggcttcatcggggggctcgcgtagtttgttacgtcaactccaaaaggataagttgcattggaatcgagaaagtttcgttcataattgcataaaaggagtaaaaatagtggct

SEQ ID NO: 62957 - DNA, 284 bp, Oryza sativa
  Clone ID: PAT_MRT4530_64246C.1
gcacgaggggcaggaggtgctctgagtcgccggtgggcgcgcgcaaccttttctctcctctctcccccctccccgtctcccgatctgcagggctgccggccgtccggcgaactgagtttgggagggtttgacgcgcggttcgactccatctccgtcggaaacgagctcaaagaaaatggtaatcctctgtgctagccacattggcatcaatactacccgttcccgattctggtcaggatggttgtcgcagaatggctgtcccagaatgtgttatcatatccctg

SEQ ID NO: 62958 - DNA, 311 bp, Oryza sativa
  Clone ID: PAT_MRT4530_64247C.1
ggaattaaaaggggtggttcaatttaccaaacccgggattgggggacagggaaaccaaaaaaacacccccggggaaggggtttaattttaaaaaaagaaagggtcaaatttttgggaaaaaagttttttatccccggaaaattggacccttggtaaccaaaccccctttaaaaccctaaatttggttaggggggggggccaaatgggtttttagccccccccaaaaaaaaataattttttgtggtccttggggggaagggtttaaaagggacccctgccgggaaaaaaatttccttggggttgtccaaggg

SEQ ID NO: 62959 - DNA, 582 bp, Oryza sativa
  unsure (1)..(582): unsure at all n locations
  Clone ID: PAT_MRT4530_64248C.1
aggaagaagaatatttcaactgcagtaatatctttaatggtagtcgcattataggtcaacaagtacataacattctgatagggagagaaatggattactcagcattcgtatacaattaactctgcaacaaccacttaataggccgtgatccaagggctaaatccataaaaagaagaaaaggtaaaagaaaatgaaaacaaaaaaccactgagctagctatgatacctgaatcatgggataacaaatcaccagttcatcttaactaccagctttgaaaactcaaaactgatgccacaggcaactaagcttggagaccatattcactgtccgcactccgcaggatcagtacttgccgtggcaataaagaattaggcaagacagcctctttactcgatcttgacagaagagtacatcagcctagtgaacaggaagcatgcgtagaatccgatcgtaccagtcaaggcaaagaaggcatatgaggcggtaagcatgtaaccgaagtacagaacagctgacacnaaactttgtgatctncagctttgtgaagaagtagaaggttgcatacaagaacaggtagatagc

SEQ ID NO: 62960 - DNA, 586 bp, Oryza sativa
  Clone ID: PAT_MRT4530_64249C.1
aaaggccaacgggcacgaggcaaacaggggcaggacagcaaatgggacacagagaaacgaggtgaaagaggatgcgcagtggcgcaatgtgcgtgaggggcctgggacactgcaccacgatgtgtgaactgccactgaggtgacaactgatgccacaaagaaacacacacactgaatggtggcaaactggtgttgtgcacacagcaacagtgtgtgcacaatgcccaagtgggctggtgcacacaattgttgtggtggcaatgcccaatgtgctgggcacacaaagtgggatggatgtgtgccaacagaacaccctgcactggggtggttggttggagatgccacaagtgacactgattgagggggttgatgcagcaagctggcacactggtgcatggtgaatgcagatgcacactggcttgaggagggtggattttgaccaaaaaaacacaacactggcaccacagtgtggtgggacaatggtggtgtgtgggaatggtgtgtgttgaactgtgctggtgtgggaaagatgcaaatgaagtggctgtgggtgtgctggatgctgcaaaaaaaaaaaaaaaaaaaa

SEQ ID NO: 62961 - DNA, 386 bp, Oryza sativa
  Clone ID: PAT_MRT4530_6424C.1
cggaccgggcaggaaaaaatggaaccaaacaaattataggggtaaaacccccctcaccctttgaaaaaacaactttgcataagcatttactacatccagcagcaggaaacataaggttcaagggatcaaactttggaaaatacttaaatactaggccaaacgggtcgtatttcaaaattcagctaacacccccacgggtttcactaaaacaaccacccttaaagccagggggtcacttttttgcctttttaggggccgctgcaatttgaacaagaactgcccctgcaggaactgctggcttttttgggccctgaaccaaccttttctccctcctggaaattttcctctcacgggttgccttgctcttggcacccttaaccccaaac

SEQ ID NO: 62962 - DNA, 398 bp, Oryza sativa
  Clone ID: PAT_MRT4530_64250C.1
aaaacaatcggggggtttgggccccccctcctacccgccttgggaagggggtttccccccaaacccaaaaaaaaattttttttttttttttaaaaccaatttggggaaagtttaaacctgggggggggggttttttttggcaatctttaagcggactgggcctggggtttggggattttaaacccctttttaaaaatttttgggtccccgaccaaaaaggccggggggatcctttttttgggggggggcccaaaagggacccccccgggggggggggtcccggccctggaattccttgacaattgggcccttttgtacccaaaggggctaagggggggaattcctgggttttttttcccggggggggggcttttcgcccccccccccccttttttggg

SEQ ID NO: 62963 - DNA, 230 bp, Oryza sativa
  unsure (1)..(230): unsure at all n locations
  Clone ID: PAT_MRT4530_64251C.1
aaatatatataacccgagcttccatatatttcattcacatatnccgcgcccgagcgcatatagtcggagcagataccactcttacatcaagtcacagaagatcanttgaaacaaaaacaaaagcagagcacggcctgtaaaatcaaaagaccattaacaaacggggaacacaccaaacaaggtgttttacatcatcnaatcanagataaacaattaaacacggctatata

SEQ ID NO: 62964 - DNA, 352 bp, Oryza sativa
  Clone ID: PAT_MRT4530_64252C.1
actgaatgattttttttgaaatggagcgttgtcaaatttttggaaactgaaccatttttttttgaaggttttgttttcaaagatccggaagctggccctccttactaaggagtttttgtttaaactaaatctgaacattttcccacccagataatttagtagggtttaaataaaagcagcccattgtccaccatggtgtacttagagccactttaactacatctttggatttggtagcacgcgcaactcttttgaatatcgtgtggatgaacacaaaggggctgacaaacccagtaaattgatctctagtgtggaaacatcaagggttttagaatgcacataaattgctttt

SEQ ID NO: 62965 - DNA, 469 bp, Oryza sativa
  Clone ID: PAT_MRT4530_64253C.1
atgtgggccccacatgtcagtgactcggggagggcggtccacggtggaccgagtccacggaccggggaggagcagcgcaccacgtggtgcacacgtggcgccaacgcggcgcacacgcggcggccacgcggcagccacgcgggcagccaaaccgacggctccgatctaccgcccggtagatcggatgttggatgcggctcgcggccggcgcgcgcgggcacggctcaaactggcccggcggccatggcgcatggcggaggggcgcgcacgcagcggcgacgcgaggcggcgaccggcggcgaccggccggcggcggagggcggcggcgtcgcggcgacgcgagcggcgatagcggtggctaagcgactaggcggcagtgcggcggctaagcagcgcgggagagagggagaatcaccgaggacgatcgacgacggcgagcgacggagggcgatgacgacggcgagacgag

SEQ ID NO: 62966 - DNA, 2347 bp, Oryza sativa
  Clone ID: PAT_MRT4530_64254C.1
atggagaagagccacgccaagagcgacgaggcggcggaggacgcagcgaggaggaagaaggaggaggcgcaggacaaggcgctgctgaagaccgcggaggccgagctggacgcggcgaagaaggagctggagacgatcaaggccgggagcttccagttcatgacgtccatggactgcacgcgcaccgagatcatgcgcgtcgccgaggagatccgcctgctcaaggcgaaggaaaagaaagcggacgcgcaggtgcaacagctgaacaccaagctcctcaaggcgaaggcgcggttggaggccgtcacggcggccgacgagaggtcgaaggcgatcgtgtccaacttggcggcggcgatgaagcaactgaaagccgagacggaggcggcgaggatggaggaggacctcaccaagctggagaaacggtgcgtgatcgcggaggccgagaacatcgagaaggagatcgccacgaccgagggacggatcaagcagtcggccagggcgtcgtcggcggcacggcggcaggggacgatgaccatctcccggttcgagtacgagtacctgaccgggcgcgcggcgctggtccgggtggtgaccgacaagaaggtggccgcggcgcaggcgtgggtgcaggcgctgaaggccagcgagaaggaggccgcgcgcgcgccaggcggcggagcgggaggtgagggagatggaggccagggcggcgcaggtggcggcggaggcggagaagacggcggcggagcagaaggagctggagcaggagctgtacgacctgaacgcggcggcggagagggacggcctgcagtgcgcgtacccgcggcggcggtcgagcagggtgtcggcgacgtcgaggaggctatttggattgtacaaccagcttcttagcaaccagccggataccagcattttcttcgtagtcatatagttccagagagaagaatgcgtccaccatgttccctcgaacaaaccaagagtccagctccgcgacatctaccttgctgaaaactagcttctgaatgttgccgctagcctctttctggtatatttcggtcccataggtcgcagcttcaccgctgacaatagtggggatgtgtaggcggacagtaggacaattcacataaccatattttttaatcaatggtctccattcagaagtgctcccagaatcctgagatgatttctgagcgataccatcacagaattctagaattttactgagattctcagggatgtcaaccagtatgttcaactttgggcgacctgcgctgtctaggaactttgtgctgactccaaactggatccgcagaccagcacaacaaagttggatcgggctacctttgtgcttgatagatgtttttcgagttaatcggtaggaagaaggaacagaaatttggatggactcagttgaaacgtcatctggctcgaggaacccagaaaacccactagaacttgcatcgatctgtatgccagaacctaatgtcatttcctcgatattggatatcaactcaatgggttccttgtttgttgcaggatcgattgattgttggttacctccagcttggattgcattgtcaactcgagaaattgttcgttgccgttttgaggaatcaggtgaagaccgtgctacaggttttggcacctcaggagaagcagctccattagcttggctccttgtaattgcacgctccaccaggttctcaacagtcagcactcctggaagacttgcctccaagaagagaactgtagcacaatacttgagaacttcaagattcatcctaacatcatcaaggctcctgtgactttgtcgccccagaccaaagtaatttgccaagcttgccatcttcatgtcccctgctctcctcccaaatttctgggtaagcagaggcaaggtgtcgatcatcccctttggttccggaggtggccgtccaatttcagcgaatgcttcccttattctggccaagtcaaaccttacgatgttgtgaccagcccagacacgcccgtgaaggacgctgtagacggcgtcggcgacgtcgcggaaggccggggcggcggcgacggcgtcgcgggtgatgccgttgcagcgcacggacgccgcggagacgaccccgaggtcgccggggcggacgagcgtggcgtaggaccccaccacgacgagccgccgcgggcacacgaggatggccccgaactccagcagcgcgtacccctgccccgcccgctgcggcacggaggtctccacgtcgaagaacgcgatctcggggccccccgcctccggcacagctcctcctcctcctccaccaccaccgctcgtcccctcccccgcgctcgtcgccatctccat

SEQ ID NO: 62967 - DNA, 4664 bp, Oryza sativa
  Clone ID: PAT_MRT4530_64255C.1
atggatagacttgttcgtgtttactacggtggtagagtggtggaaccttatgttggtggacatgttgagtttgaggatatgtcattgaagaccattttgtttcccacccacccaactctagatgaactaaggtcacgagtgaaagaagttcttggatggaccgaggataatgtggagattcgtttttatgggagatacgatgttggtcaagggcataagtatatattaaatgtgataggtcagttggaatgggaagtttactttgatttggtaaaagagtctcagtttagatctctagaggtgtttgcatcaaagttagttcgtaccgtagaaaatgtggatctaaacaaatctccttttaatcatggcgtggagaagaattgtgaggcatattattctcgtcgtggagggggtgcaagtaagagtgagttggtacgagaagacttggagggggaaggagagaagaagagacctttgcttggaaatgatttatgggaggcaggaccatcaaagagacattgcggtactgatgatgtggatgcagcgagggtgatgaaaagggagttagaacaagaggggcttgatctaagtgaacatttgtcggcgagtgttcattggtcgtcgtacggagtcaaccctgaatacccgacagaagtagcaggccaatatgtgaatccagatgattactttgatgtcgaattgagtggtggtcacgattctgtctcagtagaagtcaatagagatgatgttgacgaggaggcaagtgttgagcaatatgatgttgaatttgctgaagactctgatgatgaccgtctattccctccacttactaataatgacaagttagcattagaggaatgtcgtgcgtttgagaaggtgtttgggaggaagccggacattcctgagtttagggacctaacacatgcccatggtgcactactagatgacggcatcaacctagatcagttgccagaaccattccaggtggatggtctcagaaagggtttagagttcccatccatggtcacattgaagctatggctccaggagtacgccatcgtgcaccatcgtccataccgtgttgtcaattctgccgcaaataggaggtacactgttaaatgtgaaaacccacggtgcaaatggaaggtccatgcaactaagaggtctagtggcacgtggaggatattacgggtaggtaaggaacatagttgtgctactgccgaaggttcagggagccaccggcaactgacatcaaagttcatagcaaataggttatgcaatgccataaaactgcaacctacactctctgcttctgcgttagctttgtatatatttgaggttttccagtatagggtgaagtatggcaaggcttggagggcacgagaggaggctatgaagctcatttatggtgaatggggtgaagcgtatgtccgtttgcccactttgctgcaagccattaagcagaggaatcccagtatggtctaccacatcgatactcatcctgatagggttgtcaacgttgatggagtgaccaagaaaatttttatgcgtgcattctggtgctttggtccttccattgaggcttttaagcattgtaggccagtactagctatagatgcaaccttcctaactgggaaatacggtggtgccttgatgactgcattatcagctgatgcggaggaccaacttgtacctttagcttttgccttggtggagaaagagaattcacgagactggtgctggtttatcgatcttgtccgacgggttgtggttgggccgcatagggaggtttgtattatctcagatcgacatgctggtataatgaatgccatgatgactcctgttccaggattgccatcggttcaccaccggtggtgcatgaggcacttcagtgctaatttccacaaggccggtgcggacaagcatcagacaaaagagctcctaaggatatgtcagattgacgagaagtggatatttgagagggatgttgaggcactaaggcagcgtattcccgaaggtcctcgtaaatggcttgaagatgagttgttggataaagataagtggtctcgtgcatacgatagaaatggccgccggtggggttacatgacaaccaacatggccgaacagttcaatagcgtgctagttggtgttcgtaagcttccagtgacggccatttgtatcatttacgttcatgaagtgcaatgactactttgtgaacagacatgatgaagctttgaagcgagtccagttagggcagcgttggtccaccaaggttgacagtaagatgaaggtgcaagaaagtaaggcgaacaaacacactgcaaggtgtttcgataagcagaaaaagacatacgaggtcacagagaggggtggtataacacgtggtggtgttagattcggcgcaagagccttcaaagttgaaggtgaggggaactcatgttcttgccaaaggccattgctctaccatatgccttgctcacatcttatacacgtttatctgattcatgcaattgataaggaatctcccaaccgaatgccgtatcagttctcttcaagagccgttgtgaacacatgggcaagtcgctttgagccatacctcgaccccacacagtggccatcgtacaatggtgaagaatttgttgctgacccaaatttgaagattaaaacaagagggaagaggagatcgaaacgattcaagaacgaaatggactcgggtctgggtggttctggaaggaaaccaccttcatgcgttcaacttgatgctgcgccggtgcaaaatagatgctcgttgtgtcaccaggagggtcacaagaaaactaagtgtcctaagcgtccaaaaaagaagaagtccaaaaaaaatttaagtgttagggaggtacttcaaccgctccgagtcagagctcatgcccccccagtgttcgacgataggtacatcccgtacctaagggctgccgggttgctcagggtggccttggtcgtgagcagaggaatgccagtgttcaacgctcctgcgttgacagcacttgtgaacagatggaggcctgagacacacagcttccacctccccagtggtgagatgaccatcactctacaggatgtggctatgatcttggccctcccattacgggggcatgccgtgacgggcaggacagagactcctggatggcatgcacaagtgcagcagctgtttggcattccactgaacattgagcaggggcaaggggggaagaagaagcagaatggaatacccctgtcttggctgagtcagaacttctcacatcttgacgacgatgctgagccatggcgtgctgagtgttatgcccgtgcatacatcttgcacttgttgggaggggttctgtttcctgatgctgggggtgacattgcttcggcgatatggattcctttggtcgccaaccttggtgatctgggccgtttcagttgggggtcagcagtgttggcgtggacatatagacagctctgtgaggcctgttgtcgtcaggcaccatcatccaacatgagtggttgtgtgctattgattcagatgtggatgtggttaagactaccgaatgagccagacatggagaagacagtggcctacctttttgagagtactgccactgcacatgctcaccgggatgtggcatacaagcattatgtcaatgagatggattacttgcagcctcaacatattgagtggttaccataccacacaaatgaggcttcaagcctgaccctgaactcgatgtgcaatcgagactctgactatttcatgtaccagtgcccattgatttgtttctgggcagttgagtaccaccttccgcaccgtgtcatgcgacagttcgggaagaaacaagattggccggttgaggacatctcaactggagttgaattacacaagtatgacagggtgagaacaaagaaggtgaaagactggggactagagcataatagatacattgatgaatggagaacagccggaatgaacgataggtacatcgagactatacaccaaaatcatcttttctcagagtaccttcgttggctgcataggacatatagactgttcctccgccctacttggacggaagccgacatagaggatgaccgcgactccgatgaggggcggaatccctatgatgtccggactagagttggatatcaaatggagcacgccccacttagagacagagtctcgagagagctcctcaggagtgtgaatgaaatggggcatgccctccaagctccgaggggtggtgaggacacggagaacacgctccgcaatgttttagagaaagttcgtcaaaggtgccggaaacttgcagcaagattaggttgcaggtcggttggattggacgacgtgtaccaaccggggagacaaccaccaccactacctcaatccacgcgtccaagtactgctcgacactctatcaggatagaagagcgtgaaggagttggtggctcgtcgtcgtcacgcattaagcaagggaggggaaaggggaaggcgccggctccacctagcgacgacgatgacgatgaggacgaggaggatgaggactacgtcgcaccagacgccgaggagatagacatgtcacagcttcccgacgcgcctcaggggacgcaacccacgcaatacaacttgcgatccactcggacagcgaaaaacg

SEQ ID NO: 62968 - DNA, 289 bp, Oryza sativa
  Clone ID: PAT_MRT4530_64256C.1
actagacagtatggtaggtaactaactacgggactctggaccgcacggggatggactactacaccacctaccaggatacagtcgaagggctaatgttcaccgacaagcagaccgagaggcgggagtggccaactacggctatcctaacggcagcaagggcggcaggatcaagggcatgcacgagtggctcaatcgagggggtcaagacagtcgagaccataaggtacctgccaccacatcaccgtggtacgatctgacgacgcagatcgagaacctgcttcgagccaag

SEQ ID NO: 62969 - DNA, 2471 bp, Oryza sativa
  Clone ID: PAT_MRT4530_64257C.1
acgacatggaagaatggaagagagacctaatttttattcagccttggtgcaattcaccttttctttggtgcgataaaatggaggccgccatcaccatggatgagaacttgggacgaagtgggtcatttcgagctgcgatgagcatctttggcgaaagcatcaacgggaggaaggcagacaagaacagaggaactgttccagcccaagaggttctgtctgctgtcacgcgccagctagcacaatccggtctggacaagctgaatgaacgcaaggcgtacgtggataaagagagagccggcgccgagtccgagctgtcgagagcgcgagccatggcgaaggagcttgagcgccaaatcgagcagacaacggccaaagccacgtcccagaggtcggagctccaagcaatgtgggcagcgaggacgaggaggaagggcaccgacgcaccgggcgcggagcgcgacgcgcggtacgcggaggtggtgcaggagctggaccaagccaagaaggagctgctccggctgcggctcgaggtgcggtccgcggcggaggccaaggcgaaggccgagcgcgacatcgtggcgtcggcgtgcacgatccagtccagcctccgcgccatcgacgagatgaagcggcgggtggacgaggcgaacgaggagcacgtgctggtggagctggcgcgcatcgaggccgagcgggagcgccgcgagatcgaggcccagcgcggcgccgaggccgagcggttcgccgcggacatcgaggccgcgagggccagggtcagggcgctgcagaaggaggcgagccgcgcgagggagatggaggcgaagctcgccgtgacgaactccgacgtggaggtgcttcaggccgagatggagctggtgcgcgccatggagaagagccacgccaagagcgacgaggcggcggaggacgcagcgaggaggaagaaggaggaggcgcaggacaaggcgctgctgaagaccgcggaggccgagctggacgcggcgaagaaggagctggagacgatcaaggccgggagcttccagttcatgacgtccatggactgcacgcgcaccgagatcatgcgcgtcgccgaggagatccgcctgctcaaggcgaaggaaaagaaagcggacgcgcaggtgcaacagctgaacaccaagctcctcaaggcgaaggcgcggttggaggccgtcacggcggccgacgagaggtcgaaggcgatcgtgtccaacttggcggcggcgatgaagcaactgaaagccgagacggaggcggcgaggatggaggaggacctcaccaagctggagaaacggtgcgtgatcgcggaggccgagaacatcgagaaggagatcgccacgaccgagggacggatcaagcagtcggtgaaggagctggatgcggcgaaagcgttggaggccgaggcgatgaggaagctcagggacaccgtggagagcacgatgcaggccagggcgtcgtcggcggcacggcggcaggggacgatgaccatctcccggttcgagtacgagtacctgaccgggcgcgcggcgctggtccgggtggtgaccgacaagaaggtggccgcggcgcaggcgtgggtgcaggcgctgaaggccagcgagaaggaggccgcggcgcgcgccgaggcggcggagcgggaggtgagggagatggaggccagggcggcgcaggtggcggcggaggcggagaagacggcggcggagcagaaggagctggagcaggagctgtacgacctgaacgcggcggcggagagggacggcctgcagtgcgcgtacccgcggcggcggtcgagcagggtgtcggcgacgtcgaggaggtccaagccccggcggtcgtcggtgtccgcgggcgcatggaacccgcgctcgccgtcgttcaccatcaagaggaagaggaagatatcagacgatttctaccatgtattgggtgatactcgtgaggtatcatgtgatacctatcaggtatcagacgatttctcccacgtatcgagtgatacttgcgaggtatcagatgatacctaccagatatcagatgaccaaaatatccttgatcctatctcatctctcctctctgtcttcctcctctccgttcggctcggcgacgcagccagaaacggggatggtggtggcgcggccagggacggggacggcggcggcgcgcccggggacggggaacgcggcggtgtggatggggacggtagcgacgcaactggggatgagaaggcggcgttgcggatggggacggggacggggacggcggcgacgcggctagggacggggacggcggtagcgccgacatggttggggcaggtgggatgttctcctacgccgatgcagatggcgccgctgagccgagcagccttccccaacccacgccggtgccgtccctgtccccagccgcgccggcacctcatcgccgacccccatctccatcctcctcgacgacctcctccttga

SEQ ID NO: 62970 - DNA, 4278 bp, Oryza sativa
  Clone ID: PAT_MRT4530_64258C.1
aagaattttgtgacatattattctcgtcgtggagggggtgcaagtaagactgagttggtacgagaagacttggagggggaaggagagaagaagggacctttgcttggaaatgatttatgggaggcaggaccatcaaagagacattgcggtagtgatgatgtggatgcagcgagggagatgaaaagggagttagtacaagaggggcttgatctaagtgaacatttgtcggcgagtgttcattggtcatcgtacggagtcaaccctgaatacccgacagaagtagcaggccaatatgtgaatccagatgattactttgatgtcgaattgagtggtggtcacgattctgtctcagtagaagtcaatagagatgatgttgacgaggaggcaagtgttgagcaatatgatgttgaatttgctgaagactctgatgatgaccgtccattctctccacttactaataatgacaagttagcattagaggaatgtcgtgcgtttgagaaggtgtttgggaggaagccggacattcctgagtttagggacctaacacatgcccatggtgcactactagatggcggcatcaacctagatcagttgccagaaccattccaggtggatggtctcagaaagggtttagagttcccatccatggtcgcattgaagctatggctccaggattacgccatcgtgcaccatcatccataccgtgttgtcaattctgccgcaaataggaggtacactgttaaatgtgaaaacccacggtgcaaatggaaggtccatgcaactaagaggtctagtggcacgtggaggatatcacgggtaggtaaggaacatagttgtgctactgccgaaggttcagggagccaccggcagctgacatcaaagttcatagcaaataggttatgcaatgccataaaactgcaacctacactctctgcttctgagttagctttgtatatatttgaggttttccagtatagggtgaagtatggaaaggcttggagggcacgagaggaggctatgaagctcatttacggtgaatggggtgaagcgtatgtccgtttgcccactttgctgcaagccattaagcagaggaatcctagtatggtctaccacatcaatactcatcctgatagggttgtcaacgttgatggagtgaccaagaaaatttttatgcgtgcattctggtgctttggtccttccattgaggcttttaagcattgtaggccagtactagctatagatgcaaccttcctaactgggaaatacggtggtgccttgatgactgcattatcagctgatgcggaggaccaacttgtacctttagcttttgccttggtggagaaagagaattcacgagactggtgctggtttatcgatcttgtccgacgggttgtggttgggccgcatagggaggtttgtattatctcagatcgacatgctggtataatgaatgccatgacgactcctgttctaggattgccaccggttcaccaccgatggtgcatgaggcacttcagtgctaatttccacaaggccggtgcggacaagcaccagacaaaagagctcctaaggatatgtcagattgacgagaagtggatatttgagagggatgttgaggcactaagacagcgtattcccgaaggtcctcgtaaatggcttgaagatgagttgttggataaagataagtggtctcgtgcatacgatagaaatggccgccgacatgatgaagctttgaagcgagtccagttagggcagcgttggtccaccaaggttgatagtaagatgaaggtgcaaaaaagtaaggcgaacaaacacactgcaaggtgtttcgataagcagaaaaagacatacgaggtcacagagaggggtggtataacgcgtggtggtgttagattcggcgcaagagccttcaaagttgaaggtgaggggaactcatgttcttgccaaaggccattgctctaccatatgccttgctcacatcttatacacgtttatctgattcatgcaattgatgaggaatctcccaaccgaatgccgtatcagttctcttcaagagccgttgtgaacacatgggcaagtcgctttgagccatacctcgaccccacacagtggccaccgtacgatggtgaagaatttgttgctgacccaaatttgaagattaaaacaagaaggaagaggagatcgaaacgattcaagaatgaaatggactcgggtctgggtggttctggaaggaaaccaccttcatgcgttcaacttgatgctgcgccggtgcaaaatagatgctcattgtgtcaccaggagggtcacaagaaaactaagtgtcctaagcgtccaaaaaagaagaagtccaaaaaaaatataagtgttagggagatacttcaaccgctccgagtcagagctcatgctcccctagtgttcgacgataggtacatcccgtacctaagggctgccgggttgctcggggtggccttggtcgtgagcagaggaatgccagtgttcaacgctcctgcgttgacagcacttgtggacagatggaggcctgagacacacagcttccacctccccagtggtgagatgaccatcactctacaggatgtggctatgatcttggccctcccattacgggggcatgccgtgacgggcaggacagagactcctggatggcatgcacaagtgcagcagctgtttggcattccactgaacattgagcaggggcaaggggggaagaagaagcagaatggaatacccctgtcttggctgagtcagaacttctcacatcttgacgacgatgctgagccatggcgtgttgagtgttatgcccgtgcatacatcttgcacttgttgggaggggttctgtttcctgatgctgggggtgacattgcttcggcgatatggattcctttggtcgccaaccttggtgatctgggccgtttcagttggggctcagcagtgttggcgtggacatatagacagctctgtgaggcctgttgtcgtcaggcaccatcatccaacatgagtggttgtgtgctattgattcagatatggatgtggttaagactaccggttggaaggcctaagtggaggcaaagcttcactccttggtactacaatgagccagacatggagaagacagtggcctacctttttgagagtactgccactgcacatgctcactgggatgtggcatacaagcattatgtcaatgagatggactgcttacagcctcaacatattgagtggttaccataccacacaaatgaggcttcaagcctgaccctgaacttgatgtgcaatcgagactctgactatttcatgtaccagtgcccattgatttgtttctgggcagttgagtaccaccttccacaccgtgtcatgcgacagttcgggaagaaacaagattggccggttgaggacatctcaactggagttgaattacacaagtatgacagggtgagaacaaagaaggtgaaagactgggggctagagcataatagatacattgatgaatggaggacagccggaaggaacgacaggacatatagactgttcctccgccctacttggacggaagccgacatagaggatgaccgcgactccgatgaggggcggaatccctatgatgtccggactagagttggatatcaaatggagcacgccccacttagagacaaagtctcgagagagctcctcaagagtgtgaatgaaatggggcatgccctccaagctccgaggggtggtgaggacacggagaacacactccgcaatgttttagagaaagttcgtcaaaggtgccggaaacttgcagcaaaattaggttgcaggtcggttggattggacgacgtgtaccaaccggggagactaccactaccactacctcaatccgcgcgtccaagtatggctcgacactccatcaggatagaagagcgtgaaggagttggtggctcgtcgtcgtcacgcattaagcaagggaggggaaaggggaaggcgccggctccacctagcgacgacgatgacgacgaggacgaggaggatgacgactacgtcgcaccagacgacgaggagatagacatgtcacagcttcccgacgcgcctcaggggacgcaacccacgcaatacaacttgcgatccactcgggcagcgaaaaagagggaggcagagggcggcaccaaccaccctgatgccgcggttggggagggcggcgccagccagtcccgcgaggcagaagggtttcgggctgggggagggtggcgccagctaccctggcgccgtggtccatga

SEQ ID NO: 62971 - DNA, 340 bp, Oryza sativa
  Clone ID: PAT_MRT4530_64259C.1
aatgctagtcccggaaggggaaaccaatccgcatatgataacgcccactggaacgggcgcccacgctccaagcgaccccaagaaagcgactactaccgccgtccgcatgacaagacccaaccacacccgaaccgaccgaaataacgtggaacggcgcctggtcgaaaaacaaacaaacaaccgcgggggcgtcaagaaaacgaaccccaccccgacccgttcctcatacgcgaaccacgctgcaatccctcgcgacaaacgcgcagagacacatcacacacgcgaacaacaaggaacagacgaagacattaaaaccaaacgaatcgaaagacaggactaa

SEQ ID NO: 62972 - DNA, 255 bp, Oryza sativa
  Clone ID: PAT_MRT4530_6425C.1
ttataatttccaaaaatgcttttaattaatacaactgtttttatatgaagaacctgggggatcacattgaccagaaccatggcgatcacatatcaggatatcttgaataagtacttatgggtataaaaaaaaataatctcacacatctacaatatatgaatcatttccagtttcccgttgattcaataggggccgatcaataggttataacatacaatatttgaatgtgcttgctatgtaattaaataattatgc

SEQ ID NO: 62973 - DNA, 2253 bp, Oryza sativa
  Clone ID: PAT_MRT4530_64260C.1
atggatagacttgttcgtgtttactacggtggtagagtggtggaaccttatgttggtggacatgttgagtttgaggatatgtcattgaagactattttgtttcccacccacccaactctagatgaactaaggtcacgagtgaaagaagttcttggatggaccgaggataatgtggagattcgtttttatgggagatacgatgttggtcaagggcataagtatatattaaatgtgatagggggtgcaagtaagagtgagttggtacgagaagacttggagggtgaaggagagaagaagagacctttgcttggaaatgatttatgggaggcaggaccatcaaagagacattgcagtactgatgatgtggatgcagcgagggtgatgaaaagggagttagtacaagaggggcttgatctaagtgaacatttgtcggcgagtgttcattggtcgtcgtacggagtcaaccctgaatacccgacagaagtagcaggccaatatgtgaatccagatgattacttttatgtcgaattgagtggtggtcacgattctgtctcagtagaagtcaatagagatgatgttgacgaggaggcaagtgttgagcaatatgatgttgaacttgctgaagactctgatgatgaccgtccattccctccacttactaataatgacaagttagcattagaggaatgtcgtgcatttgagaaggtgtttgggaggaagccggacattcctgagtttagggacctaacacatgcccatggtgcactagtagatggcggcatcaacctagatcagttgccagaaccattccaggtggatggtctcagaaagggtttagagttcccatccatggtcgcattgaagctatggctccaggagtacgccatcgtgcaccatcgtccataccgtgttgtcaattctgccgcaaataggaggtacactgttaaatgtgaaaacccacggtgcaaatggaaggtccatgcaactaagaggtctagtggcacgtggaggatatcacgggtaggtaaggaacatagttgtgctactgccgaaggttcagggagccaccggcaactgacatcaaagttcatagcaaataggttatacaatgagccagacatggagaagacagtggcctacctttttgagagtactgccacttcacatgctcaccgggatgtggcatacaagcattatgtcaatgagatggactgcttgcagcctcaacatattgagtggttaccataccacacaaatgaggcttcaagcctgaccctgaactcgatgtgcaatcgagactctgactatttcatgtaccagtgcccattgatttgtttctgggcagttgagtaccaccttccgcaccgtgtcatgcgacagttcgggaagaaacaagattggccggttgaggacatctcaactggagttgaattacataagtatgacagggtgagaacaaagaaggtgaaagactgggggctagagcataatagatacattgatgaatggagaacagccggaaggaacgataggtacatcgaaactatacaccaaaatcatcttttctcagagtaccttcgttggctgcataggacatatagactgttcctccgccctacttggacggaagccgacatagaggatgaccgcgactccgatgaggggcggaattcctatgatgtccggactagagttggatatcaaatggagcacgccccacttagagacagagtctcgagagagctcctcaggagtgtgaatgaaatggggcatgccctccaagctccgaggggtggtgaggacatggagaacacgctccgcaatgttttagagaaagttcgtcaaaggtgccggaaacttgcagcaagattaggttgcaggtcggttggattggacgacgtgtaccaaccggggagactaccaccaccactacctcaatccgcgcgtccaagtactgctcgacactccatcaggatagaagagcgtgaaggagttggtggctcgtcgtcgtcacgcattaagcaagggaggggaaaggggaaggcgccggctccacctagcgacgacgatgacgatgaggacgaggaggatgaggactacgtcgcaccagacgccgaggagatagacatgtcacagcttcccgacgcgcctcaggggacgcaacccacgcaatacaacttgcgatccactcgggcagcgaaaaagaggtacactccgggctcgcaagcaattcggcgccaacggaagaagtaa

SEQ ID NO: 62974 - DNA, 2188 bp, Oryza sativa
  Clone ID: PAT_MRT4530_64261C.1
cagcaaaaagagatatcactatttcatcaaatagcatagaggctaccttgaaggtacattacagccgtacaggtttaaaaactgacatgaaactaagccgaagggtatcatcaacatctccccaatgctacagtctatgtgaaactaacaacaattgttaattctacaacaaatgtggggggcttaaaatggtaggagaccagtattcgccgaaataaatatgaatcacctcaacacagaccttttcgtggccggcaccacctgaggcagtcgttaaatcaattcaattacagatgaccaacaccttgttggcaaaaagcagtattcacggccttggtgtttttttttttttttttttttcagattggaatcagatatatatagctcggggggtaagatggcacgctaacagtgacaaaccttccaaaacgaaacatatggtaaacagtaaacacccttggagctacaccgatcaggcacgctagtatctccccgatgatgaactacggttgtagctagtatctccccgattatgccacgctaggtgaggattgctgttgcccgaaggaaagcttgactgcctgagcaactatcaatttgaccacacatggacaaggcctagtcggttgccggtgtatatctcctcacgctcttcatcgtagtacagagctgtgatgtcccccagtgcctcggaaggtgtactttggaacttagacaccctttgcttgttaaggttccctgcctttattttggccaagcattttccggttaagatctcactgatatttatggagcaagcattttcttctgaagaaggatcatttggatcagccttgcagtaagaaataataagatcttggttgctggtgatgtaaatactgttggtattgcaatcagggtgccacaacatatggtcctcaaaagatgtgactaattcaccacggaaattccaaacggatactgatctactacgaaaggtcaggtacagatgcatctcatatcagaaagataaacgcagaaggtagtcagtaattcacttctggtgccatcaattgaggtgatgtttcttacatcaagaatttgaaggttctccccttcctgtttgatcagaagtttttcattgaattgctcaatgaaatcaacttttttattgcgatgaagaaggtgtttgaatgacttcaagcgtttaccatcttcaatagaaagaatgtcaaggggaatacagcccttttttcttgagtatatcaatagcattatgccagggctgatctttatttcttgaacattcttatcagatattgtatacaacaaagtgtagtttttcaagtcaaacaccttgtaagtactgtcttgggcagaataagtcagcaccttcccgttaacatcatcaaattccacaaaacctggccatttcaaggactctgtctcgaaaagagggaaaccagcatctggcttcccccgtcgtatatactctattcgagttgtcctgcatcttaaggcactgaagttttcagaaccataaactgatacagtaatgagtgagtcattgttcttgttgtaaaacaaactgcgaatgacttcatctggtcttccattcagaaagcaaatccgctggtttgagactctgctgaatgcagcacatactcctgactgtgataaagcaaagatgatatcactggctccaactatctcaataatctcagaccttttcatcaagtaaggtagtagtgaacccatctccttgggatcatgagtatcaaactcttcctggagctggatgttgcggaaccgctcccgcgtggtgctcgcggagaacgcgcggcacggcagcgcggagatctcccgccgctgcagcttccgcgcgctgttcgccgtcgcctcgggcctccgccgcttccgcgcaagcaccctccgcacgcaggacggccgagggttcgcggagacccgcctcgcctccatccctcgccgcccccgccccccgccccaccccacctcgccgccgacgagcaaggctcagacgcgggtgggcatctcgccggaaatcgaatgggggttagggttcgaggcctcggctcgcgcggagtcgagctggcgcctcctcggtctcgtgctacactgtggttgccatcgaagtggagtagtaggtgtgcttcttttaatttggagtacagtgaaaccgagagcctaa

SEQ ID NO: 62975 - DNA, 1699 bp, Oryza sativa
  Clone ID: PAT_MRT4530_64262C.1
gcggcaaagtcaccagcccagccagcgcggcgccaaactccacctaccgacgagagagagagagagagagagggggagggcatggccgccgccgccgccgtcgccgccgtcgccgccgcggccgcggccgcggagcccaccgtctccaagtcggcgccggagctggtcccgcccgcggggcccaccccgcgcggcgcgctgccgctgtcgtccatcgacaagaccgccgcggtgcgcgtctcggtggacttcatccaggtgttcccgccggcgaccggcgggcccgcggcggacggccaggaggacgccgtggccaggatgcgcgacgggttcgcgagggcgctcgtgccgtactacccggtggccggccggatcgcggagccggcccccggggacgtggtggtggactgcaccggcgagggggtgtggttcgtggaggccacggcgagctgcacgctcgccgacgtgaacaacctcgagcgcccgctcctcatcgccaaggagcacctcctccctcgccctccgcccgaggagaagctcgaggacctcatcctcatggctcaggtgaccaagttcacctgcggcggattcgcggtggggatctgcttcagccacctggtgttcgacgggcagggcgcggcgcagtttctcaaggcggcgggcgagatggcgcgggggctcccggcgccgtcggtgcccccggtgtgggaccgcgacgcgatccccgacccgccgaagcccccgccgcgcgggccgccgccgtcgttcacggcgttcaacttcgtgacccaggtggtggacgtctcgccggagtccatcgcgcggatcaaggaggacttcagcgcctccccgacgggcggcggccaggcctgctccaccttcgacgccgtgaccgccgtggtgttcaggtgccgcgcgctcgccgcgtcgtcgctccccgacgacgccgaggtccgcctcgggttcgccgccagcacgcggcacctgctcgccggcgttctcccggcggtggacgggtactacggcaactgcgtgtacccggtggggatcgcccgtcaccgcggcgcggtgcggggcgcggcgctggcggaggtggtgggcgtggtgcgggaggcgaaggaggcgctcgcggcgcggttcacggactggctcggcggcggcggcggcggcgaccactacgacgtgccgctggactacgggacggtgacggtgtcggactggagccgcgtggggttcaacgaggtggactacgggttcggcgagcccgggtacgtgttcacgctcaacgacgacgtcaacatcgtcgcgtcggtgatctacctccggccgccggcgcccaagcgcggcatccgcctcatgctccgctgcgtcgaggagccgcacgccgccgccttcgccgacgagctcgccaagttcgcctagatatacgtgccatattgccatgacgatgtgtgtaaggatctcatctcatatcatttgggtcacaagttcacaaccctgctgctgctggtttgtgcatgtaaaattcgatcaacgttggaattcgtgacgtttattcgtgtcttaacgagacgttatgtcgtaactttggcgcgagagggaataaaatccagtgaagtctctggtttacatctaaaaaaaaaaaaaaaaaaccgattcctgcagaaaaaaacctcgtgccgaattcctgcagcccggg

SEQ ID NO: 62976 - DNA, 162 bp, Oryza sativa
  Clone ID: PAT_MRT4530_64263C.1
atgtgggcctcgtcccgcccagatccagcggcggcgggcctcgtcccgtccaagtccgatgatgggcgctctttcctccggcagctgtcttccggtggtcaccttttgcctggggttggtcttgccctctacaggccctcctccacgtctaactcgggatag

SEQ ID NO: 62977 - DNA, 222 bp, Oryza sativa
  Clone ID: PAT_MRT4530_64264C.1
atggatttgtacctcatgttccacagcgtgctgatgcacgtcgccgccgcgctggtggtgctggtgtacatcccgctgtccatgcccgtgaagctgttcttgtgggcgttcgtgaagccgctgaggaaggagagcctgagagggaaggtcgtcctcatcaccggcgcctcctccggcatcggcgagattacatacaaacccaatgcatcttggatgcaatag

SEQ ID NO: 62978 - DNA, 2058 bp, Oryza sativa
  Clone ID: PAT_MRT4530_64265C.1
atggcagaagcttttgaactttctgaagacaccttaaggtctaccagggagtcacaacaaaaactgagcgtccggctcatcaccaccactgccgtccccaccagcccgagcacaggtggtagtgtggtagcagccgggagtgacggcggcatgatgtggaaacgtcagactaggtcgcggttccgcggaatgatggaagaaatgcaacgcattcggcggtccctgattgctaaagcagctggattagttgctgtaatgaatgcttacattctgtttattacaagaagagccatgcgacgccacaaccacagatttagagctttgcaacccacttttaggaggtcaattgaaactatcagtagatacttcgctgaggtattattctctattggtgagctgcgaaatgagatgataaaaccaccctcatctgagcctcattcaaaaattacatccaatcgaagattcaacccttattttaaggattgcattggtgcaatagatggaactcatgtgcttgctcgagttccatcaacaatatctgctgcctttaggggtaggaagaaagagaccacccagaatgtaatggctgcagtggactttgatcttggatttacatacgtacttgctgggtgggaaggatctgcacatgatgccctcatacttgcagatgccttggagagggatgatggtcttagtgtcccctcaggaaaatactatctcgttgatgctggatatgctgctagaccggggttccttccgccatatcgtgggtgtcgataccatttgaaggagtatgatagaagaaactaccctcgtgattcgagagagttgtttaatctaagacactcctctttaagggtcacgatcgagcgggcatttggcgcactcaaaaaccgcttcagaatactctataacaagcctttccatccatacaagacccaagtcaaattggtccttgcatgctgcatacttcataactggatacttcagtttgggatggatgaccatgtgccactagagagtgattggaactcagatagcgatgatgaggagcccgatgacttagatgaagacaataggggaatggcgcaaattagggatgatttggctggtgctatgtggaacaatagagggatggctgaggctggtggcgggaatggtggccatggtggacaccatggagccttgcattggacaaccaacatgtctagcttaatgctaaggcgcatggttgagcttatagcaacaggtgttaggactgacaagggtttcaatgaagctcaccttaaccaagttgctagatctttgtctgatcactatggaattgaaattagtggaacccaagtgtataaccatcttcgcaaatggcgtcaaaggtgggtgcgtatcactaggctcaaagaccttagtggggctctttgggatgatcagacctcaacgattatcctagaagaggagcactacatgggacatgtcaaggaacaccctaaggatgctgagtttctcaatgtgcctttagagaactatacacaaatggcaataattttttcaaataggcaagccactgggagatttgctatggggtcaaatgaagcgcttggaaaccctgctggtgaggctgacagtggtctgggacctcttgatggcactattggggatggtattgctgctggaccaagtggtgtgggtgctgaaggtcctggaattgctgctcgagcaagtggtgttgggcctactgatgaggattctacctcagataagaagaggaagagagcatctgctttgaatgaaggtgaagttgctctcatcagcaatatgacagattcagtgaacaacatggcttcagcaataggcgctactgcacatactgaggttcaccctgatttgtgcaacacagtgatggatcttccaggtttcagtgaggatcagctggaccttattctagcttatctaactaaggagaaggctgaaagccttgtatacattcagaagaatgaggcttgtcgtgctcgttgggttaggaagttcctgaatgagcatcaccctgagagcatctaa

SEQ ID NO: 62979 - DNA, 192 bp, Oryza sativa
  Clone ID: PAT_MRT4530_64266C.1
acgtccacgcgtgcgcgcaagaccagagtaccttactttaccacttgggcgctatgggtaactatgtattatcagcacagagtgagaatgcagatacactaactatcccgacaaagtaggattcacgcttgaagattgaaccacggcatctagctgtcacacttgagacagaatctacgccacgggtttata

SEQ ID NO: 62980 - DNA, 178 bp, Oryza sativa
  Clone ID: PAT_MRT4530_64267C.1
aaagtctccatttacttttttcgagggggaaattctttaatattttgagcccttcttttccggccaagctcaatgaacaaggcttacaatggcatttacctgttggactagattaacccacgtaattttttcctccctttcttaaagtggacttcatgcaaatgcatctgatgctata

SEQ ID NO: 62981 - DNA, 762 bp, Oryza sativa
  unsure (1)..(762): unsure at all n locations
  Clone ID: PAT_MRT4530_64268C.1
actcctgaattgaaagctagcatttgcaagcttgtcaaggacaccataaacctaagccaataattactaagcagatcatttgtaactgtagaaggtacttgaagtataccaggtagacaagcattcatgtttcgtacattttatttacttgatactatgtgacaaggtntaaaacataattataacatgtttttttttntggtgcttttgccagagaggtgaccaaatttatttggatcaaatggatgaagctcatcgggcggctgcaattccgcccggggggttagagcgctgacctcgcatatttatattgtgtgtaacttctgttgaggcaggggtatgtgaacctgactgagtagcaattgacgatagctgtaaactgccaagctcatactgtttgattacattatttgattcctttaagtccgttctgcatatttatgaggttccttgtctcttaagtatcttgtgtcagcttgacgagagatactccatagatttttctaagctcctttgctttcagaagccattgtctgtttcaatgaccttataaatatttatgaagccattgtttcaatgaccttatatcaaggaaaacataaggatatcttgtttcctgtttcctgtgatttgttattttgctgtgaactcgtaaaagtttacataacgccgtaccatgatatccttttttctttaaacatcaccaacgcttccacattccaacacatgtatcacataccatctgattacttgttttttgca

SEQ ID NO: 62982 - DNA, 1309 bp, Oryza sativa
  Clone ID: PAT_MRT4530_64269C.1
ttcctgggtcgaccagcgtcggacgcgtgccacgcgtccggcggtgagttgttgtaaagttgcaagagagagatcagttgttgagtgcgtggaagcagagatcaggaagatgctggagaagctgtgggacgacgtggtggccgggcctcgaccggagaccggcctggagaagctccgcaaggccgctacaacccgcccccttgtcatcaacaaagatggcgacggcgaggcgagcggggcggcgtacaagcggacgcagtcgatgccgacgaccccgacgacgccggtgacgccgtcgtcttcgtctccgacgacgacggcgacgacgacgccgcggggcagcaacgtgtggaggagcgtgttccacccggggagcaacctcgccaccaagagcctcggcgccaacctcttcgaccgcccgcagcccaactcccccaccgtctacgactggctgtacagcgacgagaccaggagcagccatcgctgaactaaataatcccattgatcggaggctggtcgatctctctgtcacgccacgtttgctggtccttgtggttatctaatacgtaattaattatctagtatgttgctatcttatcttgttactctgttcctagtagcttgctgtctctgttagtactaccagagaccggtacgtgtcagctagcctgctggctcctatcaagggctagcgacaacccaaagaagtgtgtttgtgtgtaaacatcttccatgtgtaaatactgccgtgtgtttccctactttcagcgtttaattacctttgatgtgataataccaataccagcttgagatatttcttcttggttgcaatattttgcaattcttctaagatacttattcgtcctcaaatataaaaaaaaaaaaaaaagcgcggcctgggactcgcctcactcgccctgcccctctcccacgcgccgtccgccgccgtgaccggaggcgagcgagcgcgcgcccgccgacgacgctccccgccgccactggatccgccacccacgatcctttcagccgaggaagcaagaatttcggctggtcctatatgaatcctcggtcccttgtatactagagggcagtaggagtttggatccaagatgaggggcagaagcgatggggggcagagcaagaggcccatcttgctgctctgcgtgatggtcgcgtgcctctgcctcctcttcttgtatttctctggctccaatgggcaggctgggagtgccgcattagagtacgggaccaagttctcgcgctcactcgggtggggaagtgatggggacggtgacgacggctcggagga

SEQ ID NO: 62983 - DNA, 395 bp, Oryza sativa
  unsure (1)..(395): unsure at all n locations
  Clone ID: PAT_MRT4530_6426C.1
ataaaaaaaattgataaatttttttacaaaaaaaaaagactgatttttacaaaccaaaaggctacctgcttgtttataaaaacaaccactcccgcttcgtttttaaaaaaaaaaccgtacttaaaaaaaaattccaacaaccaacctatttgggctggatacaacgaaaaagaaggggaggtcgacccttctaccagctatgaaaaaaaggtccaaatctatccgatacttgtacttttatacaagatggaacctaatgcactcccagcatacggntgttttttttgggaagggaacaacaagttggcggcggggatgatcattggacccattatgaaggggggcttattgatggtctgatcctcccaggcatgggaaggccaaagccactattt

SEQ ID NO: 62984 - DNA, 261 bp, Oryza sativa
  Clone ID: PAT_MRT4530_64270C.1
aaaagaaattacaatcctttaaaagtcatccaaaatgaataggcgtgaatgagttacggaaaaacacgaacagacgggcatggtgaaaaaggaagagaggcccatgcaagcccaccaaccaccggatctcgctgggaggagtgggccacctcttgtgcatcccctcaatcctttaccttgcttcttcaaagtcgagactcgtgagagacaataggcgatgagagagtgtgggcgctcttaacatggagagaaaaagaaaac

SEQ ID NO: 62985 - DNA, 978 bp, Oryza sativa
  Clone ID: PAT_MRT4530_64271C.1
aggggcgatgggtactcgaaccggccgggattacttggaggtagtagtgagttgttgtaaagttgcgagagagagagagagagagatcagttagtttgttgagtggaagcagatcaggaagatgctggagaagctgtgggacgacgtggtggccggtcctcgaccggagaccggcctcgagaagctccgcaaggccgctacaacccgcccccttgtcatcaacaaagatggcgacggcgaggcgagcggagtggcgtacaagcggacgcagtcgatgccgacgaccccgacgacgccggtgacgccgtcgtcttcgtccccgacgacggcgacgacgacgacgccgcggggcagcaacgtgtggaggagcgtgttccacccggggagcaacctcgccaccaagagcctcggcgccaacctcttcgaccgcccccagcccaactcccccaccgtctacgactggctgtacagcgacgagaccaggagcagccatcgctgaactgaataatcccattgatcggaggctggtcgatctctctgtcacgccatgtttgctggtccttgtggttatctaatacgtaattaattatctagtatgttgctatcttatcttgttactctgttcctagtagcttgctgtctctgttagtactaccagagaccggtacgtgtcagctagcctgctggctcctatcaagggctagcgacaacccaaagaagtgtgtttgtgtgtaaacatcttccatgtgtaaatactgccgtgtgtttccctactttcagcgtttaattacctttgatgtgataataccaataccagcttgagataaaaaaaaaaaaaaaaaaaaaaaaaaaaaaaggagcatccactcgttctggagccgccgccacggcggtcgagtccaagggcgtcagaagaaaaaagaaaaaaaaaaaaaaaagggcgcccgctcataaggaggccaagcttacgtacgcgtg

SEQ ID NO: 62986 - DNA, 2010 bp, Oryza sativa
  Clone ID: PAT_MRT4530_64272C.1
ctacatctctcccgtgttatagtaacccatcgtagaaaacgtgacctccaggcaagctctaggcagattcttatgccccgacttcttctctgccaactgaaaccaaaacggtttcttacagcttccatgctttaatacaggcacagcaatattgccatcaaaatgagacgaaccatacgtgccaaatgctttgatatgtaacaactcgtctaaaggaacaattacaacggctgtaaacttggtatgctgtccaacacggtccttgtaaagcgtcatggaatcctcgcctgaaaatgctacaagcaaaatatcataagcttcagatgtgctgcccagatcaatatcgatagtggcctcaatcccattctttaagaagatataacgcatatcaagtggaccgaacgggccatcaattcttgatatcaactttttgtcatgctcaatggtctcatagtcgaactccatacaggcgttaatgagtatgtcatcatctgaactactatcactgtcactgcccttaaccttcaagtgaaactcgattaaagcactgtcccatacggagatgccacgcatggggggactaatctccaatgaaggcgaatccaggttcaattgacaagccttctccctgctgacattgaagatatagttcctcaatggctctttatcatccctcacagccacaaaaccataaacatgcatggaccggccatgtgggaaatctccagtaaacactagtccattgatccgcagcatagttgatgcaacatacttgtcttcatgtgcaaagcgcttacacccccaagtggttggagaagtgtcattcaagcgatagtcaacgtaaaacccaatcttggaaaaacgcaagtcctcaaggtcccgtggccagatgcaggcagggaagaaatgctgatccagagggagagtggcattcaactctacaatctttctcatacagtcttcagagtaattgataatcttcattgccatctttatactgcgtttccgtaaagctttctctgaatctttcttggaattgtccaacgacgactgagcgactgtggggggatttggagtcctctccgatgaggcctgaccctcttccatccgcctcgtcgccgcacaaggacagccacatcctccgggggcggaagtgcggtgcgcggcgaagtgggtgaccttgatcaacgggaggaggcggtctagctcgtcgtcatctaggtctgagaaagcactatagacccgttcagtttgaaaacagtcaatccacgacgcagaatcctcgtcattgttctggacttcaagattttttatcccagcaccaccttttttccttcggagaacaaacaatgtcccacgcaattttgcagttgtcaccatggcagtgttcatcccctgtccagaagaaagctcttcggcatttgtcaatggcggcaacacacccttagggagaaggatggctcccatcatataggaagggagggcggagagcaccgaattgatgagagtgagccgtccatcagaagacagaaggtgaccgcgccaaccggcaagacgttcgtcaatcctagcgatgagcggttggaagtccgcgaggcatagcttggtaacagagagagggaggcctaaataaggttgggggaaggaagctatcgggcaaccgagagtcccagccagccgaaccgcctcatcatgcaggacattgatagggaggaaggtgctcttgtgaaaattaatttttagcccagtggcctcggagaaggaatcaaggatggctttgagcaccacaagttgttcttgctctgccggcaagatgacgagtccagcaaagcaatctaggaagcagatgcgtaaagctttctcggagtctttcttggaattgtccaaaggcgactgagcgattgtgggggggatttggagtcctctccgacgaggcttgatcaacgggaggaggcggtccagctcgtcgacatctaggtctgcaaggcgacgagaatcggtcgccgccat

SEQ ID NO: 62987 - DNA, 707 bp, Oryza sativa
  Clone ID: PAT_MRT4530_64273C.1
tggctcgctagttttagcttagacccagtaattagtaggagtagacgcctaccctacgtaatcacatatgtatataaataaataatatagaagtcataatttgaagcaatatctaaaagaatatgtgtgcaacatacctagaatcaacgggagttggattctaaaagatagttctctatacaccgtagttcatcacatgtgcagttggattcctaacaattattgtcatttttttccatagattagcaaaccggtttgacaatacaacaattatgaatgtatgcattgacctatcactactagaaaaacattttttccatgcagccaaaacacgtttttgcaggcagccaaatcttccgcctgcacctaaaggcctgtgaaaatcatcaatatttttacaggcagaccaagcactgcctccgaaaatcattttcactagtggaaattcaatcttcccaagcgctacagtagccccacccacgaaagtagtctcggcgccataaaaaaaatgccccaccagctcaaccatgccctcgggtttcaccctagctatcataacaaatcacaaattaccacaaattcttcatccatttaataaaatggaatcacaaacatccatgcatcaacacaagagcatcggattcaaattcacaacaccgacttgcagattagctagcatcaatcaaagtggaaataacaaacaaaaa

SEQ ID NO: 62988 - DNA, 969 bp, Oryza sativa
  Clone ID: PAT_MRT4530_64274C.1
caacccacaacattgagcgatagtacaaagtagttaagtgatcaacaaaaaatgacagttggcaacagctaataccatgatacccggaatttgtacaacaaaataggaaaagagtacacgaaaagtagatgctagactgagatcaaaggatattgatggaagaccccggtcatattttgttgagctgcttgaaagtatgtcaagatcagcagaggctatcattaccctctgggttgtcaatattcctacaacaggacctcttagagttgtttgccagtgaacctggagaacggactcgtttggtttcaatttgataaatttcttcccctccgttttcgtggtgatggataccccattatctgcagataacctatatccctgtaggagcttcgccagtccaatgtgctttcccgaaattacatacaacatggttgattctagtggagcagaaaatatgcgatcaacctctgattcaaaagtaaactgcataggaccctggcgctctgtcggattggtaacattatcagcaaatgtgttttcttcaagcactgcagcattattttcaagagcttcctttgtggctactgctttgagattaaaaagattcagactagttctatcttcctccaggatagcgtattgattatcatccgggcctaaaaatgcagcatctcgaccttttattgaacttcctttgctgtttactgtctgtagatcagtctgctcccagtaaagaacaacttcatgagctactccatttggtccacttaattcaaatacaacaagaaacatatgctgtttaggactgtatacaatgttcttggggtggcattccatatttgaaggtatcgttgagtaaagtttcttatagagattatcagctcctgatgacagattgtgggccattaggttaaatccatccaaatagaaagctctaactggatattgaaccacgcggcggacgcgtgg

SEQ ID NO: 62989 - DNA, 403 bp, Oryza sativa
  Clone ID: PAT_MRT4530_64275C.1
gatgaagaccctctcttcatagtgcaagcactgagtggaacccacaaggtggtgtgctagtgggacccacaaatccctaactacccccgaaccggcaaatccccaaatttctcctccctcaaatccttctcctctcccaaatcccctcctcccttcgccggcgtaggctcccctcctccctccgccggcgggggctctcctctcctccgggatgggcggcggtggcggcaccctcgaagacggcggcacggcgtggatctggaagacggcggcggcgggaagacggccgtgcggcggcgccctcgaccaccgatgtcggacgaagacgacgatgagctcgtccggagcagcggcagggtcgtcgagacgtggagcggcaacggcgccctcaggcttccccggc

SEQ ID NO: 62990 - DNA, 403 bp, Oryza sativa
  unsure (1)..(403): unsure at all n locations
  Clone ID: PAT_MRT4530_64276C.1
cccctntgaaaaaanacaatggngcncntctccaaantcntcctccaccaccgccgtcgcggcgctccccggcgccgccagggcctcctccttcctcggcggcgccggcaggancggcaggctgctgctgaagcangccgaatcgtcntccgcgcgggcgtcgttcgccgtgcgcgccgcggcgcccgacangccaatctggttccccggcagcaccccgccgccgtggctcnacggcngcctccccggcgacttcggcttcnaccccctgggtctcggatcggacccgganantttgcngtgtnatttncnagcgganctggtncactgccggtnggcgaanctgggggcggcgggnatcttcatcccnganttcntgaacaaaatttggatnctttaacac

SEQ ID NO: 62991 - DNA, 430 bp, Oryza sativa
  unsure (1)..(430): unsure at all n locations
  Clone ID: PAT_MRT4530_64277C.1
tcggatactcaatatgactgcgcttgaatggtnnntgggcagactcaactgatgatggaacaagtggaggaacttcgcagaaaggtacattatcaatccaaagtttctcaagcatacatacagtatcagcattgccatgggcgggtgacttcaggagtgctagctactagtgataatctaaattaaaccacgaaatgacttggctagctttgacaatgcatctatattgccagcaaggctgctagggtataccgcatgcaagttaattagggtagatcgtgtagcctttgactgtataactaaagaaatggtagcttcgttcttgcgagagatttctttcatgagagttgttacatattatactatcttcaatatatttttcttgtgccacaggagcgtcagctgggtgaaattaataggcaactcaagc

SEQ ID NO: 62992 - DNA, 1050 bp, Oryza sativa
  Clone ID: PAT_MRT4530_64278C.1
atggcgattatcagcatgggcggcgatggcggattatcggcggcggcgcgtgagaggggaagaggagggattagggttgggggaggaggcgcaggtcgggccatccggccatcggggtggggaggggcgcgcgggtcagggtggggtgaatccggagcgttggatcggagtgaggttgttagtctagttgttaggtcttggttcttttatgttcttgtaatgttagaaaaccctaatagtgatttggggatttccatagagaatcaaactcattggtggcaaatgagccttcgaactggaaaagagtcttgtgtccatctcatcgcaaggcacattcatgcctacccagggtttatcaacttctttccacttgaaccagagccagcggagttggagtgctctagagaacctgtccagatccgggtcttcgcccttccacagaaaagatcttctgaaacggtcgattcttttgaagacccattttggcgcatgaaggattgtgaaaagaaacgctattgtcaaatggttttgatgaacccattcagtggtgaaacgtttaccatgcctccagcaccgctcggcttgcgttgtggtaggccaaaagcttcattcacatattggtcatcctacagtgtttacttgcgtggtccgtatcttgtggaatttgaagggagggtgttgtctgtctgtgctccaaaaccctttgaacctgatggtggtgggaagttcttcgtcggggagttgacagttggtgaaaaccgagctgctctagtggagctggatgactctgagctgagtaacaagtcttggtttctgggtccagtccaatcattccgtgcaaggatcaagggccatagagtttataactttgcatataaaccacaatgggatggagaagatattgagaaaaatcatcattatcacgtgcattaccatgacttgctcaagaaaaagttcagatatctcacagttgatgaattcagctctgggcattcttgggttgatttaggtggagtgcttgtaacacgctaccccaagacccaagcatga

SEQ ID NO: 62993 - DNA, 164 bp, Oryza sativa
  Clone ID: PAT_MRT4530_64279C.1
atgtcgagcttgcctttcattggtgaagatttggaatggtcggaatttccctccaaccgtcattggggagtgatccacgccgtccagccaaaacctggatccaacgacgaccagggtggttcggccgaactctgggctggcccaactggcccaagctctagcag

SEQ ID NO: 62994 - DNA, 417 bp, Oryza sativa
  Clone ID: PAT_MRT4530_6427C.1
atgtcagttcgtcagtcgggcccacagttcgtgccccgcgccgcatgggaaaatagagggaggacgagcagctcgtctcggtggccggtgaggaagcccgcatcacctaactgcaccaccgcgtcgaggagctcgccgccgtccacctctcagtgccgctcggtctcaatccaccgccagcgctcgattctcaccgccggagaccgattcgcgccacccgagctcaatccgccaccggcgttcgatctgcgtcgtcagagatcagttcgcgccgccggagaacgattcgcgacgccggagattgattcacgccgtccgagctcgtttggcaacgaggagggaggagaggcatggcgacccgaggaggaggagggggggaggcgctgcttgggctgcgccgctcgggacaatagctga

SEQ ID NO: 62995 - DNA, 462 bp, Oryza sativa
  Clone ID: PAT_MRT4530_64280C.1
atgccggtcgacgagaaggccatcctcgagaagaagatcgctgccgccaaggtgaagatggagaagctgcagcgcaccacccgtgagatggaaatcaagctcgtcatctgggacctcatgtccggccgtcgcaagaacctggacgacctgtccctagattttgttgacgacctacagaaggccatcaagaagcgcatccaggagccgtcctgcccggcaccccgagtccgtgggatagagatgtcggatgggcctagagtaagcgcctttcaggtggcggccatgggccagccatacaaagagctaggaaagggctatttggtggacagtcagcgtgggatgaaatccatggagatgcgctcctcgagatggaatctaacgagggaggagaggggtcttatatatggtggatgggtgaggccggatgatggactggagactagaaatggtgttggtgaatga

SEQ ID NO: 62996 - DNA, 495 bp, Oryza sativa
  Clone ID: PAT_MRT4530_64281C.1
atgaaccgaaggtgcaagaaccaaaggtgcaagttgtgtcatccttcggagcagaaatcgaagtcgcaccaagtttggaatgttgaaacagagacagatgtgtatgaggacccatgtcctgccaaaaatgacgtggagaacaccccggtcgataacaatggcactgacaagtctgaagtgcatagagtgctcagaagccacaactccaagtctaaggatgatcaaaaggataagtggatggtatccaccttcagagaggagaagacaaaggaacctatcagatatcaagatctaacaaggatctgtcaaatacaacataccgtgacgctatcaccaaactccgagcagctcaaggacaagacgcctaaagagatagtggaatacaagaagggcttgcacaagaccaagttgcttactatcgcacaatacattggacaagccttcatgaaatttcaacataaaagaatcatcatggttgcgtacaactttaagtaa

SEQ ID NO: 62997 - DNA, 2262 bp, Oryza sativa
  Clone ID: PAT_MRT4530_64282C.1
atggagaggaccaagaagaatgccaccgtgcctcccccaccacgcctcgctgctcggctgcttgcgtcctcgacgagcgggccgagcggtgccggcggcggagcagcggggaggagtggcggcggccggagtggggcagggaaggagcgtcggcggccggagtggggcgggaaggagcgggccaggcaccccgacgaggaggccaaagaacaggaggtgcgcggccacggcgtcggaggcagccgccgcggcgccgcacgccatgacgaggcatgcccgagagaccttcctgatggccctcaccaccttcagcttcctcgccaccttcccgtggctcgacttgatggcgtggagaatggacgagtacctgtcgtggatccgcccgaagctgctccgtgtcgccgcgtcgctgaacgggacaacgggttgctccgcacggcggcgagcggcgccacggtgccatcggtagcggcgacgctgtcggagatggtggccaggaagctgtccgtggacagtgacgaagacaaggactccttcatgcacctcgtctctcgctacctgatcagggaggagaaagagatgatcgactggaacaaagttgagcgacccacccctgagatggtggtgccgtacgactcactggtgcaggctccccgagatatccctgagattagaaatctgcttaataaacttgctgtgctcaagcttaatggaggacttgggacgaccatggagtgcgttgctcccaagtgtacgattgaagtccgcagcggccttacctttcttgaccttgctataatgcagactgagatcgtggagaagtacacaaacattgaaattcacactttcaatcagaataagtaccctcgtatcattactgaaaagttcttgccactttcaagcgaaggaagtacagggtcccattgctggtatcccccaggccacggtgatgtgtttttctcattgtgcaaaagtggaatacttgataccatgttgtcacagggcaaggaatatgtcttcatagcgagttcagagaacttgggcgctacagtcgatattgaaattgaatccttaaccagcacagaaatcctaaaccacttgatccataacaaaaatgagtactgcatggagctgttggagatttttcaggtcccttatgagaatgtagcttttggatataggcgggtgaacttgaaggccatcaagaggctggtaaaagctgaagcactaaagatggaaatcattccaaacctaaaggaagttgatggtgtgaaagtcttgcaacttgaaaaggaagctggttcagcaatacagtgctttgaaaaggccattggtgttactgttcctcgctcaaggttccttgcagtaaaaaatacatccgatctgttcctcatcctgtctgatttatatattgtgatggatggcactgtaacccgtaacccagctagagataattcaacaaaccccttgattgatcttggacctgagttcagaaaggttgacagtttccttgaccgatttaaatcaatccctagtattgttgcgcttgatagcttgaaaatctctggggatgtttggttcggttcaagaattactctcaagggtgaggtgacgattgctgcccagttagggttaaagctggatattcttgatggcagtgtttttgataacaagcattcaacacatagttctggagccatcaaatatacaatgaaattggatgagggagcggactgtgcatctattgattctgcgctcaatcggctgaacccaggatcaactttgatcctaaagaaagatgatttctatcgatacattgacccaattcaggcacggaaccgggcaatgttccattcagaaagcaattgcattatcacagcaactttgaaggacaattggtttgccaaactggtgcaaggaaagctgtggcttataatattggtctttcatcagttcaagttgcttagccgccggcgcctccgctggggtgagaggaggaggaggacgctcagatctattcatcaggatatccagagttacttggacaattactctgactccgacatgtggcatttgattgtacacagtgttgctagagtgatatccaatgtgctggaagatgtaaaccgcaaatatatgaagaatcactacctaggctttcttgccatacattcaacggtgtttgccatcgaagtgataggttcatacgctgttgaacttaattacgacattgagcactatgcagaaccgccagagttatag

SEQ ID NO: 62998 - DNA, 1545 bp, Oryza sativa
  Clone ID: PAT_MRT4530_64283C.1
aactaagaagagcaacctatcctatcccctggataatgacgatgatgatgacactggtgaagagtctgatgcagttgtaccagatggagtggaagaggtagaattagcaaagattgatgttgaaataaaagaaagagaatggaagatactgctcgatgatatcagaactttgtctgttggtagtgaaatatctgctgatgagacccaaaccccaaagtctgatgatgctacatggattgttactggatcaagagcaagtctggtaaaatgtctgaagaaggaacttgttaatgttcgcaatggtaggaaagaggtatcttctatgctgagagttgctatgcacaaagctgcacaagcaaggttaatggaaaaggaaaagaacaaaagcccttcatttgctatgcgagtttcactgaagataaacaaggttgtctggagcatgttagccgatggaaaatcatttgctgaagctgagataaatgatatgatttatgatttcgaccgggactataaagacattggcattgctcatttgacaaccaagttgtttgttctcaaaaatggacttgctaatgcaaaatcagatactgttctggcaccatggaatccaccttccgaatggggcaaaaatgcaatgctgcgtgttaatgctaggcaaggagctccaactggtggtaactcagtaatagagagtctcctcgtagacatctatccactgaaaatttatttgactgaagcaatgtacagaatgatgtggggatatttcttccctggtgatgaacagcacccacaaaagcggcaggaacttttcaaagtctccacaacagcagggacacggcgagtaaagaaaagcacatctattgctgaaacgaacagtcccagtaaacaatcatcgaaagactccatgcttttacaaaagcctgaacttcgacgcacatcttcgtttgacaggacgtgggaggaaactgttgctgaatctgtagctaatgaactcgttacacaatttcagagtcagtcaaatgcgccgcctgaatctcaagatgctcctaaggaagccaaattagtacgatctgctcgctctactcgtgaagagaaaaaaaatatggaccctaatgaggtgaaacaaactagacctcagaaaatgatggacttccgcaacataaacataagtcaggttgaattgcagctcacgtacgagggattgccatttgctgttagtgatgtaagactactaatggatacctttcatcgtgaagattttactgggacatgggcgagcctgttttcacgagtaaagaaacacattatatggggagtattgaagtcagtaactggcatgcagggtaaaaaatttaaagctaaatccactagccaaaaagagccaactgcaagtttaatcgctgccagtgattttaatctaagtgacagtgatggcgatgaagctggtggttctgatcaactgccagcattccttaaaaaacctaatgatggagctggtgatggatttgccacttctgttaagggattattcagttcacaacgaaa

SEQ ID NO: 62999 - DNA, 588 bp, Oryza sativa
  Clone ID: PAT_MRT4530_64284C.1
atgcaccggaggacgtcgtcggagatcaagctggcgatggcgggctacttcgacgccaacgacgaggcgtcggagatctgcaagcagctgctgacgaacatcaagaacgcgcagagaaactacctcgacgcggcgacacggagcagcttcgggcggatccacgacaggtactcgtccattctccacgccatcaagtcgagccacgggaaggtggcgaggaagctgaaggtggtgagggccatcaggaaggtctctcgggcatgcctcgtcatggcgtgcggcgccgcggcggctgcctccgacgccgtggccgcgcacctcctgttctttggcctcctcgtcggggtgcctggcccgctccttcccgccccactccggccgccgacgctccttccctgccccactccggccgccgccactcctccccgctgctccgccgccggcaccgctcggcccgctgctccggcaggagagagaagagggagagagagagaggatagagagagggggatagagaaaagggtagtgaggatgacaggtggggtccacgtgggcctcacaattgaaactgacatgtgggtcctatag

SEQ ID NO: 63000 - DNA, 375 bp, Oryza sativa
  Clone ID: PAT_MRT4530_64285C.1
gaatacagtacaccactgcagcctgttgacaggcttataactggattaaatgcaaatttaacaacacagagaccaagcatatagtgttttatctaattaaccaaaacaggtgagagtgagtgaacaagagcacccttccgttcgctagtaaggaaatactcactaaactagcttgatttacaacatgccatcaggaattctggaccctatatcaattgtatgtcctttctgatacaatgagcacaattactctcctgcatccataagaactgtgaacaactcgcatgagtgaatcacctcacttgcagtatcggtcggccttcttgcgcacgcggtcgtcgagggcctcctccacggtgcggctgcgggaggcct

SEQ ID NO: 63001 - DNA, 248 bp, Oryza sativa
  Clone ID: PAT_MRT4530_64286C.1
ccggccgggtgtggtgacttcgtaatctctcaggatttgccggcccagtcttcgaagatgctcatagggtagggtttgcgtgcgtagggtgagtgcgcgtgcgttgtgagtgtctgcgttatactgtgtaattttaaaaaaagtgggtgctaaaaaaagctacatttgaggttctaagttaatcggagaaaaagaaagtaagaattgcacaatttaatagttataaaaaaaaaaaaaaaaaagcggcc

SEQ ID NO: 63002 - DNA, 804 bp, Oryza sativa
  Clone ID: PAT_MRT4530_64287C.1
tcagacacaaatcggcaacaagtcaacaaatcgagcggcgcgggcggcgcggtcgacggcgaggcgaggagcacggcggcggcgtccccggcgtgccgccacggcgtgggagagaggaggaggcagccggggatgcatcccgccgccaagaaccgccggtctcccctccgccgcttgcgcgacgccgagctcgtcgcgagccaccgcctcggccttctcgatctgccgccgcgaggagaggggagaagcctcccagagctcgccggccacgccgcccccaatccggccgcctagagctcgccggccacgccgcccccgatctggctgccgggagctcgactgccacgccgctcccgatctggtcgcctggagctcgccggccacgctgccgccgattcggccgctcggagctcgccggtcacgccgcccccaccgtccaccgcgccgccgtcctcccaccgccgccgtcctcccaccgccgcttcttcgaatctgccgccgccgctgctcggtccggaggacgccgtcgccgccgcacggcccggaggagaggagaaccggcgccgacggagggaggaagggagccggcgccagcggagggggcatcgccgcttcttcgaatcggccgccgccgctgctcggtccggaggacgccgtcgccgccgcacggcccggaggagaggagaaccggcgccgacggagggaggaagggagccggcgccccggagggggcatgggagagccggcgtggtgaggagggaggaggagacgggctgtgagacctcgtgccgaattcctgcagcc

SEQ ID NO: 63003 - DNA, 332 bp, Oryza sativa
  Clone ID: PAT_MRT4530_64288C.1
atccccgggctgcaggaattcgcacgagggttattttggtagaaatttcatagtgatacccattactatccgaggtttgtttgccttcacgggactgcttataatcgtggatcaagtagtgattttctgtatgggggtactgttatattgttgtttttggtattggtgggtttttaattttgagcttctgcgtggattacaagactcgttcatgcctatataccatcaatttttttggtctggagttgtgctattagaagataaaatgttgtaaaatcgatagagattaatgtactaatagaaatactgtaatcagtaatatcgtggtgcta

SEQ ID NO: 63004 - DNA, 357 bp, Oryza sativa
  Clone ID: PAT_MRT4530_64289C.1
atgtcatcctctctttcccatcttcctcctttcctctctcttctcctcactctctggccaccaaacacgtcgtcagccaccagcaacgcagcctgtcatgacaacttctctgtttcgcttgctcctccgcatccaagccatgtctcattttgcgttgcgctcttcggtgccatagccagcagcatagctcgaagattcactgcggcggtagctccatccacctccacagtgcgccaaccaccgaggaaaacgggaactacaaccgccatagcagcagcgatgcctcgtaccctcccgctcgctaggatcaaggaggtcgattcaacgttgacacccaagcaagtgattgcatggtga

SEQ ID NO: 63005 - DNA, 248 bp, Oryza sativa
  unsure (1)..(248): unsure at all n locations
  Clone ID: PAT_MRT4530_6428C.1
gagccgaccggacacagctcccccccgaaaaatcctccggggggcgcgaggctcccaacggctaatgcacagctcacccgccctcggatatcaatccaattcagcgctcttgcgctatgccagggctctatagcccagctatttgncccgaacgtaaatccaaggcacaaccctcggcaaggaggtcttagggagcgtgggggggatagactacaagcatttgaaccacttcggcagagtggaggcca

SEQ ID NO: 63006 - DNA, 420 bp, Oryza sativa
  Clone ID: PAT_MRT4530_64290C.1
atggcggcgctggggtcggcggcgtggtgggcgaggacggcgatgggggacgcggtggaggaggccggcgatggcagcgctggggtcgacggcgtggtgggggagcgacgcggtgggggagcgacagcgatggcggcgctgtgtcggcgatgcggtgggggagcgacagcgatggcggcgctgtgtcggcgacgcggtgggggagcgacagcgatggcggcgctgtgtcggcgacacggtgggggatgcgatggatgcggccgcggcggtggatgtgatggatgcgggcgctatcccccgatgtgtgaggatgagccgagcagttgggtgcggatcgttgcgccgttggatttagcgaactggctcatactccacgtgtctgtcagggttggagtcaccgccaccactacggaattttaa

SEQ ID NO: 63007 - DNA, 737 bp, Oryza sativa
  Clone ID: PAT_MRT4530_64291C.1
gcgactctatccgacggaatccccaaccccaacccccaaaaccaatccgccgccgcgctgcctcgcctcgctcgtcgctcccaccaccaccacaaacccgcgcctcctccgccgccgcacgcccgcccgccgacgaatcagagtttggatttaatattacaggcgcagccatgttcaacaggctctttggtaagcccaaggagcaggccaatgctagtgcgttggccacgcttgataagttaaatgagacccttgacatgctggagaagaaggagaaagtcttagagaaaaaggcagccgcagaactggagagggctaaggagttctcaaaagcaaagaataaaagagcggctatccaatccttgaagagaaaaaagctttatgaacaacaaattgagcagctagggaacttccagttgagaattcatgatcagatgatcatgttagaagctgcaaaagctacgacagaaaccgttgatgctttgaggactggagctgcagctatgaaagcaatgcaaaaggcgacaaatattgatgacgttgataagactatggatgaaattaatgaacagactgaaaacatgaaacaaatacaagatgctttgtcagcccctcttggagcatctgctgattttgatgaggacgaactagaggcagaactggaagaactggagggagcagaattggaatctcagcttctcgagcctgttgcagcttccccctgtgcatccagggca

SEQ ID NO: 63008 - DNA, 447 bp, Oryza sativa
  Clone ID: PAT_MRT4530_64292C.1
atgaccgcgctggtgttgacggagctgcaccggatgagggacaagaagaaggcgtccgacacgctagcggaggacgtggctttcatcaagaaggatcttgagttcatggagtcattcctggcggatgccgccgacgccgagaagcgtagccacacccaccacacgacgacgacgacgactccctccaagagtttgagaacctggttgcgacacatccgcggcctgtctcaggacgggaaccattatgacgtcgaggactacctccaggagttttgccttcgtgcggagaagccgcctcgtgccaaatccaagctgctcttgccactggacaccatcaccaagcagatcagcagactgaggaaagaaattgaacatgtgaacaagaccagtgggatatactgtaacgcacttaattttggtccggacgctgcacaacccatggtgtaa

SEQ ID NO: 63009 - DNA, 3344 bp, Oryza sativa
  Clone ID: PAT_MRT4530_64293C.1
cccaaaaccaatccgccgccgcgctgcctcgcctcgctcgtcgctcccaccaccaccacaaacccgcgcctcatccgccaccccacgcccgcctgcctacgcaccagctgcgcgccgccgccctccccccccctccccctccacagccgccgcacccgatctacccgacgaagccgcgtgggctgtcaagacgacacctgacgccacgatcaactgccccctccgttaccccgaccaacatgccgaccccagcgccggcgcgcgcccctgctcggttcaccggggctccggccgggccataagtttggaattaattcttcgggcgcaaggcaggtgccaaaaggctctgtggtaagccctacgagcaagccaatgctagtgcgttggccacgcttgataagataaatgagacccttgacatgctggagaagaaggagaaagtcttagtgaaaaaggcagccgcaggactggagagggctatgaagttctcaaaaagcaaagaacagaagagcttcttgccaatacttgaagagataaaagctttatggacaacaaattgagcagcaaggatacatccagttgagaagtcaatgtcagatgatcatgttagaagctgcaaaagctacgacataaaccgttgatgctttgaggactggagctgcagctctgaaatcgatgcagaaggccacaaatctggattacgattgatgagactatggatgaaattaatgaacagtacgcaaacaaataaaaaacagacgaccgaaacacattaatcctcacgaggcccctttctcatcattggcatacaatgatgatggtacaatattggctgcaggcacaaatagtggtcgtgtggtattttatgatgttcgaggaaaacctcagccattgactattcttcgtgcatacaatagctcagaggctgtgacaggtttatgttggcaaaggtcaaagcctgtcattgttaacgagaatagttcttctgaggttgctcttctgggtgggagtagtgaagaatctgttctcatgccagatcccttgccttcagcaacttcagcttttcattctggaggtgtcatcccaaatcttcggtcttctttggctgcaaacccaagtggatttctttctacctctacctcgtccactgtggaggaaactccatacaggacacggccattgtctggtggaccattatcaaagctacaggctcctcgtagtaacttcagtctaaaggatgatatggatgtattctctccacttgtagatgttcaacctttcacaccgtccagtggcagcctgtgggatgaccatgggagtgatgaaacaaaaaaggatgataaacttggagagaagaaattgtcgacaactagaaaattcccgtttattgaagacaataatgagccacatccaatctcagactggaagtcaatttccaattcaagacaggatgatgcctcatcagcaaccactacatccatgccatcatggaagagtgaactatctatcacttcacctgagacagcaactggaaatgcattatccgataggttaactcaccgccaacaagtctcgcgctttggggcttcagcctttcagactggcagctttgcatttgcaggcttacaagattcagctccaacaactggtaactcactgaaaggttctctaacaagtaatattttaatgaacctacaaaacaagggtgtcttgagcaatgcacgcccttccctggacatatcaacttctagcctccagagttcactgtcctcaggcttaatggccaagactatgccaccagtaaactccgaccagcctggagcagcacaatctagttctcaatggagaccctcaacatatactgatagagtgagcacatcgtctgttttcagtgaaggattagcatcagcctttggttcaccaaaatcaaagaagactggggcagaaacaaaagatgaactgctcagcagtcttctatcaagacaagaagcagcagctgcctcttcatctgccaaccttgtagcaaacaatggggtggtgccaccacaattgccaacatcaggtttgtcagctgatcaacagggagcttcatccttctcacttcagtatgtgcagcggatgcttgaagaatccctagggtctgttcagaagtccatccatgaggacgtgagaaatctgcacatcgaacttctaagacagtttcacatgcaagaggctttagccgattgtacttccctcatgaactgcgactttgcgtttgttagtagaaggcgatgtgtggagtttggatttaatattacaggcgcagccatgttcaacaggctctttggtaagcccaaggagcaggccaatgctagtgcgttggccacgcttgataagttaaatgagacccttgacatgctggagaagaaggagaaagtcttagagaaaaaggcagccgcagaactggagagggctaaggagttctcaaaagcaaagaataaaagagcggctatccaatccttgaagagaaaaaagctttatgaacaacaaattgagcagctcgggaacttccagttgagaattcatgatcagatgatcatgttagaagctgcaaaagctacgacagaaaccgttgatgctttgaggactggagctgcagctatgaaagcaatgcaaaaggcgacaaatattgatgacgttgataagactatggatgaaattaatgaacagactgaaaacatgaaacaaatacaagatgctttgtcagcccctcttggagcatctgctgattttgatgaggacgaactagaggcagaactggaagaactggagggagcagaattggaatctcagcttctcgagcctgttgcagctccacctgtgcatccagtgcaggtcccaggcaccaggataccaactcgccctgctccacagaaagcatcagctgaggaggatgagcttgcagccttgcaagctgaaatggcattgtgatcaggttcacaatgaagagacgaaatgtacaaatgattggctgtgctctacggaatttcaacgagtctagctacaatataatttcccatgtgtgtacaatctttggggatagtcagcaatcaaagagagatgctgcttcagtccagtactccagtgttctgttttagtggcttggggggtgtcgtctgttttccatgcacataatttaagttaatctggcacagtaagctccaagctaatccatagtcatgcaatgtgcattgctgtcgcacaatatttttcattgaccattatctgaagccgtgtaaaacaagttgaagcgattgatacgtttgttgggctttctgcttcaaaaaaaaaaaaaaaaaaaa

SEQ ID NO: 63010 - DNA, 518 bp, Oryza sativa
  Clone ID: PAT_MRT4530_64294C.1
agacctggaagggaattgctattcacagtcgtctcacaggatgagaagtacaaagcgaaggtaaaagatatgcggctacctatttgaatttagtgaccaataagaaacgaaagaatacatttgcttgaatgcgatagatgagttgtgccagtagtacacatcatcattcaccgcagagaactaacaaaatttctaatccctggattgctcaccaattttcatcaatttgcattgtgttatacatgtctctggtagatatcaaacatatacacatcaacacgtggtgtgttctatcttccatgctgttgtttcacagacacacacacacacacacgcactgcacagggaagcacaatggtattccttagaaaaattggccattcaatattggctctgttttgaattcacctagacacatcagagttagccttgtctcttaaaatggagagtgggtgattaacagcgaaatttgaagttgaatttccagattaagtaggctatcaatagaaaaatagtca

SEQ ID NO: 63011 - DNA, 371 bp, Oryza sativa
  Clone ID: PAT_MRT4530_64295C.1
ccccaacgggagcatggcgtgtccagtccagcgcgaacaggaaccccgcccggccgtctacgtaccccccctcccacggggcggaaagccacacctccccgcaggggaattacagcgacaccgggcgcgggatctggccttggggggcaaaaattcgggcaaccgggggcctgtaccccgaacgggcggggcaatttttccaacaggcgggtggcctcctcttaaggccacccccgccgcccgcctgcccagatccggcggccagccgcttccaccggggctatcccccaccatggtccagcacctttccatcgccggtcgcctcctcctccaccaccccaccgttgcctgccagattcggcggccattag

SEQ ID NO: 63012 - DNA, 361 bp, Oryza sativa
  Clone ID: PAT_MRT4530_64296C.1
cccacgcgtccggaggaacaagatcttctgatgaagaattatttcaaatttacactcattcagaaagaatcttttatttcgaggattaacgcaagatttattgtgctactttggggtgagaaatcgtgcctaaacagtgaagttgtgaatggaataccactttatgacttcaaggatatcactcaactcggacgagaaagccgtaatacattgcgtcactctcatgaacaaggtcagcaggtcgtctttgaaactattactccagatgatgttgctacactaatatataccagtggaacgagtggaacaccaaaaggagtgatgcttacccaccgaaacctcttgcatcagatttaaaaat

SEQ ID NO: 63013 - DNA, 3503 bp, Oryza sativa
  Clone ID: PAT_MRT4530_64297C.1
atggcgatggcatcatcccgcctcccgctccaactcctcctcgtcgtcggcgccgccgcgtcggagatcgcgcacttcctgggctccaaatatagcaggagggccgatggcctatcacctccgcaccgggccatttagctcgcacgcacggcgggctccgcgtgcttccaattttgttactccaacaccaccttcctctccccggctatctcctctggccacgtgttcataccgggggtcactaactaggtacactcctcgctccccgccccccgtcgcgcagccgattattgggtcgcctccacgaacctttactgccctcctaacggccgcgtacgcttccccaaagacggaagtgaggacctcaatgcccccaccaccaagtacggctagcactagcttgggacgggcaaggcgtacctcgaggccgcactccgccgccacggcacgcgccgcggcaagtggagcaagtagctcagcttggacggccacaacggcaagtacgtgtgcaagccgtccgccgggaaatggagtcccgacatcgcccaggccgttgtggcaccagttctcgactttctcgagcgcaccgactcctacctcttcgtcgacgcgtacacctacttcacctggtcggcgaaccacaccatcgtgccgctccactacgcgctgctcgagccatcgccatcgccgtcgccggcgtaccagtaccacgaccccggcacgggtctctcctacaccaacctcctcgaccacatgctcgacgcggtggtcgccgccatgtgccgcgcaggccactgcggcgtcaggatggcgctggccgagaccgggtggcccaacgccggcgacctcgaccagttcggcgcgaacgcgcggaacgcggccacgtacaaccgcaacatggcgcggcacctggcgtccggcgccggcacgccgcggcggccggggatgcgcatgccggcgttcgtgttcgcgctgttcaacgaggacctcaagacggggcccgccacggagcggcactggggcctgttccaccccaacggcagcgcggtgtacgaggtcgacctgacgggtcgccgcccgccggcgtcgtacccgccgctgccgccgccggcgacgaacgacgcgccgtacccggggaagctgtggtgcgtggtcggggcagcggcggcgaacgagacggcggtgagggagcagatggaggcggcgtgcgccgacgaggccgcgctgtgcgcccccgtgcgcgccggcggcgagtgctacctgccgaacacggtggcggcgcacgcgagctacgtgttcagcgcgcactggaacaagttcagcaaggtgtacggcggctggtgctacttcgccggcctcgccatggagaccaccaccgatccaatatgtactgtactcaagttcatgctttcaacgaaaaacaaccaaaaccccacaaaaactcaaggtttcgactttcgacgcagaatgaaactagaaaacccagttcgcagaaagtgctcaccattacttgagagtgctctattacctggtggaaatggtttgactacgcatgattggatggctgttccagacatttggaggacagcagcagaaaaatatgctgaccgtgtagctttggtagatccttaccatgaacctccttcagaattgacttataagcagcttgaacaagaaatattggatttttctcaaggtctaagggccattggagttgctccagatgaaaagatagccctttttgctgataactcatgccgatggctagttgcagatcaaggaatcatggctactggtgctataaatgttgttagaggaacaagatcttctgatgaagaattatttcaaatttacactcattcagaaagcattgcacttgttgtggacagtcctcaattctttaaccggcttgcagaatcttttatttcgaggattaacgcaagatttattgtgctactttggggtgagaaatcgtgcctaaacagtgaagttgtgaatggaataccactttatgacttcaaggatatcactcaactcggacgagaaagccgtaatacattgcgtcactctcatgaacaaggtcagcaggtcgtctttgaaactattactccagatgatgttgctacactaatatataccagtggaacgagtggaacaccaaaaggagtgatgcttacccaccgaaacctcttgcatcagattaaaaatttgtgggattttgtaccagcagtacctggtgataggttcctaagcatgcttccaccatggcatgcatatgagcgtgctagcgagtacttcatcttcacttatggaattcaacaagtttacacgactgtcaagtacctgaaggaagatttgcaacgataccaacctcaatacatagtatcagttccactggtctatgagattctctacagctcaattcagagacagatatcttccagttcaactgctcggaaatttgttgctcttgcacttattaagataagtttgctatatatggaggcaaagaggatatacgaggctggcattagtggtggtggaagtctcccgatgcatgttgacaaattttttgaggccatcggtgtcaaagtgcaaaatggctatggtctaacagagacatcccctgttgtagctgctagacggccattctgtaacgttcttggcacagttggccacccagtaaagcacacggaaatcaaggttgtggatatggagactggtgaggttcttccagatggttcaaagggggttgtgaaagtcagaggaccccaagtgatgaagggatattacaagaatccgtcagctacaaataaagttttggatcaagaaggttggtttgacacaggggatattggttggattgcacctcactgtccaacagggccaagtcggaagtgtggagggatgcttgttcttgaagggcgtgcaaaagatacaatagttctcacaacaggtgaaaatgttgaacctgctgagattgaggaagcagccagcaggagtgacttgattaatcagatagttgttgttggccaggacaagcggcgaattggtgctcttatcgttcccaactatgatgaagttctagcaacagctaaaaggaagtccattcttgatgggaataacgaactagccaaagataaggttttgaacttgctatatgatgagctgagaacttggatggtggattgttccttccaaattggcccgattctaattgtcgatgaaccatttacggtggataatggtttgctaacacccactttgaaattacggagggacaaagtgactgccaaatatcatagagagattgatgcgttgtacaagtgatgtggagtgagcatgagtacatacagacagtagtttgcattttctttgccttggaagacatctcttgagtagacagtagctagaacatacaataatgcaaccattttaaaatttttttggagtgaaatggaataaggttgctgattcagtatgtataagcattatttctcctc

SEQ ID NO: 63014 - DNA, 250 bp, Oryza sativa
  Clone ID: PAT_MRT4530_64298C.1
agccgataggccatccacacaacaaattaacccgtacgccgccgctcaccgtcgccggagaactctagctccctcccctcctcggccgcaacccctttccccctccatcgccgcctttggggaacggctggaggtagaagaagagaagagagagagagagagactgacaggtcttgagggttcttctgactcaatagataatatcaatcaatctcaggacatcgagcaaggcaagttaccatataccttt

SEQ ID NO: 63015 - DNA, 2946 bp, Oryza sativa
  Clone ID: PAT_MRT4530_64299C.1
atgcggctgttccagtctttcttcatcccgcagctgctgcaaggtgcggtggtggggggatgttacttccaaccccggccaggcacagcggggcaatacatcgagagtcatcttcgcaagaaatgggaggactggaagaaggactggttctacaccgcattgccggaccatccacgacttcggcttcccgtcggtcctcccgaaagatccgccgcatggctggcagtttcggaactgggcgaagagtacgacgcggtgtgggatcaccttaggggcctgcgaagcctgggcctcacaggggcgatggtctttggtgactatttccgccgccgcattgcacctctccaggatcgatcccatggcgcgtgggagtacactggtcccaacgaccccatgcgcacgcatgtgggtgagcgctgggattggggggaggaggacgcgaagatggtgattcggcgagtactgggcttggactccgccgagcaaactctgattccagacgggatccttcccctctgctgcgaccgcgaccgggagagcatcctggccatgatgtcggttgttggcgccggcaggagccggtcctgccggggcggcaccggtggtagcactgccggtgttggtggcggtggcgcgaccgcaggcgggagtcggacaagcggacccggcggaggtgggagctccaggtctcccggcccaaaccgcggacccggggacgactcggccagcgacctgaaagagaagcggaagatgtccgaatctcgaccgccctctcccccgcgtggagggggcgccgagcgcgtggcggatcgtccgccagcgggccacaagcgccctgccgggcctgaggccggacggaaaaagaaacggctccggaagataggacaaacggagccgtgtcgggggagcttcattgagcctccgaagtggactttcaaccgccctccccgcagggttcatgcggagcgccacccgggatcggggggcgagggaggtcgcggctcggatgccgagggacagggcggccctgagcccgaggtcgaggccgaaatcgggggcgggcccgagcctgaggccgaggccaaaattgggggcgggcccgagcctgaggccgaggccgaatctacccgaggacccgaggcggggggcgagagggacggccgctcccccttgcacttgggacgccctcggggctggtcgcgcagaagggggggggcgagagcagcccccagtctcgtggggatccagcagcactccatcatcacaggggcgggccgcgactttttcttctccgactccggcaagtatggagccgctcctgcaggtgctcgccgccgccgattccaccgtccgggaggggctcaagcccaagttcaagccctggcagaagagcgagcggccctggaggctgaatgggcacagctcgccgcggaccgcgcgcgagttgacgaggggcgccacgccatggacgacatggtgagggtgggacacaaaatgcgccaagcccaactagccaaaatccaggcgcgtgaggagtcgctggactccatcatgcgagaggtggaggaagagcggcaggcggcgctggttgccttgagcgtcctggacgaagcactgggtgacatccgcctccagtacgaggcccatgccgaggatttggcgaagaggatcaaggacgcccgcggtatcctcgacgcagctgttgcccaagagcggcgggtatcggaggccaatgcctcgctgcgggctcagacagcggcgctcgaggccgaacgcagggccttggatgagcgtgcccgctccgcgcaggagttcgagaccacgattcgtcaacgaatcgaggtcctcaatcagagccagcgtgagcaaaacgcgcgcgaccaggagcaggcgcagcgagctcaggagctggaaaggcggactcaggtgctggaggagcgagcgcgtctgctcgatcagcgggagtccaccttggccgcccacgagagaacagcggcggaggtggaggcctcccttcgccttcgtgaagaggtcgcagctgagcgtgaccggatcaccctcgccgtgaaagcttcagcggaccgccgcgcggaggagctacggctccgggaagaggcgtgccgggaacgggacgtcgcactcgccgagcgcgaagctgaggtgaaccgccgtgaggtggcctcgcgccagctgggcgagcagctcgcgaaacgcgaggaggccgttgctgggcgtgaggctcggcatctggagagtgctcgcgccaagcgcgcggcgattgcggcgagggcttctgagctggaggcccgtgagaaggacctggcggcgggcgggcagcccggcggcgcggagttggggagccagcttgccacggctcagagcactctcgccgatctagaacgcttggtgcaagatcaagccggggagattgcggccctccgcctcaccaacgagatcggacccgggcagctctccgacgccgtcgaccgactggagcgcgcggggcgccgagtcagcatttccgtgcgccgggatagtaagcttccgcccacactgccggcactcgcactccggctggacgggctggctgcggatctggagaggctggaggaggaggttagcgagaccgtgaaatcgtcgtcggcttccttggcgcgggccgcggtggaactggttctcgtgagccaccaagttcgtgaccccgactttgtcccatggcgcgcactcgaggattttcccccggggaccgaggcaagggctcgggagcaagtccgggaggcggccgacgcgatcgtctctaacttcgaggggtcggcccctcggttcaccttcgggcttgcctcagacgaggagagcggcagcggggacgatgatgacgacttcggcggcgaggactgggacaacgtcgttagcggcgccagcctcgggggcccgggcactccgtga

SEQ ID NO: 63016 - DNA, 627 bp, Oryza sativa
  Clone ID: PAT_MRT4530_6429C.1
atgacggccactggtggagaagtgctttttagtcccggatcatgcaacaaatcacaaattcttaaaaaaaaaaccacggaggcgccgctcggccggccgctgccgcctcctctccgcgccagccggccaccgcccgccgccgtcggctgccgcgccgccctccgcgccgccgcccgccgtcgcgccgccgcccgctgccgcgccgccctccgccctccgcgccgccgcccgccgccgcgccgccccgtggccctccgcgccgcgtgctgcgccggccgccgccccgccgcccggccctgcgcgccgcccaccgcccggcccgcccaatccaaaaagaagagaggaagaaagaaagagataagggagggaaggaagaaagagataaggcaggaggcgaagcttgcgaaggaggaagaggtggtggtggcggagctggagcttgcaagaaagctacaacgagccctctgccagatcaacaccaagtttgggcatggcagtggaggctgctctccctccgctactcccgtcgccgaccagagagctgccctgacaaacaccaaggaggcgaggggaggggagggcgccaccaccgaggaggatggcgacggtgggcagtggcggtggtag

SEQ ID NO: 63017 - DNA, 1706 bp, Oryza sativa
  Clone ID: PAT_MRT4530_642C.1
gcattatgagtttgcaatcctctacataagataaatctggttggcaagcattcagtttcctcccataagatgagaacctctcaccatcattatttgatgggacatgtcaggctgcacgtcgcctgacacacgagcagtgcacaggcgcactaccccagtcccatcggtcattcgaccggtcacagaccggttgagtgcattgcacaccgcattaaatgcggcgtggcgcgattactcgggccgccataaatgcgggtaggtgggcacccccgggcccatatcaccgatagtagcccccggcgttagccctgaccaaaacttttcccaggtggtcaaggttgacgccactctcctagtctaatgatatgtggtccggtcttctgttctatcatcctggaagttggccggtgggagtttagccacgttcacacgccagccttacttcccacttccttccgctgttccgaggtgccgtgggctcaggaatttagcccggtgaccttacgccgcgtacctcacttgcccctgccttttgttaacctctgttcgtgttctatttcatctattcaaacgattattttcgcgtgagtgtgaggactgaactttccatagccagcaatcttcacccgcgataaagccaagctgggcgctatagctagccggcggggccagagccagctgttgaagcttgaaaggacgatcagttgagccgggccgggcactgtatgcagccggcgggaccaaagctagccaaggcgggtggcaggttcatgagtgatccccgcgcttggccctagagggccatggggaaaaaatttgccttgacccggtcatcaccccacgccgcctatatgatcgtcgtgtggttctagagggactcggaggtgttgacgctaccgtggtacctttctgtgaagctgggccgaaacttttgggggtcattggacattccgaagactcgccataaatacctggccgccagccttacccggggaagaggcggggggcctagccccctgcctggggtggcacggcactcttgaagaggctgcgctttcccctgcattggcggcgcgatgcttatcatgccagcgctcgaaagaacctcaaaaatcacgaacgcgccccctacctaacgcgccaaaagtcggagggtgatcttctccaccagggaaccgtgaggccccccttttttgagttccgccaagggcagcgggtgagatccgaggtttttgagacaaaagacacaagggatttatacaggttcgggctgctatgaagccgaataccctactcctgtgtttgggattatggttgagtgttacaagggttcctaaactccggagagcatgcacgttgcctgacacacgagcagcgcacaggcgcactaccccagtcctatcggtcattcgaccggtcacagaccggttgagtgcattgcacaccgcattaatgtggcgtggcgtgactactcgggccgccataaatgcgggtaggtgggcacctgaggcggacacttaacccaacgtacatggtgacctcgggcctgactccccttaggggagggccacgaggcattgggtggcagcctcctccctctaaacatgatatccctgggcccatatcaccgacaacagcgcagacaaaatcgatgcgtcggtggggggaatgctgagatgcctgagctcggtacccaccttcaggag

SEQ ID NO: 63018 - DNA, 497 bp, Oryza sativa
  Clone ID: PAT_MRT4530_64300C.1
cccacgcgtccgttcacttatggaattaacaagtttacacgactgtcaagtacctgaaagaagatttgcaacgataccaacctcaatacatagtatcagttccactggtctatgagattctctacagctcaattcacagacagatatcttgcagttcaactgctcggaaatttgttgctcttgcacttattaagataagtttgctatatatggaggcaaagaggatatacgagggaacagtgctatcgaacaatcccgtcaaaccatcctttattgtgtatatggtcaattggctatctgcaagaattgttgctgcacttctgtggcctttgcataatctggcaaagacgttagtctacaagaaaatccattctgcaattgggatttcaaaggctggcattagtggtggtggaagtctcccgatgcatgttgacaaattttttgaggccatcggtgtcaaagtgcaaaatggctatggtctaacagagacatcccct

SEQ ID NO: 63019 - DNA, 2327 bp, Oryza sativa
  Clone ID: PAT_MRT4530_64301C.1
atggcggcattgccggcctatctcctcctcctcctcctcatcctggtgatcctccgaccagcggctgcgcccggcgccgcttcgcagccgcctacctcggagcctcacctcccgccgccgctgcttgctcagaaggtgcaggtgtggcccaagccgacgtccatctcgtggccgtccgcggtgtacgcgccgctctcgccgtcgttcagcgtccgcgcggtgctgtcccacccgtcgctccgccaggcggtagccttctacacccgcctcatccgcgccgagcgccacgcgccgctggttccccccgccaactacaccctctcccgcgtccccgtccgcaccctcacgctctccgtctccgaccccgacgtcccgctcggccccgccgtcgacgagtcctacacgctctccgtgctcccggactccggatcggccgatatctccgccgccacgccatggggcgccatccgcgggctcgagaccttctcccagctcgcctgggccggcggcggcgccgcctccggtggccagccgatcgtccccagcggcatcgagatctccgaccgcccacacttcacccaccgcggcatcctcctcgacaccgccaggaatttctacccggtccgcgacatcctccacaccctccgcgccatggccttcaacaagctcaatgtcttccactggcacatcaccgacgcccagtccttccccatcgtcctccctaccgtccccaacctcgccaactccggctcctactcccccaccatgcgctacaccgagaacgacgtccggcacatcgtcagcttcgccgcctccttcggcatccgcgtcatccccgagatcgacatgcccgtatactcaaggctaagtgtcgcgcgcttcggatcagggcacacgggttcgtgggcgggagcgtacccggagatcgtcacctgcgcgaacaggttctgggcgccgcacgcggagccggcgctggcggcggagcccggcacggggcagctgaacccgctcaaccccaagacgtaccgcgtggcgcaggacgtgctgcgcgacatggtggccctgttcccggacccgtacctccacggcggcgccgacgaggtgaacacggcgtgctgggaggacgacccggtggtgcgccggttcctcgccgagggcggcacgcacgaccacctcctggagctgttcatcaacgcgacgcgcccgttcgtggcgcaggagctgaaccgcacggtggtctactgggaggacgtcctcctcgggcccaaggtcaccgtcggccccacgattctgcccagggagaccaccatactgcagacgtggaacgacgggccggagaacacgaagcgcgtcgtcgccgcgggctaccgcgccatcgtgtcgtcggcgtcgtactactacctggactgcggccacggcgggtgggtgggcaacgacagccggtacgacaagcaggagaaggagcgcgagggcacgccgctgttcaacgaccccggcggcacgggcgggtcatggtgcgcgccgttcaagacgtggcagcgcgtctacgactacgacatcctgcacgggctgaccgacgacgaggcgcagctggtgctgggcggggaggtggcgctgtggtcggagcagtcggacgagacggtgctggacgccaggctgtggccgagggccgccgccgccgcggagacgctctggtccggcaacaagggctccaacgggaagaagcgctacgcgaacgccaccgaccgcctcaacgactggaggcaccggatggtcgagcgcggcatccgcgccgagcccatccagccgctctggtgctcgctccaccccggcatgtgcaacctgtcgcagtagcagtgtcagtttgctccatcgttcgcctcgctgtcgcctgcacagtgcgaaggaatgttcagaaatccaagtgacagaagaagaatccgcatcgatcttgggggcgtgacgtcgtacactgattgctgaagaaaccaagaacagaataaacgaatgcctactaaacaaatgttctgttctgatgccctcttccggagggaacccgccgattgcgaattgttcaagaaagtcgcggacttatgccgtgcagaaaagaaagttttctttgtgagtagtttctgcacttgatgctgaacagatttttgcactgtttattccttcattttcacaataacacgggtagatagagtagtagtagtatttggctagtgcaatagatgaacaaggttgtagtagaagtgcagaaccatctggttgtagttttgtacgaagggtatcttaatagaaaaaagttgggaaaaaaaaaaaaaaaa

SEQ ID NO: 63020 - DNA, 2454 bp, Oryza sativa
  Clone ID: PAT_MRT4530_64302C.1
atggtctttggcgactacttccgccgccgtatcgcgcctctccaagatcgatcccatggcgcgtgggagtacactggacctaacgaccccatgcgcacgcatgtgggcgagcgctgggactggggcgaggaggacgcgaagacggtgattcggcgggtgctgggtgtggacactgccgagcaaacactgattccagacgggatccttcccctctgtagcgaccgcgaccgggagagtatcttggctgtgatgtcggccatcggcgccagcaggagtcggtcccgccggggcggcaccggtggtagcgctatcggcgtgggtggtggcgggttgaccacaggcgggagtcggacaagcggccccagcgggggtggcagctccagggcacccggcccgagccgcggacccggggtcgactcggccagcgacccgaaagggaagcggaagatgtccgaatctcgaccgccctctcccccacacagagggggcgccgagcgcggggcggaccgaccgtcggcgggccacaagcgccccactgcgcctgaggccggacggaagaagaagcggctctggaagataggccaaacggagccgtgtcgggggagcttcattgagcccccgaagtggactttcaaccgccctccccgcaggtccgaccctttgcaggggacaaaatccgaacgatcagagcggcccggacttggccgatccagggccgcggggccttcacagcctcccggcggggcccacgggccgcacaccgagtccgaccctgggttcacctcagccgggactcgacccgccgcgagcgatagcggcggtgacgtccctcccgagggcggctctgagacccggatccatgcggagcgccacccgggagcgggggacgagggaggtcgcagcccggaagccgaggccggagacggccctgagcccgaggccgaggccaaaactgcgggcgggcccgagcccgaggccgaggccgaatctacccgagggcccgaagtgctcgccgccgccaattccaccgtccaggaggggctcaacgcccaagttcaagccctggcggaagagcgagcggtcctggaggcagagtgggcacagctcactgcggaccgcgcgcgggttgacgaggggtgccgcgccgtggacgacatggtgaaggtgggacacaaaatgcgccaagcccaactagctgaaatccaggcgcgcgaggagacgctggactctgtcatgcgggagacggaggaagagcggcaggcagcactgattgcctcaagcgtcctgggcgaagtgctgggcgacatccgcttacagtacgaggcccatgccgaggacctggcaaagagggtcaaggatgccgcggagtttgaggccacgattcgtcggcgaatcgaggtccttgaccagagccagcgcgagcaggacgcgcgcagccaggagcaggcgcagcgagcccaggagctggagaggcgggctcaggcgctggaggatcgagcgcgtctgctagatcaacgggagtccaccttggccgtccatgagagaatggcggtggaggcggaggcctcccttcgccttcgtgaggaggccgcagccgagcgtgaccggatcaccctcgccgtgaaagcttcagcggcccgccacgcggaggagctatggttccgggaagaggcgtgccgggaacgggacgccgcactcgccgagcgcgaagccgaggtgaaccgccgaggccattgccggcgtgaggctcggcatctggagagtgcccgcgctgagtgcgcggcgatggcagtgagggcttctgagctggaggcctgggagaaggacctggaggcgggcgtgcagcccggcggcgcagatttggtgagccagcttaccacggctcagagcactatcgccgacctagagcgcttggtgcaagaccaggctggggagattgcggccctccgccttacgaacgagatcggacccgggcagttctccgatgccgtcgatcggctggagcgcgcgaggcgccgagtcggcatctccgtgcgccgggatagtaagctcccgcccacacagccggcactcgcgctccggctggacaggctggcggcggatctggagaggctggaggaggaggtcggcgagatcgtgaaatcgtcgtcggcttccttggcgcgggtcgcggtggaactggtcctcgcgagccaccaagcctgcgaccctgacttcgtcccatggcgcgcactcgaggatttccccccggggaccgaggcaatggctcgggagcaagtccgggaggtggccgacgcgatcgtctctaacttcgaggggtcggccccccggttcaccttcgggcttgcctcggacgaggagagcgggagcggagacgatggtgacgacgtcggtggcgaggactgggacgacgtcgttagcggcgccggcctcgggggcctgggcactccgtga

SEQ ID NO: 63021 - DNA, 692 bp, Oryza sativa
  unsure (1)..(692): unsure at all n locations
  Clone ID: PAT_MRT4530_64303C.1
aatccttcgtcttgcttggctacctatcttgcagggagctcatgccgctcgcgggcatggctctcctccagctccgagagcactgctccctcctcccaaatcccctcagacccgcgaggaatcctcgcaagaaccggctcttgccgccaaattcggccaaggttcccggcttctcaagaatctcaatccacggtgcgccgcccgcgcccgaggccgcaatcttggaggaaagggtggaggtggatgtggatgtggaggccgcggttgtgccgtggagggacgcgttcctcttccccgtcgccgccgccgtcgtcgcgtcctggccgctcccttcgctcgcggcggaggccggcgggaaggtcagcctcgagtccatcgtggtggccatcgacgacttcaacaaccgcaaccccttcttcgttggccggggcgtgtcgtctggctcgtggcgatcccgctggtgcaggagtacttcaagaagtacaagggcggtgagcgccatcgacgcgttccgcaagctccgcgacgagccgggggcgcaactgctggacatcagggaggggggaaagagcgtgcggttcatgggcgtcgccgaacctgaggctcgtcgagaaagcgccggggcangtggagttcgacgagaaagaccaggagggatccgtcaaggaggtgctggctagattccctgaccc

SEQ ID NO: 63022 - DNA, 2694 bp, Oryza sativa
  Clone ID: PAT_MRT4530_64304C.1
atgcggctgttccagtctttcttcatcccgcagctgctgcaaggtgcggtggtggggggatgttacttccaaccccggccaggcacagcggggcaatacatcgagagtcatcttcgcaagaaatgggaggactggaagaaggactggttctacaccgcattgccggaccatccacgacttcggcttcccgtcggtcctcccgaaagatccgccgcatggctggcagtttcggaactgggcgaagagtacgacgcggtgtgggatcaccttaggggcctgcgaagcctgggcctcacaggggcgatggtctttggtgactatttccgccgccgcattgcacctctccaggatcgatcccatggcgcgtgggagtacactggtcccaacgaccccatgcgcacgcatgtgggtgagcgctgggattggggggaggaggacgcgaagatggtgattcggcgagtactgggcttggactccgccgagcaaactctgattccagacgggatccttcccctctgctgcgaccgcgaccgggagagcatcctggccatgatgtcggttgttggcgccggcaggagccggtcctgccggggcggcaccggtggtagcactgccggtgttggtggcggtggcgcgaccgcaggcgggagtcggacaagcggacccggcggaggtgggagctccaggtctcccggcccaaaccgcggacccggggacgactcggccagcgacctgaaagagaagcggaagatgtccgaatctcgaccgccctctcccccgcgtggagggggcgccgagcgcgtggcggatcgtccgccagcgggccacaagcgccctgccgggcctgaggccggacggaaaaagaaacggctccggaagataggacaaacggagccgtgtcgggggagcttcattgagcctccgaagtggactttcaaccgccctccccgcagaagggggggggcgagagcagcccccagtctcgtggggatccagcagcactccatcatcacaggggcgggccgcgactttttcttctccgactccggcaagtatggagccgctcctgcaggtgctcgccgccgccgattccaccgtccgggaggggctcaagcccaagttcaagccctggcagaagagcgagcggccctggaggctgaatgggcacagctcgccgcggaccgcgcgcgagttgacgaggggcgccacgccatggacgacatggtgagggtgggacacaaaatgcgccaagcccaactagccaaaatccaggcgcgtgaggagtcgctggactccatcatgcgagaggtggaggaagagcggcaggcggcgctggttgccttgagcgtcctggacgaagcactgggtgacatccgcctccagtacgaggcccatgccgaggatttggcgaagaggatcaaggacgcccgcggtatcctcgacgcagctgttgcccaagagcggcgggtatcggaggccaatgcctcgctgcgggctcagacagcggcgctcgaggccgaacgcagggccttggatgagcgtgcccgctccgcgcaggagttcgagaccacgattcgtcaacgaatcgaggtcctcaatcagagccagcgtgagcaaaacgcgcgcgaccaggagcaggcgcagcgagctcaggagctggaaaggcggactcaggtgctggaggagcgagcgcgtctgctcgatcagcgggagtccaccttggccgcccacgagagaacagcggcggaggtggaggcctcccttcgccttcgtgaagaggtcgcagctgagcgtgaccggatcaccctcgccgtgaaagcttcagcggaccgccgcgcggaggagctacggctccgggaagaggcgtgccgggaacgggacgtcgcactcgccgagcgcgaagctgaggtgaaccgccgtgaggtggcctcgcgccagctgggcgagcagctcgcgaaacgcgaggaggccgttgctgggcgtgaggctcggcatctggagagtgctcgcgccaagcgcgcggcgattgcggcgagggcttctgagctggaggcccgtgagaaggacctggcggcgggcgggcagcccggcggcgcggagttggggagccagcttgccacggctcagagcactctcgccgatctagaacgcttggtgcaagatcaagccggggagattgcggccctccgcctcaccaacgagatcggacccgggcagctctccgacgccgtcgaccgactggagcgcgcggggcgccgagtcagcatttccgtgcgccgggatagtaagcttccgcccacactgccggcactcgcactccggctggacgggctggctgcggatctggagaggctggaggaggaggttagcgagaccgtgaaatcgtcgtcggcttccttggcgcgggccgcggtggaactggttctcgtgagccaccaagttcgtgaccccgactttgtcccatggcgcgcactcgaggattttcccccggggaccgaggcaagggctcgggagcaagtccgggaggcggccgacgcgatcgtctctaacttcgaggggtcggcccctcggttcaccttcgggcttgcctcagacgaggagagcggcagcggggacgatgatgacgacttcggcggcgaggactgggacaacgtcgttagcggcgccagcctcgggggcccgggcactccgtga

SEQ ID NO: 63023 - DNA, 369 bp, Oryza sativa
  Clone ID: PAT_MRT4530_64305C.1
atggctcaagatgctggcgacacagtgctcccggcatcacgcattacgacggataggcaccttagcctcccccgcaagattatgtcggaaggcgccgtcgtgagggcgggggagtcgcggctgcggccacggtatccggagcgatccgtgcacctcttgtccttcgctatggcggggttgattccgccattcttcggattcttccatgaggttttggattgctatgaaatccatgccttgcatctcgcacccaacgccgtgatgacgctagccatcttcgcgcatctgtgcgagatgttcattggggggcagcctcctccctctaaacctgatacccccgagcccatatcaccgatgggagccatctaa

SEQ ID NO: 63024 - DNA, 676 bp, Oryza sativa
  Clone ID: PAT_MRT4530_64306C.1
atagacggcatagcacagctgcccgggtccgatctcgttggtaaggcggaggccgcgatctccccagccttgtcttgcaccaggcgctctaggtcggcaagagtgctctgagccgcggtaagctggctcaccaactctgcgtcaccaggctgcccacccgccaccaggtccttctcctgggcctccagctcaaaagcccttgccgccatcgccgcgcactcggcacgagcactctccagatgccgagcctcgcgcccggcaacggcctcctcgcgtttcgcgagttgctcgcccagccggcgcaaggccacctcacggcggttcacctcggcttcgcgctcggcacgcctcttcccggagccgtagctcctccgcgcgacgggcctccgaagctttcgcggcgagggtggtccggtcacgctcggctgtggcctcctcacgaaggccaagggaggcctccgtctccgccgccgttctctcgtgggcggccaaggtggactcccgctgatctagcaggcacgctcgctcctccagcgcctgagcccgcctctctagctcatgggctcgctgtgcctgttcctggctgcgctcgtcctgctcgcgctggctccggtcaaggacctcaattcaccgacgaatcgtggcctcaaactcctgcgcggagcgggcatgcaag

SEQ ID NO: 63025 - DNA, 164 bp, Oryza sativa
  Clone ID: PAT_MRT4530_64307C.1
ctgtccgcttcactcatgggaacatatcgtgctcgcatactatcgtttttggtcgcctactcctcaccatgtggataaacggatccagattcgtgcccagaatggcatggccgattctaatgggagatgtacctgagctgctacgagaggataccctactatca

SEQ ID NO: 63026 - DNA, 276 bp, Oryza sativa
  Clone ID: PAT_MRT4530_64308C.1
atggctgcaagcccagctgacaaaaggccggagcgtgtacgtagtcgacaggagatcggcgcgcgcgacgaaacagggatccgtacggcaagagatacggatcagcaggagaaggacgatcacactgtgatcaacagatcatcccaaagtgtgcctcttccttgccctatcctcctccagagcttccatcatgttccccgctacaaccttctctcccccaattggtcgtgcacggtcaccagcgacaagtaccatcaccgactccttgtcgcttga

SEQ ID NO: 63027 - DNA, 139 bp, Oryza sativa
  Clone ID: PAT_MRT4530_64309C.1
gcttaacacagctcaggccacatatatcttgaatgcatgcttaattccattgctcttgtgaagttttctcactctgtcatgctataccattatcacgctcttgtatatatataaaagcgggttaccctcgtctacaaca

SEQ ID NO: 63028 - DNA, 170 bp, Oryza sativa
  Clone ID: PAT_MRT4530_6430C.1
ttgggtttttcaaacggaggggcttcctaacgaacaatattctctggcctgtacgtaactgtataacatggcatccccttataacaatatgacaaagaattgctgtgcggtggaacatttgcatttttgaaaaaagcacaactgtgcaaatgacttttgaaatttacaat

SEQ ID NO: 63029 - DNA, 404 bp, Oryza sativa
  unsure (1)..(404): unsure at all n locations
  Clone ID: PAT_MRT4530_64310C.1
cgcgcaaggaagatccagcgtttcttgagccagcccttccatgtggctgaagttttcacgggtgctcctgggaagtacgtggagctgaaggagagcgtcaacagtttccagggtgttttggatgggaaatatgatgaccttcccgagcagtcattctatatggtggcaggcattgaggatctcgtgggggggggggtcattatcnccttgnttccccgtgccaccatgcctctcgccgngttctctgccgtctccgttagcgcctgcgccggtggccggcctctcctgtggaaggtgccgtccgaccccgcgccgggcctgtgttctgttcaggaccgctccgtgggtcgcgctctgccctgcgctgcggctgccgccgcggctgccgcgtgccttgctctggt

SEQ ID NO: 63030 - DNA, 1188 bp, Oryza sativa
  Clone ID: PAT_MRT4530_64311C.1
atggactttactcaatacagggattgctttgcttgggagtattttgagatgccaggaattagccgatcgattgttgaacatcggctgcctatcaaactaggatatcagccgtataaacaaccacctagaagatgtaaagccgatatgtatgatgctatcaaagctgaaattaaacgtttttatgatgttggttttattcggccatgccgatatgctgagtgggtctctaatatagttctagtaatcaagaaaaacggtaaacttagggtttgtattgattttcaaggtttaaacaaggctacccctaaggatgaatacccaatgccgattgctgatcaattggtagatgctgcttcaggacataagattataagttttatggatggcaatgctggatataatcaaatttttatggccgaagaagatattcatgacactgcttttcattggcctgttgtcaaatccaaggagattgctgatcatatagccgatttgaggaagaagggagtggctttcaagttgtacttgtcagccgatgagaagtcaatcggctcagtcttgatccaagaatttgaaggaaaggaaagagcaatattttatctcagtaggaggcttcttgatccagagaccaggggagcaagttttgagtttgcttgtactatcaagctttatgctactaacaatcaagccgagtatgaagcagttctcaagggtttgcaacttttgaaggaggttgaagccgatgccattgaaatcataggtgattctctgttagctattagccgattagctagggaatatgaatgcaagaaggatacattgatgatatacaatgagaagtgctgtgagttgatggatagttttcggctggtgactttgaagaatgtttctcgagagcaaaatatgcagacaaatgatttggcacagggggcatcgggatacaaaccgatggttaaagatattgaaattgaagttgctaccattacagctgatgattggaggaggattgattttcaagatgagttgacagccgatgattatcataatcttatggtagatgaattggaggacttagtgcaatcaagattgcgtgctttggagaaggtggtgagagataaggagagaacgactctagattataacaagaaggttgtgccgaaatcattttcggaagaagagttggtttga

SEQ ID NO: 63031 - DNA, 430 bp, Oryza sativa
  Clone ID: PAT_MRT4530_64312C.1
ggcacaaaatggttttcttatataatttcttactggcatacacagatgggatggtccttgtttacactggcttacaagggccttattggttggtgggaacctgggatctactgggaacactttaatactttaccaactacaacaacccaactggtccttccaaaccacacgttccaaccccaacctttgggttggattagataccttaactttgcaaatgccacattaggtttatcaaatgatttattggccttatattagggcccttttgatccggtccggttgtaaaacgaccagttcttggtggggggaaaatttttttgctttttaaacgggcttggcttcaacttggaagaagtggaccgggggcccaccaacgggaaaaccaaccccggccaattccggaacttcttttttgcccccccggccg

SEQ ID NO: 63032 - DNA, 4109 bp, Oryza sativa
  Clone ID: PAT_MRT4530_64313C.1
agaagtcaagaacccatttttgtgctttgttcttgcttgttatatggagtttattagagtaaaagcccttttcttttccgttggtcgtgtagacgctgcagcttcgaaagatccgctcttcgtggaggttgaagccgacgtttgggaaagcgagcaaggcaaatttcctaggaagaatcggctacctcagaagaagttgcttgttcatcagaggttgggccctattcatgaaaacttctttcaggatgaatctgctaatgaaggagagaagattggaaagaaacaatggtgtccttcagcagagtttggagttgatcaagccgatgtggaagaagatatagtagaagaatccttggctaagttggttttgtcacctgagcaagctatttttgagaagctagagggagctgagaatcggtatcttaagccattgtatgttaagggatttgtcaatggcaagccgatttccaagatgttggttgatggtggagctgcgattaatttgatgccatatgctacattcaagaagttgggaaagactgcagatgatctcatcaagactaatatggttctcaaagatttcggtggcaatccttcgaagaccaagggagtttatatttaaaaataattcataactttttcatgtgaactctaatgaagacaaactttatatcaaaattgtagccctcgacgcaatgtacaatttgtagttgaattttttctattttaagtcattttttgtcccaaaatgtaattttaaaattaaaatttcaaaatctataaacatgcaacaatattctgggaccataaacagttttaattcaaaaacttttcaactacaaagttgtaggtcgcgtcgagggctacaattttaaaaaaaagtttgacctaaacgagtgatctgcaagtttagggaccgggatgacacagttgaacaagtttgaggacctgaacagacgatttgtgagtttagggaccgggaagacacagcggtataagtttagggaccggtgatggactttactcaatacagggattgctttgcttgggagtattttgagatgccaggaattagccgatcgattgttgaacatcggctgcctatcaaactaggatatcagccgtataaacaaccacctagaagatgtaaagccgatatgtatgatgctatcaaagctgaaattaaacgtttttatgatgttggttttattcggccatgccgatatgctgagtgggtctctaatatagttctagtaatcaagaaaaacggtaaacttagggtttgtattgattttcaaggtttaaacaaggctacccctaaggatgaatacccaatgccgattgctgatcaattggtagatgctgcttcaggacataagattataagttttatggatggcaatgctggatataatcaaatttttatggccgaagaagatattcatgacactgcttttcattgtcctggtgcaatcggcttgtacgagtgtgttgtaatgacttggattgaagagcgctggagctacatatcaattagctatgaattacatctttcatgatctaatcggcttactggttgaaatctatatcgatgatgtagttgtcaaatccaaggagattgctgatcatatagccgatttgaggaaggtatttgagagaacaagaaaatatggcatttagataaaccctaccaagtgtgcttttggcgtattgggtggacaattcttgggatttcttattcatgagagaggcattgaagttacacagagaagcattaatgcaatcaagaacattgaacctccagaggacaagaagaaattgcaatcattggtcgggaagattaattttatcagaagatttatttctaacttatctgggaagatggcgccttttacacctttactcagattgaaggccgaccaagaattcttatggggggcagaatagtagaaggctttggacaatatcaaggaatatttgagttctcctccagttttaattcctccacagaagggagtggctttcaagttgtacttgtcagccgatgagaagtcaatcggctcagtcttgatccaagaatttgaaggaaaggaaagagcaatattttatctcagtaggaggcttcttgatccagagaccaggtattcagctgtggagaaattatgcttatgcctgtatttttcatgcacaaagttgaggcattatctgttatccaatgagtgcaccatagtttgcaagaccgatgtggtgaagtatatgctatcggctccagtgttgaaagggagagttgaaaagtggatttttgccttgaccgaatttgatcttaggtatgagtcacccaaggcaggcaaggggcaagctttagccgattttattgttgagcatcatgatgactcaatcggctcggttgatattatgccttggacattattttttgatggatctgtttgcactcctggtgtggtatcggtttagtcataatttcaccaaggggagcaagttttgagtttgcttgtactatcaagctttatgctactaacaatcaagccgagtatgaagcagttctcaagggtttgcaacttttgaaggaggttgaagccgatgccattgaaatcataggtgattctctgttagctattagccgattagctagggaatatgaatgcaagaaggatacattgatgatatacaatgagaagtgctgtgagttgatggatagttttcggctggtgactttgaagaatgtttctcgagagcaaaatatgcagacaaatgatttggcacagggggcatcgggatacaaaccgatggttaaagatattgaaattgaagttgctaccattacagctgatgattggaggtatgatgtatacaattatctcaaaaatccttctcaatcggctgcaaggaagttaaaatataaggccttgcgatttttcttgttggattatgagttgtattatcgaacgattgatggagtgttgttcaagtgtttgagtaccaatcaagctaaggttgagatgggagaagtgcatgaaggcatatgtagtactcaccaatcaactcaaaagatgaagtggttgcttcgcagagttggatatttttggccgatgatgttggaagattgttttagatattacaagggatgccaagattgttagaagtttggagcaattcaaagagcaccagcatcggttatgaatccgattatcaagccatggccgtttagaggttgggggattgatatgatcggccagattaatccaccttcgagtaaaggacataagtatattttggtggcaaccgattatttcatgaagtgggttgaggtaattcctttgaagaaagttgattctggggatgcaattcagtttgtcaaaaaacatattatcaattgatttggagttcctcagactattacaaccgaccagggatcaatttttgtttcggatgaatttgttcagtttgcgaaaagcttggggattaagttgttgaactcttcaccatattatgcacaagctaatgggccggcataggcatataacaagagtttgattaagctgatcgagaggaagattgccgattttccaaggtagtggcatagccgattggctaaggtattatgggcttatcggatggcttgtcatggttcaattcaagttcctccttacaagttggtttatggatattaggcaattttaccgtgggaaactaaaattggatcgaggaggattgattttcaagatgagttgacagccgatgattatcataatcttatggtagatgaattggaggacttagtgcaatcaagattgcgtgctttggagaaggtggtgagagataaggagagaactgctcgacattataacaagaaggttgtgccgaaatcattttcggaagaagagttggtttgaaagttgatctagccgattggcacacgtgacaacaaattcgacaagtggtcgccgaattgggaaggaccgtttcaaatttataagtctatttctaaaggggcttatatgttgcaaggacttgatggagaaattttcggcagagctcttaatggaaagtatttgaagaaatattatccaagtgtatggatccattca

SEQ ID NO: 63033 - DNA, 672 bp, Oryza sativa
  Clone ID: PAT_MRT4530_64314C.1
ccggcccggccggcacgtcccgtcgtcgaaaccgtcactcaccacccaagtcgccgagatggttcgatacgctgccaccgagatccagcccgcgaagtcggcccgcgcccgcggtgcctacctccgagtgtccttcaagaacacccgcgagcccgcccaggccatcaacggctggaagcttcagcgcgctgttaccttcctcgagaacgtcaaggagcacaaggaggccgtccccatgcgacgatacgccggcagcactggccgcaccgcccaaggcaagcggttcggtgtctccaaggctcgatggcccatcaagtccgccgagttcctcctcggtctcctcaagaacgctgaggccaacgctgatgccaagggcctcgacaccggtgccctcgttgtcaagcacatccaggtcaaccaggcccccaagcagcgacgaaggacataccgtgctcacggtcgtatcaacccttacatgtccaacccctgccacatcgagctcatcctgaccgaggctgaggaggttgtccagaagtccgatgctgttgccgagcgtgagcacctcagctcgcgccagcgtggtgctcgcctccgcaaggctatcacctctgcttaagccaatcaacaaccttcttctcaaatagacaaatttaagcgctggtcgaaactggg

SEQ ID NO: 63034 - DNA, 369 bp, Oryza sativa
  Clone ID: PAT_MRT4530_64315C.1
atggtcattgctgagctgctccctgtgactgttgttgcaagggctcgaactaaccgtattgaggtgcaaactgaggttgagtcagtccccctggctgatattgggcttgcggggaaggaggctgatattgataattcaagttgcccccttgaggctgctgccttggtggttgaggtggcagaaacgtggcagcaacctgatcctgggtcagccgattcgcaacctacccactatgctgtggctgctctctcattaacaaccgagggttcaccggctagcctggcgccattgctgacggagcaggtaggggagttgatgccggtgccgttggctgagctgttggtgcaacgaagggaatcgcctgaatag

SEQ ID NO: 63035 - DNA, 1251 bp, Oryza sativa
  Clone ID: PAT_MRT4530_64316C.1
atgggcgggggcggagaaggcagcgggcggcgggtgggcgcgaggctagcgacgggcaagggcggaggcggcagcgggcggcgggcgggcggcggtcgaggagccgaggtttctcgagccccggctacgctaggaaattttgaccattctggttgggtccttgttgaatgcaaggttggtgaccaggggctcgtgaaggttgctgccctaaatcctgaaactgctccagttgcccccctagagctggaatttgaggagaacaagaatgtggttttatcagtccgtggtcagaactcagtacacttatcaggatactacatctgttcttacaatggtgactatggtgaaaacagcaaacaagccactaaagaaacctctttgcttaagtatgcaagcggattgccctgcaaacctgtgcttataggccaatttcgcaggccagtgttggcttgtgaaaattgcctaataagcagggtctcgaaagatgatggtgctgctgaaaacaatgatgaaaaacaaggggatgaagctaaacagtctaaaaatgtacaggccgaactgcagcctcacattcgcgtacttgatagtgaccatggtgaaaacagcaagcaagccactaaagaaatggaatccaatgcaatggatgaagatgcatctcttggcctagagcatactctgggaggcaatgtggttcaagctgctagtcaggaggaaaatgcttcacaaactcatgaggataatgatgctgcagatcatattatccaacaaactgaccctcctatcctggtctcagaagatgatggtactgccgaagacaatgatgaggccgaactgcagcctcgcattcgtgtacttgatagtggtatgacaatagaagatctggccaagggaaatgttggtgccaaaattgcatcttgtggcaaaaaggtttatgtgaagtatgtctgtatgttgagcaatggtgatactgttgatcctaccggtgaaagttccacttgcaaattcaaacttggtgctggagaagtcattagtggatgggatcttggtatcgatggcatgcgtgtaggtggaataaggagacttggcattcctccccatctaggctatggtgatgttggaagaggaaacataccaccaaacgcgtggctcaactttgatatcgaactgctgaaagtcaagagtggacgcaagaaggcacggaaagtcgatttcatgtatgttgccttggatagagcctacattcagctatga

SEQ ID NO: 63036 - DNA, 540 bp, Oryza sativa
  Clone ID: PAT_MRT4530_64317C.1
atgccgctgcttaatcgctgtcaacaatcacatcggcccacggttgttgctaagctaccccttgtgactgttgctgcatgggctcaaactgaccatactgagacgcaaactgaggttgagccaatccccctggctgatattgggcttgcggggaagcaggctgatattggaaattcaagttacccccttggtaattatgaaggttcggctggatattacgtaccaaatgctcaggaacaacttgaggctgaccaccaggcgttgcaaacccggccgatgcgcctattgaaccttggtgctggatcggctgaacgatttgttgtcttaacggcgtctgctgaatcagctgctaccttggttgaggcggcagaaacgtggcagcaacatgatcttgggtcagccgattcgcaacctgcccgccatgctgtggctgctctctcattaataaccgagggttcactggctggcctggcgccattgctgacggaacaggtaggggagttgacgccagtgccgtcggctgagatgttcgtgcaatag

SEQ ID NO: 63037 - DNA, 519 bp, Oryza sativa
  Clone ID: PAT_MRT4530_64318C.1
ttaccgatgttcagccatcaactcaggcggttccctctgttccgtcagcaatggcgccaggccagccagtgaaccctcagttgttaatgagagagcagccacagcatggtgggcaggttgcgaatcggctgacccaagatcaggttgctgccacgtttctgccgcctcaaccagttcagcaaacaccaccaaggcagcagcctctgcagccgactcagcagacgctgttaagacagcaaatcgttcagccgatccagcgccaaggttcaataggtgcatcggccgggtttgcaacgcctggtggtcagccacgtacagccggatggcacagtaatacctcaagttgttcctgagcatttggtacgtaatatccagccgaaccttcataattactaaggggtaacttgaattaccaatatcaacctccttccctgcaagcccaatatcagccagggggattggctcaacctcagtttgcgcctcaatacggtcagttcgagcccgtgcagcaacagtcat

SEQ ID NO: 63038 - DNA, 477 bp, Oryza sativa
  Clone ID: PAT_MRT4530_64319C.1
ttacctccgttgcaccaacaacttagccaacggcgccggcaacaactcccctacctgcttcatcagcgatggcgccaggccagccggtgaaccctcggttgttaatgagagagcagccacagcatggcgggcaggttgtgaatcggctgacccaagatcaggttgctgccatgtttctgccacctcaatagccgattcagcagacgctgttaagacagcaaatcgttcagccgatccagcaccaaggttcaataagcgcatcggccgggtttgcaacgcctggtggtcagccacgtacagccgggtggcacagtaatgcctcaagttattcctgagcacttggtacgcaatatccagccgaacctcagtttgcgtctcaatacggtcagttcgagcccatgcaacagcagtcacaaggggcagctcagcaacaaccgtgggccaatgtgattgttgatagcgattaagcagcggcat

SEQ ID NO: 63039 - DNA, 200 bp, Oryza sativa
  Clone ID: PAT_MRT4530_6431C.1
gcgcgcgccgcatccggccttacatgcagcactacagcaccaacaccagtcacaagatgatgagcgcgccaccgaggattgcgtccatgtccggcgccgatatgattggcggcagctcagggtcgttggacgaccaggcaaagaagaagcggtatgggtggtcgccggggagtggaaagaagcagccgctctcatcctag

SEQ ID NO: 63040 - DNA, 588 bp, Oryza sativa
  Clone ID: PAT_MRT4530_64320C.1
ctacttcatcagccatggcgccaggccagccggtgaaccctcggttgttaatgagagagcagccacagcatagtgggcaggttgcgaatcggctaacccaagatcaggttgctgccatgtttctcccacctcaaccagttcaacaaacaccaccaaggcagcagcctctgcagccgattcagcaaacgccgttaagacagcaaattgttcagccgatccagcaccaaggttcaataagcgcatcggccgggtttgcgacgcctgatggtcagccggtgcaataatttttaaatcaagttgtcccagaacacttggttcaccacgtacaaccggatggcacattaatgcctcaagttgtccctgagcacttggtacgtaatatccagctgaatcttcacaattaccaagggggtaacttgaattatcaatatcagcctccttccccgcaagcccaatatcagccagggggattggctcaacctcagtttgcgtctcaatacggtcagttcgagcccatgcagcaacaaggggcagctcagcaacggtcgtgggccgatgtgattgttgacagcgtttaagcagcggcat

SEQ ID NO: 63041 - DNA, 513 bp, Oryza sativa
  Clone ID: PAT_MRT4530_64321C.1
agggttgactgtcttattcaggtgccagtattaatgaatgctgttggtggaattcttgtggtctggtcacaacatatgcaggaggtgttagaaaggcaagtgcctgaacttttacaaaatgaaaatctctcattcatttttacctaagaactgtcctgctttgcttattcagggttttgtgatagtgtcagctctccttgtaactgcactactacaatttatatttgacggaaagcctccatcactctattgcctgatagcattaccacttgtcatgacaagcatatttatttaccagaagtatccatatgttgatagaaagaagaaagactgataagcttgctcagaagagaagggaattatttagcatcagcacaacataaatacattatgctaacctcattttgatcccacgaaagtggatgcgccttgaatgggccatatatgaccttgaagagtgtctcttcatgaagctatgtatcattcatctaatgatctctatattaaatggat

SEQ ID NO: 63042 - DNA, 237 bp, Oryza sativa
  Clone ID: PAT_MRT4530_64322C.1
atggcgagggcacaatccacggagacggtgaagttggccgtgatgtgcaactgccgcgttaaggctgcacggtggatctcgtggagtgcggacaccccagccgttgaagacttcggcattttcttcgccaccgccgccactctcccatcctccgccccctcactggatctcgcccacgacggcctccgctcgctgactcaagggatcatccacctccgccgcgcctcctcgccctaa

SEQ ID NO: 63043 - DNA, 324 bp, Oryza sativa
  unsure (1)..(324): unsure at all n locations
  Clone ID: PAT_MRT4530_64323C.1
ctttnttttttttttttttttttttttttttttttttttttttttttttttgnnaattttttnngttttttttgtctgtcacggggnnnnnngggccgatgggaatttttctgcctcacacatggatctttcgcgcctcacccgacgggtgttgcccaacaaatggcaggcctctcccaacgctttttcctgcgtagatnaaggtttgggccntgagccccgatatatgttaaaaaaaacccgggattttacggcccagttccgtttcttaaagggacaactttgttttgaactgtctttacccggacctggtgttgctttaca

SEQ ID NO: 63044 - DNA, 138 bp, Oryza sativa
  Clone ID: PAT_MRT4530_64324C.1
ggaaggttaaaaagaagcgaacacattagaaatttcactatgggccaaaaagaatgcaacgtcttaaatagctttaaataaaaaagggagacctgctcctgtgactaggcaccctatggggtggtacaaacaacacac

SEQ ID NO: 63045 - DNA, 331 bp, Oryza sativa
  Clone ID: PAT_MRT4530_64325C.1
gcaggacgtctcggcactacgtgcaggctagctccagccaggcgtcagctaccgcaaaaccatcagaatccgatgcgcttcagcaaaacttgcttggtgaagaggagaggggagaaaacccatataggctgatgggtttaactccgactgaacgatcccccccgccggccaccgccctcgccggcgtcgatccgatacggcgtgcgcctggtcgctgcaccatggggtacctgcaggaggccagggagaatcacgtcaagaagaaggtcgaggaaggagctgctgaagactggggatcctctagagtcgacctgcaggcatgcaagcttga

SEQ ID NO: 63046 - DNA, 211 bp, Oryza sativa
  Clone ID: PAT_MRT4530_64326C.1
tcgcccacgcgttcggaacaccatgtactaatggaggggttcctactgacgctcagcatggtcacgctacgatgtgaatcacaagaactgctaccgtcaactgatcttcataatcaccaggcgcacgctccaaaggactgtacatgctgtcgtgcctgccattggattgctctctggaggacagagcgaggtgaggacactgaaaccttac

SEQ ID NO: 63047 - DNA, 412 bp, Oryza sativa
  Clone ID: PAT_MRT4530_64327C.1
acggggaacttaatttgtaaaggagtgccggtttacatacgacccctatttgaccctgacttatcaatcaaccaatttactcaatacaacacagattttttacatgcacgaaacagaaggcagtcgctaactactaacgatacacaggtcgtagacactagctagaatggaccgttagattctttgtaaacaacattttggagaaatggccctatcttgatgcaattggtatcgacacatactaactattatgccgcgctaccttatgtgcgctgatggtaaggaccggggctaggacacaaacagttatatacgtaacgcggggacccattggtatagcatccactcggagacatgcccccggccgtacgagaacactgccaagttgagtaacaggagggtggagcccaac

SEQ ID NO: 63048 - DNA, 1173 bp, Oryza sativa
  Clone ID: PAT_MRT4530_64328C.1
atggcgaattctgggaagaagctcatggacggcggcggcgtcgctttccagacgcttccacgcgccgccggcgacgataatgccgacgacgactatgtccggccgccgccgaggccgctggtgtcaaccgtgcacgacaagccggccacccatcctcagcaggtgcacatctccgtggtgggggcgaacaggatgaggatttgctgggtcaccgacgatgacgacggccggagctcgccgccgtccgtcgtggagtacggcacgtctccgggggagtacacggcgtcggcgacgggcgaccacgccacgtacagctactccgactacaagtccggcgcgatacaccacgtcaccatcggcccgctcgagccggccaccacgtactactaccgctgtggcgccggcgaggaggaggagctcagcctcaggactcctccggcgaagctgcccgttgagttcgtcgtcatcggcgacgtggggcagacggagtggacggcggcgacgctgtcgcacatcggcgaaaaggattacgacgtggcgctcgtcgccggcgacctgtcgtacgcggacgggaagcagccgctgtgggactcgttcgggcggctggtgcagccgctggcgagcgcgcggccgtggatggtgacggagggcaaccacgagaaggagaagacgccgccgccgccgcccgtcgccggcgccggcgccggcgtgcggctgtcgccgtcgcggttcgcggcgtacaacgcgcggtggcggatgccgcgggaggagagcgggtcgccgtcgagcctctactactcgttcgacgcggcgggcggcgcggcgcacgtggttatgctggggtccattcaattactcttaattgatgtaattaatcgtgggattatgatcgattacaagacgaggatctacgacaacgaagccaacagccagggcccgatgtacatcaccattggcgacggaggcaacgtggacggacattctgacaagttcatcgaggatcatgagttggcacacctgtcggagttcagggagatgagcttcgggcatgggcgtctgaggatcgtgagcgagacgaaggccatctggacatggcaccgcaacgacgaccagcatgccactgttcgcgacgtcgttgtgctggagagcatggctggagctaagacaaattaa

SEQ ID NO: 63049 - DNA, 243 bp, Oryza sativa
  Clone ID: PAT_MRT4530_64329C.1
ggcacgagccgaaggagatggtaaaatgtacctataataaggttataaaataatgttactgttaacacttcatataacttagatacttatgaccactatcaattgtccaatgtatcatggtagcttattttttatgttctggtgactcatcttatttcagataccatatcttcattgcaccgccacaaggattactgcatctctacaagcttatcagtaaggaataaaaacagttttaacatt

SEQ ID NO: 63050 - DNA, 602 bp, Oryza sativa
  Clone ID: PAT_MRT4530_6432C.1
tcagccctccgcttctcgcttgatgccgccgcgcctctgctcctcttcggtcgccgcctcttcggtgaccgccgcgccttcttttgcctgccgccgcatgtgtgccgccacgacgcaacggccttgcccgccgcacttgcccggcctctgcgccgcgcggggcagaaatgccaccctcccgccctcgtagggcgggtacccgcaggggacccggccccccctcctccgccccctcgctcctccccaccgcgataactccgcccccgcctcctcgctcctcccccgctgccatagcccgccgcctcctcgctcctcctcgccgcccgccccacgaatccccgcgcctcctagcttctcctccgcgcccgcgaatccccgccgcctcctcgctccgcgcgcatcctccctcctcgcgacggggcagcgaggtcgtccccttccgctgccacccccgctgcccacgccggagacgaggtcgtccccagccaccgccggagccgtggtcttccccggagccgacgtcgtccccagttgccgccggagccgagttcttccccatccgcattggatctgaatgcaccacatatcttcccctctggaaa

SEQ ID NO: 63051 - DNA, 1509 bp, Oryza sativa
  Clone ID: PAT_MRT4530_64330C.1
atgccgacgagcccagtgaccaccacggcggacggcgacgggctagctcagcttgacatcgccatttcgcgccggcccagcctgcttcaccccgcgctcctcgctcttctcgcttgcccgcgtgtgccgccaccgctcgcgaggctcggcgctaccgagctcgccgccgtgcagcaccagcccgcgatcgccaccatcttcctcccgaatccaagccccagcagccaccccatcctcctcccgcacactcctccttcggtccttccatcgtggccgcggcggcggggagacattttctcaaacagctcgtgggcaagccagccgccgcccgccggccttgcacaacttcctccgcaagtcgcatcccaccgggggcgagcaagccgacgccgccctcgcctcgccattcccgtaccacaagtcttggtcgacctcaacgcaatggccgacccgtcgcgatccaccagcagcggggcggcgaagaagccgtcgccgaggaatcctcggtgcgccgcatgcaagtttctccggcgtgcttgctcgccggaggagtgccggttggcgccccacttcccggccagccagccggagcgcttgcagagcgtggagcgcgtcttcggcatgaggaaagtgctggagctggctcacaaggccgggccggaatacctcgacgacatcctcagctccatcgtctacgaggccgaggcgtggggcagagatcccgtctggggtcccaccggcgtcgtgggagccctcgagctcgagatagggaccgcgcgcgccgacctcgccgtgctccagggccaagaccaggaccagccgccggcggtggccacgctccccgagcccgagctcgtcgtccacccgccgacgatggcgcaggatgagtcgaagccgtcctcgacgacctcgtcatcaagcgggacgacgacgacgacgacgaagaagaagaacaagcctagatgcgccgcgtgcaggtacctttcgaggagttgttggccggagtgcttgctggcgccctacttcccggccggccagccaccggcgcagttcgggaatgtgcaccgcctcttccgcctcaacaacgtcctccggatgatggaggaaaccaggcgggaggagagggacgatctcatggcggctatcgtctacgaggcggatgcttgggccagggacccccggtacggcgtcgccggcgtcgtgcggagcctaacgaacgagctcgcccgcgtccgcctcgacgaaatcgccttccacctcctcggcaccgacgagacctacgacggctacaaggaggaggacgcgctcgccgtcgaccccgtgagcggcgcccaagcgggcatcggggtgctcggtggctcgggcgcggacctccaagagaataccggcatcctcctcggcgccgacgagccaggcccaggcgagctcgccgtcgacccaatcaaagacgtcttcgacatcgacaggttactcgccgtcgacgatgacttgtcctccgggacccagccc

SEQ ID NO: 63052 - DNA, 2315 bp, Oryza sativa
  Clone ID: PAT_MRT4530_64331C.1
gcacgaggaacagatattagatgcatgatagaatgacgaatgtgtcagccgctgtgcagtggtgggacgagtggcagctgcgcatcctggtgctgtgcagcctgggcatccagtggttccttctgctggctgcccccatgcgcaagtacaccatccctcactggttcaggaccttcatctggctggcctacatcagcagcgacgccctggccatctacgcgcttgccaccctcttcaaccgccacgccaacacgaccaccgccgcgaaacagcattgtgtcaatggcagcgccctggaggtcctatgggctccggtcctcctcatccaccttggcgggcagcaggagatgtctgcctacaccatcgaggacaacgagctgtggaggcggcacactgtgactctggtgtcccaggtcacggtcgccatatacgccttctacaagtcatggcccgccaatggcggtgacaggaagctgctggtgtcagccgtcctgctcttcgtcattggggtgttcagcttcaccgagaagccgtgggctctccgacgagccagcatcaaccggctggcagctgtgtcgtccatggtacaaggcaggaaggaggtcagcaagtggagatactgcttcaccgagctggaaaaggacaagagagacatactcgaccgctgctgccagctgaaaaaagagaaggagacccctcctccaggggtaggcactgacgttgtcaagaggagtcagcagcacatcttgacagatagagacaaggtcctactgatactctccgacatgtcgctgctagctgccgactctgacctcaagcaggaacaacgtcgtcgccgtcaatgccaatccttgatgggagaagatgacagcaaggaggaggtggagggagacttgctggggaccctaagccctagagcagagaagggctccaagcgttggcttcgcagagcgtttgcgctcatctacaccagagccaacgtggtgttgacccctgcatacctggcctaccacatactgttggcgccgttccttcacatcaccgccatcgtgctcttcgccgccagcagcaagcgccaccacaacaccatcgacgtgaagatcacctacgtgctcctctgcctcaccgccgcgctggacatccttgcggagcccatccggcagctgctgttcaagctcatgtccatggcggatgtcgcagcgctatgcgagacagtcccccaatacaataacctcatccggtcagctctccaaaggacacagcctgctggggtcttgctcaagtgtgccgcacatgtcggctacacacagggattcttcgtttgccaacgcaagaacctgtaccacatgctggccgggttgatcttctccgacctagtggaggcgaatgccaagggtctcgacttcaccagctaccgaagcttcgcgccggggcgccgcaactgggtgctcaatgagaacctgcgcaaggtatgcggcctagaggtacagggcagcctgcgtgggtcctttgataggggtgtcatcctctggcacatcgccactgacctttgcatgcgccgcatgatggctgaaaacaccatcgacgagattgacaggaaatttctcgagtgcacggaggcgatatcggactacatggcccaccttctcaacctccgccctgacatgctcatgaccggcagcaggcagcacctcttcacgcaggcaatggaggaggttgagctcatcttgaaggatattgagtctcagcagcagcagccgcatagcctcaagaagctcggacgagacatcctggcaaagaagatcatcgacaaggcaaaagctgaggtcaatgctgaggtcaatgctgcgatcgacatagaaatggtaagagaacaagagagggaaatcagggtggatgagccccctccccccaagtaccctctcgtccatgacgcatgcaggctcgcagaggagttgatggataagatgggccgcagaacacggtgccaagtgatgtaccgtgtgtgggtgggcatgctcttctactccgccagcatgtgtaggggatacctacatgccaagagcctcggagaaggtggcgagttcctctccttcgtctggctcattctctcgctcaagggcgccaagaccttggccgacaagctccagatgccggagccggagccggagccggagcgggagccagagccaaagtcggggccttattcccctagccaagagatagtacaaggagagcctaccgctaccgtcgcaaccaccgccgacgaaggcgaggacctcagcttcctgcttcctcatagccctcgttcataa

SEQ ID NO: 63053 - DNA, 1063 bp, Oryza sativa
  Clone ID: PAT_MRT4530_64332C.1
ttttttttttttttttttgacgagggagtatctgctagcattaacatcatgatcagtagcggccgctttttttttttttttttttttttttccatgaaggaagctcctgctcatatgcatagcttttattagcacccacaccttaattaattgtacttaggcatatcatctcacaattttcactgcatataacacagtgaacacacacatgcatgcaagaacacagaagagacaacactggtagtattctctctgggataaaaagggcatgtcattgatgccatattgctgcaaatctagttcgattttgtgagagtatattcagatttagccctggcctttgcagcctcgagggagtgcttcctggacagctccaccaccttcttctccccggcgatgaagtaggccatgccagcagcgtaggtgatgatgactgtcttggcgactgggttgcccagattggcctttgcccacttggacatacgaacactggcaaaggtggggatcgcggtgcagacagcagtgacggccgctgctttcagcccggcaatggccgcctcatgggagctctgcttggccatggcgaacttctgctcgatgagctgggaagaatccgtagccttgttcgacatctcgatcaaaacacaccagatcgacacacactatcacactaaccaactagctaattcaagctaatgaatgcgagatcgatcgatggatggatttttttttttttttttttttttttttttttttttttttttttttttttgtgaagggatttcataagattgaaatcctatagaaaattttcctatttggccctttgattcaaaggattggaattttctaaatcctatacaatttcaatggaatagctcattacatataggttttaaaggaaatttagcaagaggtccaggaaaagtcatccgattcctatgttttctctgtggcccaatcaaacaattattcatgtgttttgcaatcatctgttttacacttacattctctgcagaataatgtgttttcctgttcctccactatttggctactacaattc

SEQ ID NO: 63054 - DNA, 243 bp, Oryza sativa
  Clone ID: PAT_MRT4530_64333C.1
atggagccacgggaggcggcaggcggcaacgccctcccttccggcgggaagggaggcgtgggaagggaggggaggtggtggtggcccggcgacggcagcaccctccccttccgtattgcctccgttggtgttaacaggaggctccttctccttgtctccagtgttattgttatcgccggttatcgacatattggtgaagatgatgcagagcagtcgcgcttgaagcgctacccaaaaacttga

SEQ ID NO: 63055 - DNA, 763 bp, Oryza sativa
  Clone ID: PAT_MRT4530_64334C.1
gttaaagttatctccaggatgatgtcattttataatttctgggtatcataatggactattatgatttttggagagggtcgcttgcttttatgacgactgaaattcagtcttattaatagtatttctcccttttttttattacaagagatggatgtgcacacgctgaaggagctggtgaaaaattcacgaagctcataaatttccaaccaactgcacctcgctccattaattggtttcttcttttttttaatcaggttttaatctaaaaattaactgtccttaatgggaaagactcggctgctacatatatttatcctttatttgaattgaacgtatttaaaattattatttcacatcacatggttttcttgacattatattgtattggatgttttaccatattttttccttctaattcaatgtgtttacatttttatacatttacaattgtaccatgaagcaaaaaatagaaacactttactgagtaatggatgttgaatggatttttgtagggaaatcatcaactatgaatgttcgttgataatttaacgaaattatgacccgaatacgcaagagaacggcataatgcattcaaaagaagaagaagaggacgaggtttgaatatttacaagacacccacagtggatgatggaaagggaaaggaaaaaccaccaaaatcttccgaaaccaataaaaaacctgaaatattgtaaatttaagtttcctagctagttcttattgggaacgtggactttgaatatcg

SEQ ID NO: 63056 - DNA, 942 bp, Oryza sativa
  Clone ID: PAT_MRT4530_64335C.1
atgaagcatgtactgcagtatgtggctggtacacagaattttggaattcagtttagcaggaagaaacaagaaattcctcagcttattggctatagtgatagtgatatggctggggatatcaatgataggaagagtacatcgggtgtgctgttcaaattgggtgaaagtttactcagctggcagtcacagaagcaaaaaattgtagccctgtcttcatgtgaagcagagtatgtggcagccacaactggagcctgtcagggtgtgtggctagcacggctaattggcgagctgcgagcttgtgatcctcagtgtgtaattctgaaggttgacaataaatctgctatcaatctttgtaaaaatcctgtgcttcttgatcgtagcaagcacattgacacaaggtttcacttcattcgggaatgtgtagatcagaaacggattgaagtggattacatcagaactgaggagcagattgcagatgtgctgacaaaacctctcggcaagaatcgttttctagaactgagaaggaagttgggaatggttgaagccccgcctatgcctaagaggaggaggcctggcacgaaatgtgaagcatatcagaagtacgcttgccggaagaggcttgcggacgagagggcgagggtgaagggccgcttcgtctccagctccggcggcaacgataataatgcacctgcacatgagctgccgccgtcgcttgtcaatctcagcgatggtgctgctgctgctgcaatcatcccaacaagaagtgtgccggagtggtggccagaaatgcaggcgtcattggccagggatgagatgtgtggcggcgcgggcatgaatctccacctgtgcgacgccaacgagatggagcaggttgctgcctacgttggcgtctcctccatggacctctgcgcctacctgcactgctcatggccgcccgtttag

SEQ ID NO: 63057 - DNA, 282 bp, Oryza sativa
  Clone ID: PAT_MRT4530_64336C.1
cccacgcgtccggttctagatcgagagggccagccttttttttttttgtttttgccttagacactttttaattaatacgatcgcgaaatcaccatattacaataattgaattatatctgcctcaatagactgtttattgggtgcagctggtgtgtctgaacctgagccaccgattgttgaagacaaacccccagaagtgctcctgctgcaagatagttgcgatcactgacacccccgggcacgcccccttctggaccccgatgcacttgacgccaggcgccg

SEQ ID NO: 63058 - DNA, 492 bp, Oryza sativa
  Clone ID: PAT_MRT4530_64337C.1
atggatttgggacagaagaaggagataggacaggcatttgggttgcaccctctttgttcatccgacaatcgccaacaccttttggagctcaaggatgtcatggtcattgagacaacaggcgatcgaaatatcctcaagagcttcaggggtggttttggagttgaaatccgggagctttgtcgagtgatcttcctcgcggagagctcatgttcagcctccataccgctgcagtcaaaatccggcgagttagatcgcgagctgaaggccatcaccttctccaccaccgtggttgttgtgttggcgccgatgccatgttcgctgctgggccaggcggccagcaaggggcgagggatcccccggggcttgctgaaactgaaaggatgggaagtgacgcacgcacaacccgtcttcgtcaatattcccagcaaggtcccaagtcgcaatcactctgaccttagcgatgcaaacgcttccatcttggaagcggactaa

SEQ ID NO: 63059 - DNA, 483 bp, Oryza sativa
  Clone ID: PAT_MRT4530_64338C.1
atgagagccccatccttcttcttcctctccctcctcctcctcctcctcctcatccacatctccatccattgcaatgctgcagattcccagctaggttcagagaaggtcaccaacctcctcttctacctgcacgacaccctcagtgggaaggatccaactgctgtcccagttgctcaggggcctcagagagaatccaaggtggttgggaatgcgcaggggatgtacatttcgacagccaagaaagggctcacgcttgttcttgggatcgatttcgagctcactgatggcccctacaaaggcagctcgttcgtcgtgtactcgcggaacccggtcatgcaggggaatggcagggagctcgccattgttggtggccgtggtttgttcaggatggctcgaggtttcgccttgcttcagactgtttatctggacaacgtgaacggcgatgcgatcatagagtataatgtgactctcttgcaccattga

SEQ ID NO: 63060 - DNA, 432 bp, Oryza sativa
  Clone ID: PAT_MRT4530_64339C.1
atggcgtctgcaagctcgtcgtcgttaagcagtcgacgaaataggttagttctaccgttgattgtgtgcccctcatgcaacgtgaagaccattgtgagatgcacagcgaagacggatgctaatcgaggccgtgttttctacacttgtcctgaccatgagaaagatggatctgggtgtaacttttggtattgggagcaaggttacatcaattttctcaagaggaatggcttcattgaagatggcactaaggggaagagtgcattaagggtggatctggagcaagatgattttggcagacaagatgaactagagaagaatttgatagctgtagtgcccattgctagagaactactgttggcagtgaagggcatgctagttttagggttatttggagttgttattttagtactccctccgttttttaatagatga

SEQ ID NO: 63061 - DNA, 1917 bp, Oryza sativa
  Clone ID: PAT_MRT4530_6433C.1
atggcggacaccaaggcggaggcaaaggcggaaactatcggcggcggcggcggcggctctggctcgttcagcgagcaggcgtttgttgagaagcttaacaagctcaacaacacggcgactaggatccagagtatcctttcttccgcagcactttcaaattggtgcatttttcaccgaaagagagccagaaaggttgttgatacatgggagaagcagtataacagtgcaaataaggataagaaagtatcattcctgtacctgtcaaatgatatcctgcaaaatagtaaacgcaagggaggggagtttgtgaatgaattttggagggttcttcctggattattgaaagacttttatgtcaatgggggagaagatggaaagaaagtagttggaagattaatagatatttgggatgagcggaaggtctttggaacccgtattgaaagtctgaaaaatgacattcttggtggtagcactcatacaatgggtaacaatgtcaatagctcaaatccaagccctaacccctcttcagtttccaaagctgcgcggaaagattctggtacagtaacaagaaaacttactgttggcgggatgccagaaaagattgtaacagcatatcagtcagtgcttgatcaacattttgatgaagacacagctttaaacaaatgcaataatgctgttagtgttttggataggatggataaagatgtagatgatgcttgtactcaaggacagcgtggtggtaaaattgtagttagcccctttcagccacagtaccaccccgaaaccccccaaaatccccaaatccctcctccctcgcaggagctaaatgcaattttaccgccactccgtgctgtggatgaggctggatgcaaaattgttgcctacgtggggcgccacatcgtcggtattcagcaaggatcatcgttgatttctgaccttcaagggcaggaaacagtccttaagcagtgcattgagcaacttgaaagtgtcaacatggctagaataaccctaatcaataaactaagaaaagccctcggcgaacaggtggctcgagcaaaggctgaacatgccatgcaactaaaacaacgacttggtagtgccttgaacaatggtgcaggatctagttctagtccactgatggttacacttccaccaggacaaacagctgccatgatgcagaattcagcagcaatgccgatatttccccagtttcaaccactgcatccagcaacctcacttcctgccacatccagtgctgttggtgatgagcccaaaaaaactgcagcagctatggcagataagcttgcatctttgtcagctcctgagaaggtgctctcctccattttctcttcccttgctgctgaacaagcaaggaatagtggttcgacttctggagatctttctgcaggacctccaggctttgagagcaataagaagcctaggcttgacaaccccattcatgctagtgacatgagtgctcccccattctttgggcaactgccgcaggtgcaaccacagattggagcaacagctgctcttggaggcacacagccaccaacccaagcaaaccaagcagctggttcatttccaccacctccacctccattaccacttatgccacaatttgttcaaaatactggaggaatgtttggaatgggaccttttgggatggtgagtggctctgcgccacctccacccccattgcccaacattatgtcagcaggttttccaagactaagtgtgcctccacctctgcctctgcctacacaatctcagaaccagagccagccccagcagcagcagtctccacaggcaccacagcaatcgccgacctcgactggattttttcaaccaccaggtgctgggttcttcccaccagtgcaggttcagcaatctccatctgcccaacggcaatga

SEQ ID NO: 63062 - DNA, 928 bp, Oryza sativa
  Clone ID: PAT_MRT4530_64340C.1
tcgtttcactcccccatctctgtaccaaactggagtttagaattcagagatccaataaccaaaagcaagaacaccatgagagccccatccttcttcttcctctccctcctcctcctcctcctcctcatccacatctccatccattgcaatgctgcagattcccagctaggttcagagaaggtcaccaacctcctcttctacctgcacgacaccctcagtgggaaggatccaactgctgtcccagttgctcgtgctgagaacgctgtacccaagcctgataatccggtacccttcagcacgatctatgtggtcgatgatctgctgacagaggggcctcagagagaatccaaggtggttgggaatgcgcaggggatgtacatttcgacagccaagaaagggctcacgcttgttcttgggatcgatttcgagctcactgatggcccctacaaaggcagctcgttcgtcgtgtactcgcggaacccggtcatgcaggggaatggcagggagctcgccattgttggtggccgtggtttgttcaggatggctcgaggtttcgccttgcttcagactgtttatctggacaacgtgaacggcgatgcgatcatagagtataatgtgactctcttgcaccattgagttgtttttttttttttggaataagagttgagttgttttagttattatgcccgtgctttccgttgtttggagcacaataagtgtgatctgtggttgggtttgtcaggttatgttttccatttcttttcttttgtttgtctactctccaggagatggatatgtcatggaaattcgtagaaatgtttgcctggttgaatctccattttggatgtgtggaactgtgaataaacattatgtttgctgttttcattaaaaaaaaaaaaaaaaaaaaaaaaaaaaaaaaaaaaaaaaa

SEQ ID NO: 63063 - DNA, 330 bp, Oryza sativa
  unsure (1)..(330): unsure at all n locations
  Clone ID: PAT_MRT4530_64341C.1
ggaatcctaattgnccgtacgcgccggcccacacggcccaagacatggttagttcttttttccgaattttttcatatatgtataagcttttancccatatttgaatactttcaactctgacttaaaaactttcaactcagattcgaaaactttcaactcgagattcgaaaactttcaaatcagatttaaaaattttcaaaagttataattaaaaaactttcaactcaaaacattttgaaaaaaaaatacgtgtgctaaagattttaaaaaagtaatcagaaaaaaagaaaaaaaaagctaaaaaaaaaaaaaaaaaaaaaaaaaaaaaaa

SEQ ID NO: 63064 - DNA, 1563 bp, Oryza sativa
  Clone ID: PAT_MRT4530_64342C.1
atggagccatcagcattggccaccttgctatccatggcgctcgccgccttcctgctactcgggctgatcaaacgcaagggcagccgccgtggctacaacctgccgccgggtccgacgccgtggcccgtcatcggcaacttcaacctcatcggcgcgctgccgcaccgctccatccatgagctctccaggaagtacggcgagctcatgctcctccgcttcggctccttccccgtcgtcgtcggctcgtcggtcgccatggccaggctcgtcctcaagacccacgacgcggtgttcatcgaccgccccaggacggcgtccaggaagcacaccacctacggctacgccgacatcacgtggtcgccgtacggcgcgtactggcgccaggcgcggcggatctgcgtcaccgagctgttcagcgcccgccgcgtcgcgtcgttcgagcacatccgcgccgacgaggtgcgcgcgctggtgcgcggcctcttcgccgcggcgtcgtcgggacgcagcggcgccgtgcacctcaacagggatcacctgtccacgctgagcatgaacgtgatcacgcggatggtgctcgggaagcggttcttcggcgagggcgcggacgcggcggaggggcccgtgtcgacgctgtcggagttcaagtggatgctggacgagctcctcctgctcaacggcgtcctcaacgtcggcgactggatcccgtgggtggactggatggacctgcaggggtacgtgcggcggatgaagaaggtgggcaagatgttcgacgcgttcatggagcacgtcctcgacgagcacagcgagcggcggcggcgcgagggcgaggcgttcgtggcgagggacatggtggacgtgctcatggacctcgccgacgacccctccctcgagatcaagctcggccgcgtcggcgtcaaggcgttcacgcaggacctcatcgccgggggcacggagagctcgtcggtgactgtggagtgggcgctctcggagctcttcaaaaaccccgccatcttcgccacggccaccgacgagctcgaccgcgtcgtcggccgctgccgctgggtcacggagaaggacatcccgaacctcccctacctagacgccatcatgaaagagaccatgcggatgcaccccatcgtgccgctcctcatcccgcgcgtcgcccgcgacgacgccgccgtcgcgggctacgacatccccaagggcgcgcgcgtgctcatcaacgtgtggaccatcggccgggacccggagctgtgggacgcggcggaggagtttatgccggagaggttcatcgggagcaggatcgacgtgaaggggcaggacttcgagctgctgccgttcgggtccgggcggcgcatgtgccccggctacaacctcgggctcaaggtgatgcagctgagcttggccaacctgctgcacgggttcgcgtggaggttgccggaggggatgaaggaggaggagctgagcatggacgaggtgtttgggctgtcgaccacgcgcaagtacccgctccaggtggtcgtcgagcctaggcttcccgttcaactctactccttatga

SEQ ID NO: 63065 - DNA, 2010 bp, Oryza sativa
  Clone ID: PAT_MRT4530_64343C.1
atggcgcgcggcgcaacgtggacgcggcggctgcacctgcacggcctcttcctcgccgtgctcctcctcctcacgttgccggcgggctccaccgcggccgccggcggcggcggcggcaccgtgatcgggatcgacctcggcaccacctactcgtgcgttggtgtctaccggaatggccacgtcgagatcatcgccaacgaccaggggaaccggatcacaccctcgtgggtcgccttcaccggcggcggcgagcggctcatcggcgaggccgccaagaaccaggcggcggcgaacccggggcggacggtgtacgacgccaagcgcctcatcggccgccggttcgccgacgccgaggtgcagcgcgacatgaggctgctgccgttcgctgtcgtcgacaagggcggcaagccgcacgtccgcgtcgaggtgaggggcggcgacgtgcggctgctcagccccgaggaggtgagcgccatggtgctcgccaggatgaaggagacggcggaggcctacctcggggaggaggtcacccgcgccgtcgtcaccgtgccggcctacttcaacgacgcgcagcggcaggccaccaaggacgccgccaccatcgccggcctcgccgtcgagcgcatcctcaacgagcccaccgccgccgcgctcgcctatggcgtcggcaaggagggcgccggcgggaagaacgtcctcgtcttcgacctcggcggcggcacgttcgacgtcagcgtcctcgccatcgacggcggcgtgtacgaggtcctcgccaccaacggcgacacccacctcggcggcgaggacttcgaccagcgcgtcatggagcacttcgtggagctcgtcaggcgcaagcacggccgcgacatcgccggcgacgcgcgcgcgctcggcaagctccgccgcgagtgcgagcgcgccaagcgcgcgctcagcatccagcaccaggtgcgcgtcgaggtggagtctctgttcgacggcgtcgacctgtcggagccgctgtccagggcgcggttcgaggagctcaacaacgacctgttccggaagacgatggcgccggtgaggaaggccatggcggacgccaggctgagcaatgccgacatcgacgagatcgtcctcgtcggcggcagcacgaggatccccaaggtgaggcagctgctcagggactacttcggcggcaagcagcccaaccagggcgtcaaccccgacgaggccgtggcctacggcgccgccatccaggccaacatcgtcggcggcgacaccgacaacaaaacccgcgacatggtcgtcctcgacgtcacgccgctcaccctcggcctcgagaccgccggcggcgtcatggccaccctgatcccgcgcaacacgccggtgccgacgaagagggcgcagctgttctccacctacaaggacaagcagacgacggtgaccgtcaaggtgttcgagggcgagcggagcatgacgcgggacaaccggctgctcggcaggttcgacctcgccggcatcgcgccggcgccgcgcggcgcgccgcagatcgaggtggcgttcgaggtggacgcggacggcatcctcagcgtgagcgccgccgacagggccaccggcaggtcggagaggatcaccatctccggcgacgaccgcaagaccagccgggaggagatcgaccggatgctgggcgaggcggaggagttcgccgacgaggaccgccgccacagggagcgcgccggcgcccggaacagcctggaagcctacgtctacggcgtcaagaacgccgtggtgggcggcgagatggcgggcgccatggacggcggcgagaaggagaaggtggaggcggcggtgatggaggcgtacgagtggctcgacggcaaccaggacgtcggcaaggaggagtacgaggagaagctccgggagctggaggacgtgtgcaacccggtcatgtcggcggtgtaccagaggtccggcggctcacggcgagatggcgacggcggcggcgacgacgatcacgatgagctttag

SEQ ID NO: 63066 - DNA, 338 bp, Oryza sativa
  Clone ID: PAT_MRT4530_64344C.1
ctttacgaacaagtatcagaagcaattttcatggataacgatagattggcgaatgttgcttcttggctgcttcggttaacggggatggcagggtcttacactctacagggatgtgtgtcaactcaactcaactcactcgagctacagatggccgacctgagccttagtgtaggtttcatgccttcacttctgtagcacatacatctatagtaacccttaagtttgtttggacaagaggtagtggcacaaagtgcaataggtgtcgtcgttatccttgcatcaattgtatgcggaaatgatccatattctaaatgagaatcacaaaattttggtcgttg

SEQ ID NO: 63067 - DNA, 422 bp, Oryza sativa
  Clone ID: PAT_MRT4530_64345C.1
atacaaacacaaaccacggacccgatgatggggggaaaaatactagcacgctgcccgacataacgcactattacataaacatacatcatccccatgacacccacaggtacaaacatgaactgtatcacgcacaagtaaactaactaacgcacacatctatgagactgcatacctcttgacgcatatacgcggcaagatgaatgatgctacacaaagacgccatctcaggggcacactacttacgacgaccaatataacaaaccatatcagcatagacgccatcagacataagggtgcgctgggacataccctccacggactactgacgggcgaacttgaccaaaacgcactgcctgctaacgatgacattctgcccactatcaaacactaacgtggaccagccaagcaccagcatagcatgt

SEQ ID NO: 63068 - DNA, 480 bp, Oryza sativa
  Clone ID: PAT_MRT4530_64346C.1
cggacgcgtgggcgcgctatgccttgtgactcctccgacctcaaaaccagggggccagtatccacgatgccgccgccgaccaccgagaggcaaccatcgcgccaccagctagcgaacaccgctatctaaacggccacgccacgccacggccaccatctgcgatcacgacatggcgccctctctcctcaccaccacgtgctaggccctgaccctcgcccccggggccggcgacagccgtgtatgtggcggccgaagtggatcggcgcggctgagcttccagtccggccgagttcagagccgacgcgcgctggagatgcaagtgcggtcgtcggtggcgatcgataaggagacggccgtaagcgatccgacgccgacgttactgcggcatgacggatccggcgcggggtcactgtcagtgcgtcagcgagctgaggccatgatccatcaagtgcagggggaggtgtgccccgcactggaaga

SEQ ID NO: 63069 - DNA, 447 bp, Oryza sativa
  unsure (1)..(447): unsure at all n locations
  Clone ID: PAT_MRT4530_64347C.1
aggaacgcccncggggggggggagccaanncngccaaacaccggaagcgaggggaccaccaccccgcggcgaacccacangacgccgccggcgcggcgaggggaaaaaaggcgggaagggggacntnggcgctcaacaaacgaatccgcagaggcccntacacggcaaaggatcngnggggggggggggggnccaaagacaacaagggaagggcacacaaggagccgacgaacacacctccgaccccaacggcaacgccccgggacaaagacggcaaaaactcctgccaacaaggaaacgaagaaggcttccggaaaccggggaagcttgcgccacgaagcaaggccggaaagaaaaagaattccgtacaacaacgcgggagaccggtgggaaacaaaacaagggaatgggaaacctgcttcggaactaaactcgaacccaaaccgg

SEQ ID NO: 63070 - DNA, 504 bp, Oryza sativa
  Clone ID: PAT_MRT4530_64348C.1
atggtgggcgacggcatcgtcgacgcccgtggtgagagctgggaggcggagcagctatatatgtgcaatgacagcgtgcagcccaccacggtgggcatcaaccccatgatcaccatcagcttcccaggaaagcagcttcgtgatgcaatccaagttcccgctacgagcggccaaatgaggcgacgtgcaggcgcagctgtggcggccgcgtcgctcggcgggggtggcgtcgagctgtggtggcggcggcgctcggcggcggggtggttgccgtcgggagcgacgctcggtagcggggtggtggcggtcgggatggtcgcggtcaggatggccgcgctcggtggtggcgcacggcggcagggtgctggcgcctgcctggaggggtcgatccatccagagaggaatatctctggatctgacaggggagaacgtgttcaggtcgaggagggagctgacaggggtgcagcgatggtgctagcgatggcctcatggtacgacatctag

SEQ ID NO: 63071 - DNA, 246 bp, Oryza sativa
  Clone ID: PAT_MRT4530_64349C.1
cggacgcgtgggaaaaaagagaagagagtacttaacaacaaccctcacgaagattgcgaactgtggcggccctatctgactgaagctacgcgctctatatgctgaagcttatatcaatgataagatcacgtagacataggtgaatgtccgactttatactacttgaccgcgggggaaacccgaacttatccgatttataaggcttggcaagacataaatttgtcgctagtgctggaaaaaccacat

SEQ ID NO: 63072 - DNA, 2599 bp, Oryza sativa
  Clone ID: PAT_MRT4530_6434C.1
gaataaaaaataaataaacaaataaacttgaacatgacaaatatttgcaggtcacaacttcaagtaaggatctatggatatatggcttctctagcaaactaacagagccaaaggtaagttctaccattgaggagcccaaaaaagttctttcacttgggcacctctttaagtaaaaaatgtaatgccaacatttgtttgcctcaggactaaaaataagatctggctatgcaaacaaaagtaaagtctaactaacttcacataatcaagaagagttgaacaaactcctcagaccaaaaggaacagttgtacatcacataagccgcaagcctatcctacaaatcctcccaattcataagcattaatcctgcttcacgatgcaggactcgccaactatcagatcaatcctcagggattattttttaatatacaaagttagcacaaggtgcttcctttatagcccaacaattgttgtagaatcatcattgccgttgggcagatggagattgctgaacctgcactggtgggaagaacccagcacctggtggttgaaaaaatcctgtcgaggtcggcgattgctgtggtgcctgtggagactgctgctgctggggctgactctggttctgagattgtgtaggcagaggcagaggtggaggcgcacttagtcttggaaaacctgctgacataatgttgggcaataggggtggaggcggcgcagagccactcaccatcccaaaaggtcccattccaaacattcctccagtattttgaacaaattgtggcataagtggtaatggaggtggaggtggtggaaatgaaccggctgcttggtttgcttgtgttggtggctgtgtgcctccaagagcagctgttgctccaatatgtggttgcacctgtggtacttgcccaaagaatgggggagcacccatgtcactcacatgaatagggatgccaagcctaggctactttttgatctcaaagcatggaggtcctgcagagagatctccagaagtcgaaccactattccttgcttgttcagcagcaagggacgagaaaatggaggagagcaccttctcaggagctgacaaagatgcaagcttatctgccatagctgctgcagtttttttgggctcatcaccaacagcactagatgtggcaggaagtgaggttgctggatgcagtggttgatagtggggaaatattggcattgcagctgaattctgcatcatggcagctgtttgtcctggtggaagtgtaaccatcagtggactagaactagatcctgcaccattgttcaaggcactaccaagtcgttgttttagttgcatggcatgttcagcctttgctcgagctaccttaacgttccattgcaattgagttacagacatggcataagaaatagaaagatctaacatgtgattatgcaactgattgcgaagaagctctgactttgcttcctgttcgctgagggcttctcttagtttattgattagggttattctagccatgttgacactttcaagttgctcaatgcactgcttaaggactgtttcctgcccttgaaggtcagaaatcaacgatgatccttgctgaataccttgggtacaagcatcatctacatctttatccatcctttccaaaacactaacagcattattgcatttgtttaaagctgtgtcttcgtcaaaatgttgatcaagcacagactgatatgctgttacaatcttttctggcatcccgccaatagtaagtttttttgttactgtaccagaatcttttcgcacagctttggaaactgaagaggggtgagagcttggatttgagctattgccattgttacccattgtatgagtgctaccaccaagaatgtcatctttcagactttcaatacgggttccaaagaccttccgttcatcccaaatatctattaatcttccgactactttctttccatcttctcccccattgacataaaagtctttcaataatccaggaagaaccctccagaattcattcacaaactcccctcccttgcgtttactattttgcaggatatcatttgacaggtacaggaatgatactttcttatccttatttgcactgttatactgcttctcccatgtatcaacaacctttctggctctctttcggtgaaaaatgcaccaatttgaaagtgctgcggaagaaaggatactctggatcctagtcgccgtgttgttgagcttgttaagcttctcaacaaacgcttgctcgctgaacgagccagagccgccgccgccgatagtttccgcctttgcctccgccttggcgtccgccttggtgtccgccatcacgaaggcgaaggctccaccaccgaactcctccccctcgcgaacaagctaatcccccgaagaaacttgtacttcttggccggccaagatcgaaccaatcctaaatcccccccccggtggcgagctcgtcagcttgaattcgccgccggtgaacgacgggaagggggcggcgaggccggggtgggcgggggaggggaggacgagagggtttggtttttttttccttttttcccctttccgtgctgcgtgtgttcgctgcaagcctcttgggt

SEQ ID NO: 63073 - DNA, 2151 bp, Oryza sativa
  Clone ID: PAT_MRT4530_64350C.1
atggtagatgatataaaatttcaattaatatcaaaatatcacccaattaagtacaacccgactgatatagaattaaaagatattctaattgaacaaatagaatatttattatccaaaagtggtataagtatagacaaatttaatcttcctcagatgacagtaagatacaaattagattcaactaatacactaattcaagatgaattaaattataatgcaaatgatttagaagagcaagctaacaaattgtacttacagctaaacgatgaccaaaagaaagcatttcatcttatagtaaatagtgtaataaataaagaaagtaattttttctttgtatctggccatggaggaactggcaaaacatttttatggaatactattgtatcatttttgagagctaaaaaagaaattgttctaacagtcgcatcgtctggagtagcatcattattactaccaaatggtcgaacagcccattcaagatttcgaataccagttgatatagatgaactatcattatgtgatattaaacatggaacaaaattagctgaattactaatagaaacttctcttataatatgggacgaagcattaatgacaaatcgccaatgctttgaggctcttgatagaacattaagagatatattatcagaaaaatatattaatgctatcgataaaccatttggagtctttacacatggccaattatatgtcgcaatctcacgaatgaatatcattccaattgcagagctgcgcccagggcgatatgactacatgatatgcgtccgaatatccaggatatgggaatttagaggaactaatgaagatgataacatcaaacatttagatctggttttacttgatcaaaagggagatgctatctatgctgagatcccacctgatgctatacctttattgaaccaatatttacaggaaggaaatatcgtctacatcagcaagataacagttaacaatgctaagcccagttatagagcagttgatgttattggaaaaatcattgctgtttctaatgcagcaatgatttctacaagttcatcagattataggatgagaagaatagtcaaactacaagatttaagtggaaaaaccatcgacctctcattatcaggaaaaagagctgttgagtttgatggagagacaatactggaagttggtcaaaataaccatataatagcaatatttgttggtacatcaatgaaaatccttaagggaacatatgaatttctaagtggaacaacagcttgtcgttggtatatcaacgaaaatgacatccctgaaatcaagatgtttcagaaatgccttccaccacatgctgatcctatacaaaagctatacttgcaaagtgatgaagatatgcaacggagcattgaacacaaaacacttgcagaattgaaggaaattgatccttttgttgacaaggatgaaaaataccagtgcactgctactatcattggaattcaggaaagaaaaacttggtgttatcaagcctgtaaattgtgcaattgcaagatgatatgggatggttctatattaaaatgcaagaaagagaactgcccatgtaggcagtatgagtacaagtacaaaataccattcattgcaaatgatggcacagctagccttgaacttgtgctatttgaaaagaaaggtacagaacttattggtaggactgctgaaactatgaaaaggcaatatgatatcaatcaaacacctccagaaataaaagcatggataggacataaattcacattcatagtgaaggttttgccgaacataactatcaacgctgatgaaccttcatttgaggtgctgacaattaaagaaagatttggaaggcaacattccagccaaggctttaaggcaactaagaatcttcccatcagttcaagttcatctcaacaactacataatttacctccactggtgcctatactatccaagaaaatacaacatgagatagaaccaccccaagatattcaaagcatggaagttgaaccatataatttagaaacaagcactttgtcaggaaaaagagcttatgaagatccaaacagtacagatcaggaaaatgatgaagaagaaagcactgactatggcttcattcagacaaagggcaaaaagaagcgttctacctga

SEQ ID NO: 63074 - DNA, 5364 bp, Oryza sativa
  Clone ID: PAT_MRT4530_64351C.1
tcaggtagaacgcttctttttgccctttgtctgaatgaagccatagtcagtgctttcttcttcatcattttcctgatctgtactgtttggatcttcataagctctttttcctgacaaagtgcttgtttctaaattatatggttcaacttccatgctttgaatatcttggggtggttctatctcatgttgtattttcttggatagtataggcaccagtggaggtaaattatgtagttgttgagatgaacttgaactgatgggaagattcttagttgccttaaagccttggctggaatgttgccttccaaatctttctttaattgtcagcacctcaaatgaaggttcatcagcgttgatagttatgttcggcaaaaccttcactatgaatgtgaatttatgtcctatccatgcttttatttctggaggtgtttgattgatatcatattgccttttcatagtttcagcagtcctaccaataagttctgtacctttcttttcaaatagcacaagttcaaggctagctgtgccatcatttgcaatgaatggtattttgtacttgtactcatactgcctacatgggcagttctctttcttgcattttaatatagaaccatcccatatcatcttgcaattgcacaatttacaggcttgataacaccaagtttttctttcctgaattccaatgatagtagcagtgcactggtatttttcatccttgtcaacaaaaggatcaatttccttcaattctgcaagtgttttgtgttcaatgctccgttgcatatcttcatcactttgcaagtatagcttttgtataggatcagcatgtggtggaaggcatttctgaaacatcttgatttcagggatgtcattttcgttgatataccaacgacaagctgttgttccacttagaaattcatatgttcccttaaggattttcattgatgtaccaacaaatattgctattatatggttattttgaccaacttccagtattgtctctccatcaaactcaacagctctttttcctgataatgagaggtcgatggtttttccacttaaatcttgtagtttgactattcttctcatcctataatctgatgaacttgtagaaatcattgctgcattagaaacagcaatgatttttccaataacatctagaaaacgatcagtcttgcttgtgaaatcatgaagtttatcaaatgacaccaagtcaaatgtatactttggaaaatccataggttgatctttggcttcaatgatacaagttcttttgtttagtttgatcatatatggattaccaactgctctataactgggcttagcattgttaactgttatcttgctgatgtagacgatatttccttcctgtaaatattggttcaataaaggtatagcatcaggtgggatctcagcatagatagcatctcccttttgatcaagtaaaaccagatctaaatgtttgatgttatcatcttcattagttcctctaaattcccatatcctggatattcggacgcatatcatgtagtcatatcgccctgggcgcagctctgcaattggagtgatattcattcgtgagattgcgacatataattggccatgtgtaaagactccaaatggtttatcgatagcattaatatatttttctgataatatatctcttaatgttctatcaagagcctcaaagcattggcgatttgtcattaatgcttcgtcccatattataagagaagtttctattagtaattcagctaattttgttccacgtttaatatcacataatgatagttcatctatatcaactggtattcgaaatcttgaatgggctattcgaccatttggtagtaataatgatgctactccagacgatgcgactgttagaacaatttcttttttagctctcaaaaatgatacaatagtattccataaaaatgttttgccagttcctccatggccagatacaaagaaaaaattactttctttatttattacactatttactataagatgaaatgctttcttttggtcatcgtttagctgtaagtacaatttgttagcttgctcttctaaatcatttgcattataatttaattcatcttgaattagtgtattagttgaatctaatttgtatcttactgtcatctgaggaagattaaatttatctatacttataccacttttggataataaatattctatttgttcaattagaatatcttttaattctatatcagtcgggttgtacttaattgggtgatattttgatattaattgaaattttatatcatctaccatttttgcccaatttgtctcaaaaaatttcctttcatcttctaaattgcaatacaatagtaggattataaataaagatcgtagttgtggagatgttgcccaacttgcagcttcgtcaaatgttttataccattcattatcatccattaataatccacgtgctgcacatgtttctttaaaagttttataaataataccattgtatgttctaatatcttcatagttttttgctcctttaactatcattaatagcatacgtagatagaaacgttctccttcagttggtttgacataatataaacgggctattttaaaaccatgttgtcgtttgacccatttcctttcttttttatcccatttccatttttgtgggaattcacagtatgtcaagtttcttgcttcttcatgtaactgatttgccataaaccattctgtaagcatcgttctttgattatctggattttctataatattttttagttttgtatccttagttaatttgaccaattcattaagggaagatgaacaggcattctttccactggtggccaatgataatgtatttcatatccaagtaatctccacataccatcttgatcacaaatatatctacattctaaatattctttatttcatctattttttctgtttgctcattttcagaatgatctattccttgtttgatacgttggaaaattattttagctttatcccctcctttgtttacatatttacataaatattttaacattctgctttgattaacaaactcaacatttaaatgggcttgatatctttttaataggaataaattgtgtggaacaacccatctattgtccaagttatggttatctttacgtatgtatatattagtatttctacgtttatattgtgcaaatccattttcagtaaaattagtttgatcattgaattctttagggtaaaattttgaacatttgccttttttcatgcatggacaattttcattcttggctccacatggtccatgcatcatatgttcagctataaggatgtatcctagaggatcttctctaggatctggtatttcagttgatatccatttttctatcatttcaatcgttatttcacttggctttttatctaaccaaactaagatatgtacatgtggtaaacctcttttttggaattctaccgagtataaaatagctgttgtaggtccaaatattgtgccggattgtatatcttctattaattgttctagctttatatgaaatactcgaactataatatcaggtctatcattgggttgttcgttttctaagattgtcatagtaatttcaggccacctaggattacatgtaaatgttataaataaatgtggaggtccatatacacgacatattgctatgccatcgtaatagttttgcattgtatatcgtttagaaccaacatggcttgatggtaatattattttttttcctatttggtttccttccgttaaacctttttgtactgcatcaaatattccttgtaaacattcagctcgtaatttgttttgatttttagcaataaacattagtctatcttcatcttctattgcacgggcatcaactattgcttgttttgataatctaccataacataaataaggatttggttgatttggtcgataatgcatatgatatttgtagtattcatgtactgtaattgttgatcttgtttttttactctttttatttgtattactattataatatggtatgccaagttgaaatcctctttctccataaggaaataataaagggtattgtaaagccatataggctggatggaatatagatatgcgttgtaatccattatttttattttgaacaataatatctcttttataattttctagatttaattctccaactattaaaattgctaaatcttctgtatgtggcatttcatattgtattggatcacctttatcagcccctattattcgaatactaaaatcaacacctttattttcttcaaatagatcgcgagcatagcgaaatgtttttaccaatggattatattcatcaaacattttttttaattgttcaactatatacggattgatatctgtacttcccatttcttctttatttaaagcatgtattctattttctatttcatttttagtatcaaaaatatatagttctgcaaactttggaatttcattaggcttaggtaggagacatccaatacgatgatgtatttgtccatttacacgaaacacatatggtccatcgccattatttatatttttatctattgtgccacccattgaagtaaaagaaaataaactattatattgtctaatcttctgcataaaatgttttgatagattatcttctttattattaagtaacctagcaagtgtttctggtgggttctggaatggtggtatttttattttgttatttttacagcaatttgatatataatttcaccttttcttttctttgtctctcttttatttctttcttcaaaccaaaatatagcattgcaatgtttacatttatactctggcatacctataaatgatttgttttcatatgattcttttagatatttaatgtattctggggtaaaggacaccatgccatgtgaagttgataaatatgaagatatatggtctatctctaaacatttcttttttgcaattttttctagataatctaaattatattgtatttttcttttatttttaatatttttttgcttttctgtatatattatatctcttatattactattttttgatgtttcttcttcatctttattacattttttattgttattatgcaccatatttttttcttcttctctttttcgctttttctctcttagaatttgtagtctgatatatcttcttttcttgcaatctgatttatcatattctgctatttttattggatcttgctttctctttgatggcatattaacacttctgattatataagcacaaaaaatagccaaagtcagaaatgaatataagcataaaattaaatatgaataattaaagatattggttgaatcaatacaaaacttaatcat

SEQ ID NO: 63075 - DNA, 533 bp, Oryza sativa
  Clone ID: PAT_MRT4530_64352C.1
cccactttttcggaccttagataagatcgagtccgagattgcgatccaacattccattatattataccatgccatcttgtgctactatctttaatcctacaaataattatgccgaaattgatgaggatattgctgcatcaatataaacaattggctgaaagagtgaatgatggattgattccttaaagactgcgaagatatggctcggttccaaaatcggttggggactagatccgctacaggaaccgcataaacctgacctacaccgttacctatattggtaccattacgcgtatatcgacgagatctttatgactatagcgatgactgctacactgttgtacgaacctttaaacgtcttgcgacgacgcatacttcattgcgatagcctttacgcatgaaacgacgacttatatgtcgatgcgattacccataagcctataacgacgcctcatacttggttgcgataagggttaagcctgtaacgacgaggtatatagccgatgcgataacccataagcctataacgacgc

SEQ ID NO: 63076 - DNA, 1812 bp, Oryza sativa
  Clone ID: PAT_MRT4530_64353C.1
tgcgttgggggccccacccatttcggcacacccttccctccacttgccgattacttttttgccccccggcgcgctgggcgccttggctttggccctggctttggctccgctgttcttatcttccccactcgtgcctggctctctctctctccctttctcctctcctccaaggtcatggcaaaggagaaataacagctagcgggcttggggaagggaaaacagcaagtgggagatcggcagggagaggtgaattactacttgagtagaagtggtacaagaagagtcgtcgtctacctgtgagcgaattatttcgaggttgtgcgttgcgatgatgggaggtggtctggtgatggaccagggcatgatgttccccggcgtgcacaacttcgtggatctcctgcagcagaacggcggcgacaagaacctcggcttcggcgcgctcgtgccgcagacgtcgtcgggggagcagtgcgtgatgggggagggaatctgacggagaatgatgtcagcgacgaggagattgaggccgaggatctggcccggcggatgtggaaagacaggatcaagctgaggaggatcaaggagaggcaggacaggctcgcccttgcgctgcagcaggctgagctggacaagtccaaggggaagccgatatccgatcaggccatgcgcaagaagatgtcgagggcgcaggacgggatcctcaagtacatgctcaagctgatggaggtgtgcaacgcgcgcgggttcgtttacgggatcatccctgataaagggaagcccgtgagcggcgcttccgacaatattagagcttggtggaaggagaaggtgaagtttgataagaacgggccggcggcaatcgcaaagtatgagtcggagaacttggcgtcggctgatgctccgagcagcgggatcaagagccagcacagcttgatggatctccaagacgccactctcggttcactgctttcgtcattgatgcagcactgtgatccaccgcagcgcaagtacccattggagaggggcactccacccccgtggtggccttcagggaacgaggattggtggattgcgttgggccttccgagggggcaaattcctccgtataaaaagccacatgatcttaagaaggtctggaaggttggggtgcttacaggtgtgatcaagcacatgtccccaaacttcgataagatcagaaaccatgttaggaaatcaaaatgcttgcaggataagatgactgcaaaagagagcctgatttggttgggtgttctacagagagaggaaaggcttgttctcagcattgacaatggcatgtcagaggttactcaccacggtgctctggagtacagaaatggggacacacacagcagcagtaatgagtatgatgttgatggttttgaggaggctcccctttcaacatcatctggagatgatgaacaacatgccccaacaaggagagaaagagctaaagtcaaacgccctaatcaggttgttcctaagaaggcaggaacaaaagaaccaccaaagagaaaaagaccacgccacagtgtcaccgtaattgagcaggaggtacaaagagctgatgacgcatcagaacattcaaggaatatgattccagatatgaaccgactggaccagcagacgctgcaccggctgcagcaggtgctgacgacgaggcagatggcgcggtcgctgctcgccgtctccgactacttccaccgcctccgcaccctcagctccctgtctcaaaaatgctatttattcaactgaattacatggctaatccaattagtatgcagcatttattctcccgta

SEQ ID NO: 63077 - DNA, 582 bp, Oryza sativa
  Clone ID: PAT_MRT4530_64354C.1
atggaggaggcgttatacccggttttccggttgagagatgttattcacacaagcgcaagagatgagggagaaatattatatcatccaaaatatttacagaaatggcccctgccacccaagtggagggtgacaagaagcagcaacgacatcggaggatgcgtggtgatggcattggaggagctggtcgttcccaacgaccttcaccgacgtgcgtatggcaacggggacgaaggagaaggcagttgttgtgtcggtcacggagaggcatgcagaccgtcggcggcggcgcaccccccaggatgagcatgcaggacgtccgtcacggcagccttccctctcggcgaaatttcggactgaaattgatggcatggcatggcgacggacgggcgcgcgtacgtcttcccgacaacttgctgctggggctcgacgtccgtccaccatcgccaccgccaccgccggccgggtgagctctagatcgagctcgtcgcacgccggtgtgaagaaattaggaaaaggtggtgaggatgctgacacctgggtcccacatatctcttcaggttcaggggagctgccatgtgacat

SEQ ID NO: 63078 - DNA, 366 bp, Oryza sativa
  Clone ID: PAT_MRT4530_64355C.1
cggagcaaacactttgatctgacatttcggggcgaagagaaaagcttccagagaagcatacaggaaccactactgccttaaggcaagggttgtcccccttgatttgcatttgcccagacataaaagcagctaagaactgcctaagattatatcgagttggagcattttgtcgcagtccaagacaatggcatcataatcaccaccttcagttaaatcttcatcctcgggtataaacctctcataggtgtgcatatccccatccatgtaatctttatccaagctctcaccaccatgggaccaaaggctgcttgggaaaatctacttatacctgatggggcttctggcctgaaactcatccccacgaag

SEQ ID NO: 63079 - DNA, 469 bp, Oryza sativa
  Clone ID: PAT_MRT4530_64356C.1
cttctcctccccctctttaccttttcctcctcggttcgggtccgggggtcgtctagggtttagtggggtggggatggcgcgcccgatggcgagacccgttgtttcgccgcgggcctcgccgggccccccgccacccgttccttgagggccgccttctccccttcgggaagaccctccactcccagaaccttaaccaccgggaagagggggaggccacgggggttgggtttcgtaaccttctcctccgaccagtcaatgcgcgacgccttcgagggcatgaacggcagggagctcgacggccgcacatccccgtcaatgaggcccagtcccgccgttccggcggcggaggcgggggctacggcggcggcggtggcggctacggcggcggtcgtggaggcggcggctacggaggaggtggcggcggcggctacgggcgccgtgagggcggctacggtggcggcggcggcta

SEQ ID NO: 63080 - DNA, 300 bp, Oryza sativa
  Clone ID: PAT_MRT4530_64357C.1
cctgcacgtacccggccttcctggctggacccacgcgtacttgattttggctccccaagctggcgcggctctggttgtaccttaaacaaatgtctcttcctcatgatggatgctgtaggcaagacatacactggcatgactgctcaccttggggtggcccctctgacaccatcgatactgcaaaggctgagatccaagataaggagggcatccgcccggaccagcagcgtctcatcttcgctggcaagcagctggaggatggcaggacccttgctgactacaacatccagaaggagtcga

SEQ ID NO: 63081 - DNA, 373 bp, Oryza sativa
  unsure (1)..(373): unsure at all n locations
  Clone ID: PAT_MRT4530_64358C.1
aggattcggcacgaactggcaggaaaaacacgggggaaaggtgtnttccnattccttgaaaaatncggggcaaacgtctanggggnacancccaatctactccccngangaatggtctcccnccggtgaaacctaccttngtggaaacaccnggcttctcatctgggncntganccnccccngggtcctcngggggggggccctccncntctaaaaaaacaacgccctccccngggtaaatttcacccaaatccnatctatttttnttanaccnaactgggtgtctgcatattcntctgttatctaaaanaaccttccncttaatncnaatttattantcccnctgcttaatccaactgcnttgtgattaatc

SEQ ID NO: 63082 - DNA, 420 bp, Oryza sativa
  Clone ID: PAT_MRT4530_64359C.1
atggagtccatgggtggcgatgacacgacaaggttggcgcagcctggttgcgaagtcatcggggagctggagatctcccctccgaccctctccctcatcttgttgttgcccaccacggcgccacccctgtcactcgtccatcgagaggcccttcatgtgacggagcatagggggataagagcggggagagatggcgtcggcatcgacctcgtcgaccatgtctctaccgcttccttcgtgatcaccgttgtgggctccccttcaccgcttcgaccctcacttgcctgtcaccgccgctgctccagccaaaaggaaagagaaagggaagagaaaagagaaagagagaagggagagagggatgaggaagaaaggatgtgggcccacatatcagtgggtcccacaaatgttttttttgtgtga

SEQ ID NO: 63083 - DNA, 951 bp, Oryza sativa
  Clone ID: PAT_MRT4530_6435C.1
atggccgccgcctcgctctcgcgcctctcccaccgggccgcggcgccctccctccgccgcctcctctccgccaccgcatcggccccttcccccgccgcggcgtcgcccccaccgacggccccctcctcggccgcggccgccgcggcgggcgcggatcgggtgcggtgggactaccgcgggcagcgccagctggtgccgctcgggcagtggatgcccaaggtggccgtcgacgcctacgtcgcccctgaggccgtgctggccgggcaggtcaccgtctacgacggcgcctccgtgtggagcggcgccgtgctgcgcggtgacctcaacaagatcaccctcggcttctgcgccaacgtccaggagcgatgcgtcctccacgccgcctggtcggcgcccacagggcttccagctgacacccttgttgaccggtatgtgacagtgggtgcatactgtctgttgcgctcatgcactattgaacctgagtgcatcatcggtcagcattccatcctcatggaaggttcattggttgaaaccaactcgatccttgaagctggctctgtcctgccccctggaaggaggattccaactggtgagctctgggctggtaatccagctaggtttgttcggaagctaaccaatgaagagatcatggaaatcccaaagctcgcggtggcaatcaacgatttgatgcaaagccatttttcggagttccttccgtactccactgcttatttggaggtggagaagttgaagaaatcgttttcaattcctctgtaagcatgttttttttgtcaccttctccgccaaatgaacgagaaaataaagcagcccaaagtacctagatgttttgtattgaatctaacttgtaacttgggtggatgtgttacgttgtgaatttttcgttcattgttgttgtcaacttggggacaggcgttaaggaccatgtctgaa

SEQ ID NO: 63084 - DNA, 978 bp, Oryza sativa
  Clone ID: PAT_MRT4530_64360C.1
atggctgctgccttgtttgacgagcttggacagcaggccaccaacttgaaggagttctttataagatgcacaagttgcttgaagacggtggaggacctcccattcctctctggtttccttcaagttgaaggatgtgaaggcctggagaggatctccaaccttccccaagtgagagagctgtttgtaaatgaatgcctgaatttgaggcatgtcgaggagttgggtggtttggagtggctattgctggaaaaaggtatgcaggagatctctcagctgtggatccctgggcttccggagcaacaccgccagctccatggagatgagcatgagctggagtcccctgtttgggagcacgcacaagccacaggatgggcgactgtcgggctgacaaagccgactttggtcgacaagaagatatcgggtagcgagcaggtggctggcgagcaagtggtgacggtagcggatggtgatatggttttgtcggcgcagcctgaaaaggagatgaccgcggcaatgcttcttaagtcttcgggacacgctggttcgcactatccagtgaccggcagcaatgaagcagtggctgtcgggcttgcgccgaacatgacaccaatacgccgcagtgatcgttccaactccgagacagccctcggcatcgcttcggccgatgatgactctctgttgaaagcgatgaagaggaaagcagccatcaatctggatgatcaatttgccccttatggggcaaggccggccttgttggcttcccctcaaggtacacctaatgagccttttacaagttcttgttccgcttctcaacttagtttttgttcgtctttaaaccgtattgaggtctctttgggaaataattcttctgaggttgatttttctattaaagcccttaagcacatcaatgttgacaaattgaaagtaatccctaaagcaaactcttcattttccctaaaccaatgccgccatggatga

SEQ ID NO: 63085 - DNA, 1259 bp, Oryza sativa
  Clone ID: PAT_MRT4530_64361C.1
ccacgcgtccgcatgcagcgagaataaggtaggaggagtagttgcttgcctccgtcctgatctccactgattcattgtgttatatatgcataagcataacgcaattaaccacgcgtccggtcagctcgatcatatcgcagggagtacgtagcaaattaatggcggccgtcgggctgttggtactagttggcctgcaggtggtggtcgggtcgatggcggcgcaagaagcaggtgatgccccggcgagcatcacggggccatgctcgcgtacaggagacaagaaggcgtgcgtggagttgttgtcgggcatcccggaggcccggaaggcgacgacggtgggccccctcgcggagctgtacctgcaggcaatcgccaaccacacgacggaggccaaggcgatggctaccaagctgctagccaccatgaaggggaagggcgtgccacccgtgtgcctccagcagtgcaccgccagcgtcgacaccctctccaacgccctcgccgccttcttctctgcctccgccgacgtcaacaaaaagtacagggacttggacggttttctcgtgggctttcttaaacaaccgcccatctgcatgagcgcgtgccccatccggtcgtgcgatatggaagaggtcactatcgccgacaagttccaccaagcctggaagatgttgggtgtcgcacacgacctcatcacgcagatcctaggcacaaagtcctagatacattaaggggcggatccataacaagatttaaggggaggactcgtgatctctttcttccttgttcagtcctctctacttttcattttctctctatttttccccctttcatttccccttctaccaaggtaaaaacagcgggacacgggcgaacccagtccccctagcacccacgttggatccgcccctggatacgttctatatgttggacattttgatttgccatcctactaccagaatttacctatcaaataaatctttctaggttagcaacccaaatacttccttacaactgtttttttatttattttgacgggtgcgcatgtgtctgttcccacctccaatcgaggaataggaatttttatcataccagtgtgggtattattgttatatactcctatgttgttgaaataactgagatcgttatttttaagatgtgcacattgtaactatttctatggggagaatgatttctatatattgacttgcactaataatatgtagcggcttttgattctcttataaaaaaaaaaaaaaaaa

SEQ ID NO: 63086 - DNA, 234 bp, Oryza sativa
  Clone ID: PAT_MRT4530_64362C.1
atggcttgtgatcacggagaagcaaaccaagctggcagtgggaatcaaggaccaccatacggatatagcgcttccgacaacgtaggaatatctggaggactagatgagctcgcgatgatacaaggaggcggcgcaaacctctcttcgtccggcaatactactccgtcccaaaaagaatccaatcatagcaatgaatatggacacgcatgtgtccaggtcacatcagatgtttga

SEQ ID NO: 63087 - DNA, 375 bp, Oryza sativa
  Clone ID: PAT_MRT4530_64363C.1
gtatcggccttactttctatttgcatcggtatagtcgtgtagtcagcctaccagggaggtgcagtggtgtggatttagtgtccggttattcggttgctctatgtcatcttggaggatgtagagtagtatttaataatgtagacgtggtgtctagattattaagtatcattatctgggcatatatgctacaggtcagtcgaggtgagccgctgatgatgacagctcagtacgggcattcctccacgatagtatatattcctaagaaactttcctggggagggtactcctccgtatttagccccggttggaccatgacaggttgtcgtaaggaactcggcaatccgaagtggtccctcgaagcaccaggagggcatt

SEQ ID NO: 63088 - DNA, 105 bp, Oryza sativa
  Clone ID: PAT_MRT4530_64364C.1
atggcgaccgatctatcccaatcacttgatttaagtatatatcaacatcgatgcaaatatgatatcggctcaaagataaatgatatgtcatcggcacctagctga

SEQ ID NO: 63089 - DNA, 396 bp, Oryza sativa
  Clone ID: PAT_MRT4530_64365C.1
atggaagtttctgggccgtgctgtgcctgggccgaggttgcagcccgtgggctggcacgacacttcacggttcctatagtaggccgtcacatcaagcccatgcggccatgccacttcccgtcaacaccaatgggcgcgcatggtgcaagcccccgccaagacagagcacgagtggcatcacctctctcgcccaatctccgcgcatgcatgctcccgcggcgccttgccctgcgccccaacccaatctcattgcgctctggtcgccgtgccacacgcctgccgcacgccaatcctctcgcgctcacgcgtccccgcctgcccaatggaaatcgcacgagatttaaaagtgaacattgtagcattatggatgttggtatttcttacaaccacagataa

SEQ ID NO: 63090 - DNA, 281 bp, Oryza sativa
  unsure (1)..(281): unsure at all n locations
  Clone ID: PAT_MRT4530_64366C.1
cgctctctctctctctctctctctctctctctctctctctatttctccccatctccccgatccacccgtctctctccaaaccctagccgagctagatctccacctccgncgccgccgccgncgcctccgggaggccccaccgacacagatccccccgcgatggcgttccgccgnctcctctccgccgcagtgcgccgtcgctccgncgncgcggcgcgcggtggtgnccccggngaatgcgcgcgaggcatncaccgcggtcgccgncgggggcccggcgt

SEQ ID NO: 63091 - DNA, 2466 bp, Oryza sativa
  Clone ID: PAT_MRT4530_64367C.1
atggctgccttgccattagccaccgctgaagtatgtgatgcaaatgcagatttaatcatgaatggtgagcttcgtgctctccagcccatcttccaaatctatggaaggcggcaggtttttgctggccctattgtgacactgaaggtctatgaggacaatgttcttatccgtgagttccttgaggagaagggtcatggaagggttctcgtggttgatggtggtgggagcttgcgctgtgccattttgggtggcaaccctgtgcagcaggcacagaacaatgggtgggctggcatcgtcgtcaatggttgcatcagggacgtggatgaaatcaatggctgtgacattggtgtccgggctctgaactcacatcctatgaaggcaaacaagaagggaataggtgagaagcatgtgcctgtgaccatcgcagggaccaggatttgcgacgcttgcgacgctgcgctgccgcctccagatctctacacactaattaagcacaaattttcttccatgtcgaccccatcatcgtttgaagctactgaagaggcaacccttttaggggcaaagcggaagtcttctttagatcctccttcagccaagcgaccacggtcacctattttgccattagtaaggtccccaagggtcaggcttagaatgcaccatttgattgagcatatgcatgccaacttgtcccctaccgctgatgttatgaagaattggaaatttgaccaagaagtgttacggaaagaacttcttaggatgattgtgttccaagagttaccctttagcattgttgagcatgttggatttaggagatttgttgcaagtttaaatccatattttaaggtgatatcaagaaccacactgagaaatgattgtatggctgcttatgaggatcgtaagttagctttatttgatgtcttgaagagctcaaattctcgagtatctcttactgccgacatgtggacttccatccagaacttaggctatttgtgtgttacctgtcattacattgataatgaatggaagttgcaaaagagaattataaagtttgctctagtgccgaccccacatgatggcatcactatgtttagtgaaatgctaaaggccattcaggagtggcatatcgaaaataagttattcagtgttaccttagacaatgcaagtgtgaatgatacaatgatgactcatctgaaaaccaatcttgttggtaagacaatgttgccttgtgatggagtgttgttgcatttccgctgtgctgcccatatattcaatctaattgtccaagatgggctaaaaaccatgagcaacgccattaacagtataagagaaagtgttaaatatgttcggagttcgcaatcacgtggtcaaaggtttgaagagatgattgctcaagtgggaataaaaactaacagacgaccatcgcttgatgtatcaacgagatggaattcgacatacttaatgctcgagtcatctttattggtcagaatggcctttgaagccttggatcggcatgacataaattatttgcatcaacccttcgattatcaatggacaatggctgagaagctttgtgctttgttgaaagttttctatgaagctactgttgcagtatctggtacgttgtacccaacttcaacatgctattttcatgaactttggaagataaagatggttttggacaaggaggctacaaatgaagatgtcaccattgcatctattgtcaaggaaatgaaagaaaaatttaagaagtactgggacgctcaatacttgcaaatatgtttcccagttatttttgatccaaggtataagtacaaattcattgagtttcgtttgaagtctgcatttggagctgctgcaactcattaccttaaggaaatcaagagtaatatgcagaaattgtttgatgaatattctgccaagtatgggggctcaaacaacatcaattctcagcccgaaacaagtgttgagcagaatgttgatgcaagtaatcaattcgttgattggagacagtttctacatgacaaaagcaggagcaaagtaaagagtgagcttagtcgatatcttgctgatgtgcctcaggaaggtgatttccaagatgggcatgattttgatatcttgaactggtggatggtaaacaaaacaaagtaccctgtgatttcacgaatggcacatgatgttttggctattccagcaacatcagtggcatcagaggcagcattttcaactggagaaaggatcattagtgactatagaagtagactttcgagcagtactgtagaggcattgatttgccttcaagattggatgagggcagaaggtttgggtgatttctttgcacgtgatcttgctgagagtgatgaccaaaatgtgcaacattcaggtaatatagaaaaagaccggaagagctcatggagttggaagcagttgtttgtcactttgtcaattgggacagttggtttatcatga

SEQ ID NO: 63092 - DNA, 613 bp, Oryza sativa
  unsure (1)..(613): unsure at all n locations
  Clone ID: PAT_MRT4530_64368C.1
ccggccgaatcgattcattgtttcatcctggtaatcatctgcgctgcgtattgcctccgtggttctcggctggggctcgattcgcggctcccagcgtcagcgctgcgaacatcgaacgtagcgctgccgtcgtcgccctgtagcgccgccgtcgccatacgcctggacgccggctgtagcgccacctctgcaaggcggacaccatcacagggcacaacgccaccgtcgctagacaccagcttccttcgttcctcggaggaattaccatgaccagggcatctaaagaaatcaaatcaatcctgcaatggttcagctgctgcatacaactgattcacctgatgaagagataatatcaggtctctgtatcatttcaacctcagcagatgactggagctactaccatgattattacaggatgcattatgtagccattaatattacagaaaaacaaacggcgagtgcacgactggcatgcgaagccccaggaaatcttgcgatgcaccatacgcatggcattctacagttggtaaagttctctttaacagggagaacnactacactacnagaacatagtaacacggntccaacctttctcggaatcagatgctacgct

SEQ ID NO: 63093 - DNA, 1317 bp, Oryza sativa
  Clone ID: PAT_MRT4530_64369C.1
atgtggaaagaatttgatccaatatgtactaatgataaactatcacatgctaaatgtatccactacaataaggttttcgtggctagccgatcttctgggactagtcagtgccttagacatttgaaagtttgtaaggtcaggcttagaatgcaccatttgattgagcatatgcatgccaacttgtcccctaccgctgatgttatgaagaattggaaatttgaccaagaagtgtcacggaaagaacttcttaggatgattgtgtttcaagagttaccctttagcattgttgagcatgttggatttaggagatttgttgcaagtttaaatccatattttaaggtgatatcaaagttagctttatttgatgtcttgaagagctcaaattctcgagtatctcttactgccgacatgtggacttccatccagaacttaggctatttaatggcctttgaagccttggatcggcatgacataaattatttgcatcaacccttcgattatcaatggacaatggctgagaagctttgtgctttgttgaaagttttctatgaagctactgttgcagtatctggtacgttgtacccaacttcaacatgctattttcatgaactttggaagataaagatggttttggacaaggaggctacaaatgaagatgtcaccattgcatctattgtcaaggaaatgaaagaaaaatttaagaagtataagtacaagttcattgagttccatttgaagcctgcatttggagctgctgcaactccttaccttaaggaaatcaagagtaatatgcagaaattgtttgatgaatattcttccaagtatgggggctcaaacaacatcaattctcagcccgaaacaagtgttgagcagaatgttgatgcaagtaatcaattcgctgattggagacattttctacatgacaaaagcaggagcaaagtaaagagtgagcttagtcgatatcttgctgatatgcctcaggaaggtgatttccaagatgggcatgattttgatatcttgaattggtggatggcagcattttcaactggagaaaggatcattagtgactatagaagtagactttcgagcagtactgtagaggcattgatttgccttcaagattggatgagggcagaaggtttgggtgatttctttgcacgtgatcttgctgagagtgatgaccaaaatgtgcaacattcaggtgaaaatgcctatacacctctagtaacaggtaatatagaaaaagaccggaagagctcatggagttggaagcagttgtttgtcactttgtcaattgggacagttggtttatcatga

SEQ ID NO: 63094 - DNA, 312 bp, Oryza sativa
  Clone ID: PAT_MRT4530_6436C.1
atggaggtggaggtggtggaaatgaaccggttgcttggtttgcttgtgttggtggctgtgtgcctccaagagcagctgttgctccaatctgtggttgcacctgtgcctggaggtcctgcagagagatctccagaagtcgaaccactattccttgcttgttcagcagcaagggacgagaaaatggaggagagcaccttctcaggagctgacaaagatgcaagcttatctgccatagctgctgcagtttttttgggctcatcaccaacagcactagatgtggcaggaagtgaggttgctggatgcagtggttga

SEQ ID NO: 63095 - DNA, 2424 bp, Oryza sativa
  Clone ID: PAT_MRT4530_64370C.1
atggttttggacaaggaggctacaaatgaagatgtcaccattgcatctattgtcaaggaaatgaaagaaaaatttaagaagtactgggacgctcaatacttgcaaatatgtttcccggttatttttgatccaaggtataagtacaaattcattgagtttcgtttgaagtctgcatttggagctgctgcaactccttaccttaaggaaatcaagagtaatatgcagaaattgtttgatgaatattctgccaagtatgggggctcaaacaacatcaattctcagcccgaaacaagtgttgagcagaatgttgatgcaagtaatcaattcgctgattggagacagtttctacatgacaaaagtaggagcaaagtaaagagtgagcttagtcgatatcttgctgatatgcctcaggaagaggcattgatttgccttcaagattggatgagggcagaaggtttgggtgatttctttgcacgtgatcttgctgagagtgatgaccaaaatgtgcaacattcagtctgcggtagcataggtcactctgggaatgactgcccggagacccgtgaagaggcgatgtacatgggtaacaacaacaacaacgggtatcgtccacaaggaggtaaggggtggaaccagccacgcccatactatcaaggaggtaacaacaacggtaacttttctaaccaacccacattgaaagatctcgtttttgcacaagctaagaccactgatgctttaagcaaaaagctagctgccaatgacaagaccgatttttttccggagatggatgcggccgacgggatggaggaggctggcttgatcaaatcaactggcacgctcacgagcctaaaagcaagattttggacctgcactaaagttaatcagatcttacaggccaaaaaccaatcaccgtcgacggttaagcctccaaaccctccggggaccaagcatccatcttctgaggttggagctaagaacatcgtcccaatcactatagacaaattgtcaccagaacaaaggcaggagtttgagcggatgatgagcagcgtgcaggacaaattcatgaattcattcaaggagaccctctcaggaacaatcattcaaaagtacaagctgaaggtggttgctgccgatgaacctggaacaagctcatctaagcatggtaaagccaagggcagtgcagataattcaagtgataaaggtggggagcctagggatggtgaggttgaggatgttgaagaagaggacgctgaggagcaagaacctttgaaattcaataatttccaagatcaagttgactatgttgttcaacatgctttgatcaaccaatcaggagtgcttgaatttggtgacaggcaaccagcagcatactgccaatgcacctccagtccaaccgacgacatcagtttcagctccagcaccaggcagcagacggtgcaacagataccagcaaggcagagaacacctattgctcagcaaaatcagcctattggggctcaatttgttcctgaacaacaaatgtataatgtgcaacagcctcctgagaactatcttggtgataatttgaacttccagtatcagcctcgttcacctcaaatgcaaggagttccccaacagaagccttgggcagacatgattgcagatgtgatgagggagcagttcgggcttaggatattggaaatttgtatcggcatccctatcctgagtggtttgaaagagttccactacctaaccgattctcagttagccgatcttacattccagggtttgatagctccgatcaaggagaagttttcatctcaagagtttgagagcttgtctcatcttgcacagaaggtgactctacataagcagaggtttgcagaggctaagaagaatttcaagaagatcaatcatgcgtatccttatatgtatgactctgaagaggaggatgactccgaggtagcagcagctgagtgggcgaggagtaaaaaggttgtgccatgtcaatgggtaaagaattctgggaaagaagaaaggtatggctttgatatcaccaaggctgataagatttttgatttactacttcaggagaaacagatacaacttcctgctgacgagacgaccagcggtgaagaagataaggccaatcaacactggcagaatcatgcagccatggaagtgaagaaaccagtcggcagccatggcaaacgcggtgacaccagtcagcggcggatgcggcggccggtcggtgaagacgtagacgcccaacaacggcagcataataagtctgccgtgcaggcggaagcaccagtcggcggcggcgaaggcaagccggtcggtgaagacgcgcccaacaacggcggcataataggccagccgtgcaggcgaggacaccagtcggcggcgacgaaggcgagccggtcggtgaatgtcacgtcctga

SEQ ID NO: 63096 - DNA, 263 bp, Oryza sativa
  unsure (1)..(263): unsure at all n locations
  Clone ID: PAT_MRT4530_64371C.1
tntaaatgnacaaaaagntccngncttntagaaaggagcttgnaganntatgcatntcgttgaaanggaaacatgangacgccaaagagctagcagtgcgggctattgttaacancaggtacaatgctnatgttaaaccatccaatgtttnaggctaaaatttgtgctcttcagaantttgntagcaatctgngntccaagaagntttcattcgagganatnagtgccattgatgctcattcantcatncgactanaatggag

SEQ ID NO: 63097 - DNA, 937 bp, Oryza sativa
  Clone ID: PAT_MRT4530_64372C.1
aggccaggccgagcaggcccaagacaagacgactggacaatggctgagaagctttgtgctttgttgaaagttttctatgaagctactgttgcagtatctggtacgttgtacccaacttcaacttgctattttcatgaactttggaagataaagatggttttggacaaggaggctacaaatgaagatgtcaccattgcatctattgtcaaggaaatgaaagaaaaatttaagaagtactgggacgctcaatacttgcaaatatgtttcccgattatttttgatccaaggtataagtacaaattcattgagtttcgtttgaagtctgcatttggagctgctgtaactccttaccttaaggaaatcaagagtaatatgcagaaattgtttgatgaatattctgccaagtatgggggctcaaacaacatcaattctcagcccgaaacaagtgttgagcagaatgttgatgcaagtaatcaattcgctgattggagacagtttctacatgacaaaagcaggagcaaagtaaagagtgagcttattcgatatcttgctgatatgcctcaggaaggtgatttccaagatgggtatgattttgatatcttgaactggtggatggtaaacaaaacaaagtaccctgtgatttcacgaatggcacgtgatgttttggctattccagcaacatcagtggcatcagaggcagcattttcaactggagaaaggatcattagtgactatagaagtagactttcaagcagtactgtagaggcattgatttgccttcaagattggatgagggcagaaggtttgggtgatttctttgcacgtgatcttgctgagagtgatgaccaaaatgtgcaacattcaggtatttaaattgagattcgtttgaattaacttggctattctatatttttgtatagttgtatactacaccact

SEQ ID NO: 63098 - DNA, 552 bp, Oryza sativa
  Clone ID: PAT_MRT4530_64373C.1
atgaaagaaaaatttaagaagtactgggacgctcaatacttgcaaatatgtttcccggttatttttgatccaaggtataagtacaaattcattgagtttcgtttgaagtctgcatttggagctgctgcaactccttaccttaaggaaatcaagagtaatatgcagaaattgtttgatgaatattctgccaagtatgggggctcaaacaacatcaattctcagcccgaaacaagtgttgagcagaatgttgatgcaagtaatcaattcactgattggagacagtttctacatgacaaaagcaggagcaaagtaaagagtgagcttagtcgatatcttgctgatatgcctcaggaagcaacatcagtggcatcagaggcagcattttcaactagagaaaggatcattagtgactatagaagtagactttcgagcagtactgtagaggcattgatttgccttcaagattggatgagggcagaaggtttgggtgatttctttgcacgtgatcttgctgagagtgatgaccaaaatgtgcaacattcaggtatttaa

SEQ ID NO: 63099 - DNA, 457 bp, Oryza sativa
  Clone ID: PAT_MRT4530_64374C.1
ccgcctcgtcgccgagctgtcgccgctcctccgcagccctccgcatccgccaccaacggcggccctccgcgtcgcaccgtccagccgccgctcctctcgccgcccctcctcgtcaccgagccgccgctcctccgcagtcgccgctcctccgccaccagcggagggccgcctcgtcatcgagccaccgccgctcgtatgcagccctccgcatctgccgccagtggcggtcctccgcatcgtcggccgagccgccgctcctcccgccgcccctccgcgtcgccgagccgctgctccgcgcagccgccgccgccgctcctccgccgccagcggagggccgcctcgtcgccgaactgccgccgctcctccgccgccggtggagggccgcctcgtcgccgagctaccgccgctcttccgcgtcgcgccgccgagccgccgcttctcggcagtgctctggtga

SEQ ID NO: 63100 - DNA, 850 bp, Oryza sativa
  Clone ID: PAT_MRT4530_64375C.1
aggattctccctttccgcaggcaggaggagacgctgggactgggtgggtaccctccgccgccggctgccgcggctacctcccctcttccttccctcctctctcgcatccacgcgacagatcaaaccaaccacccccactaatcgaatccctcacccgattgccccgaccacatcgccgccgccgcggccgatccgaccccgcgagcgagaaccgaagccaatatggctgccttgccattagccaccgctgaagtatgtgatgcaaatgcagatttaatcatgaatggtgagcttcgtgctctccagcccatcttccaaatctatggaaggcggcaggtttttgctggccctattgtgacactgaaggtctatgaggacaatgttcttatccgtgagttccttgaggagaagggtcatggaagggttctcgtggttgatggtggtgggagcttgcgctgtgccattttgggtggcaaccctgtgcagcaggcacagaacaatgggtgggctggcatcgtcgtcaatggttgcatcagggacgtggatgaaatcaatggctgtgacattggtgtccgggctctgaactcacatcctatgaaggcaaacaagaagggaataggtgagaagcatgtgcctgtgaccatcgcagggaccaggatttgcgacggtgagtggctctatgcagataccgatggcattctcatctcgaggactgaattgactgtgtaaacctctctgtgtgtctgtgtatgacaattcagagcataaaaaggagttctgctttcgctctcttgtgtgtaatatctacaactgtaataatgtactattaaattaaatgaacacctggaat

SEQ ID NO: 63101 - DNA, 474 bp, Oryza sativa
  Clone ID: PAT_MRT4530_64376C.1
atggctcaagaacttcactgcaaatatgcggatcttacactttggaaccaaaatgggatagcggcaaacgtgtgcttggaccattataagttgggccggaatggagaagattaccctgaaggagctgcctccaagaagttgtgccggaatgggtttaccacttacatgcaggctgggccggaaccatcgttaatctatgcttttctagttaatgaggccgaggatgtagtcgttgatgaacagctgcgactcgaggaaagggacgagctggtggaaggactgtgcgccaccagctcgatcgtgagtgccacagtggagagcggagttcagaagcaccttgagccaatgagccatgtgctgccgagtgaagaagctagcgccctgcccccgggacggcggcagcatcagcatgacttgctctgacttgttgatccgtcggccacttgggccgttgaggaatgaggaggcgaccat

SEQ ID NO: 63102 - DNA, 347 bp, Oryza sativa
  Clone ID: PAT_MRT4530_64377C.1
ctgccacagtgccggccacaccacgctgctccctggccaccccgactgccacagtgcggccacaagtgaagtccaccgaagcacaccgaacacctccgcccgcccggccgagtcaccctgcccttaatttggtccaccacactatataaccaccccactatgagctgctgcgctcttgccccctgtgtgcctgattattgcctgaattaaaccccgctgttgtttatcgattaattaagcagctggtcgcttcggcgactatgcgtgtatcaacgtatgaatttgtgtgatgtgacgtacccgtgctattctcagtgaaattaatccaaaaaaaaaaaaaaaaaaaa

SEQ ID NO: 63103 - DNA, 318 bp, Oryza sativa
  Clone ID: PAT_MRT4530_64378C.1
gcgactgtatctaccacatttgctccatccagtaccagcccacctgtttcatctccaatccctgcaattccgacattcaattttggttcaagcacttcaatggtggcagcaactaaatcagatagtacaaatacagtggcaaagccagctagcagtttattgttcggtactggggatgctatagctgaagccaaatctactgcccaggatacagccaacaaggcatcatcaaatctaacttcaaatgatggaattgcctcaactacttctgcctcaacagcaccttttacattttcgagctcaagaaacaacactttt

SEQ ID NO: 63104 - DNA, 1422 bp, Oryza sativa
  Clone ID: PAT_MRT4530_64379C.1
ttatgtttctagtgtcaccaagcccacaacattggacatcactaatttggagggaggtaatgaaagagaaagaacagaagatgtccataaatcatcagataaggtattaccctcggctgctcctttccactttgcatctgctgcatcaactacagcaagcctgagcaatggtttctcactgccatcatcatcaaagttatcaaatgtaacaccaattgataagcctgaagttagcttggctccatccactgtatcgaccacatttgctccatccagtaccagcccacctgtttcatctccaatccctgcaattccgacattcaattttggttcaagcacttcaatggtggcagcaactaaatcagatagtacaaatacagtggcaaagccagctagcagtttattgttcggtactggggatgctatagctgaagccaaatctactgcccaggatacagccaacaaggcatcatcaaatctaagtaccactcctatttcttcaaatatttcaagttctccagtcacatcctcttctgctttctcaagcatagcaacattttcatcttctatggttgcagcttcaaatgatggaattgcctcaactacttctgcctcaacagcaccttttacattttcgagcacaggagcttcctcgtctgggtctggatctgtagctttcggagtaggaacagcctcaactggttctgggatcacatcttttggaaccggagcatcctcatcttggcctagcacagtgtctttcggattaggagcttcctcatctggaactggtgctctgttatttggagcgggggcttcctcatctggaactggggctctgcctttcggagcgggagcttcctcatctggaactggggctttatcttttggagcaggagcaggaacctcctcatctgggcctggaactgtgtcttttggagctggaacctcgtctgggcctggaactgtgtcttttggagtgacaacttcctcatccgggtctttgtttggtaattcaccatttggatcaggaactactttctctggccctggaagtggattcgcattttcatctcctagctcttctgctgggtcatctttaactatggccagcacaagtatgttcagcaccagttctacggcttcatcatcccctgctttcagtaacccattcggttcaagttcatcacctcccagcatgtttacatttggccaatcggcttcttcaggaggaggtttttcatttggagcacagtcatctccagctttctcctcacaagctccagttttttcatttacctcagcaagcatgaattcatctactccgcagcctgcttttgggatgacaaatgccaacacatccttcggcatgggatctccaagcagcaccagcaccagcaccgatatttggttcctcaccat

SEQ ID NO: 63105 - DNA, 575 bp, Oryza sativa
  Clone ID: PAT_MRT4530_6437C.1
ccggccgcgacagaagctcacagctcaggtctaccacgtacaacagcacaagtgagagagggagaagaagacaagggaagaggaggagcttacctagccagccatggcgaggcgctttccttgcctcgccgccgccatgctcctgcttggggctgtgtggcggtggcgagcgccttcattgatgaagcggcggctgctgggcgggggctcgggcatggcgcccgcttcatgagcaagcagggtcgcgtgacatactacaagctggcggagccgtagcccaagccacaagccaaagcctcatcctacacccacgccaaatcctttgcccacgccagagccgcagccaacaccagaacccgagcctgatcctacaccgtaaccaaggccagaaccgcaacctgcacctaagcctgtacctaaaccatacccggagcccacaacgttgccgccgccagagacacctactgtatccgggcctatacctctgcctaagcgagacccacataaaaatgaaagagccggatcatgcctcacactcgaggttttgatgccttcagtggaggttaatcgcgcgc

SEQ ID NO: 63106 - DNA, 557 bp, Oryza sativa
  Clone ID: PAT_MRT4530_64380C.1
ccacgcgtccgaaaaaaaaaaaaaaaaaaaaaaaaaaaaatataatattaaaaaaaaaaaaaaaaaggggggggtttttaaaaataattagaattaattaaaatggttttaaataaagggggcctttttaagggttcaaattttattccgcgtgttgcaagttatattttttttttggggcacttaaataatttcattggccgtggttttaaaacgttttgattggaaaaaccttgccttacccaaactataatggctttgaagaaaatcccctttttccaagttggcttaataacaaaaaggcccccacgattcgcctttccaaaaatttgcacaatttgaatgacaattggaacccccctttttgtggcgctttaaccgcggggggtgtgtggtttactcccagttgtaccgttacttttgccagctccttaggccccgatcttttagtttttttcctttcttttttagccacattggcggttttttctcgtaaagttttaaatggggggtttctttttgggttccaatttaaggttttacggcccctgaacccc

SEQ ID NO: 63107 - DNA, 834 bp, Oryza sativa
  Clone ID: PAT_MRT4530_64381C.1
atgtccactcactccactgagcttgtcaagggctcgcatgagttcaccgtcgccggctacagcctgcagaagaggaacggcaccggacacttcgtcaggtccggctcattcgaggtcggtggatacagctgggcgatccgattctaccctgctggcagcacaaaggaagaagaaagacacgtgtccgtgttcctcgagctgggaagcactgtggtagagaaagttaccgcaaggttcagattccgcgtcaatggcgctaccgcgagctcgtggggccagtttaacgacttcacacttagcagcaaaacatgggggtaccagaaatttatggagatagaacccgtggagtcggagtacctgatcaacgactgcctgacgatgcactgcgacgtggaggttgtcaaggagttgaagaccggagcaaccatgagccgcttcatcacggtgccgccgccagccatctgctgtcatctcgagcagcttctggagagcaaggaaggctgcgacgtgacctttcaggtcgagcgcagcgactacgacgcgcacagggtggtgctctcggcgcggtcgccggtgttccgcgcccagttcttcggcccaatggcggacaccggcggcggagacaggcctactcaaactgtttttattcctgggaggaacattataggagtggttattctacatgagacgttgtatgaattacatcgtaaaggaattccaatgcattttaggaagcattctaataaatattggaaagttattgaagaaagaattgagaaaaaacttagtagttggaaagatagaattatcatcacaatggtaggttctcggtaa

SEQ ID NO: 63108 - DNA, 1773 bp, Oryza sativa
  Clone ID: PAT_MRT4530_64382C.1
atggccgcggctctggcaatcgtagttacacgtaagaaaaaatatttagaggcggcgccgtcccacctcgcggcgggcgggtcaccccgggtcgggaccgcggagcacgactggctgtgggattgccgcggcatcggcgggggcgggagggactacgctagggagatggaggtcgcggtgcgcgtcgtgcaggccgcctgcaccctctgccagcgcgtgcagagctcgctcctcctccccgcctccgcctccgcctccggcagcgtccactccaagatcgaccgctcccccgtcaccgtcgcagattggggcgtccaagcgatagtaagctggctactctcggattgctttcaagatgaaaacatatctatagtagccgaagaagatgatgagacgctatctagtagcgatggtgcagctttgcttgaatctgtcgttgctgctgtcaatggttgcttgattgaagctccgaagtatgggctgaggtccccagagaaagagctcaaagctcatgatattcttcaagctattaggaggtgcagctctatcggaggtccaaaaggaaggttttgggtgcttgatcctgtggatggcacgcttgggtttgtacgtggggaccaatacgctgttgctctcgcgctaattgaagatggggaagttgtattgggagttcttgggtgcccaaattatccaatgaagaaggagtggctcaactaccaccaacgatattacaggttgatgtctaaggtttctcctcccacatcaggatcctggcataagggttgtgtgatgtatgctcaccgaggatgtggccaagcttggatgcaaccattagttcatgactttggcaagcttgattggcgtaattcaagagaggtccgagtatcaactgttagtgatccaatctcagcaacattctgtgaacccgttgagaaagctaatacaagtcattccttcactgctggacttgctcatagtgtaggcttaaggaagcaacccctgcgtgtgtacagcatggtgaaatatgccgcaatagcacgaggggatgtagaaatattcatgaaattcgctagagctggatacaaggagaagatatgggatcatgccgctggggtggttatcattcgagaagctggcggagtgatcacagatgctgggggccgcccactcgacttctccaggggtgttttcttagagggcttggatagaggcataatagcctgttccggaccattgcttcatcacagaattgtgggtgctgtcgatgcaagctggaactcatcaacactgtaatgcaaatagtacggatgattacagttggttggaccaatgtcggtcatagaatgcaaaggtgagttttacaaagaattgctgttgtgccctctggttgaaatctgttcagccatcttattctctgatagtctcctacgggaaaatcagctatttctaggttgcagaattagtatgtgttcatttcagttcgatttacgaacacgaaaggtaatactgcagcacgtaatacggtatatcctgttgttcaataagcaagttgtgagacgagattggcatattattagctgattcagttagttcttgtatctcttctcgccgtttctgcatgtgaagttgtcggcgtaagctcctgaaggtcacaacttgattaagttactcatctgcaacttgttggcacctgaaataactgaacctttgattaactgattgaatgatgattacatgatgtattctctgccacgcaaaaaaaaaaaaaaaaaa

SEQ ID NO: 63109 - DNA, 473 bp, Oryza sativa
  unsure (1)..(473): unsure at all n locations
  Clone ID: PAT_MRT4530_64383C.1
gcttctaaaaacctggtcggagtaaaaatgatgatttttcaccctctattaaaagttcactggttattcccgagcgtaggaaaggcttatgggagagtaaactgattttaacatttgatttctatactctggtcatgactttcaaaattaacagactatggtcattgttgtagtgacctaagtagcatcttaagggactgagttcaaatctctataggagcgaatttcagattgggttatttgagggctaagttccctatttgatgggctaagtttctaatttaaaaaaaggttgtatatatccgatttgatgaagaggcaaaaaatacccttcttaaaaaaggtcatcgnncattgtatgttttgtgatattaagagagttccactggtcaaatatgcatgttgcgctcttgctgagagtgctggatttggacgcagtcatgggtgggaagattttncacacaatattgaat

SEQ ID NO: 63110 - DNA, 340 bp, Oryza sativa
  unsure (1)..(340): unsure at all n locations
  Clone ID: PAT_MRT4530_64384C.1
acttattctttgtggaaaaaaaatttcgaaagagagcacagggaaaaccgatacattgggggaagaaaataaataattatatatcctacatccgaacaaaagcaactggcaaaactaatcaattaattaagaatctagctagcaaacgacgtgctagatttttagacgagactaaaaatcaaccaaagacttttacaaattggcgatcgattccctcaaaatggaacgcaaattttgcaggaacatttggcaaaaatgccatgtttcatgcacttgggacgcttgactctgcctttggtggatttngcctcaagccaacagtcctacatgcaagttggac

SEQ ID NO: 63111 - DNA, 386 bp, Oryza sativa
  Clone ID: PAT_MRT4530_64385C.1
tttgttgtttttttttttgtggtggtttattttgagcacattcaccacgtattcaggtgcaaatgccacttattcataaagacatctgtactcccccagtaaacggttcgataaacatcacaaattgatcgtccattgggtgtacacaaccccggcccaaagcgggatctgtgccccctgtacccgtataccagaggctggggccgacccatgcccattccatgccaccccctactgggtgattactgacccccacgggggcggggccccaggaggggggggggctcgttctggatgttcccaaccgacagggggcgatcattctacagctgcttggccacgacaccaccgcccttgcggggcgccgggaactgcaatgctgggct

SEQ ID NO: 63112 - DNA, 328 bp, Oryza sativa
  Clone ID: PAT_MRT4530_64386C.1
gtgccggttggcatgctttctttatagcagttatttcaacattcatgacaatattggaagacgatagcgaccacaagctcctattgagaaggcactcatcgggcaaatcaacattgaggatatgagtggaaaagctaaggatgtgattagtgaggaggggagcaccaaggagatgaaggatagcgacgatgatgttggcatggtcattgggggatatgcacaagatctatacaatcatagcggcctagaagaactcatgcaagaccaagatgcgttggaaaaatcgctcaagacctctccggagggttttaggggcactgtcttgaga

SEQ ID NO: 63113 - DNA, 240 bp, Oryza sativa
  Clone ID: PAT_MRT4530_64387C.1
atgcgccgcgcatgcctcggcttcacgtcgcgggtgcgcatcacgcaggcggacccgaatggtgtggcgttcatccacggcgacggcgtggtgctcctcaagatgctcacggggaagctgccggcaaacacggtgccggggttcgacggcgtcgacctgtcgcagtgggtgcgccgtggtgcaggagtggatgggcgaggtgttagacgccagcatcgccgactaggcatgcgcagatga

SEQ ID NO: 63114 - DNA, 269 bp, Oryza sativa
  unsure (1)..(269): unsure at all n locations
  Clone ID: PAT_MRT4530_64388C.1
ctctccgcactccgcacggcacgncgccgcatcgggtgacgagttgttgttgttggcttgttgctggtgcagccgcgccgcgccggcgtgctcgggtataaatgccgcagccgatgcccgtttatttcgattattttttgttataggcgatcgatcgagccacctgtagccgaacgactcactggccggcggcgaggctngagacgagaaaaggcggcggcgcggcgggtnatgggcagcgtggcgatggactncgactacggcgtgcc

SEQ ID NO: 63115 - DNA, 832 bp, Oryza sativa
  Clone ID: PAT_MRT4530_64389C.1
gtcaatgccatagataagaaatgtcgcgctttccagtggacgggtatggatgcagttcagggaggacgatgcattatgtcttggacgagtgtttgtcgccccagagctatcggtggtttgggtattgtggacttgtggcttcattcttcaccttcgctagctctggcttcagcgctcaggccacctctattgggctgacctgaaggccccctcgagagatatgtctgcgtcgttcatcttcttcgtgccagggaacgacacgtctctcttttagagaaaccaatggattgagggtcgctcggtggcctccttggtgcctggcctcctccttgccgtgccaccacatctccgggcatcgcgcacaatcacctctgctctctctaacaacttatgggtgggggacatccgtggcgttctcacggtccctatcatttcccaattcctcgtgatctgggacacggtgttttgtgtccagctcttagcgttggacaagcgattggtgttacttggcttaccagacatttttcctcggccaacactcctttgcttgcgccaatctactttgtcaggctaaaggccctgctaagtgtaagcttttcctgtagcttgcgttccaaaagtgccgctggatgaccaaccttcttctaaagcgtggtattgacagccactcagtctgtcccctccgtgcccaagaaatggagacggtgaatcacatcctacttgattgtgttttcgctcaccaggtctggcatcctcactctaggtctggtggccgactactagggcctgcttgtcagagcacctcataagggtttcagctcccttgtactcc

SEQ ID NO: 63116 - DNA, 728 bp, Oryza sativa
  unsure (1)..(728): unsure at all n locations
  Clone ID: PAT_MRT4530_6438C.1
gcaacttgaaagtgtaacatggctagaataaccctaatcaataaactaagaaaagccctcggcgaacaggaagcaaagtcagagcttcttcgcaatcagttgcttgtggctcgagcaaaggctgaacatgccatgcaactaaaacaacgacttggtagtgccttgaacaatggtgcaggatctagttctagtccactgatggttacacttccaccaggacaaacagctgccatgatgcagaattcagcagcaatgccgatatttccccagtttcaaccactgcatccagcaacctcacttcctgccacatccagtgctgttggtgatgagcccaaaaaaactgcagcagctatggcagataagcttgcatctttgtcagctcctgagaaggtgctctcctccattttctcttcccttgctgctgaacaagcaaggaatagtggttcgacttctggagatctttctgcaggacctccaggctttgagagcaataagaagcctaggcttgacaaccccattcatgctagtgacatgagtgctcccccattctttgggcaactgccgcaggtgcaaccacagattgggagcacagctgctcttggnagcacacagccaccaacccaagcaaaccaagcagctggttcatttncaccacctncaccttcattaccacttatgccancatttgttcaaatactggaagaatgtttggaatgggaccttttggg

SEQ ID NO: 63117 - DNA, 709 bp, Oryza sativa
  Clone ID: PAT_MRT4530_64390C.1
aaatcctttcaatcaaattcctcctcaaaagtctattttgcctcccccgagagctgcgcaactgcgccttccccgtctccaccggcgcagcccgccgcctacacggtttccctcgccgtcgccgtcgacgaccccttccaccgccaagccgcgacctccccggccatcactctaagcccggggaacagcataggcccctcctcctcctaccccccaatcccccgaccaccccaacccgtcgccggatgcgacgcctccgccagccgccgggcctgcaccgagaactccacgccgtcgcctccccgcaacttcaccatgggcaaccccgcccccgcccccgcccccgccgccgccgccgcgccctccatcgccgtcgccggcaccggcgccggcgccgcctccatcgccatcgccatcgccatcgccatcgcccagcccccgctgctcgccgccgccgcttccctcctcgccctccccagccaccgccaccgcctccctcctcgccctccccagccctgcatccatctccctctctccccagccaccgccaccgcccgcctctctatctccctctcgatgctcgcctctctctcgttgccggcagccgcgaggcgatgaggagggccgccttcctccctctctctcgtcgttgctccctccgccgcccttcggctgcccgtctccgcgcgtgccggagagctggtcggcg

SEQ ID NO: 63118 - DNA, 148 bp, Oryza sativa
  Clone ID: PAT_MRT4530_64391C.1
ttttgggtttattaatgttaatactttcatttcacatcagtttaagggaaataataaggctcagaacaagtttaatccgaacagaaaaaaatagagtatttaattacacagtgcacacagtcgagcatatgatcaataacaggggaat

SEQ ID NO: 63119 - DNA, 338 bp, Oryza sativa
  unsure (1)..(338): unsure at all n locations
  Clone ID: PAT_MRT4530_64392C.1
ctcgaatcgaatccaccacacggtaccctcctctctcctcctccgaccaccatggccatggncacgcaagnntccgccgccaagtgccacctcctcgccgcctgggcaccggcgaagcgnctcatccaccctctccatgcccacctcgagggcacccacctccntcagagnggcggcggaggatcagnccgncgaggcggcgacgnaggagaagaagccagcccccncggggtttngtgccgacncagntnagaccncaacacgtcgttcccgatcttgggcgggagaacggggggactcctccggaaaggcgcaggtggaggagttttacgtcatca

SEQ ID NO: 63120 - DNA, 231 bp, Oryza sativa
  Clone ID: PAT_MRT4530_64393C.1
atgcctagctcggaggtgccagagcttgccgccgcaagcttggtggttggatgcctggatccaggtcggatgacgtcggagctggtcagcgctcagctgcttcctggtggcgccgagcaggccttgtccgtgcagcttggtgacctcagccacctcgcctactcccatgccaaccaagccctcttcagcccaatggcccaacatactaaatcatgctttcactctgaataa

SEQ ID NO: 63121 - DNA, 3759 bp, Oryza sativa
  Clone ID: PAT_MRT4530_64394C.1
gcgcggacgcgtgggcggacctctgggcgcgccgccacctctccccaaccctagctagctccccctccttccccggcggcgacatcgacgatggcggcggctgcggcaggcggcggcggcgccgcggggggggcggggtgaggattcctaccccaccgccccccctcaccccccccgcacactccccgccgccaccctctccgagctctcgcctctcctcctcccccgtcttcccttcgcgcgcgccacccccacacacgcgaccatggcggcagtggcaggaggcgcagcgcgggcgctgtcgcaggcggagcaggacgtgcagatgatgctcgccgccgacgtccacctcggcaccaagaactgcgacttccagatggagcgctacgtctacaagcgccgctccgatggtatctacatcatcaacctcggcaagacatgggagaagctgcagctcgcggcgagggtgattgttgccattgagaacccccaggacatcattgtccagtcggcccgcccctacggccagcgcgccgtcctcaagttcgcgcagtacactggcgcgcacgccattgctggaaggcatacgcctggtacatttaccaatcagctccagacctccttcagcgagccccgtctgctcatcctcactgacccaaggaccgatcaccagccaatcaaggagtctgctctgggaaacatcccgaccattgccttctgtgacaccgattccccaatgcggtatgtcgatatcggcatcccggccaacaacaaggggaggaacagcattgggtgcctgttctggctcttggctaggatggttctgcagatgaggggtactatcctccctggccacaagtgggatgttatggttgagctggtggtcatttagagtgatggctctagatgtgaagttccctgaggagcaggaaggcggcagaaagtctggaatgctccagcacaagactttgctgccatcactgattacaccgcacctgaacaatggtctgctgaccagtggacctctgatgtggctgctcccccagctgctactgttggtgattggggcgcagctccagctccagttgctgctgccgaaggatgggatcaagcaggagcacccgtagccactgaagccgccgtcgttccaccggttgcgcctactggatgggacccggcagctcaaccagctgctcaaggctgggattaggctaggcaatcactttgagatgtcttccgcagcttaagttaaatatttcccgaggcatgaatgaacacccaaaatccaatgtgatcatctatagctacaccatgaactcaactgtttttaggaatttctagctgaacctgtgttgtttgtccgtccctatttcgaacaacaatgctgtgagggtgagctcggcaagatgtgtggtatatgttaagctttctacttttgtcctaagtttattctgtagcgtttaaaggcagtgctccggcacctactggctggtaggaaatgtgcggatcatcattcgtcagctactggaggaaaactgagttacttaacattatgtaatgtatttggtagatctgtttaagtagctccatgttaaagtattgcataatgttaagtgagaatcaattttgaatgccgatgcatctggttactgcgtgttagcttccttcctgtcaacgttcatggattacattgcttcaagtgcattttgtgagcaaatgctatgacttgcaactctggtaatttttcttgtatatcttctgatgtcatttgtcggtgagcgcggaccccacgcgcccaaagccacccacactctccgtctcctcctcatggcgatctcgaaggcttggatctcgctgctgctcgcgctcgccgtggtgctgtcggcgccggcggcgagggcggaggaggcggcggctgcggaggaggggggcgatgcggcggcggaggccgtgctgacgcttgacgcggacggcttcgatgaggccgtcgccaagcacccgttcatggtcgtcgagttctacgccccgtggtgtggacactgcaagaagctcgctccagagtatgagaaagctgcacaagagctaagcaagcacgatccaccgattgttcttgccaaggttgatgccaacgacgagaagaacaagcctcttgctaccaagtatgagatccagggtttcccgacactcaagatattcaggaaccagggcaagaacattcaggaatacaagggcccgagggaggctgagggcattgttgaatacttgaagaagcaggttggtcctgcttccaaggagatcaagtcaccagaagacgcaaccaaccttattgatgacaagaaaatctacattgttggaatcttctcagaattaagtggcactgagtatacaaacttcatagaggttgctgagaagctgagatctgattatgactttggccacaccttgcatgccaaccaccttccacgcggtgatgctgcagttgagagaccattggttaggctattcaagccctttgatgagcttgttgttgacagcaaggattttgatgttactgctttggagaagttcattgatgctagcagcacccctaaagttgttacttttgacaagaaccctgacaaccatccttaccttctgaaatttttccaaagctcagctgccaaggctatgctatttttgaacttctccactggaccgtttgagtctttcaagtcagtttattatggtgctgctgaggagttcaaggacaaggaaattaagttcctcattggtgacattgaggccagtcaaggtgccttccagtactttgggctgagggaggatcaggtaccactcatcatcatccaggatggtgagtccaagaaatttttgaaggcacacgttgagcctgaccaaattgtttcttggttgaaggaatactttgatggtaaattgtctccattcaggaagtctgaacctattcctgaggtcaacgacgagcctgttaaggttgtggtcgctgataacgtccatgattttgtcttcaagtctggcaaaaacgtccttgttgaattctatgcaccatggtgcggacactgcaagaagctggctccaatcttggatgaggcagctacgacgcttaaaagcgacaaggatgttgtcatcgctaagatggatgcaactgcgaacgatgtgccaagcgagttcgatgtgcaaggttaccccaccctgtacttcgtcacccccagtggaaagatggttccctatgaaagcggcaggacagccgacgagatcgtcgacttcattaagaagaacaaggaaaccgctggtcaggcgaaggagaaggcagagtcggccccagccgagcctctcaaggatgagctctaaacaagtgagtaggagagggcatggatgcttgtggctgtagacatggaggagacgggacctgacggctaacatgtttgacagctccaacgccagattttgccaaggttctgaaagacggtgagatggagagtagtgagagtgggggaaatagttgatgtttcggcatgtctgtcccattgagaaatactgtacaatcaacccgtggtacctagttaattttacccatgcaaaagtgatagtcggtagagaagtggttctggacaagttgaataaagctgcctcggtcgcatcacatctgcttgttttgtttgcttttttgtgatccaataacggtgatgtactgtggctgatttttcttgcgcaaaaaaaaaaaaaaaaggccgccaaacttaa

SEQ ID NO: 63122 - DNA, 465 bp, Oryza sativa
  Clone ID: PAT_MRT4530_64395C.1
atccaaggccaaacgtgaccaaggggcatgcatcaatgttcacagagggccagttgtcccagtgacacggcacaaaagagcatccctaacaagcacaaactgtccactgcctgaatgcaatacatgtcgcaagtcttgactcatgctccgatatgcacagctcaaatgagaggcacaacggcgcgacctgttcagtttccgctcctgaaggattgatgctgccaatgcactatcagcagcacaaacaggaagcaccgttacacattcgcaccaaggatagcttaagacacctatctctatgagcctcttataccagagcttattagcagctaatgtgaatgtccaatcctccgaaacctccctgagacatgatcaggcgatacttgtccatgtgctactacaggagccagcatacatacgtcatacacataagcaggtggcgatcaccatagaccatacatcaca

SEQ ID NO: 63123 - DNA, 523 bp, Oryza sativa
  Clone ID: PAT_MRT4530_64396C.1
tgtcaattcttgcggtttctcgccgtccgagcggccaagcggagagcgcctcgatccgcccgccgccgcgcatgaggatcctcgcgctcgtcgtggcggccgcggccctcctcgccgccgccgccaccgcgcacgagcaccacggcgaggcgcccacctgcgccggcggcggcagcgggcgcgtgctcgcggagttccgtccaggggaggtgaccctggacgggcacccggcagactgggacggcgtggaggcgtcggagttcgcgctgcttccggctcttgaccccgacgaggacaaggcctacgccggcggcaaggtcttcgtcaaggctgtgcatgatggcgtcaacattttcttcatgctgaaaggtgatggggattacacctacactaaaggcgaaaataaggaagtgccctttctgctggtctgatggttcaaatatggagaggaaagcaccgaactattatatgggagggtggaaagatatgcctggttcatgcacaagcacaagttgcagaggtc

SEQ ID NO: 63124 - DNA, 729 bp, Oryza sativa
  Clone ID: PAT_MRT4530_64397C.1
atggggcggccgggttacctgacgctgccaatcctctcggtgctcgcggccatcgggtacgtctactacaccacggtgttcgtcgccgtggcccggtggctggggctcgccacggcggccggggccgcgaacgccgcggcgatcaccgccctcgccgccgcctgcgtcgccacctacgccgtcgccgtgtgccgggacccgggccgcgtcccgccctccttcgcgcccgacgtcgaggacgccgagagccccctccacgagatcaagcgcaagattcttatcatagggagcgccatgtacagtgttcctgtagatgaacattcaagcaatgattcttctaggacatcgattatcatttgtgggatcattctatgcccgctgactttggctttgacagtgctctttggttggcatatctacctcatattacagaataaaactacaattgagtatcatgaaggtgtgagagcaatgtggttagcagaaaagggtggaaatctttatcatcatccgtatcatcttggtgtctacgagaatcttatttcaagcataaacattctacatatcctaatagaaggcaataagggaacaaccgaatacttgacttttgagaaacaatgtcgaagattgtccccttttcctctgtataagacatcaaagcttttgccactacccattcatccagtagaaacagaaaggaaacagaacatgagaatgtcaatccattaa

SEQ ID NO: 63125 - DNA, 747 bp, Oryza sativa
  unsure (1)..(747): unsure at all n locations
  Clone ID: PAT_MRT4530_64398C.1
ctcccgaaaccctccttccccgatcgatgccgccgccgccgcctcctccgccggagtgggccgacctcccggtggacgcggtcctggcggtgttcgagcggctgggcgcggcggaagtgctgatgggcgccggggtggtgtgccgcagctggctccgcgcggccacccgcgagccgcggctctggcgccgggtggacctcaccgcctgcttcgaccccaccgtcgacatggaggccatggcgcgcgcggccgtcgaccgcgccggcggacgcctcgagcacttcgccgccgagcgcttcgtcaccgatgagctcctcctctacgtcgccaagagaactagctgcttgaaaagtcttcggctacgtgattgcataaaaatctcagagaaaggcttggttgctgttggcaagacatctccctgtcttgaggaacttgagctcactacctgcaccatcagtattttgctgaaggctgttggcgaagcatttccgaacctgaagtgtctgcgactgaaccatcgttgngtttgatgggttcagtttgatgagttcagagataacttccatgcccttggaatagcctgcagcatgcacaggctacgccatcttcagatctttgccaatcggctccgcaacaatgcacttgctgccatccttgacaactgcccgcaccttgagtcccttgacttgncgtcagtgcttcacgntcgatgtggatggcagaagtgagagcanagtgtgcaagctg

SEQ ID NO: 63126 - DNA, 507 bp, Oryza sativa
  Clone ID: PAT_MRT4530_64399C.1
atggccggcctccccttcccctccgactccgacaccgccctcgaggccttcctcgccgacattggcttcggcgcaccatgtccggaagctgctccggcgccgtctccgtcgcatccggacacgacggcggcggcggctactgatgagccggtgatggccggtgacgaccaggccgacgaggagcggcggcggcggctccggcggaggatctcgaaccgcgagtcggcgcgccggtcgcgcgcgcggaagcagcggcacctcgacgagctccgggccaaggcctccgcgctccgcgccaccagccgcgacctcgtcgcgcgcctccgcggcgccagggcgcgcgccgcgctcgtggcgctcaccaacgcgcaactccgcgacgaggccggcaagctcgcgcttcgcctcgccgccgcccgccgcgtcatagctctccggcagctctactccgccgccgccgccggcggtggcttcgagatgcaggcgctcgcctcgttgatcgcgtag

SEQ ID NO: 63127 - DNA, 257 bp, Oryza sativa
  Clone ID: PAT_MRT4530_6439C.1
tgcgaggtaaacgagccacacccacagggcagggtccttttaaaagggggaggcgttattaccacgaaaaaagaaggactaggtgatcactgacactgaagttggcggcggtaggtaggtcatgaaaaatcagatgagctatgttcaaaccgggaaagcggatagaaggcgaaaagaacagatctcagacgatgagggaccgaagcaggtacctcgacgcctgaagctgttgcccaagggcggggccaagcgcggtt

SEQ ID NO: 63128 - DNA, 231 bp, Oryza sativa
  Clone ID: PAT_MRT4530_643C.1
atggatgaagtctgggggcatctatccaccattaaccgaatactagagagccacgatctccaccttccacacatcaagaagcatggctctggtagcggcacaggagaggagtcttttgttccaaaccaagatcagagcaccagtggcagtggtgttctgcggaacaacgagttagagttcctggacttcgatatccacagatcttcatcattggtcttggtgatcccctaa

SEQ ID NO: 63129 - DNA, 274 bp, Oryza sativa
  unsure (1)..(274): unsure at all n locations
  Clone ID: PAT_MRT4530_64400C.1
aacgatttggattaccgggatgtcttcctcgagtactttcatttacgccccgatgagatcgttgctaccccacgtganacagtgtcaccccagaagtgcctctgccgtggacttgtttcctgaaggtctgaactgaatcttcagagttgcagttacttatcactacgtttttttgtaaaaagatgggtgccatcagctagtacctgtgaattcccattttcagtaaaatggaagncatgctgatgaaaaaaatgctggtcaaaaaaaaaaaaaa

SEQ ID NO: 63130 - DNA, 1452 bp, Oryza sativa
  Clone ID: PAT_MRT4530_64401C.1
atgccgccgccgccgcctcctccgccggagtgggccgacctcccggtggacgcggtcctggcggtgttcgagcggctgggcgcggcggaagtgctgatgggcgccggggtggtgtgccgcagctggctccgcgcggccacccgcgagccgcggctctggcgccgggtggacctcaccgcctgcttcgaccccaccgtcgacatggaggccatggcgcgcgcggccgtcgaccgcgccggcggacgcctcgagcacttcgccgccgagcgcttcgtcaccgatgagctcctcctctacgtcgccaagagcctgtcaagtcagttaaggccaaccctggcagggaagctgacaatcctgctgcttctgtgccagcactggtaccttgatgaccgacttcaagtccatcagagctggacaatgcggacgaagcagtatttggagttagctgtggctgtccttgcatcctcatcttctggcgacatgatgattccaataactagctgcttgaaaagtcttcggctacgtgattgcataaaaatctcagagaaaggcttggttgctgttggcaagacatctccctgtcttgaggaacttgagctcactacctgcaccatcagtattttgctgaaggctgttggcgaagcatttccgaacctgaagtgtctgcgactgaaccatcgttggtttgatgttcagtttgatgagttcagagataacttccatgcccttggaatagcctgcagcatgcacaggctacgccatcttcagatctttgccaatcggctccgcaacaatgcacttgctgccatccttgacaactgcccgcaccttgagtcccttgacttgcgtcagtgcttcaacgtcgatgtggatgcagaagtgagagcaaagtgtgcaaggctgaaggatgtgaggttcccaaacgactcaaccaaggactatgagtatgagacttttattgagacaccatcactagattcgctcccacttccatttcccgcagcagttcctcaatggcccttccatgggaatgacgaggatgacgacaatgatggtgatcaggacgatgacgatgatggtgatcaggacgatgatgacttgggcggtcacagggtgacagagtatggttttatcatcggtgactaccatgtccgcggtcggatcatccaccatgagtaactcgacatctacatgccgtaattagcaggttttgatgtcccagcgtctgagtctcaggaaatggaaggtaggtgttcagaagtaaggtaattcgctgagcgctgtaagttatttctgttgtagtagcttactacaacagaagggcgcatttagaacggttctgtatccaactgcaagtctgcaaccggtctagtgacctcatgtgtagtggtaaaacctttgttcctattctgcgtgttgccatagcgcttgtggaagtttcttggtttgtgt

SEQ ID NO: 63131 - DNA, 108 bp, Oryza sativa
  Clone ID: PAT_MRT4530_64402C.1
atggggagtcgaacccaggaccagtggcggatccagcatgggagcggcgggaccccactactatttatttctagatccgccactgcccaggacctcaggtgctactga

SEQ ID NO: 63132 - DNA, 443 bp, Oryza sativa
  Clone ID: PAT_MRT4530_64403C.1
cccacgcgtccgcttttgcaaaaattatatatataagttatttaaaaatttaaataaatctaatttttcaaattaaattattaatatttaattaattatatgctaatgagcttttcgttttaggtgggctaaaaatctctctcaaaaaggagatggaaagcagcctagaaatcttcgataccactacaatagcaaagacagcatcagtgggcaacttatcacttgcagctaattgttctaaatgcccaacaaacaagtggccttgttctttcgctgtcgacatataaatcgtctatcgctataaaaaataattagaacgtaaatatgagcatcagtatcgagtttagaattcaaatccgggtaaagctacactcatttggcatgccgttttatgtttgttaggcataaatgccatttaataaaatacagataaatttgtcagt

SEQ ID NO: 63133 - DNA, 1092 bp, Oryza sativa
  unsure (1)..(1092): unsure at all n locations
  Clone ID: PAT_MRT4530_64404C.1
nagnnccggccgggnaaaaaaaaaaaaaaaaaaaaaaaaaaaaaaaaaaaaaaaaaaaaaaaaaaaaaaaaaaaaaaaaaaaaaggagaaaccaaggctccagcattcggcggcggcggcggcggcccgtgagaggcggtccggcgacaatggttcacgtcagtttttaccgcaactatggtaagacattcaaaaagccacgtcgcccttacgagaaggagcgttttgatgcaaagctgaagctagtgggtgagtatggactgaggtgcaagcgtgagctgtggcgtgttcagtatgctttgagccgtatccgtaacaatgcaaggcatttgttcacacttgatgagaaaaatccacgccgcatttttgagggtgaggcactgtttcgccgaatgaaccgttatgggctccttgctgatgggcaaaacaagcttgattatgtccttgccctcactgttgaaaacttcctcgcaaggcgtcttcagactcttgtcttcaaggctggcatggccaagtccatccaccatgctcgtgtcctgatcaggcaacgccacatcagggtcggcaggcaaattgtcaacatcccgtcgttcatggtgagggttgagtctgagaagcacattgacttctcactgacaagcccattcggtggaggcccccctggtagggtgaagaggaagaaccagaagaaggcaagcggcggtggcggtgacggtgaggaggaagatgaggaatgagaaaagaagtttgcaactagttgtttccttaatgatcataaaactttctgtgctgagtaactgggcccaaattctgtagcttgcctatctggatttcagaattcaagcaggttggccttcagatgttggtttatgttagcactttttggcaccatgttaggtagctcgaattaaagatatgtctggagatgtttaattttggtgtttttatatgtttttgcattcggcattgtggtcaatgctgttttatggattcgtttcatggtaatcctcactctaccagtgtgcttgaactagtttatactcactagtaccaatgctgtttttagtgtttttatggattggaagttgctcc

SEQ ID NO: 63134 - DNA, 263 bp, Oryza sativa
  Clone ID: PAT_MRT4530_64405C.1
caattgccagacggtgtagtggatcatgcaacttcaatctaggagaacaattctcaactgacgcctgaatgatcctgaagctgagaagcagcaacaggagttgttgataaagtgcatatctgaagatatgggtttctctattgcaaggcctattgccgcatacctcatctaccgatgcctgatccattggaaatcatttgaagaggacaggacaacagtttttgattgcattattcagaagataagtgctgcaactgaggtat

SEQ ID NO: 63135 - DNA, 1694 bp, Oryza sativa
  Clone ID: PAT_MRT4530_64406C.1
caccaaggcccgcaggaatccggggcggccgcaacgggagagagggggtccggcggacgatgctccgcggcagctgccgccctccagaaacgaaagctccagcaatcggcggcggcggcggcggcccgtgagaggcggtccggcgacgatggttcacgtcagcttctaccgcaactatggtaagacattcaagaagccacgtcgcccttacgagaaggagcgtcttgatgcagagctgaagctagtgggtgagtatggactgaggtgcaagcgtgagctgtggcgtgttcagtatgctttgagccgtatccgtaacaatgcaaggcatctgctcacacttgatgagaagaatccacgccgcatctttgagggtgaggcactgcttcgccgcatgaaccgttatgggctccttgctgatgggcagaacaagcttgattatgtccttgccctcactgttgagaacttcctcgcaaggcgtcttcagactcttgtcttcaaggctggcatggccaagtccatccaccatgctcgtgtcctgatcaggcaacgccacatcagggtcggcaggcaaattgtcaacatcccgtcgttcatggtgagggttgagtctgagaagcacattgacttctcactgacaagcccattcggtggaggcccccctggtagggtgaagaggaagaaccagaagaaggcaagtggcggtggcggtgacggtgaggaggaagatgaggaatgagaacagaagtttgcaactagttgtttccgtaatgatcataaaactctgtgctgagtaactaggcccaaattctgtagcttgcctatctgggattcagaattcaagcaggttgtgcttcaggtgttggtttatgttaaccctttttggcattatgttaggtatagacttgtggttaatgctgttttatggattcgtttcatggtaatcctcatcgtaccagtgcgcttgaactagtgatactcactcgtaccaatgctgtttttaatgtttttatggattcgaagttgcaacatggattatggagttgttaagtttgtccttgccctcacctgttgagaactttctcgcaaggcgtcttcagactcttgtcttcaaggctggcatggccaagtccatccaccatgctcgtgtcctgatcaggcaacgccacatcagggtcggcaggcaaattgtcaacatcccatcattcatggtgagggttgagtctgagaagcacattgacttctcactgacaagcccattcggtggaggcccccctggtagggtgaagcggaagaaccagaagaaggcaagcggcggtggtggtgacggtgaggaagaagatgaggaatgagaaagaagtttgcagctagttgtttccgtaacgatcataaaactttctgtgctgagtaactgggcccaaattctgtagcttgcctatctgggtttcagaattcaagcaggttgtgtccttaatatgttggtttatgttagcactttttggcattatgttagatagctcgaattaaagatatatctggagatgtttttgcattcggcatagacttgtggttaatgctgttttatggattcgtttcatggtaattctcactaaaaccagtgtgcttgaactagtgatactcgtaccgatgctgtttttagtgtttttatggattggaagttgcaaccaaaaaaaaaa

SEQ ID NO: 63136 - DNA, 1791 bp, Oryza sativa
  Clone ID: PAT_MRT4530_64407C.1
atgtgggttggtgatgaaaatggtgatgctggtaccttctcccccatctccctctcgtcggagaacggcggtttagttagcttcttcgtcgtcgccgtcttgattggtccaagatggaagaagggcaacgatggcaaggacttctcagcactagcagcagctaatcccatgtcagtcattgttgctgagctcaaggcctcattcataagctcaaagcctgtggcagttttgtcaggtccaggtggcggtgccattcttggagttgagccagagcaagccgtgatcctaaaccgtgctgcctttggccacgccgtcgaaattgctgcggcacagaagcactggttccaacttagccctgaggaggtcttctacctctgccatgttctgaactgcatcagggttgagtcacacgacaagaagcagatgagtgataagcaactgtggaatcacttcaggtccatgtcggagtcctttccagagatgtacaaggcttactcgcatctgagatttaagaactgggtggtgagatcagggttgcagtatggtgcagattttgtgtcttaccgtcaccatccagcactcgttcactcagaatttgcggtggttgtggttccagaaggcgcagcgtttggcaataggtgtggtcgtatggaggtgtggtctgatctactatgtgctctccgggcttctggcagtgtagccaagacattgcttgttctgaccatcagcagcggcagttgcgaactgagctccccagattgcttagaacagcttgttgttcacgagagaacaatcactagatggataccgcaacagtgccgtgaacagcggtctgaagcaagcagagatgaagccaatagggaagaactgattagcaaaaaggaaagtgtagagttcaacctctgggatggtaagacattcaagaagccacgtcgcccttacgagaaggagcgtcttgatgcagagctgaagctagtgggtgagtatggactgaggtgcaagcgtgagctgtggcgtgttcagtatgctttgagccgtatccgtaacaatgcaaggcacctgctcacacttgatgagaagaatccacgccgcatcttcgagggtgaggcactgcttcgccgcatgaaccgttatgggctccttgctgatgggcagaacaagcttgattatgtccttgccctcactgttgagaactttctcgcaaggcgtcttcagactcttgtcttcaaggctggcatggccaagtccatccaccatgctcgtgtcctgatcaggcaacgccacatcagggtcggcaggcaaattgtcaacatcccatcattcatggtgagggttgagtctgagaagcacattgacttctcactgacaagcccattcggtggaggcccccctggtagggtgaagcggaagaaccagaagaaggcaagcggcggtggtggtgacggtgaggaagaagatgaggaatgagaaaagaagtttgcagctagttgtttccttaatgatcataaaactttctgtgctgagtaactgggcccaaattctgtagcttgcctatctggatttcagaattcaagcaggttgtgtccttaatatgttggtttatgttagcactttttggcaccatgttaggtagctcgaattaaagatatgtctggagatgtttaattttggtgtttttatatgtttttgcattcgggattgtggtcaatgctgttttatggattcgtttcatggtaatcctcactcgtaccagtgtgcttgacctaaaaaaaaaaaaaaaaaaataacaaa

SEQ ID NO: 63137 - DNA, 1267 bp, Oryza sativa
  Clone ID: PAT_MRT4530_64408C.1
gaaatcgatgaaaaaagaggaatgagagaaaggggtatcgtgcgcaccggctctgccgcagatgccaccggctccgccgcagacaccgccgccacagccgccaccaccacgctcacgccactctccctctctggcacaactgaccttgtgcgcatcggcgccgctgaagaggaggagccgcaagaaggctccgccgccggcgactccgccgccgcagccatgctcgtgacgatttgggagctgcaggtatgtatgatatgggcaaccagggataacacagcaaaactaaatctggcatatggtaagacattcaagaagccacgtcgcccttacgagaaggagcgtcttgatgcagagctgaagctagtgggtgagtatggactgaggtgcaagcgtgagctgtggcgtgttcagtatgctttgagccgtatccgtaacaatgcaaggcatctgctcacacttgatgagaagaatccacgccgcatctttgagggtgaggcactgcttcgccgcatgaaccgttatgggctccttgctgatgggcagaacaagcttgattatgtccttgccctcactgttgagaacttcctcgcaaggcgtcttcagactcttgtcttcaaggctggcatggccaagtccatccaccatgctcgtgtcctgatcaggcaacgccacatcagggtcggcaggcaaattgtcaacatcccgtcgttcatggtgagggttgagtctgagaaacacattgacttctcactgacaagcccattcggtggaggcccccctggtagggtgaagaggaagaaccagaagaaggcaagcggcggtggcggtgatggtgaggaggaagatgaggaatgagaagaagtttgcaactagttgtttccgtaatgatcataaaactttctgtgctgagtaactgggcccaaattctgtagcttgcctatctgggtttcagaattcaagcaggttggccttcagatgttggtttatgttagctctttttggcaccatgttaggtagctcgaattaaagatatgcctggagatgtttaattttggtgttttatatgtttttgcattcggcattgtggtcaatgctgttttatggattcgtttcatggtaatcctcactcgtaccagtgtgcttgaactagtttatactcactcgtaccaatgctgtttttagtgtttttatggattggaagttgcaacatggattatgtagttaagattaatttagtagcgtgtcaggtaatatttacatgttc

SEQ ID NO: 63138 - DNA, 1140 bp, Oryza sativa
  Clone ID: PAT_MRT4530_64409C.1
atgcggacgacgaggaggcatccactgcacgatgccatcgacgccgcccggtgggacgccgagcctcccctcggccgcctcgtcgtggtcgcccacgccgccttcctccacgccggcttcgtcccctacagcgccggcggcagctcgtcagcgtctcgtcgtccactcccggatgagatcggcgcggtggcttcgtcgctctcgctccgctacaccgtcccggagctcctgcgacggacgacgacgcaaaggcgccgtagccgcgccgagaccgccgtgctgaggctatgcgcgcacggcgaccacgtcgtgttctacgggtacctcaccggcgacgccaatcaggtccagagactccagacaaccaggcactgggcgtgcatcgacgcgctaagcgtcgcgtccgtcctcctctccggcgaccttgatgcgacggcgcacgcgctggccgacgacggcgccggcctctggaagaagctcgccggcgggctggcccggcgactcttcgtggacatgtgccggaagaacagcaggctcctgccgccgcgcctgacctcgctgccgcctgacctgcaggaggacatcctgcgcaggctcgccgtggaggacatcgcggcgatgtacttcacctgcacggggctccgcgacctcatcgccggcagcgaggtgttgaacaacaatttccagtggggggagctgtggatgaacttcgcatggagccagggttatctacggcggtggctgccatcaccggcgagggtggtcgtaggtcggcgaagtcaaacaacgtcgtttgtcgccggagacggtgaggataggtgcaggtggcgggatccaacaaagcagatgatagagcgtttcgtggagaagaggattgtgcgggtaattgttcacatgttgcagtcagggatcgaaatgtctgtaatttcggaccacgagactatacacgagtgcccgccaacttgtcctcatggaagcaaaccctttctaaaatctttgagaaatggtacatcattgcatctagtggcaaactggcaattgatcaactgccactcaattgtcaggcaaatgatcagttttcacggtataaaatggtacatcattgcatctagaaccttatcatatcttctcaaggattaa

SEQ ID NO: 63139 - DNA, 746 bp, Oryza sativa
  Clone ID: PAT_MRT4530_6440C.1
caggctgcgcaactgttgggaagggcgatcggtgcgggcctcttcgctattacgccagctggcgaaagggggatggcgaattcgagctcggtacccggggatcctctagagtcgacctgcaggcatgcaagcttgcatctttgtcagctcctgagaaggtgctctcctccattttctcttcccttgctgctgaacaagcaaggaatagtggttcgacttctggagatctttctgcaggacctccaggctttgagagcaataagaagcctaggcttgacaaccccattcatgctagtgacatgagtgctcccccattctttgggcaactgccgcaggtgcaaccacagattggagcaacagctgctcttggaggcacacagccaccaacccaagcaaaccaagcagctggttcatttccaccacctccacctccattaccacttatgccacaatttgttcaaaatactggaggaatgtttggaatgggaccttttgggatggtgagtggctctgcgccacctccacccccattgcccaacattatgtcagcaggttttccaagactaagtgtgcctccacctctgcctctgcctacacaatctcagaaccagagccagccccagcagcagcagtctccacaggcaccacagcaatcgccgacctcgactggattttttcaaccaccaggtgctgggttcttcccaccagtgcaggttcagcaatctccatctgcccaacggcaatga

SEQ ID NO: 63140 - DNA, 1914 bp, Oryza sativa
  Clone ID: PAT_MRT4530_64410C.1
gatggcttcgtggacctatgggcaatccaaagcgagattgcagaattacatggaaaattgccggttgcctctcgtcacagtgttagctgtatcacagcaaggatggaggagacgagggcgaagagggtggatgcctcggcgaggatgcgggccgtgccgatcgccgtcacgccggagggattctggtgctgcccgtcgccggcggcgctccacaagagcctcaagaacaacccccaccaccacggcggcggcggcaaccacaagcctccgccgccgacgccgccgccgcagcagcacaagacgacgaccccatccgcgccgccgtcgagggccccctcggtcctgagcgagccggtcgccggcgacgctcccgacgagccgccgccgcagccggcggcggcggaggcggaggcggagaggcacaagatctgcgtggggttcgggcagccggagacgagcgacgtgacggtggtgctgtacggcaaggaagggatcgcggtgaggatgagcgtgcacggggacgtgctccgccggagcagcgccttcttcgccgagaagctctcctcctcctcctcctcctccggctccggtggccatggccatggctcgtgcctggagatccatgactgcgacgacgctgagatctatgtggaaaccgtcgggctcatgtactgcgacgaggccaagcacaagctgctcaagcagaatgtctcgcgtgttcttcgcatcatgaaggttgccgagtcgcttggtttccacgcatgtgtcaagtcatgcttggattatttggaagctgttccttgggttggtgaggaagaagacaatgttgtgtcctcgatacggcatcttcagagcaaggcttatggagttagtcctctgctgaaaagaattacttctgacaatctaaaatcaccaactgatacattagctcttataatggagatggtgttgaagagcactgatgacagggcgcgtcgggaaatgaaagcccttgttctgaatcttctgaaagacagcaaccattgcacagatggatcatcagacatcagttcagaattattgtacagttcatgccaaggttgcttagacagacttcgactactgttttcagaagcgacgggacaagaattttctgttgaacttacacggcaaataactctggagacagataatctcctctggttggttgagatattggttaaccagcgcatctgcgatgattttgtggctctatgggcaaaccaaagcaagattgcagaattacatggaaaattgccggttgcctctcgtcacactgttagctgtatcacagcaaggctttttgtcggaattggaagaggagagatgcttccatccaagaacacccgtcttctcctcttgcaagtctggctgcaaccactcattgatgactactcatggttacaatgcagctgccggtcattcgataggaagctcgtcgaggaagggatcgggcagacaatcctgacacttcccttggaagatcagcggtccatgttactggcatggcttgggagattcttgaagttaggggataattgccctaatctccagagggcatttgaagtatggtggagaaggacttttgtcaggccttatgtcagtcaggcaaggatcttgttcatccaaaagatgtgctacataccaaattcgcagcattatagtgtgggttgtaactcagtacttcagtcccaacatgatgaaagctttgctgtcaagatggaatctgattcagtaaaaatcttcagtggtgagcatctggagaaagaaaagcatgtgccttaccagggggagattaccatcttgaataagctgaaaagggtcaaaattcagctgagtgatccctttgtcagaaggatggttgagaaaaatgtaaacaacttttcattatcttaa

SEQ ID NO: 63141 - DNA, 473 bp, Oryza sativa
  Clone ID: PAT_MRT4530_64411C.1
gcatcggcggcaagagcagcaacaaatggcggttccgccaccgcgttgttttaaattttgaagagatccaggaactcattgatctaggactcttgagcagtgttactttgctaaatgaaatagaagacacaatctaatggagaaggaataatgtggccacatactcggcaaaaagtccttatctcttccaattcattggttctcagcaagacaaggttttcctgttgaactggaaggcgtcggcgcttccaaaacaaaaattcttaggttggctcatcctacaccacaaggttctaacagctgaaaacatgctgattcggcactgggagtgtgactggatttgccccttatgtagaggagaatttgaagataccgaccacttgtttcgacaatgtgatttcctaaaagaaacatggaatcttgtctcaacatgcatgcaacaaatcaaaactttgtggagggaattaatgctg

SEQ ID NO: 63142 - DNA, 4740 bp, Oryza sativa
  Clone ID: PAT_MRT4530_64412C.1
tcaaggttcaaaatttgggaatgtagccctgatgaatgtagcatcctcccatgtagcatcagctggcgatagattgcgccacaacaccagccattgtaccactggttctcctctccttggaatcattcgacgttgcagaattgctacaggttctgcctttatctgcccgtcgggtcctaccagtggtaaattaggcattggaacagcatggcgccccagatgcttcttcaattggctcacatggaacacagggtggatattagctccttcaggtagctgaagtttgtatgccacttgaccaatcttttgttccacccgaaatggtccatagaacttggaccttagcttcaaggatcctctcacacccaaggcattctgcctgtatggttgcaatttgagatataccatatctcccacctgcaattccctctcagtcctgttcctgtccgcatagtgcttcattctcttctgagcagcatccatactactcttgaggttttgaattatagcctccttctcttccaaagaaactcttgcctcagcagaaacattgcagggaacggagaattcattgatctgtgggggagtgtacccataaagtgccttgaatggggtcatctgaattgctgtgtgatatgtggtattgtaccaccattcagccagtgctagccaagagtaccagttctgaggttccttgaaagtcatgttcctgagataggattccaagcactgattcaccctctcactttgcccatctgtttgtgggtgataggccgtgctgaacctcaggttgacccttctggctttgaacagctcctgaaacaggttactagtaaatatcctatctctatcagtgactatgaccagtggcatcccatgtaatttgtgtatgttatccataaatgcctccactacttgttctacagtataggggtgagacagagcaatgaaatgagcatactttgtgagtctgtcaactacaaccaatatgacatcctttccctttgatttaggcagcccctcaatgaagtccatagtgatgtgagaccaagccatatccggtacttcaagtggactgagtagcccagggatgtgcacatgttcaatttttgtcacacttcccacatatattcttcccttgtatttgagcaacccagattcttctttatacaattgctccggatccatatcagtcccaattaagctaatgattttatgtgccaatacatccccttcatagctccttttgatgtctgtcacccactcaggaatcaccactgttatagcttgacatgattcagcagggactgcttctgaaattttccccctggacagggcatcagccactaaattctccttcccagccttatattcaattgagtaatcatactccatcatcttcaataataatttgtgttgaatgccctctaccaatctttggttcatcatatactttagactctgctggtctgtcttgattactagtttgttccccagaatgtagtgtctccatttcttaagtgcttctaaaatagccatagcctccttttcataaattgactgtgctgctgccttgggccctaatgctttactaaggtatgcaatgggtttccctgtctgcattagcacagcccctattcctgtgttgcaggcatctgcctcgatcacaaatggttgtgagaaatctggcattgtcagcactgggctggtactcaatctcagcttcagttcttcaaatgctgttgtttgttctgggccccattggaatgcatctttccttaacatatcatgtaagggcctgcatatcacaccatatcccttgatgaatctcctgtaataaccagccatccccaagaactctctcaattcagtaatgttgttaggtattttcctcctccgaatcccttctaccttctcggggtctgtagctaccccttcactggaaataatgtgccccaagtatgcaattctatccaaaccgaattcacacttcttcagtttgatcaccaagtggttatctaacagagcctgcattactagtttaatatgttctaggtgctcctccttgtttttgctatatatgagaatatcatcaaaaaacacaagcacgaattttctgagataaggggctaacacctgattcatcaaagcttggaaggtggctggtgcattggtcaatccaaacggcatcacattatactcatagtggcccaagtgagtcctgaaggctgttttatgcacatcatctggatgcattcggatttgatgataccccgaacgcagatccaatttggagaacaccctggacccatgtagttcatccagtaaatcttctatgatcggcattgggaatttgttcttgatagtttgcccattcagctgtctataatcaacacaaagtctccacgacccatccttcttcctgaccatgacagctggtgaagaataggggctatcactgatctggatctcttgggattgtattaactctgctatgatattttccatggattccttctggtagtggggaaccctgtaaggtctgaggttgggtggatctgacccagtcttcaagttaatggtgtgatcacacttcctccttggaggtaggccctgaggttctttcagaacctgtggaaatttcagtaaaatttcttggatttcaggagggataacatgcttctcattttccttttctacagaaatagtatggatctggattacacatcccacagccccttttctgatcaacttacccatcttcttttctcctaccctggctcttttgccaggtttagtgaagtcttgcagtataatcttctgtttctcctttgtgattaccaactcccgctgtttcaggtccaaagtgattggactgtgagtaaatatccagtcagcccccagaattatctcatacccctttagtggaattaaattaaaaccattgctaaagtcttctccttgtatttggtatttgatttcaggcacttggtcttctgacagtaactctcctcttccagcaacaactatcttcttggccagagtctgatgtatagggcacttactcttgagagcaaactcttggtccataaaggttcctgtacttccactgtccactagacccactgctctccttccatttatcaagatcatcactaaaaaagtgtctggtctagttgtcccttgcaaagcattctgagatatgcacattagctccactttggctccctcttggacaggtttctcttgctcaacaggtggttcttcctcctgaataacctcctctgcattgccctcactgtcttccccttgttcctcatcctccaccaacaaagcatgtaatgcttgtttaactttgcactgatgtcgaggaaaccatggttctttacagaaccaacacttcttttcttccttcttatccacctctcctctcagctggtttcttggccccattggtctcccctgattaccagcaaactgctgttggtttctatttctgttgaaattgtaaattgctctcttagcatttgctgctctctcataattcttagcataccagtaagattgcaataatccctgaggtttttggccacttacatcatgtttgatatcccctcttaatcccccaatgaaacaactgttgaggtattgttcttgcaagtatgggtgttccctccggaccaaatcaacacattcctcgaacttatcaatatattgtgttactgataagttagcctgctttacattctgtaattgctccactgcctcatggtcactagcttcacaaaatcggtcacacatcatggctgcaagttggggccatgagattagttgccacggaattcccacacctctgaaccaccaagcagctcttccactcaaatgagccaaagccaaatttacccattgttcatgaggtgttccggttaattcatagaacttttcgcattgcttcagccagccaatcacatcatctccttcaaacaatgaaatttctagcctagggcctttgatgattgcttcagcatacaccgcattacttccagctacaaaaggcatcgaggccatgcagttggacattctaggctgagtaacatttggctcaatgaaaaatcctcccccttgactcatgataggagcagtaccagtaagcattggaccagaaccatcaattatatcagccaaagcagtagtggcattcacatcatgaggagctccacttaccctttctgaagcttctcccgtttctggcctcttttcaggatctccttcacccaagctagcacacatcaccttaagcagcttcttgacttcagccatttcgttcttcagccccttcaacgccccaagatccttcttgattgtggctatctccactctcatctcagtcaactcctccacaccatccatggattcttgggatcgggtcttggtcaccattcctcgtcgtccggcttggtcgcggcgtgcttcccaccgctgctgcgcgtgatcgagttcgtgggcgaagacgacctcgacaacatcggcgagggagaaatctggactttggttgagaccagagggaggtcggtgaggctcctgaaagagaagatcgcgaagcttgtgggctacgacgacttcacgatgtgcgtcagcgccggccgccatgggcagttcacccctctgctcatcgacctgcgtcgcagccgggagaccctgaacatcgtcctcctcaggaccaacagcgaagcactgtag

SEQ ID NO: 63143 - DNA, 550 bp, Oryza sativa
  unsure (1)..(550): unsure at all n locations
  Clone ID: PAT_MRT4530_64413C.1
tccatcgagccttaggactccacccggtggcggcgctctagaatagtggatcccccgggctgcacgaattcggcacgacagcaaaagacaactcaagccaaaaccatctcagagcttcagagacgaacacaatggccggtggacgacatcacctgaactgctggggatgtgggcgacccgttcgcgctgcgagcgaactcgcgctcacttcaagggcctgagctactagtactccaggaggatctcaataacaaaacgagctgcttctcactccacccggtgcacaagaaagtaccgtgctcatccacaacgcaaccctctgcaatccaggtctcgtcatacatcacaagcttccccacccggctttctctctccatcaacctacaactgcgtcctccttctgggcgctactcacaacacttttaatctgtgcagctcaattcaaacgaccgaaagcgcgcaaaagaactcccgcgtgcacttaggcgttcaggattccgggacctctcgcggaactcgggtcttaatccccgcccatngtttcctcnaa

SEQ ID NO: 63144 - DNA, 339 bp, Oryza sativa
  Clone ID: PAT_MRT4530_64415C.1
gttttggtgagaacacaggagcgctcactgattaaagagctgggaagccatggcgcgtgggacactcaacgtgctaagctcgctctaccagtcacatacgcagcggatccactaaatgtgaaacggtatatacagcttgggctcctttacagtcgcctactagcttttgtgcatttacatggtgaccaagctgataggtcacagttactactacgaccatgctatggacacccgcggagcgctgccgctcaacgtgttgtgcgatatcaccagagtgtggctctggaatacgctccccggccaggtgacattcagatggatcggccacaagctcggacg

SEQ ID NO: 63145 - DNA, 519 bp, Oryza sativa
  Clone ID: PAT_MRT4530_64416C.1
atgccatcctccttctccttcccttcttcctccccctctctctcccttatctctctctcccccttgggcctttctcttggccggagtgcgggggagacggcaatggggagcggcggaggcggttgggagcggggacggatcaaggaccgtcagtacctgctcgtcccggagggcaccgaccacccaccgcatgccgcgctgtcctccccctccccatcgccgccgcacgtcttccaccgtatccgcgtcgccgcgtgcgcgctgcgcgtcctccgcaacctccagcccgcggcggccaccatctggagcaagcttggcgatggcgaggggccgcgggtgttgctctactacacgtcgcttcgcgtcgtctgcgggacctacgaggactgtcgtgccgtgcgcgccatcctgtgggggctccgcgctgccgtcgacgagcgagacctccccatggacccgaccttcctcccggagcttgccgcgctcctcccccaacgccgccacatgaccctcccctaa

SEQ ID NO: 63146 - DNA, 221 bp, Oryza sativa
  Clone ID: PAT_MRT4530_64417C.1
gggcccaagtcaaatcttccccccttaaaacattaaagtttggaggaaactcaaacctaaattgggtaattattcttaagggttggcccattatcaaaacatatgctctgattccaggcccgtcggagcccaaaacttattacttggattcgactcggattaatgtgtcaatcccctggatcaggaaatattgatacatgtgatacaactgggtcttcatt

SEQ ID NO: 63147 - DNA, 606 bp, Oryza sativa
  Clone ID: PAT_MRT4530_64418C.1
atggaggaggacgactacaccgtggcggttgatggtggtgtccgctacgacttcgacgccggcgttatccgcaccgcactccctcagcacgcacagcgccgcactcccatcgtgctctccacctcctgcctccacaaccaccgcgccggcgccgcctccagcaccgcgccggccgcctccgcccgccctccgcccgcccaccgcctctgccgccgccctccgccgcctccgcccaccctccgcctccaccgccgccttccgctaccaccgcggccggaacgcgccgccggcaagcagccacgtcgtccctccctcctcctccgtcgccaccgccgccgccgctcaagctacggctgctgcggggtctcctgctgctgtggggcgtggctgctgctgcggcagccggtcatcgccgtcgaggccggcgggttcctccggggcctcctgctgctcgtctacccgctgctgtgcctctcctcgtcggctacggcgacggcggcggcggcggcatgctggggagggccatggcgacggtggcgctcgtggggctggaggagagggaggtggcgaggggtgggctgggctgaaataatttggtcagactga

SEQ ID NO: 63148 - DNA, 441 bp, Oryza sativa
  unsure (1)..(441): unsure at all n locations
  Clone ID: PAT_MRT4530_64419C.1
ttttctttttttggacaaatgacacaatattattgggcagcaccaccaaaaacaattaataggtagtcaagctcaattttacagagtattccacaagagaaagcaacattccagtgcacccataattgggtcatgcccgtccatcatctatccatagcgggctgtagaatttcagtgaagatgtatgcatgacatgattagaagcaaattatcttcagttattgtgctttttatgtagtgagtgaacttcaatacacaaggcanagcagggctcgaatcaagaaagctaaacaagcattagtacaaatcagttacaggagatatgatatttgaaaaaacagaaagtaaacagtactaccagaatgatattgctcactaacaagaatctcatggtttttctgggttcttctggtgctggtggcatgattattctcaaagata

SEQ ID NO: 63149 - DNA, 387 bp, Oryza sativa
  Clone ID: PAT_MRT4530_6441C.1
atggaggcaactgcgggcagcaggggggagccgaggacgagggttggagggggcggaggcagctgcgagcaaccgacaggcaacaagggcggtgggacgtggagcgaagcggcggcgagatcctccttcccctcttccccaccgtcgcggcggcacggagctcgaacacacctgcgctgctgcggcctctcccttccccttccctgtgcggagcccactgaccggttccccctcctcgtctcacgccgctgccaaccgcccgcccccgcgcgctgctgtccgctgccagccacacacgcctgctcccgcgtcgctgccgccaccgccctcctccacagcgtcgtcggccgcccgctccgcctctgcctcagcgagctcataagctga

SEQ ID NO: 63150 - DNA, 564 bp, Oryza sativa
  Clone ID: PAT_MRT4530_64420C.1
atggaggaggacgactacaccgtggcggttgatggtggtgtccgccgcaccgcactccctcagcacgcacagcgccgcactcccatcgtgctctccaccttcctgcctccacaaccaccgcgccggcgccgcctccagcaccgcgccggccgcctcggcccgacctccgcccgcccaccgtctgtgccgccgcccttcgccgcctccgcccaccctcagcttccaccgccgctttccgttaccaccgcggtcggaacgcgccgccggcaagcagccacgttgtccctccctcttcttcggtcgccaccgccgccgccgctcaagctacggctgctgcggggtctcctgctgctgtggggcgtggctgctgctgcggcagccggtcatcgccgtcgaggccggcgggttcctccggggccttctgctgctcgtctacccgctgctgtgcctctcctcgtcggctacggcgacgacgacgacgacgacatgctggggaggcccatggcgacggtggcgctcgtggggctgaagaaaaggaaggtgacgaggggtggcctgggctga

SEQ ID NO: 63151 - DNA, 326 bp, Oryza sativa
  unsure (1)..(326): unsure at all n locations
  Clone ID: PAT_MRT4530_64421C.1
caacacgacgcaccaatggcgctcgtttccgcctcctcctccaccaccgccgtcgcgggctccnnggcgccgcagggcctcctccttcctcggcggcgcggcaggagcggcagnntgctgctnaggcaggccgantagtcgtccgcncgggcttcgttngccgtgcgcgccgcggcgcccgaaaggccaatttggttccccggcagcaccccgccgccntggctcgacggcagcntccccggcnacttcggnttcaancccctggttttcggttcgnacccggagaagtttgcggtggaacgtgcangcggagttggttcanttcc

SEQ ID NO: 63152 - DNA, 673 bp, Oryza sativa
  Clone ID: PAT_MRT4530_64422C.1
aacagcgtaccggccacgccgttcgcgcgcggtggcacatacccgcccgcaatcggggcacggcaccgcaaccgacacaggcaaaaatggccagctaactcggtgttccagcgtggtaacaaggcaaacctatgacggcggaaccgtcactccaacacaccaccaaggagagatctttgaaaatggatttacttcagcccgtgcggcaaaacgcagtgcgtatcagaacgcggcggacaaatctgtacggcaacaaaatgcaacacacttagccgggcggttcggcttatgtacgagcgtacgacgccccggcacccccgcgatacgcgatacgcctgacttatcgccccccgcggtagaagacacgcaccgcccgtgggaaggtgaccactctgatccgaccggcgccggtctaccccctcccgccacccgcctgcccactgccgcagccgtcagccgcctggccagcctccctgagctcccgccgccggcgacatccgccggtgtcggcccggggacctgcctcagccagcgcccgccgccagcacacagcccgacacagatcgaccggccgaccaccgtctcagtgttggtcaacccacccgagggcgccccgggaatatatatacccccgggatctttactcccggttgttctcaacaaccgggagtaa

SEQ ID NO: 63153 - DNA, 405 bp, Oryza sativa
  Clone ID: PAT_MRT4530_64423C.1
tagggaggccaaggtgcgcgccgaggtgactgggcccgggtgggcggcgagcaacgcggtgacggcgcccggagcgaggccgccgccgccgtcgaggcggagagggcgtcagcgggaggagatcgcggcggcgtcggagcagccggcgtagacgtggtcaaacccgaggagcgcctagagcatgcaccacctgccgaggcaggagcccgcgccgcctcggcgtccgacagcgagcagtacaggttggcggcgcgcgacatggcgttggccacctcgaacgacaggatgtcgaccttccgtcatccaccccctccgccgccgcacgcaccgcccttgccgctgctcgtcactggcttcatcttcctagacgacgacgtcgccatggacaataccttgtgcaccgcc

SEQ ID NO: 63154 - DNA, 1245 bp, Oryza sativa
  Clone ID: PAT_MRT4530_64424C.1
ctaagcaaagcttatattatttcttaggagatgagctagttcctgaatacttcctcgaaagatgttgtaaaaaccaagaaattcaaacacggcaggatatacacactccaaagcatcaggaccagaaacaaacagatcaacttcccaccacttaataccaatacagccatttacatcaagagttgtgagactacgtgagcaatgttttgacaaagcctccaggcagacatcagttacaccaactattccaaataaactaagcaattgaagggaccggcatccttgtgcgatagctaccaccccaacatcagtaacacgtacacaccaggacaaattgagatatgtcagacatacacatcttgatatacatgaaaggccatcatcagttacattctgggccccacataagtctagaaatgtaaggttagttaaagatcctatcttcttataaaccttgtcgctaaaacttgacagggcataaaggttcaagctttcaagagaagaacatttctgaagcacttcttgaagtccatcgtctgtcaacttgatgcacctggttatgttcaacttctttagtccttcataattatcagcaactagctgcatacctttatctgagatattcttacaaccactcaagttcaggtcgactatgtgcttgcagttctgcacaatgtgcctaatggttaagtctgtcagtccaacaatccaatagatagaaagggcccgaaggtttggacaaagacttgtaatagtttcaatccctttgtcagaaactttttggcatgcgtttatgttcaataattccaactcttgcagtgaggtacatcccatttctttcaggcgaacaaaatgccggtcatcaatatcttgagcaaattcaaggttaataattttgagatgacaatatcttggcggccactccagcgacgaagcccaggcgagggaccacttcctcagcagcgcgaaacaacgaagaagcacgcctcgagagtcgagaccaagagcaagcagcgggaggacgaagaaggtagaagggagcgacgcgacgcggtaccgcacctcccagagcttggggttggcgacgagggcgcggtggcaccaggggctgacggcgagcagggcgcaggcgtcgcgctgggggaggcgcgggctcaccagctccatcacccggggcaccgtctcccggcaccacgcctcgtcgccggccgccgcctccgcctccgccgccgccgtcgccgccat

SEQ ID NO: 63155 - DNA, 714 bp, Oryza sativa
  Clone ID: PAT_MRT4530_64425C.1
caagcacaccctaaaaaacctttggttcacacataatatatgcgttcacatacaggatatacacactccaaagcatcaggaccagaaacaaacagatcaacttcccaccactgtaagaaaatcaaatacaagttctacaaaatctttgtgatctccaccaaattcaaaatacatatagccactaggtcgacaaaactgtcttgctattgtttttcttcatggagtaactcgattgtgttttaaatgttaacagggggaactgacctctggtagaataaacaacttaacagaaattcaggtcaactagctgtgtactttgaagcaccgtaacaacgggaacagctgaatcaggtcatcccgactcctctttttaataccaatacagccatttacatcaagagttgtgagactacgtgagcaatgttttgacaaagcctccaggcagacatcagttacaccaactattccaaataaactaagcaattgaagggaccggcatccttgtgcgatagctaccaccccaacatcagtaacacgtacacaccaggacaaattgagatatgtcagacatacacatcttgatatacatgaaaggccatccatagttacattctgggccccacataagtctagaaatgtaaggttagttaaagatcctatcttcttataaaccttgccgctaaaacttgacagggcataaaggttcaagctttc

SEQ ID NO: 63156 - DNA, 116 bp, Oryza sativa
  Clone ID: PAT_MRT4530_64426C.1
accacccggatacttgtattcagaaccccattttggttcaaggttgttcttggcacggcaagaacagcaacaacgtggagtcggtgtaccggttgctaaggcgcagcacccctgtg

SEQ ID NO: 63157 - DNA, 210 bp, Oryza sativa
  Clone ID: PAT_MRT4530_64427C.1
gcgccgacgcgtgcgcggactcttttttactggcataatcggctggagaacacaagaattgccttcagtgacgccatcctgatgagggatagggcctcacgccgggctgacttgacctgtcataacctcttctatattcctcacccatattatggaagacgtccagagcagtctgactcctggcttcattagctccatcctcagcattgt

SEQ ID NO: 63158 - DNA, 1064 bp, Oryza sativa
  Clone ID: PAT_MRT4530_64428C.1
attgttattataattaacatccgaatagacaaggagtggtttgttaacgaccacaaacccaatcccaagaacccgttcgatcgatggctgcttccgacgtgcaccacggcggcgccacgccggcggcggcggcgaccgccgtgccgtgcgtcacgctcaactcgggccacgcgatgccggtgctgggcttcggcaccggctcgtcgaccccgccggccgacctggcggcgaccatcgcgcacgccgtgcgcctcggctaccgccacctcgacaccgcggcggtgtacggcaccgagggcgcggtcggcgccgccgtcgccgaggccgtgcgctgcggcgccgtggcgtcccgcggcgagctgttcgtcaccaccaagctctccatggccgacgcgcacccgccgcgcgtggtcgccgcgctccgggagtcgctgtcccggctcggcctcgactacgtcgacctcttcctcatccactggcccgtcgccatcggcaagaaggacgccgccggcgagctgacgtgggacgacctgagcccgcggcctggtgccgttcgacatggagggcgtgtggcgcggcatggaggagtgccaccggctgggcctcgcgagatgtcgcggctgctcgcgctcgccgccgtgccgccggcggtgaaccaggtggagatgaacgtcgggtggcggcaggagaaggtgcgggaggtgtgtggcgagggcggcgtcgtcgtcgccgcctactcgccgctcggcgcgcacggcgcgcactggggctccgacgccgtcatgaacagcggcgtgctgcacgacgtcgccgccgcgagatgcaagacgatcgctcaggtggcgttaaggtggctgtacgagcaaggcgtgtgcatggtggcgaggagcttcaacgagggccggatgaagcagaacatggacatcttcgactgggagctcagcgaccaagacaaggcgatgatcgccggcgtgccgcagcggcgagcctgccatggaaactacttcgtctcgccggacggcccgtacaagtccctccacgacctctgggacggcgagatctga

SEQ ID NO: 63159 - DNA, 1005 bp, Oryza sativa
  Clone ID: PAT_MRT4530_64429C.1
atggcattttcacccgtggggtcaggtccaggggacccgccctataggggtgggggtggggccatttttcaatccgcggggcttcatggccgggggagggcatccacccgcggcgtcgcaacgaggaccccgccgcaccgcgcactgcctccacacaccagcaggctcgacgcccgcgcatggccctccccatccggtctcatgtcgtcgtcgcatcagccacctgagcccggcgaccagcgccctagccctgtgagacctcgcgtcaccgtcgtcgccgccagccgtgcgccgccgtcgctccagtcgtcgccgtcgctcggggaggtcgccatcgtggtcgccgtcgcgtcgccgtcctcgtccgcccctccgccgtcgctgtcgatcgccggaacaccgccgtcgtcgtcaagccgaaggtcgccgccgcttcttcctcgacgccgtcgccgtccgttgatcttccgccgttgctttggtcaccgccgtgcgccgccgtcgtttcggtcgtcgtcgttgctcggggaggccgccatcgtggtcgccaagtcgtcgccgtcctcgtccgccgcttcaccgccgccgaagaccgccggagcaccgtcgccgccgtcgacccgatctccgccgccgcttcttcctcgtcgccgacgccgtccgttgcttttccaccgttgttttggtcaccgcgccctagcgccgtgccgcctcgcgccgccgtcgtcgccgtcgctccagccgtgcgccgccgtcgctccagtcggtcgccgtcgccaccatcgggttcgcaaggtcgtcgccgtccccgtccaccgcttcgccgccgccgaagaccgccggagcgccatcaccatcgtcgacccgatctccgccgccgcttcttcctcgtcgccggcgtcgtccattgatcttccgccgctcctttggtcaccgagcaccagactgagaagtggcggagataagcccacgggggtcgctggggagtccatgccttgtttataa

SEQ ID NO: 63160 - DNA, 525 bp, Oryza sativa
  Clone ID: PAT_MRT4530_6442C.1
atggtgggttgtgagcacatggttttgaaggtcgtgctcgtgacaattaaggaccgactgagaagcggcgagaagtccgtgggggtcgctggggagtccatgcctctagtttttgaggggtgccgtggtggtacttcggggcatggcgacatgtgtggaatcgtgtcttgtgggtacagtggctcaggctcatggtggaccgggtgcacggtgacgatctacggaacgatcggccgagatcgatctaaaccaaaacggacggccgagatcaacttgatctaccgcgggtctacgggtgacgtggcgctgacctcagcgatgacgtcatcaccggcggcggctcgggaccacgtgctcgctggcgaacgacgcggcggtcttcgggtcggcggtgacggcgatgctccggcgggaaacggcggcaacgaaggggtggacgaggcgctgctcctcctcgcgatcccgacggtggcgacgacaactgaaggcggtggctgcaacggcgacgcgacgcggctggactga

SEQ ID NO: 63161 - DNA, 333 bp, Oryza sativa
  Clone ID: PAT_MRT4530_64430C.1
atgcttggaggctacgacaagcgcagtggaggtggtgtcggcaacaacggatttggacttggaggagcttgtcagcctccctgcctcctccatctccgcgcggtggagctggtgttagcgacgacagatttggacttggatgagctcgtcggcctctccgtcccgctcactggccctccctaccttctgcctctccacacacactcgcgggcctccccgccccctagctggacgaccccagtgcttcctctccgcgcgctcttcggcctccccgtcccctcgccagcctactcgttccactcgtcagcctccccacgacctccctctccatga

SEQ ID NO: 63162 - DNA, 1374 bp, Oryza sativa
  Clone ID: PAT_MRT4530_64431C.1
atgagtagagtgtccactagttgggggttttgtttaatctagggtgaacaagaccgagtacacagagacggtccacgggtcgacggaagcggatcccgtgtgtcaaccgaggcgagtggccgacaaacggactccactagacaccacacgggttgcacacgtggaaaccatgcggctaccaagcggacacactaacacggtcaccacgcgcacaagcgaacgactgccgacaccgatacacaggtaccggggccgacaaccgcacaacgggcacgggcgacaccgaaaggacgaggacagggcagcgagggagagggatccttaccaccacgtgacgaggcgtgggaatgaccacgacgaacgggcgcggcggagacagacgggcacaacggagacgaacggcgaggggacggcttcggcggcgatccttggacgaaggcgagacgcggccggcacgaggcttgacgacgcggagccgaggacgaagacgttgacggctatagcgaccttgacgaaacaccgaggatggacgagaacggctcggcggagggacgaacgccacgacgaccgggagcgacgagaggacgacgacgacgacgaccggggccggcgaggaggcgacgagggcagccggcagtggctgcacggagacggggacgacgtggaacacgccgctgcgatgacgatgacggaggcggcgccgtgagacgacgagccggggaggcgaggccgagggcgaccttgccgctgcgatgccggaggtggtggtgccgcggctgaccggtaaacaagcgaggaggaacgggcggccgaagggacgtcggcgacgacgaggatggaggccggcacgggcgacggcgttccggcgaaacagaggagtggccggggaaggagacgatgccacggcgtcgacgaaggagacggcgacgtcggccgacgctccgacgagggacagcagccggctggagggagtacagtggcaccaatgccactggttgccggcggggacgcgtctccggtggtctccgcgtgaaacggaggcgacgccggtggaggggaagcagctgcgacgccgctggcggcgacggcgcgaccggacgacgctccggcgaggagggagaggcggctggaggcggccggcgcgaaggaaagagaagggcgacggcgggaacgtagctccgggggtctccgcgggaaacggagggcaagccggggaaggtgaggccactgcgatgctggaggaggcgacggcgaagaggaggcgggagaaggagagggagagaaagagagggaggaagagaggacttccgccgcgggccgagggagagagagggaggctttgggccagacttggcccaaaggaaaaaggaggat

SEQ ID NO: 63163 - DNA, 3400 bp, Oryza sativa
  Clone ID: PAT_MRT4530_64432C.1
atggagagctcaccggcgtgcgatggaaacggcgcttcggcgacgtttggcggcaagcgagcggcggccgaggtagctctagctgcggcggcggttgcgcggcgcggcggcgagcctagcagcgacggcgtgcggccgaaggtcggcagcgggcggcggaggcaagaaaaaggggaaacttcagggcgtgacaagaagccttccatgagcccaccaccctcttgcctcaccttcctcggctccggcctactccgactcagctccctcttcctcaccgcgcgccatctccttgccgccaacagctacgccagtcacctcgtctgcgtcgatgatccttgcaccgaccaggagcgggttggcttcgcaactcatcagctggttggaccggcttcagagtggtgggatagctacgaagcatcacggccagaaggacataccatcacctggaacgagttttcatctgtattccggagatcacatgttcccgccggaatgatcacactaagaaaacgagagtttcgctacctgaagcaaggagatttgaccgtcacagagtacctgcatgagttctatcgttcggctcactatgcaccagaagatgtggaaacggatgaagacaaacaagagaagttcctccaggggttaaaagatgagctcgcagtgcaactacttttagaggattatgaagattttgagaaacttgtggacaaagccatgcaactcgaaagtgagcatagtcggatgacgaactgcaagagaaggatggttaacaacccagtatttccaggtggcaaccaaagacagcgcactgagccacttcagatcaccggatcttctgttgtgtatcaagagttcctgccccaaggagatgaacgcaacgcagacaaccacaatagcaatactaatgctgatgataccaccaacaaccatggttctggccccattagtgaccactcgaataaagcgtgcaatgtcagtagcattcaccaagatgtcaacgatagtatcaatgttggaacccagaatgacaaccttagcaattttgactctgagaaagactccaatggtgatagcaactatggtaccactgatgccaatgttagcaaggatttccaaccgccaattccaactccacgtcacaatgatcatccccagatggacagctcagcaaagaagacgttgatttgttacaactgcaaagaaccaggtcatttctctagagattgtccacagccgaagcgtaacctgcgccatcactccggccattatgcaagaagaagacagcatcgccgccacctcctccacgccggcctgccctccgtttcgcgaggagacccccggaactacgttcccgccgtcgccctcccctttccctcgcgccggccacctccagccgccttcctctcctcgcccgaacgccgcccggccgcgccgtcttctccctcggcctcgcagctgccccctctccctcggtcagccctccgtttcgcggggaaatcaccggagacgcgccctcgccggcgtccagtggcgtcgccaccacttctccgcctccggccgcctctgccacgtccccggagcgccggccgacgtcgccaccaccttcctcggctccacgacgccgctctcatccccggcatcacctccgcctcgcccgaacttcgccggaacaccgtcgcccgcgccggtttctccttcctcctcggcggcatctcctccggctgccccggtcgccgcgccagagcgtcggccgacgtcgccgtctcctccctcggcgtcgccgcatcgccctccaccccggcctgccctcggtttcgccggaacgtcgccgcgaacctctccgtccgcctcaccggagttgttcggccgcccgtccctcctcgccgtgcatcggtcggccacctccaccaccatcttcggcatcgcagcggcaaggtcgtcctcggcatcgtttcccctccatccaaacccctccgcggtccatcatcgtcgtctccgatcgttctcgtcgtcgacgtcccgttcatcctcgctcggctcgtcgtctcgcggcgccgcctccgtcatcgtcatcgctgcggcgtgttccgcgtcgtccccgtctctgtgcagccactgccggctgccctcgtcgccccctcgccggtcccggtcgtcgtcgtcgtcgtcgtcctctcgtcgttcccggtcgctgcagcccccgtcatcgtcttcgtcctcgcctccgcgtcgtcaagcctcgtgccggccgcgtctcgccttcgtccaaggatcgccgccgaagccgtcccctcgccgttcgtctccgttgtgcccgtctgtctccgccgcgcccgttcgtcgttgtcgttcccgcgcctcgtcgcgtggtggtaaggatccgtcctctcgcttccccgccctcgtcctctcggtgtcgccccgtacccgttgtgcggtcgtcgaccccggtacccgtgtaccggtgtcggtagtcgttcacgtgtgctggagtccgtttgtcggccactcgcctcggttgacacacggggtccgcttccgtcgacccgtggaccgtctctgtgtacccggtctaccgtggtcctttaggttgacatgtggggcttgtagctttgcttgtgtgcttcgcgtagcttctgtcgttccggaggttcccgaagcgtggttcgtggtcgtcgccgtaggttcggaaggccgttctctctcgggtactataaggattaagctcgggcctctgttgcaaagcactaccgtacttccacatgtctagtgggtaaggcttagtttgtggctcagtctcgcgtacccccaccaccctctcctcgtcagcacaaaggagagcccgtcggtcagccttgacatcgaggcgatcgacagctccaacgttgtcaaggccctcgggcagccgaaggcacggcgacgactcgtcaggagtgtcgcgcctctccgcgcgagacgcccgctccccgcgaccattcccggtgggaccgggtgcaaggccttcgtggtgagtctccggaatgtccggtggcccccgaagttccgccccaacctcaccgagaaatatgatggcagcatcaacccctccgagttcctccagatctataccacgatcatcatggcagcagggggtgatgaccgggtcatggcgaattactttcccatggcccttaagggtcaggcgtgcggctggctcatgacccaaccccccgactccatctactcctgggaggacctttgccagcagttcgttacgaacttccaaggcacgaaccagcccaggaaaggaggcagatctgcacgctgtgcagcggaaggatgacgagtccctccgctcatacatacagcgtttctgccaggtccgcaacaccatcccctgcataccggcccatgcggtcat

SEQ ID NO: 63164 - DNA, 1275 bp, Oryza sativa
  Clone ID: PAT_MRT4530_64433C.1
atggcggaaaccctagccgaggacgccgccgacgcgccgctcgacgcggcggccattcgaagccggttggagcggctcgcgctgtcgcggcgaggggaggaggaggttgcttcggcggcggcggcggcggcggacgcggtgcgccgccttccctccgtggaggacgtggaacctttgcaggggttggaattcgacgcatgggcctcgagcgccgcgccgatggagagcgactttgatgcgttcatggaatggttgagtaaggaggtaagcttggctgaggaggagaaccgcaaactatctgttgaaattagcagcgttgcagagacaactctcaaagcatgctcctcgcagttctcccttcaacacctaacactttgttatctagattcgattcagttggatgctgatattgccgaattggagtcttcattgaagaaaattgattcacagggtttgaaacacttggaggcaagccacatcgctgagttatcagtttcaactgattcatgcagagaccaaattaaatttgacaaggactacaagtatgaggtactggaacttaaccaacagctggaaaaatatgagaatgacctgaagctgttagaaaaccaaaaaagtgctgaagcaatgtgggaacttgaatctatgttatcagaagcaaatgttttagactttaaagacaattgtctcagggtattcctgaaggaagctgtactcacgcctgaatgtttaatgtacgggaaagagtcagattgttctgttaattcattcgtttcagaccatgaattgctgatagaagttggagaaaacatggaaccaaagaaagtgcagatatttcctgatgatacctgtgtagatatacttcttgataagctcaaggcctccagagagaccatttctactacatcactgggatggattattcggcaatttcaacaccacattataatcaacactttgaggcgttccttggtgaaagatgctaataattccaggcattcttttgagtacattgacaaagatgggacaattctagctcacttagcgggtggcattgatgccttcatcaagatatctgcagactggccactgtcatcctgcggcctgaagttaatctccattcacagttccagggcgcagtcagcagatatttctttagctttgctttccaaaacaaaggaactggccaatggattggagcttcagactcgtcgacatctggtgaagtttgtagatgcaattgaagatattctttttcgagagatgcggtcgtag

SEQ ID NO: 63165 - DNA, 5577 bp, Oryza sativa
  Clone ID: PAT_MRT4530_64434C.1
aaagatgactttattttcctatgggttataatttgactagcatggaccttatatattggattggttcagctagatgttatttatagttgcttagccgtgcttagaaacattagctcattaatgggataaatcatgcttcactatcacttatggatatttaatggaagctcacgatggtcaatcgtgattggttaattaattaaattgtcaactaaaacttgataatggtgggttgtgagcacatggttttgatggtcgtgctcatgacaattaaggaccggttcacgagtttcggttgtgaaacattaaccgtgccaaccacaagccagcatgggcaacgggctttatcttttgtatagcatggttcattgcggggcaccagactgagaagtggcggagataagcccacgggggtcgctggggagtccatgccttgtttataagggggtgattatgatccaggaaggtgcgctgcagtggattgtgttatgcgaggggtattgtcacaactccttttcgagataccgtggtggtattgaggcacatggtgacatgatgtggggttgtgtcttgtgggtacagtggtacacctctgatcagagtaaaactattcgaatagccgtgcccgcggttatggctcctggtttggaatggtatattcctggtttgaagatagaactgtgcagccgggatggttgttcagaatggttgggcctatgcaacaggattcctcatgatcgtcatgaagagaagtgccgagtcaaagtcactttgaacagtaatagtgaagatatcccctcagtgatgttcgaagctggaggaagaaactacatccatgcatgtcaggaggtagcaaggatcgccataggcgagctccgcgatcgctacagtgatcagttggccgacactgagtatcgctaccattctcgtcaaccccagggaagtgaccgtggcagctaccttgagactgagggaattgagaatgatgctaccacaaggcatttggttgagatgctgtgggctatggatgaaacccgtgcagagactgtgttagcagctcaagatcgtgaagatcggaatcgaggtaagatttgcaagctagaggacaaagtggatcgattggagaaggaactagccgcgttgaagggagaagcaccaccgcagaaggccaggatttgtcttaccgcaaggaagagagctctatttgtccctcgctatcaattggcaccaaaggtccgtgtggtggaaaaagaagttaccccagccctagcggatcctccggtcgtcaacatggtggtcactcgcagcaacgggaatggccccaacaacaacaataacaacaacaacaatggagagaatcccacacttgcccaagtcctggctcaacaggcacagcttatgaacatgatgatgcagcaactccagaaccagcagaaccagggaaataaccatgcacctccccagaacaagttagcagaatttcttcgtgtgaggccgcctactttctctagtaccactaatcctgttgaagctggcgattggctgcatgccatagagaagaagttggatttgcttcagtgcactgatcaggagaaggtctcatttgcatcacaccagttgcatggccctgcctctgaatggtgggatcacttccgcctgaataggactactgctgaacctatcacttggcttgagttcaccgctgctttccggaagatgcatataccatcgggagtggtgtctctcaagaagaaggaatttaggtcgctcacccagggatcccgctctgttacggagtatctacacgagttcaatcgtctggctcgttatgctccggaagatgtgcgcactgatgaagagcaccaggagaagttcttggaaggacttaatgatgagctttcttacccactcatgactggggattatcatgatttccagaagttagtggataaggctattcgtcaggaggacaagtacaatcgcatggagcagaagaaacgccggattgctcaattcaagacacaacaggggaataatcagaggccgcatcttactttaggaccccagtccatgccacagggaggttattcgtctgttgttcgtccgcagcgtcagttcttcaacaacaatgctggcaacaacatccgcaatcaagttccacgtcctgttgcagcctcgacacagcaacaacctgccaagagggagcaaggcagcaagcccgtggtgtgtttcaactgtggagacccaggacattacgctgacaagtgtccgaagccccgatgcgtgaaggttgtccctgcccagagcaactctaccgtatcagcatcaaaggcccgtgtcaatcatgttgctgctgcagaagctcaaggtgctccagatgtgattttgggtacgtttcttgttaactcagttcctgcaacagtgcttttcgattctggtgctacacattcattcttatctatgagttttgcgggaaatcatgggatggaagtagaagatcttagatgtcctttgatggttagtaccccaagtaatcaagcactctctttgcaacgtagcccctctgtcagaatagaaattcaaggagtaccatttctggccaatcttatcttgttagagtccaaagaccttgatgttatcctagggatggactggttagccaggcataagggtgtgatagactgtgctaacagaaaagtaactctcaccagcaatgatggtcgagttgtaactgttcatgcattgtcttctgagtctttaaggtcaatactgaaccaaataactttggaagagattcctatagtccgggagtatcccgatgtgttctcagatgatttacctggtatgccgcctaaaagggatatagagttcagaatagatttggtaccaggaacaactccgatccataagagaccttatcgaatggcagccaacgagttggcagaagtcaagaggcaagtggacgatttgcttcagaaaggaattgatgatttgtttgatcagcttaaaggtgccactgttttctccaagatagatcttcgatcagggtatcatcagttgagaatcaaagaggaagatatacctaagacagcttttaccactaggtatgggttgttcgaatgtactgttatgtcttttggacttaccaatgcccctgctttcttcatgaacttgatgaataaggtgtttatggaatacctagacaagttcgtggtagtctttattgatgatattcttatctactcccgaaccaaagaagagcatgaagaacaccttcgccttgcattggagaagctacgagagcatcaactgtatgctaagtttagcaagtgtgaattttggttgtctgaagtgaagttccttggtcacgtcatctcagcaggaggagttgccgtcgatcctagtaatgtagaatccgtaaccaactggaaacaaccaaagaccgtttcagagattcgcagtttcctaggcctcgcaggatattatcggaggtttatagagaatttttccaagattgctaagcccatgacacggctgcttcagaaagatgtgaagtacaagtggtcagaagaatgtgagcagagttttcaagagttgaagaatcgcttaatatcagctcctattttgatcttacctgatccaaagaagggattccaagtgtattgcgatgcatccaaacttgggttaggttgtgttctgatgcaagatgggaaggtggttgcctatgcatctcgtcagttacgtccgcatgagaagaactaccctactcatgatcttgaattagctgcagtagttcgtgcgttgaagatttggcgtcattatcttttcggtactcgtacagaggtgtataccgatcacaagagtttaaagtatatctttactcagccggatctgaacatgagacaaaggagatggttggaattaattaaggattatgacatgggaattcattaccacccaggaaaggttaatgttgtagcagacgctcttaggaggaaaggctattgcaatgctacggaaggacgacagttgccattggaattatgcaaggaatttgaaagattaaatttgggaattgtcagtagaggtttcgttgcagccttagaagcgaagcccactctaattgatcaaattagagaagcccaaattaatgatcctgatattcaagaaatcaaaaagaatatgagaagaggaagagctatcggtttcttggaggatgagcaaggaacagtatggttgggcgagagaatctgtgttcctgacaacaaagatttaaaagatgcaattctgaaagaagctcatgatactttatattccattcaccctggtagtaccaaaatgtaccaggatctcaaggaaagattttggtgggcaagtatgaagcgtgaaatcgcagagtacgtagcagtatgtgatgtttgtcagcgagtcaaggcagaacatcagaaacctgccggtttgttgcagcctttgaagattcctgaatggaaatgggaggaaatcggtatggatttcatcactggtctacccagaacgtcatcaggccatgactctatttgggtgatagtcgacagacttaccaaagtggctcatttcatcccagtaaagacaacctattccggaagtcggttggcggaattgtatatggcaaggattgtgtgtttgcatggcgtccctaagaaaatagtgtctaatcgaggcagtcagtttacctcaaatttttggaagaagcttcaggaagagatgggttctaagctgaactttagtactgcttatcatccgcagacagacggacaaaccgaaagggtgaatcagattttggaagacatgttgagagcttgtgctttagacttcggtggaagttgggataagaatctaccttatgcggaattctcgtacaacaacagttatcaagctagtcttcagatggctccgtacgaagcactgtatggtcgaaagtgccgcactccacttttgtgggatcaaacgggagaacgtcaggttttcgggacggatatcctgagggaagcagaagaaaaggtgaaaatcattcaagaaagattgcgtgtggcccagtctcgtcataagagttatgccgacaatcgccgcagagatttgagtttcgacgaaagagattatgtgtatcttcgtgtcacgcctcttcgaggagttcatcgttttcacaccaaaggaaaattggcaccgcgttttgtgggaccttataagattgtcagtagaagaggagaggttgcttattagttggagttacctcaatctttggcaggagtccataatgtgttccatgtgtcgcaattgaagaagtgtttaagggtacctaccgaagaagctaatcttgaacagatagaagtccaagaggatctgacctatgttgagaaaccaatccgtatcttggaaatagatgagagaagaaccagaaatcgagttatccgtttttgtaaagtccaatggagtaatcactcggaagaagaatcaacttgggaacgagaagatgaattgaagtcagctcatccgcatctgttcaccagttcttccgaatctcgaggacgagattctgtt

SEQ ID NO: 63166 - DNA, 308 bp, Oryza sativa
  unsure (1)..(308): unsure at all n locations
  Clone ID: PAT_MRT4530_64435C.1
gcagcaaatataggtcagtctcgggtgcaatctctcgttccggtgtatcactagatcacactgaacacgttttaaactacatttactaactggtcaatcattaacacgtgcattgaacacattgttgcaccctcttgaatctactgcctacttatcatcggtgagatgaaaactaactaaatgccacacatcgtagacagatgcatatgatcataggctggctgtcctgttgcngggacccgacatgaccgagaaccagctttctgccaaggaacgcctgaggccatttgtgagattattaactgggc

SEQ ID NO: 63167 - DNA, 804 bp, Oryza sativa
  Clone ID: PAT_MRT4530_64436C.1
atggtttcattgctactacagtggaaaccaacacttgctactaaggttgacagcaacatttgtgacaaccaaggccaaagctttctacatgcagcagctatgaagggccattcttccatcatctcatacgctgtaaagaacagcatgcttaagcatcttttgaatgcccaagacaaagaggggaacacgccgctccatttagctgtcgttgtagaggaatgcaaggttgtttctaagctattatcaagtggagaggtaagtttagtagtaaagttgcatgagtcaggagcacagtttcaaccacaaaggcaagatcttatagagaaatggaatgctcaagacatcatgaaatggagagacaatacatcaaaaaatctcgctgttgtttcaacacttatagcaacgattgcctttgccgcagcattcaatgttcctggatcatatggagatgatgggaaagcgaatctagcgggtgaccccatgtataacgctttcctgattctagacaccatctccatggttacttcagttgtggcgacaatactgctggtatatgggagggcctccagatctcatcgctcatggctgagctttgtgatctcaatgtactttctgtggctgtcaataaattgcatggtgttcggcttcttcacagcaatagccgcagtaagcaagaagggcataaagattgcaatgtcccaactgatctaccatgggatgtacatcttgacaatgcagcttacatttttagcaatgccagggtcatttataagcactatgaagttcctcgtattttatggatga

SEQ ID NO: 63168 - DNA, 2466 bp, Oryza sativa
  Clone ID: PAT_MRT4530_64437C.1
atggggcaaggcgtgcgtcagaccgccagtcgccacctaacccttgatctgaccgacttctttaaggggtcggggtgcctcggccctcggggccggggcaagcgcaacccgacccccccctcgggggaaatcaggaggagggcggacacctcaccctcgggcccgacgtccccgaaggtgccaggccacgtgggcgattgcgtctgcctcaagcctctggggatgctggtagcggcgagcgtcagcctcgtggacatcgagcaacctctgagtttcgatggcgcggggacgacgtgcgttgtgggagagaaagagcgcgtggatagtgcaacggataccgcgggcgcggggcgtggatggcgcgcgacagcggtggcgatgaaggcgcgcgctagcgcggtggggatggggatggggatggggagggcccccaaacctgctgcctactgcctaggtttccaatttgaaaggaaaaagtacacgaaagggcggccggcaggtgaggaggaggtcaccgggacgaggcgagagaggaggtccgactgccggcgatgcggtgatggcgcccgccggtacaaatcccacctctgcggcgccatgtcctcctcccgcgggccgtcgtctcctctgtcccacccgaaccctatcgatcccttcgccgcggtagcggcggcgacagcggaggcgccaccgctccgaaaccctatcatcccccatgaccctccctcgccggagatggaggccaccgcggaggcgctcacctgggaggggtgctgtgttggcggagagcagctgccgctgctgccctccgcgtccaaggtggtcaggccggtgtccgcgatggtgccgaggcggaagaaatgcagcttcggcgggtgcaaggtgcggaccatggctatggccaggttctgccactcccacatcctctccgatgaccatggtgatggcatgtggaggggcggcgtcagcgcgctagagcaggcggagcgcgcggtgtctccgggcgagcgcgactacggcgacggcaagcggtgggcgagcgcgacggcgggcaagcggcggctccgagggtgggcggtgcgcggccggagcaggtggagcggcggtgtctccgagcgcgggcggagcagaggggcgggggcgcgacgggcgagcggcggcgacgcgtcacctctttccccctctcccgccggcctcatctcccccaactccgtccgctcccgccgctgcggcgcgccaccacgttgggctcctccgatgagtgcgacggcggcggcgggaaccagcagcaagaacgatcccgccgcgcttgccttccgctcgccctccgccgtccaacgccgctccgcgtgccgccgcgccacccgcctccattctgcccacaggccgcgctcggtggactgcgggctcaaggatgacctcgtgttcggggaccctaacgcgccgcggttccgccgccacctcccggatcccgcccccacctcccgccgcggtcgtccgcagccgccagcccagcccacctacttctcctacacggcccaactgccacgtcagctaaccacctcattcaatccactccactccacggagccaacccgagctcgcgagatggaagctcacctccggccgctctccgccgcggcgctcctcctttcccccgctgcgccgcttcccaccgccgttgctgcttctgcgaggagagcatcccccggtggcaggaggtggagcagcgtgagggccagcgcgggcggcgggggctggctgtcgggcctgctcggaggcaagggcggcggcggcgcgccgacggcgatgacggtgacgccggggaccgtgaaggcgggggaccccgtcctgcacgagccggctcaggacgttgcccccggggacatcccctcggagaaggtccagggcgtcatcgaccggatggtcgccgtcatgcgcaaggcccccggcgtcggcctcgccgccccgcagatcggcgtccccttgaagattatcgtcctggaggatacccaagaatacatcagctatgctcccaagaaggacattgaagcgcaggatcgccgtcctttcgatcttcttgttatcatcaatcctaagcttaagacgacgagtaaaagaactgcattgttcttcgaggggtgtttgagtgtagatggatacagggcacttgtcgagcgacacctggatgttgaggtttcaggtttggacaggaatggacgccccatcaaggatagcttgatgggtggtggaaggggctacgggttcaataatttgttctcattgttcattggtctatatactacagtcctatcattgagctttgtaaaagataggctggactacatgaaattgagtgctacagcctactggcttgttacaaacttagacaaagtttccagtccattacctgggctgaaggagcttgtcatggaaaatggaacatttgtcagaactctcacatag

SEQ ID NO: 63169 - DNA, 2250 bp, Oryza sativa
  Clone ID: PAT_MRT4530_64438C.1
tggcgcagctctgtactgtagcagggattggggaaaatggcgagagttccggcggggaagacgaagtgacgtgggcgatcttaagctgtcgcagctgcgcctccactgcgccctagcgccgccgccgccgcggatttcgccgcatcccgccgtccccgcgcgcattaaagacggggaaaatcacccccgtgattccctctcccgtttccccctcttttccctctctctctccctcggattcgttcgaatcgcgcccgcaatcctcgccggcgcaatcaatggcggccgagatctccgcgcccgtttcctccctctccggccgcgctctccccctctcggcgctatataatcgttccccgagctccgctcttccgtttccgccgctcgccgctcgctctcgccttcggattcgtgctcgcgacgttctcctctctctccgccgtcgccgccgaccttcggttagccgccgtcgtcgctccggtcttcctcccgactcggcgccacctccatcggcttcgccgcgttgtcgccgaccccgtccgccccttcgcttcgcccgccgaccgccggagctccgtctccttcgtcgtcccgaaccgcgccgccgcgttcctccgctccggccgtcgtttccgccgtcctcgttgtcccggggtgagccgtggaccgtccctctcgcttccctctcctctccgctctctcgggcgccgctccgccgcgccggtggtcgccggcggtgaccatcggggcgcgggcgcgcgtctcccgtcggtcgagccggcgaggccgccttcggccgcctcccgcggctgccaggtggggcccggccgtcagccgcccgcgcccgcgggtgcggctgacgcgtgggacccacggcgccggccgccgccagccgcgtgcacccggtccaccgtggaccgagaggctgacgcgtgggccccactcccgtggacccggacaaatgaaggctacacgagctgcggcccgatggctgacaatgagaaaggcaataaggtcagaagtcaggacattggtacctcaagctcccgagtgaatgaagcaccagacaacagttgtgtgacactggtccaacacctaattaaccagaaccgattgcttatagagatactacagcagcatcagacgccaattctgaacctgagtcagatacaacctcaagtgcagttggaggcagtccaatcactcacaccacaagtcagcatgccgccagcatcccaaaagacccatggtggcgtgccacatgttgactcaaaagaagcaagtatcatttgttttatgtgtgatgagcaagggcactatgcaaggaactgtccctagcagaaaagaaaaacaccaatgcgaaccgaagatgaagtccgtaagatgatcattaccagcacagaatggcctccaccaggaatgaccaaacgtcagagaagaaataccttccgaggtgcaccacagttgacagagcatcttttagctaatggaggtagagtgtctgatagtgaagattcagatcaagtctcctcagatgatgaagatgagatggaacgtaaggcatgctctcgttgtggagaaatcggtcatgttgccagctcgtgtgccactacatgcgttcattgcgaggaagaccatccacccgataggtgtccaacgagcaggatcacttgtttcttttgtgaaggaactgatcatgtaccaaaagattgtcaattcagttttctgctgacgaagaagatggccaaccaacccgccagttccaacggagagaagcatcaaggcaacacaaatcctcgccaagattacagtttcagcctaactccagtgccaggacagaggaatcaaaatgagaaaagaaaatgccgagtccgggaagatatctgttgcttcaattgtcaaggaatgggtcattttgccgacaagtgccaaaaaccgagaaacatagctgccagcacgtcagtccacgcaactccctgcaatcagaagcttgctcctcagcgaattgtcatccatgcatcccgaagcagtcctatagcccgcgttgcaacagctccaactccagcgagtgcatcaccacaaggtgtcaatgcccaatttcagccccagccatcagttgacaagaccggcaaggatttccagccaccaattccaactccaagtcagaatgatcgtccccagacggatagctcagcaaagaagacgttgatttgctacaattgcaaagaaccagggcattactcgagggac

SEQ ID NO: 63170 - DNA, 369 bp, Oryza sativa
  Clone ID: PAT_MRT4530_64439C.1
atggagaggccgactcctccctctcgagtgacggagacggaggggtggcccggcggcacgaagaggagctggtccgcggtagcccagaccggcggacggggacagggggtggacaggcagtggaggtcgcggaagccggcgggggtggcggcgttgcaaccggccctcgcccgcccgctgccgccgctctcgtctccggcctcctcggccgcggcggccgccaccagccatgggacgcaccgccgcagttctggccctcgcccgccgccgccgtcgctccagctctccccgcagacggcgaagggggagagaaaggggagagaaagagagataggagatccggtcgcgcggagacgcgtcgctgcatga

SEQ ID NO: 63171 - DNA, 549 bp, Oryza sativa
  Clone ID: PAT_MRT4530_6443C.1
agcacggaaaggggaaaaaaaaagaaaaccaaaccctctcgtctcgtcctcccccgcccgccccggcctcgccgcccccttccctcgctcaccggcggcgaattcaagctgacgagctcgccaccggggattggttcgatcttggccggccaagaagcacaagtttcttcgggggattagcttgttcgcgagggggaggagttcggtggtggagccttcgccttcgtgatggcggacaccaaggcggacgccaaggcggaggcaaaggcggaaactatcggcggcggcggctctggctcgttcagcgagcaagcgtttgttgagaagcttaacaagctcaacaacacggcgactaggatccagacactttcaaattggtgcatttttcaccgaaagagagccagaaaggttgttgatacatgggagaagcagtataacagtgcaaataaggataagaaagtatcattcctgtccctgtcaaatgatattctgcaccctagtttacgcatgggaggggagtttgtgactgaattctggagggttcttcct

SEQ ID NO: 63172 - DNA, 1680 bp, Oryza sativa
  Clone ID: PAT_MRT4530_64440C.1
atgtcgcatctagagggagacgaatatttggaggagaagggagacgcttctagcaccaaggagactggatcaaagggagctactattcactttgattacatcaaacttaatgttcctcctcataactttgtctccgtgccttccgggcgtgcacctcattttgatgggacacattatgccgcttggaagcacaagatgaagttgcatctaatctctttgcatccaagtatttggaaagttgtttgtacaggtattgatgtacccaatgatgacatggagctcacttcggagcaagagcaactcatccaccgcaatgctcaagcttccaatacaattctctccgccttgagtccgaaggagttcaataagtttgatggtcttgaggaggccaaagagatatgggatactttgcaattggctcatgagggatcacccgccgttcgtgaggacaagattgaattgttggaaggaaggcttggaagatttgtgatggatgacaaggagacacctcaagagatgtatgataggatgatgatccttgtcaacaagattaaaggatttgggagtgaggacatgacaaatcactttgtggtcaagagacttctccgtgcatttggtccaagaaatcccactcttgtatcaatgatacgtgagaggaaagacttcaagaggctcaccccaagtgacattcttggaagaattgtgtctcatgagatgcaagaagaggaagctcgtgaagtgaggcaaatggtgaagaatgccgccatgatcaaaaatcaagaagtggctttgaacgcaaaacaagaagaagagtcaagttgtgaagaaaagattcaagcactttcttctcaagagtggctatggcaaggaaggaaggatgatgacaagggaaagaggcaatcagagagagcttgcttcaattgtggcgaatatggccacttcattgccgattgccccaaaacaaatgaagctaaggctaaaggagacaagaagaagccggagcgtgctcatgtggtgaaggcacacatggtggaggtgtggtactccgaagatgaagaagcttccgaggacaagcccaaacccaagccaaaagacaagattgaaggagagggtggtattgctaccgtcgccttcaagtcatcctcttcaagcaaagagtgtctcttcaacaacttgagtgatgacgacgacgactcctaccactactcatgcttcatggcccaaggccgcaaggtgatgactcaaaagccttctcacacttctcttgatgatgattctagtgatgaagaaactagccttagggatgtcaatgaaactcttcaagaaaaatttgctattttagacaaaagtcataaagatcttgaagttcaattagacactctttggagtagcacctctcaaccaaatgtggtttctaattcttccaatccatctactagtaatggttgtgctaggtgttacaatattgatttgacctcttatgctactaatgttgatgctatgcaagctcttaagaaagagaatgaaaggttgggtacattggtgaaatatggatgcatgaagacttaccattcaaaagatgccctttacaagaccatcaccgctcatcctaacaaggatggacacgggctcgggttttcgggtggaatgtcacgtcctgataaattcatcccaaaataa

SEQ ID NO: 63173 - DNA, 328 bp, Oryza sativa
  Clone ID: PAT_MRT4530_64441C.1
atgacggagctcgtggctcctcaccgggagaccgcgcaggcccccctttgccagttcggccgggggcttaggttcggcgatctgcatgatcacccttctttttgtagcatcttgcctgtaatggttgggatgaagcctggtattcatctaaccagggctaacgtgccatctctaagagaccggataaaggagcgcgctgcattgcgctgcatgcagcgtgacacgcttgaccagaccgcaataaatgcggttaggagcaacccgaccccccctcggggaaatcaggaggagggcggacacctcaccctcgggcccgacgtccccgaag

SEQ ID NO: 63174 - DNA, 1363 bp, Oryza sativa
  Clone ID: PAT_MRT4530_64442C.1
ttagaagatgtcggtgtcaagcgcgtcgactatccgcgccgttaaggtaggctggcgggcgcgacactgtggaatgcagatggagaattcataggacacgcagcagcggttgtttcggcgaaacgtcgaatatcataggccaggaagcagcggtttattcggcgaaacgtcgaatatgttagggtggatagcatagacgatgtcggtgtcaagcgcgtcgactaaccgcgccgttaaggtaggctggcgggcgcgacagttagggtggatagcatagacgatgtcgttgtcaagcgcgtcgactaaccgcgccgttaaggtaggctggcgggcgcgacactgtggaatgcagatggagaattcataggccacgaagcagcggttgtttcgacgaaacgtcgaatatcataggccacgaagcagcggttgtttcggcgaaacgtcgaatatctgagggtccacaactaattttcatcgaggtggttagtataggaatggcacataggacgatagggtgtatagctttgacgatgtcggtgtcaagcgcgtcgactaaccgtgccgttaaggtaggctggcgggcgcgacactgtggacatagaccacgaagcagcggctgtttcggtgaaacgtcgaatatctgagggtccacaacaaaggccacgaagcagcggttgtttcggcgaaacgtcgaatatcataggccacgaagcaacgactgtttcggcgaaacgtcgaatatctgagggtccacaagaagcagcggctgtttcagcgaaacatcgaatatctgagggtccacaatataggccacaaagcagcggttgtttcggcgaaacgtcgaatatctgagggtccacaacgtgccgttaaggtaggctggcaggcgcgacactgtggaggtcttctgcttggtatcaccctcctgaggttgattgcccttcgcttggcctggagtaggtcggggagagaaacaacttcttccatcgacgacaattctttgctgaggccgtcggcgcagagaatggttggtgctgaaggtattattgctatgatttattgcagagtcaggtgcagcaggaggagcattggtgctgtggatgatatcgtcgatgttgctgttggagctgactagcttcgcatagaaaacatgtgaccttgcgggtgggacatccacctggtggatggtcttcctcacaatgagggcaaagtgtgagacacatgctagcaacgtgtccaatttctccacaacgggggcatgcttttgattccatctcttcctcgccgagatgtcggagagactcatcttcataatccgaggagacttgatctgacccttcactatcagatactctgccgccat

SEQ ID NO: 63175 - DNA, 720 bp, Oryza sativa
  Clone ID: PAT_MRT4530_64443C.1
atggcggcgtacgtcgagccgcaggtgaagctggacacggcggaccggctcgtccgggaggtggaccgcgccgcggagagggtgaggcgcggcgaggcgcactgggtcgactgggccaccctcctctgtgagctcgcggagaacgagatgagggagatggcgagatggcggcgtacggacgcgtgccgcaacggcgcttactggcagaggctcatctgggcgcagaacccggatctctttgcgccgccgccgccgccggcggtgagcaagaagatgcaggggatcgccgcgacgtcgaagaagctcaaccaagacgacgacgacgacaccaagagcaagatgaccgatgaaatgccggcaatggagtcgctcaaccaggctccggcgatcaacgatgagttgcaggccatccgcaaacagctcatacatgctttggaggagctgacaagtggccgcgcaagcattggcatcaggaggatgggtgagcttgatccaaaagcatttgctaatgcttgcacacaaacactgactaaaaaacagcttgattctgcgcttctctattcaaagtgggaagctgaaatcagcgactcatcctggcaccctttcagggtcatcaacatcaatggaaaaaacaagctttgcccgagccaactgttcagagttcattgccatgctatcgcagatgcaatagtaatggaccctgagcatgtggtgggatga

SEQ ID NO: 63176 - DNA, 248 bp, Oryza sativa
  Clone ID: PAT_MRT4530_64444C.1
cacggctggtggagcgggcttcttgattcttttgtgtctgtctgaaattttgatatgtctgaaatgtatctcttttgctttgtttagttgcttcctgcttacaaacatgtaaaatttctctaaaggagaagttgtccagaagtttcatttgcatcatgctcttttctgccttccaaacatgagcaaactccattaggatacttggctttgtcttgagtacatcatggatcatgaagcacatttatgct

SEQ ID NO: 63177 - DNA, 2490 bp, Oryza sativa
  Clone ID: PAT_MRT4530_64445C.1
atggagattatgcatgagttcactgaatttctctgcatagtctacgggtatcccccgtcgacagtggcgcgccaggtagggggacttggtgctcaagattctactactatgacatccagcttcgtcgacaacagcgtcaacaccaacctcaaccaaggagttcctacttcaacaatgctggtgtggactcaagtcggcaaaatcgtcttcccggtttacaccacggtgccgatcttagctggtccatcaatggccggaaacgagaacgcagtggctactacccagggcgattccatgttgaaggatcctcccgccgaagcggagatcggaacatcgacgacatccgagcctgagaaggatcctagtgcggccaagccttgtcgttccgacaagaatcacgagccgacgaggatgacttccgagacaaagaatcacgacctctcaagctgcaaggtcttcctccgcgccatgaagacgccacctcctaaggtccagcagtcacgcgtcgccttcagggatgaggacaaggaacaaggagcgacattgatttcagatcgatttgttggggtaatcgacatcgatccccacgaaccatcagtcttgcacctgctcgaagactatgactcatcgtcaacgagtacgccgcgcgagaccgagaccgtgataaccgccacaaccgccacgatcacgacgatcgcgaacgacgggtgctgggcgatactggtcgaggacgtcaccctaatgacgacaatgatggagatcggcgccgagacaacaacgggagacgacgacaggattctcgagaacccggccgacgtcctcataggcatccacgaaggacgtacgatcgccgacaacccactgcccccagcgctgggtgtagagctttcggtcgttcacttcgggatacgacaacgcattggcaaattacttgccaaccgcattgaaaggctctgcgcgttcatagctgatgcatcttccccctactcgatttcttcgtgggcggacctgtggcaacagttcgtcgccaacttccaagaaacttacaagcgccacgcaatcaaagacgacctacatgcgttaacacagaacccggttgaatccttgagggattatgttcggcgctttaatgagtgcaggaatacaatccccgagatcaccgacgcttctgtaatccgcgccttcaagtccgcatacccagactccgatctccatgtctcgcacatcttcgttggttccacggcatactactcaaaacgagaatacaagaaggtggaacgtgaagtctgttcgacgtggcagggggctgcgcccaagatgaagtggtctgagcagaagatagaattctcagaagaggaccaccccaagactgttgtcatcctagagcaatatccaatcatggcgcttgacggcaggcacgagctagacaccaaagccttcatcttccaggggctcctcttctgggtttgggaaaaattgagcaagactgagtacaaccaccccgacgggagggggctcgcggaccgggtccacaggagtggggcccacgcggcagcctcacagtccacggtggaccgggtgcacccgggctcacaccagccggcgccgtgggtcccacgcgtcagccgcacccaagggcgcgggcggctgactgccgggccccacgcggcagcctcacggtccacggtagaccgggtgcacccgggctcacaccggccggcgccgtgggtcccacgcgtcagccgcacccaagggcgcgggcggctgactgccgggccccacgcggcagccactcggcgcgcccgagggcggccaagccggcgtagccggcgggaggcggcgcccgcgcccctatggtcgccggcggcggccataggcacggcggagcggcggccgagagaggggaagggaagggggaaaagaagcggcggtccacggctcaccctaggtcgacggcgacgacgaaaaaggtggccggagcggaggaaggcggcggtgcggctcgggtcgacggggtcgacggcgttccggcggtcggcgagcgaaacggaggggtggacgaggtcggcgaggatgcggcgaagccgaaggaggcggcgccgaggtgggaggtggtccggggcgacgacggcggccgaccggagctcggcggcgacggcggagagagagagcgacggcgcgagctcgattccggcgaggaggaagggcggcgagaggcggaaacggacggaggaggtcgcacgagttctgatcgacagcggtagctcaatcaaccttctcttcgccagcaccttggacgtgcaatgcgacaaacggagccttgacatggtcgagcacacgcccagcccacccgacacagctgagccacccaagaaagtgagcagaacaaacaaaacgccgaaaccggatggcgcaattaagatcgttccactctccagtgccaaccccgacaagaccgtcaagatcggggcatcactaggcgagaaatag

SEQ ID NO: 63178 - DNA, 921 bp, Oryza sativa
  Clone ID: PAT_MRT4530_64446C.1
atggcgtcgccggcgaggacgggagaggccgccgtcgtggtggtcggcgtggccgagcaggaggcggcggtagtagagcagcagcgggaggaggaggagcaggcggcggcggtgggcgcggcggcggtgctgctgccggtggggatggtgatggtgcaggtgttcaccgcggtgacgctgctcctgtcggagctcgcgctcggcgccggcgccgcgcggccgctcgtcctcctcgtctaccgcaacctcgtcggcgctgccgccgtcgcgccgctcgccgtcctcttcgaaagagttctactggcaacagggatgtactactacggtctgcgtgacacgaacgccgcctattccgccaactttctgaatctcatccctatcgtcactttcattatcgccgttattttccgtgctgagaagctggcgatagcaagctgcgccggcaagatgaaggtcctgggcacggtcctgtccgcgaagctagccaaggtgttcccgtccaagtactgggcgacggtgctgacatgcctgtcagggagcctgcaggcactcgtcgccggcgtcttgaccaccggcgactggtcggagtggaagctcagctgggacctgcgccttctcgccgtcgcctactcgggggtgttcaacaccggtatcaccttcgtgctcatctcgtgggcaatcacgcgtcgcgggccgatctacccttccatgttcaactcgctctcgctcatcatcaccaccgtcatggactcactgttgctcggcgcaaacatctatctaggaagcgtgatcggggcactgctgatcattgtggggctctacgcgttcctgtggggaaaaggacaggagctgcagctgaaggcggcaggagtgaagcaggagaggcacaaggccgccggcgacgatgatccggagatatag

SEQ ID NO: 63179 - DNA, 2776 bp, Oryza sativa
  Clone ID: PAT_MRT4530_64447C.1
atgtgggtgacggcggcgacggaggccgccgtgcggcttctggtggcggtggggaccgcgctcgatgtttacgtagtggcggccgtcggggcggattgcgcggcgacgaagacacagtcggcggtggtggagacggatgaagagaggaacgtagtttagacgaggctggacaacaattaccggaacatgaaaaaccaaaagtgcaattttgtagtctccgaagcgtacgtaaaaaatatattcaagattgcatagcagaggtaataagcaagccaagacgttaatgcccgaagtgacttcagaacgggtatcggtgggtgctgaagcaccgctgcaggaggcgccaactaccctgtagaagttttcatttctcttctgtccgctgatgcccaaaaatgcatatcacgtttctttcagagtttggccatgcccggggggtgcatctaaagccaagttccaccacacggcggccgtgctagtgtatccgtgctcactaccaccgtcgtgtgaacgtggtcatactggttccggtgtcaaaggttatccgctcacaattccccacagcatccgagccggatgcataaagcgtaaagccgggggcgcctaatgagtgagctacctcacgttaattgcgtccgctacttgccccctttccagcacccgcgcctggctcggaacatcgaccgcgtctacgtctccggcggcgccgtcagggcggcggaccccgccggcaacctgttcaccgccttcgccaccaacccgttcgccgagttcaacatctttggagaccccttcgctgcttatcaggtcatacattccgggattccaatcacgatgattcctcttgatgcgaccaacacaatttcggtcaccgaggaattcgtttctgaattccaacagcatcagcaaacttacgaggcacagtactgtttccagtcacttgataagagctactacatgtgggattcctttgctgctggtgtggctctctctagcatgcgcaatggcgaggttgatggtgaaaatgaattttctgagcttgaatatatgaacattacagtgataacttcaaacaaaccgtatggtaaacgtgacggctcgaacccctttttcgatggccgtgctactcctaaacttggcctgaaagagggtggagttcacagtggccatgttcagactggaataagagatagcttctgcctggtaccgggaagcaacagagggagatgcgaggatggatacactagagaagtgtctggtccagaaggagttcgggttccgtgttgcaacaagagcaaagcctaacacggataaaaatagttcactagaaaaggaattttccaagagcttcttagaggtcttaaatcgtcccgaacaaactgggcttttcaacatcaatacgcagttcccatattatagagaagttctttacaagccggttttcagaaatgtgagcagggggaagccagtcatttttgacatggacatgagccctggagattttgtttccctaatatacctcttgaagacaccaatagaagtaatagatctaaaggctgttttggtcaatggcaatggctgggcaaatattgcgaggcatcgatatcgtttacgacattctacatatgatgggccgcgacgacattccagtaggcctaggcaataccactgcattgggaattccaacccttggctgcaacaattcttatgctatcccccatggaagtggtggttttattgattcagatacactgtatggactagccaggtcactgccaagaagtcctagaagatatgctcctgaaagtttagatcacccagaagatcggcagcctttggctcttgaagtttggcaatctgtcaggaagcagcttgatccaggcgaaaagatcactgttcttactaatggacctctcaccaatatggccaacatttcactctctgacagggatgcaagttctgtaatagagagagtctatgttgttggtggactcatcaaagatggaggcgatgagaatggaaatttgttcacggttccatcaaacaaacatgcagagtttaacatatttcttgatccactagctgcaaaaacagtcctggaatctgatctgaaaatcgcactcattcctcttacggcgcaacgaaaggctgcatcatttcgggctgtccttgcggctttggaagacatccagcatacccatgaatcaaaatttgtccatgaattgttgtcgttgctgcaagaacttcagatcaaacagaagctgtatcatcatttggacatatttctgggagaaattcttggagcagtttacatggttgaaggatcaggactgaaaccttcagtggaactcaagccagtaagtgttattgccaacacaaacaaaagcacggacgggcagattgtcatcagcaagaatagtgcaaagctgcaaacaagagacagtctgccgttattgggagttttgaagaacaaaaggcaatttggagcaggccgattacatagcacaggtaataagaaagctgacatgataatgcttgaagtggctgaagaacgggtgtcactgggtgctgaagaatcgctccatgagtcgcgaagtaacctggagaattaatatcgtttacgacattctacatatgatgggccgcgacgacattccagtaggcctaggcaataccactcattaattccaaccctctgcaacaattcttatgctatagggtattgagcgatttcgatgggtgaaatatatagcaaaacaattggcaaaattctttt

SEQ ID NO: 63180 - DNA, 105 bp, Oryza sativa
  unsure (1)..(105): unsure at all n locations
  Clone ID: PAT_MRT4530_64448C.1
cacaagcgagagacaagcagtctcaagctagcaaccaagcaaaataggagctagtaagcaaagcaagaactagatcgatctctgacagggtatngccatgggatt

SEQ ID NO: 63181 - DNA, 397 bp, Oryza sativa
  Clone ID: PAT_MRT4530_64449C.1
atgccagtcttctcagaaagcgtcaacgtctgtgtgcttgcaagaatgagctccggttcagcttcagctgcagagagggcatggcacgagtccgttctcgttgcatccggtacacggcacgcggccgccggcggcggcggcggcgtcatagagcctatgactgccgctgcacgcgccgcagacgacgaaccaggcgccgccgcagacggcgcacgcggcgtcgcccgcgccgcggcgtggcgcgcggcggagcaccgggcggaggcgcgcctgctcgtgcagggtgaccacctcgttggcgccgcccagataccggccgtccacgaacagccgcggcggcacggcggcgtcgtccaggcccaccagaagggcgcggagctcgtcccggtagggcgcg

SEQ ID NO: 63182 - DNA, 1249 bp, Oryza sativa
  Clone ID: PAT_MRT4530_6444C.1
agtagcacctcggccaccataaggaccggtcttcgggcctctgttgcaaagaactaccgtacttccacatgtctagtgggtaaggcttagtttgtggctcagtctggtcataaacaaaggtacacggatggagatggacgaatccgtgggtgtgtcttgctgagtactgtggttgtactcaatcttgctcaatttttccccaacccagaagaggagttcctggaagatgaaggctttggtgtctagcttgtgcctgccgtcaagtgcctgtggtcgtcgccctagtcttccactgttttccgtttatcttcgtgtgtgctgggccttcgtcgcccatgtaataaattaactatttacgcttccgcttgtatgatgatttgtatttgtatttcagatgtcaggttttgtaaccctgtaattgtagcagatgtgtgttttcatgttgtgttttaaccctaatggaatcctagttctgtttatagcattatgagttaatgaccttgctggcatatctggtatttgatgttggtctctcgtcatgtggatgtatgggtaaaattgtttgtgtgtgtgtgtgtgtgtgtgtgagtttgtgtgtgtgtgtgtgagagagagagagagagagagagtgggtttgtgtgtgtatgtgtgtgagagagtgatttgtgtgtgtgcattttttttagggtaagggtaaaattgtgcgtgtgtgtgtgtgtgagagagagagagagagagtgagtttgtgtgtgtgtgtgtgtgagagagagagagagagagtttgtgtgtgtgagagagagagagtttgtgtgtgttacataattaaaaagtgtagttgtgtgtgtgtgtgtgtgtgtgtgtgtgtgtgtgtgagtttgtgtgtgatactttcaccatgcgttgtcaccgtgtccatgtccataataataaatatctgcaaattaaagtgtacaatgtttataatttttgcaatgaacaatgtcaaatcaatttggggctcttttaatttatgggtttgacattttgtatgtccagtgcttgtatttataaactatccatgttatttgatatttgttgacttcaatgttcagtactatgcaacaatagttgcattccaactgacaaactaccttgcaggttaatatgtccctgcgcgtgctgctgcgcttgcgctgccatccatctgtccagccattggaagccgccggccttctcctgccattgtctctgctagatcatggtcagtaaa

SEQ ID NO: 63183 - DNA, 238 bp, Oryza sativa
  Clone ID: PAT_MRT4530_64450C.1
atatccccaaggtacccactacaagatattatatatttatggggtaagttcattatcaagttcaaccaaccgaaaaatcagacattatttcttcatcagacacaggttctgtataaaactaaatcatagtagcataagcaaaaacaatgatattgacacaaactatccataaatcacaaatcacagcgcagaaatacccgaaaaatcaatttaattgctcctctcattgactgaacac

SEQ ID NO: 63184 - DNA, 228 bp, Oryza sativa
  Clone ID: PAT_MRT4530_64451C.1
atggcgtctatcttggccacgccgcaagagcaaggcataggcaaatacttcgtccccttcttgagagatcgtccccatcaatggcgaaggccactgtcgttcccgacgccgccccctccaccactcgcgctcccatggacattgacggtaacggtgatgggtgcggccgcaacggagaaggcgatagcgctgtacgcgtcctggccgacggagattgtgctgatggaa

SEQ ID NO: 63185 - DNA, 645 bp, Oryza sativa
  Clone ID: PAT_MRT4530_64452C.1
aagatatctgtgtgtatctctttcagagaaattgaccatgaaaagtatacaaacgcgtgataattcatacatgatcggtcagtgaccatagataattcacaaaaaaaaatggcgggaagaatcaatgatgaaaaggaagtgtgtgcagttaatttggtaatatctcttcaattcttcacgcagtcttcagcatgtacgcgtatatatatagctagggatatatgcctccatctctctctctctctatatatatatattctcgcttaatttcatttgggaaaaaaagatgcatgtgatgccagtgctgaactatgcaaacaattaagtgttggtggttgcatatgtccaagttcaagggtgatactcttctagtgcctgcgacgaatccccaagcttcttttcggcgttggaaattctgtcgtggaaggtgcgcatctccgcccattgtcgggctcgaaccttttcgctgcttccttgttgttcaccgttaccctgggcaatgagcgtgggaactccatgatgggacacgtactgcgcgtccacgatgccgatctgctcttcaggattctgccattcatgcatgatgatcatgtgtttaaccttatttcttcagcaagctatttgagtagtagtaccatctgaatg

SEQ ID NO: 63186 - DNA, 1839 bp, Oryza sativa
  Clone ID: PAT_MRT4530_64453C.1
tcaagggtgatactcttctagtgcctgcgacgaatccccaagcttcttttcggcgttggaaattctgtcgtggaaggtgcgcatctccgcccattgtcgggctcgaaccttttcgctgcttccttgttgttcaccgttaccctgaagaaagagatcgagaaattgattagtaacacaaacaaacaaacaaaggagaccctgggcaatgagcgtgggaactccatgatgggacacgtactgcgcgtccacgatgccgatctgctcttcaggattgtcgacgcatctccagaaattgaagtccagaccccagccatgaaccaagtcattctgcatatttataagcatatacagttccattggctcgtttattgcctgaatcatgtgccagacgcatgtccaggcttccctggagaagacgggcgccatcacctccacgaacttgtgcatttcccggccgtcgtttcttcgaacggtgacttcatacgtcttcttccctcttgtgctgtccaatcctggctgcgatatctccaacccattcttcttcgccaccttcacgtactcttccgcggtgaagttgtcgactcccagatcctcgtcccacaagaagatgtattcgtatggcgccacgatgctcggatgcaggaacctctttgcaaaccaccatttggtctgcttcttggcgctgacgtgaacagcctgcttcgaccactccaagtcatcccattcagtcgtgcgcccgtcgtagtggaacagaaccacgtcgaacttatcagagaacttgagaacagttgcattcacattggctttctcagagtatcccaccgcgagtgccaaaaggtacttgccagtcgccacgtcctcccttggtgatccccacagccgtctcatgtgaagatcagactctgtaactactaatcctggtggtagcttctctgcacctttcggctttgtcaacgcaggattctctgaagtgccatttgacaggatagtggtgtttctgaatggtgaccacagtatgcctatcatgctgctgccactaaagctgtagttcgcaccatcaccactgctgcaaggtaataagccacactgaagctgtggtgtgatctgtactggaaaagaaatgccaatgaagaatccaaataccgccgcagataatgcggtcacaatggggtttgctctcattctcactgtttaattatttctcttgagaactgcaagtaaattaaacagcgcagtttgcgttcgctgtctgctaacaaggtcttttactcttcagtgacccaactgaactgtaaaaaacccatgtttcagaggagcaaccaaacaacattcaggcaatggcagcagtacacacaagaaggaaaacaagaaggagctgcagacttacaggcacaaacagaattgacgtcctgtacacgggtgcaggtatgcaaagaggatgaaaattaagcaccgactgacctatatatgacttgttatgctggctggctaagctactctgcttggactgctgtttagccttgatttggttgtgaaataaagggataactaaaataacatgattgatagagtagaatccggctaacttatgcaggggaagtatggagttgagttccttacacttgcactcaaagcagctgactcccgatcctacaatctagctactctgcaacttgtttcataaggtatgctagctagcaagtttgcacacaaagtaaggccagcattgctctcaaggtctgcacgtattatattattatacttctctagattaacttttgacaatggttacagcggtccctaccagtaacagaaacaatggtgtttggcggacgctgg

SEQ ID NO: 63187 - DNA, 4294 bp, Oryza sativa
  Clone ID: PAT_MRT4530_64454C.1
gcgtactttccttcaatttcgtttccaaagagttggatcacagtacgtgtgtttagctagaggaagctggtggtggcgagaccatggtgggcaagggcaacgagtgcgccgcagctcgccgccgcttcagcctccgggcggcggcggcgtcgtcgtcgtcgtcgtccttcctcccctgtctcttgctggcggcggcgctctccgccggctgctgccgcgcgcacgcggcgacggcccgggccccgcgcagtctcttggcccgctttccgacgacgaagatgacatcggagttggagatggaggccggccggtacgtcgacgacaggtcgcaggcggcgaggacgaacaacaagatcaccaacctgcaggtgtcgttcgtcggccacggacatgatactccagcagatggagaagggcaattcgctgatgctgcatacccggcgaagtggaaaccagatcaggatccgtccacgccatcgctggtcgttgctcatcatctaccgaatggcaatgctcccttcattgatgctgcttacccagtcaagtggagtccacgtgctgatgggcctcctaaacaaccagccaccttccctgcttctccaaatggtgagaaggccgaattcactgattctgcttactcggtaaaatggagtccacgtagtgttgcacctcctaaagcaccgggcatctttgctcaacattctaatggtaacaaggcccaattcactgatgctggttacccagtcgactggaatccacgtagtgttgcgcctcctactccaccggctgccttgtcttctgtggctcatccagctgcaggcatacatatccagcgcgggatgctcttcttaatgaagaagttgcatcctggcgccgtcttgccggaatgaggaaccttcaacagcaagcctcgtttggggaagtgtcatccgaggagatcagcgatgccaataggaagaggatgccagaccagtcaggactccagataaaagggagggttcagcaagcattgttggaataccaacaatacacaggtggcagcaattccatgcatggggatatcggcaaggcagctagagcagtgaagagactcaagaaggctgcagagggtgaggacacagacgatatggaggcaaccagccatggggccgctgggaacgcggcgacagttcgtgacctttgtgccttagtgaaggaggcaggttcccatattgtgtttttaagtgagactaggcaaaagattgagaaggttcgtaggctgcggaatagattgggtttgaagggttttgctggggttaacagtgatgggatgagtggggttaagcaagtttcggatcccccgtggttagtggtgggtgattttaatgagactctttggcagtttgagcacttctctctgaaacaacgaagtgagctgcaaatgcaagcctttagggatgtggtccagagatgtgatctccatgatctggggttctcgggggtgccatacacttatgataataggagagaaggccgcagcaatgttaaagtgcgcctagactacgcccttgcagatgatgggtggaggggactgttctctacagcacaggatctgcgcgacattaatcaagctctgtttaggatgatgtctgatcttcgcacatggattaaacttaatggaaccctgttgaacacctttgctccatcacgaggtctgcgtcagggtgatcctctttcgcccttcctattcctttttgtggctgatggactgtccttgttactagaagagaaagtggatcagggagctatgaacccaattcagatatgccggcgtgctcctgctgtgtcgcatttactgtttgcggatgacacgctgttgttctttaaagcggcaaatgatcaggcggtagtgatgaaagaagttctcgaaacttatgcttcctgcactgggcaattgataaatccttgcaaatgctccatcatgttcgggcaaagctctcctactgctgtccaaaatcagataaagcagaccctgcagataagtaactcctttgaagataaatatttgggctttccgatgcctgagggtagaatgaccaaaggaaaattccaaagcctccaggagagattatggaagagaattatgctgtggggggagaaacttctgtcaactggggggaaggagattttgattaaagcggtcctacaggccatgcctgtttatgttatgggactcttcaagctcccggagtcggtctacgaggaattgacaaaactggttcgtaatttctggtggggagcagagaaagggaagaggagaacgcactggaaatcctgggactgtttgattgctcggaagttgaagggaggtatggggtttagggatttcaggctgtttaatcaggcacttctagctagacaagcctggagattgttggacagaccagacagtctctgtgctagaattttgaaggccaaatactacccgaacggttctctcattgatacaagttttggaggtaatgcctctccaggctggagagcgatcgaatatggtttagaattactgaagaagggcatcatatggcgcattggcaacgacctgattgatcagtccgagtcctgggatactgacaaaatctcgcagcatttcctgcccatggacgcagaggccatcctaaacattcgtttatcttcaaggctggaggatgacttcattgcttggcatccggatagactggggagattttctgtcagaagtgcttatcatctggcaatagctctggcacaggttgatgaaggctcgagttcgtccgggaatggaaatagcagagcctggaatgccctttggaaatgcaatgcgccccaaaaggtgaagatttttgcctggcgagctattactaacagccttccaacattggaaaataagaagaagaggaagcttgaagtttcagacatctgcaccatttgtggggtggagtcagaatatgttgttcacgctttgtttcgctgcccacatgcccggcaattctgggaagcgatgactgttgatatgaagcttaaccctctcagcaacattcgcaatggagatccgaaagtgatcttggacctattggagcagtcgcagccggaggaacaggttatgcttttaatggtactgtggcgaatctggcacacacggaatgaaatagtgcatggcaaaccagccccaggaatactagtgtccaaacgtttcattgaaagctatgtcctctcccttgctgagatcaagcaacacccccaagcaagtcctgagaaggggaaacatgttgtggatgtggttctaaagaagtcgcacaacatcaaacggagtcaagaacctgttcctgacaaatggtcgaagccgctcctaggaagcatgaagctgaatgttgatggctcattccaggagagtgacggcaagggtggtataggcgctgtgttgcgcaactgcacaggagaggttatttttgctgcttgtggacatgttgatcgctgtagcagtgctttggaaacggaactccttgcctgcagggatagtcttgccctcgccctacaatggaccctgctgccaatagtgattgagacagactgcttggcgatgatccatcttttccgcgatgcaacaggcacgaagctgacgctggcgcacgacgaccacggcgtggctgcagcggcgccaaggttcatcatctacaaggacaaggccgacgccgtgccgtccaacctccgcgccatggacgccatcctcgccatgttcggcatcctccctggatccgacaaggcggcgcaggtcgccgacaccctccgcacctgcggcgaactgacggccgccggcggcgaggagccacgccacctcccgcgaggcggtgctcgacttcgccgcctcggcgctgggcaccagcgcgccgcgcgcgccgacgcggtggcgctgagggtcgacctccacgccgtcgccggcgtgggcctgggcggcgccactgccgtcgacgtgtgccacgtcaacaccaccacctgggacagtgcctacttcgagctcctcaaggcaagccgtggcgacgccatctgccactacatgccgcagggctatgttctgtggctagccaattgagagtatttcctacaaacacctgatcgtagctactctacctttcatgattgatgcttgatgcatctctcgctgctatcttaataaaataaaactgatggtgtgctctcttctcgtcctcgactcctttttttctttttcttttttttttcgaagaacagtgaaggaagctattctaattactgttgc

SEQ ID NO: 63188 - DNA, 491 bp, Oryza sativa
  unsure (1)..(491): unsure at all n locations
  Clone ID: PAT_MRT4530_64455C.1
gtttgagttcantcctctctcgcttccatggcgctcctcgccgtccacgccatgggcgcgtccccgggcaacttcccctcctcccaccaacacgccgccgtctcctcctactgngcgctccccgccgccgcgcattctcccgctcccgctctcgcgtcccgccgccgccgccgccaccctctngggcccgctcactccagttcttgaaatttactgcgggagaagggacnagaanncnanaagggaaaaaggttcnaccnctcctncngaaatgcgaaggcgcgcnacnagaaaaaaggaactggcctgcncgggtgttcncnncncctgcgcctccnaaganngacanttcnacaanggnaaagtccccccatcganatcaacnaaaaatccnggaataggttgtctgaatttccccctgaatntggtttaccttgancttaccttttgtctantctntnccaaacactgttcttgaaattanttaccgt

SEQ ID NO: 63189 - DNA, 2844 bp, Oryza sativa
  Clone ID: PAT_MRT4530_64456C.1
atggtggtggagaaggactggtacaacttcacttcgccggacctctattccgacaacttctccaagaaatatccaaagggtgtcccgctagtgattgacttcgccatcagggatggtttttgcccagcggcaggccaggcgccgccggcgaactatgcttgtgtcagcagcaacagctcatgcgtcaacgtgaccaacgtttgcgacggtggcgagcaggacaagttcccagtatgctttggtgtggcctccggacttgtaggaacggagattaactccctcaaggatgatgtttatactattaagaagaaggccacatattctgacaacaatagcttagttcggaattttctagatgctcacaaagagaaaaggaaagcaactgagctgtttgataaggatatcacgctggcagaagacttggacgttcttgatggtctcgtgaggattgctgtggaatgtttaaaccttgacgtggatcaacgaccagaaatgacaaaatataaatacaaggcacagtggtggccgaaggtgcggttcaaagtttttccggagatagggctaggcgttgtcaaccccgtctctttgtttgttggatctagcggaagtcccatggcggccaatgtcggtgggggtgataaagggatcgtcattgggataatttcccacccgaagccgacgagcggtaatgagacggacgcggtgattctcgacaggattcctctgaagatgatcaagggagcagcgggcacatctgatcagggccaggaacacacaacggctgcgaggaggggatctgcagagaacaaccaagttgatgcaacacagggtcctacggtgttcaccgaaggagatctggtggaggatgatgaggatgtggttgtggtgaatattgaggatgatgaactgcagactgctggcctgtggacgatcttggcgaggttctattctctgagaactccgaaccaagtggccctgtttgacgacatgcgcagagcttggagattgagagcagatataagctacaaatcactacgtgacaacatgttcatcataaccttctcggcagagggagactatgattttgtcattaaagggggtccttggattcatagaggagatgcgctcctggctgggaagatggatgttacgggggacaaaactcagggaacatcgatggttgtccctgctgggaagctagcccagcaacaatcggagaaggaagcacccaagaagactgatggtgatgaaatttctgcttctgagatgataccagccatgaggaaccttcaacagcaagcctcgtttggggaagtgtcatccgaggagatcagcgatgccaataggaagaggatgccagaccagtcaggactccagataaaagggagggttcagcaagcattgttggaataccaacaatacacaggtggcagcaattccatgcatggggatatcggcaaggcagctagagcagtgaagagactcaagaaggctgtagagggtgaggacacagacgatatggaggcaaccagccatggggccgctgggaacgcggtgacagttcgtgacctttgtgccttagtgaaggaggcaggttcccatattgtgtttttaagtgagactaggcaaaagattgagaaggttcgtaggctgcggaatagattgggtttgaggggttttgctggggttaacagtgatgggatgagtgggggtctggctttattctggcatgagtctattcatgtggaaattataagtatgaatgagagatatattgacgcgtatgttcgtttatctgtgaatgctcctgtctggcatgctacttttgtgtacggggaacctagagtggaaaacagacatcgtatgtgggcgttgttaaattcaattaagcaagtttcggatctcccgtggttagtggtgggtgattttaatgagactctttggcagtttgagcatttctctctaaaacaacgaagtgagctgcaaatgcaagcctttagggatgtggtccagagatgtgatctccatgatctggggttctcgggggtgccatacacttatgataataggagagaaggacgcagtaatgttaaagtgcgcctagaccgcgcccttgcagatgatgggtggaggggactgttctctacagcacaggcggtagtgatgaaagaagttctcgaaacttatgcttcctgcactgggcaattgataaatccttccaaatgctccatcatgttcgggcaaagctctcctactgctgtccaaaatcagataaagcagaccctgcagataagtaactcctttgaagataaatatttgggctttccgacgcctgagggtagaatgaccaaaggaaaattccaaagcctccaggagagattatggaagagaattatgctgtggggggagaaatttctgtcaactgggggaaaggagattttgattaaagcggtcctacaggccatgcctgtttatgttatgggactcttcaagctcccggaatcggtctgcgaggaattgacaaaactggttcgtaatttctggtggggagcagagaaagggatgaggagaacgcactggaaatcctgggactgtttgattgctcagaagttgaagggaggtatggggtttagggatttcaggctgtttaatcaggcgcttctagctagacaagcctggagattgttggacagaccggacagtctctgtgctagaattttgaaggccatatactacccgaacggttctctcattgatacaagttttggagattgtggagggatccctggattccgcggagctattcaagaagacccatctcagctaaaagaaattgcagactga

SEQ ID NO: 63190 - DNA, 2457 bp, Oryza sativa
  Clone ID: PAT_MRT4530_64457C.1
atgaggaaccttcaacagcaagcctcgtttggggaagtgtcatccgaggagatcagcgatgccaataggaagaggatgccagaccagtcaggactccagataaaagggagggttcagcaagcattgttggaataccaacaatacacaggtggcagcaattccatgcatggggatatcggcaaggcagctagagcagtgaagagactcaagaaggctgcagagggtgaggacacagacgatatggaggcaaccagccatggggccgctgggaacgcggcgacagttcgtgacctttgtgccttagtgaaggaggcaggttcccatattgtgtttttaagtgagactaggcaaaagattgagaaggttcgtaggctgcggaatagattgggtttgaagggttttgctggggttaacagtgatgggatgagtggggttaagcaagtttcggatcccccgtggttagtggtgggtgattttaatgagactctttggcagtttgagcacttctctctgaaacaacgaagtgagctgcaaatgcaagcctttagggatgtggtccagagatgtgatctccatgatctggggttctcgggggtgccatacacttatgataataggagagaaggccgcagcaatgttaaagtgcgcctagactacgcccttgcagatgatgggtggaggggactgttctctacagcacaggccatgcctgtttatgttatgggactcttcaagctcccggagtcggtctacgaggaattgacaaaactggttcgtaatttctggtggggagcagagaaagggaagaggagaacgcactggaaatcctgggactgtttgattgctcggaagttgaagggaggctggagagcgatcgaatatggtttagaattactgaagaagggcatcatatggcgcattggcaacgacctgattgatcagtccgagtcctgggatactgacaaaatctcgcagcatttcctgcccatggacgcagaggccatcctaaacattcgtttatcttcaaggctggaggatgacttcattgcttggcatccggatagactggggagattttctgtcagaagtgcttatcatctggcaatagctctggcacaggttgatgaaggctcgagttcgtccgggaatggaaatagcagagcctggaatgccctttggaaatgcaatgcgccccaaaaggtgaagatttttgcctggcgagctattactaacagccttccaacattggaaaataagaagaagaggaagcttgaagtttcagacatctgcaccatttgtggggtggagtcagaatatgttgttcacgctttgtttcgctgcccacatgcccggcaattctgggaagcgatgactgttgatatgaagcttaaccctctcagcaacattcgcaatggagatccgaaagtgatcttggacctattggagcagtcgcagccggaggaacaggttatgcttttaatggtactgtggcgaatctggcacacacggaatgaaatagtgcatggcaaaccagccccaggaatactagtgtccaaacgtttcattgaaagctatgtcctctcccttgctgagatcaagcaacacccccaagcaagtcctgagaaggggaaacatgttgtggatgtggttctaaagaagtcgcacaacatcaaacggagtcaagaacctgttcctgacaaatggtcgaagccgctcctaggaagcatgaagctgaatgttgatggctcattccaggagagtgacggcaagggtggtataggcgctgtgttgcgcaactgcacaggagaggttatttttgctgcttgtggacatgttgatcgctgtagcagtgctttggaaacggaactccttgcctgcagggatagtcttgccctcgccctacaatggaccctgctgccaatagtgattgagacagactgcttggcgatgatccatcttttccgcgatgcaacaggcacgaagctgacgctggcgcacgacgaccacggcgtggctgcagcggcgccaaggttcatcatctacaaggacaaggccgacgccgtgccgtccaacctccgcgccatggacgccatcctcgccatgttcggcatcctccctggatccgacaaggcggcgcaggtcgccgacaccctccgcacctgcggcgaactgacggccgccggcggcgaggagccacgccacctcccgcgaggcggtgctcgacttcgccgcctcggcgctgggcaccagcgcgccgcgcgcgccgacgcggtggcgctgagggtcgacctccacgccgtcgccggcgtgggcctgggcggcgccactgccgtcgacgtgtgccacgtcaacaccaccacctgggacagtgcctacttcgagctcctcaaggcaagccgtggcgacgccatctgccactacatgccgcagggctatgttctgtggctagccaattga

SEQ ID NO: 63191 - DNA, 1440 bp, Oryza sativa
  Clone ID: PAT_MRT4530_64458C.1
atggtgggcaagggcaacgagtgcgccgcagctcgccgccgcttcagcctccgggcggcggcggcgtcgtcgtcgtcgtcgtccttcctcccctgtctcttgctggcggcggcgctctccgccggctgctgccgcgcgcacgcggcgacggcccgggccccgcgcagtctcttggcccgcttcccgacgacgaagatgacatcggagttggagaaggaggccggccggtacgtcgacgacagctcgcaggcggcgaggacgaacaacaagatcaccaacctgcaggtgtcgttcgtcggccacggacatgatactccagcagatggagaagggcaattcgctgatgctgcatacccggcgaagtggaaaccagatcaggatccgtccacgccatcgctggtcgttgctcatcatctaccgaatggcaatgctcccttcattgatgctgcttacccagtcaagtggagtccacgtgctgatgggcctcctaaacaaccagccaccttccctgcttctccaaatggtgagaaggccgaattcactgattctgcttactcggtaaaatggagtccacgtagtgttgcacctcctaaagcaccgggcatctttgctcaacattctaatggtaacaaggcccaattcactgatgctgcttacccagtcgactggaatccacgtagtgttgcgcctcctactccaccggctgccttgtcttctctggctcatccagctgcaggcatacatatccagcgcgggatgctcttcttaatgaagaagttgcatcctggcgccgtcttgccggaaggcacgaagctggcgctgccgcacggcgaccacggcgtggccgcggcggcgccaaggttcatctacaaggacaagggcgacgccgtgccgttcgacctccgcgccatggacgccatcctcgccatgttcggcatcctccctggatccgacaaggcggcgcaggtcgccgacaccctccgcgcctgcagcgagctgacggccgccggcggcggcggcgaggagccacgcgcctgctgcgccacctcccgcgaggcggtgctcgacttcgccgcctcggcgctgggcaccagcgcgccgcgcgcggtcaccacgctcgtgcacgggagggagccccgcaggtacgtggtagcggccgacggcgtcgcccggatcggcggcgacgccgtggtggcgtgccaccctatgccatatctatacgaggtgtactactgccaccggccagccgacgcggtggcgctgagggtcgacctccacgccgtcgccgacgtgggcctgggcggcgccactgccgtcgccgtgtgccacgtcaacaccaccacctgggacagtgcgtacttcgagctcctcaaggcaagccgtggcgacgccatctgccactacatgccgcagggctatgttctgtggctagccaattga

SEQ ID NO: 63192 - DNA, 456 bp, Oryza sativa
  unsure (1)..(456): unsure at all n locations
  Clone ID: PAT_MRT4530_64459C.1
acctcagtcatgcagcaggagaatcacctcaaagaaatggaagatgatatgcaatcctttgtatcttcaaaagatgaggctgctcaagggctaagggagagcatacaaaagttgaaacttctccatggttcaggcattacagctttggatagtttagcaggtgaaattgacatgaactctcagtcaacatttgagagattgaactcgcaagtgcaatcacacacgtcatctcttgagcaatgttttggaggaatngcttcagaagcagacaatttgttaaatgagcttcagtgtagcctttctaaacaagaagagaggttaacccaatttgcaaagaagcagcgggagggacacttacgagctgtggaagcatcacggtccatctcaaagatcacttgcttgtttcttcagctcactttgatgttcatgcatctaagctcacggagtattttggan

SEQ ID NO: 63193 - DNA, 312 bp, Oryza sativa
  Clone ID: PAT_MRT4530_6445C.1
gggatccaacaagtaaagctggtgactgttttttggagttacatgaaatggttcactgaatggtttttggttgaacctgaaaaaaagtgacactggtgaaagattagagggcttggtgaagcagttacatgtccaattttattggtgttcagctgcgctatacttatggttgttaggtgctgatcgatcttctttgacctgagggctgtgaaaacacctgctttttgtttcagaacacggaccttaatctggggggccttgtaattttcctgaaaaactgtttgcactggaaaaattgccatctgggcagtt

SEQ ID NO: 63194 - DNA, 5490 bp, Oryza sativa
  Clone ID: PAT_MRT4530_64460C.1
atggagatctcctctgatctgctcctgatgtctccgggggttttacccgccgtgggttgttctgggggggatttcctccctgtgttgaaacgtgatctggtagggtggcctgatcatactcgtataggagataagttgaaggctttccctttaggcggattgatctatgggaaaggttcgttctctgctttccgtattgttccaggggatctgtggcccttgcgaaattctagaagggggaggagattgaatctgttttggtatccgaagttcgagttgtattggagacctaattctgtggcattgcagtataaatacaagtcacagtggtggccgaaggtgcggttcaaagtttttccggcgatagggctaggcgttgtcaaccccgtctctttgtttgttggatctagcggaagtctcatggcggccaatgtcggtgggggtgataaagggatcgtcattgggacgatttcccacccgaagctgatgagcggtaatgagacggacgcggtgattctcgacaggattcctctgaagatgatcgagggagcagcgggcacatctgatcagggccaggaacacacaacggctgcgaggaggggatctgcagagaacaaccaagttgatgcaacacagtgtcctgcagtgttcactgaaggagatctggtggaggatgaggaggatgtggttgcggtgaatattgaggatgatgaactgcagactgctggcctgtggacgatcttggcgaggttctattctctgagaactccgaaccaagtggccctgtttgacgacatgcgcagagcttggagaggagatgcactcctggtagcgagttttgatggcattacgtgcccatcgaatgttcctttggatgttgttccgatctgggtgcgcatatatgacctccctctggtgttgatgacaaaggtaagaggtgggatgtttgggagcaaactcggcaaagttcgtgaggtagacgtgagggatgatggacgcaacaaacatgacttcttccgcattattcgtgttgatctccctgtcaagcgtcctctgaaatcacagatagctataaggatgactgtccaaggcaaggaggtccttcgcaggttcgatttacgttatgagcggattgcaatagaagatctgccaatgaggatcaacctttccaattctcagctgagctacgatgctcccccccttaaaccttttgagaagaagatcagtaaagtgaaagctgcccaaacatcaagtgttgcacgtaacttgttcttcagaggggcaggaagtgctagttcatcgtcctccagacacaaacaagatggtcagatgcaggaagcaataccgcccagagttgatgcccatgatgggtttgagtttaaggaaagggaaggggacactgcaattgatgagatgttagctcaacaggctgggaagatggatgttacgggggacaaaactcaggaaacatcgatgatgataccagccatgaggaaccttcaacagcaagcctcgtttggggaagtgtcatccgaggagatcagcgatgccaataggaagaggatgccagaccagtcaggactccagataaaagggagggttcagcaagcattgttggaataccaacaatacacaggtggcagcaattccatgcatggggatatcggcaaggcagctagagcagtgaagagactcaagaaggctgcagagggtgaggacacagacgatatggaggcaaccagccatggggccgctggagcaatgagttgcttggcttggaactgtcgcggtatagggaacgcggcgacagttcgtgacctttgtgccttagtgaaggaggcaggttcccatattgtgtttttaagtgagactaggcaaaagattgagaaggttcgtaggctgcggaatagattgggtttgaagggttttgctggggttaacagtgatgggatgagtgggggtctggctttattctggcatgagtctgttcatgtggaaattataagtatgaatgagagatatattgacgcgtatgttcgtttatctgtgaatgctcctgtctggcatgctacttttgtgtacggggaacctagagtggaaaatagacatcgtatgtgggcgttgttaaattcagttaagcaagtttcggatcccccgtggttagtggtgggtgattttaatgagactctttggcagtttgagcacttctctctgaaacaacgaagtgagctgcaaatgcaagcctttagggatgtggtccagagatgtgatctccatgatctggggttctcgggggtgccatacacttatgataataggagagaaggccgcagcaatgttaaagtgcgcctagactacgcccttgcagatgatgggtggaggggactgttctctacagcacaggtgtttcatctgtcctctcctagatcagaccattgccccatccttgtcaaattttcttctgaagaccttcacaggaatcctgtgaagtgtgtccattatgaaatttactgggaaagagaccctgcaatctctgaagttatagcagaatcttggggcgtttccggagttaagcaggatctgcgcgacattaatcaagctctgtttaggatgatgtctgatcttcgcacatggagtaagaaaaagttcaggaatgtcagccgggagattgagaaaaatagaaagaaactatctgaacttcttctaagtaatgccgacaatagggaaataagacgggtgtccgatcaaatgaatgaacttctgtaccgtgaggagatgatatggctgcaacgatctcgaattgcttggctgaaagaaggtgatagaaatacacgtttctttcacagcaaagcagtgtggagagctaagaagaataagattacaaagctacgggatagtgacggtactgttcacagtacgacaaaagagttggaacgtatggcaactgagtatttccaaaggctgttcactgccgaccccagtattgatcattcactaagaccaatcctggatgatctggtgtcacagaaccagagtgcctttgtccctggtagattgatacaagataatgccctgatagcattcgaatgcttccaccatatacagaggaataaaaatcctgagaatgcttactgcgcatacaagttggacttgtccaaagcgtatgaccgtgtagactggaaatttttggaatatgcagttaaacttaatggaaccctgttgaacacctttgctccatcacgaggtctgcgtcagggtgatcctctttcgcccttcctattcctttttgtggctgatggactgtccttgttactagaagagaaagtggatcagggagctatgaacccaattcagatatgccggcgtgctcctgctgtgtcgcatttactgtttgcggatgacacgctgttgttctttaaagcggcaaatgatcaggcggtagtgatgaaagaagttctcgaaacttatgcttcctgcactgggcaattgataaatccttgcaaatgctccatcatgttcgggcaaagctctcctactgctgtccaaaatcagataaagcagaccctgcagataagtaactcctttgaagataaatatttgggctttccgatgcctgagggtagaatgaccaaaggaaaattccaaagcctccaggagagattatggaagagaattatgctgtggggggagaaacttctgtcaactggggggaaggagattttgattaaagcggtcctacaggccatgcctgtttatgttatgggactcttcaagctcccggagtcggtctacgaggaattgacaaaactggttcgtaatttctggtggggagcagagaaagggaagaggagaacgcactggaaatcctgggactgtttgattgctcggaagttgaagggaggtatggggtttagggatttcaggctgtttaatcaggcacttctagctagacaagcctggagattgttggacagaccagacagtctctgtgctagaattttgaaggccaaatactacccgaacggttctctcattgatacaagttttggaggtaatgcctctccaggctggagagcgatcgaatatggtttagaattactgaagaagggcatcatatggcgcattggcaacggtaaatcagtcagattgtggagggatccctggattccgcggagcttttcaagaagacccatctcagctaaaagaaattgcagactgagatgggtttcagacctgattgatcagtccgagtcctgggatactgacaaaatctcgcagcatttcctgcccatggacgcagaggccatcctaaacattcgtttatcttcaaggctggaggatgacttcattgcttggcatccggatagactggggagattttctgtcagaagtgcttatcatctggcaatagctctggcacaggttgatgaaggctcgagttcgtccgggaatggaaatagcagagcctggaatgccctttggaaatgcaatgcgccccaaaaggtgaagatttttgcctggcgagctattactaacagccttccaacattggaaaataagaagaagaggaagcttgaagtttcagacatctgcaccatttgtggggtggagtcagaatatgttgttcacgctttgtttcgctgcccacatgcccggcaattctgggaagcgatgactgttgatatgaagcttaaccctctcagcaacattcgcaatggagatccgaaagtgatcttggacctattggagcagtcgcagccggaggaacaggttatgcttttaatggtactgtggcgaatctggcacacacggaatgaaatagtgcatggcaaaccagccccaggaatactagtgtccaaacgtttcattgaaagctatgtcctctcccttgctgagatcaagcaacacccccaagcaagtcctgagaaggggaaacatgttgtggatgtggttctaaagaagtcgcacaacatcaaacggagtcaagaacctgttcctgacaaatggtcgaagccgctcctaggaagcatgaagctgaatgttgatggctcattccaggagagtgacggcaagggtggtataggcgctgtgttgcgcaactgcacaggagaggttatttttgctgcttgtggacatgttgatcgctgtagcagtgctttggaaacggaactccttgcctgcagggatagtcttgccctcgccctacaatggaccctgctgccaatagtgattgagacagactgcttggcgatgatccatcttttccgcgatgcaacaggtgctaaatcggagctggcgtttttaatcagggagatagattctctcttggtgggaaatagggatattagcttcagtaagtgtcttagaagtcaaaataatattagtcactatttagcaaataagggccgttgtgacaagatcacacagttttggccggacaataagtgtacttttatctcgcagtttatctgtgaggaggctaatgagtaa

SEQ ID NO: 63195 - DNA, 4435 bp, Oryza sativa
  Clone ID: PAT_MRT4530_64461C.1
cgtcccgcacgcactcccgccctctcctcccgcgccaccgagccctctcgctcccttacacgaggcgagttctgctcccgttctccccagtgctggaaccaccacggcgtccccgagtccccctcgtcgtcctcttcttcgtcgcccccgccttctggggcggtctgctttccctccggcgcaggccggagcgagaggggaaaagggaagcgacgatctctgcccttctagaagggtttgggatttcttgactggacgacctcgtgcgatttcgggaggcaggagccatgaacggcaataagcagtccctgatatacagcttcgtggccaagggctccgtcgtgctggccgagcacaccgccttctccggcaacttcagcaccatcgccgtccagtgcctccagaagcttccccccaacacctccaagtccacctactcctgcgatggccacaccttcaacttcctcgtcgaccgcggcttcgtgtttctcgtcgttgcggatgaggccgttggaaggagcgtgccgtttgtgttcctagatagggttaaggaagacttcatgcagcggtatggctccagtatcgacgaggagggtcaacacccgctcgccgatgatgcagatgatgatgacttcctcttggaggaccgatttagcatcgcctacaatcttgaccgggaattcggaccgaggctgaaggatcacatgctgtattgtattaatcatccagaggaaattagcaagctctccaaagtgaaagcacacctcacggaggtcaaagggattatgatggacaacattgagaagatattggaacgtggagagaagattgagcttttggtcggcaagactgaaaccttacaatcacaggctgacagcttccacaggcatggaagagagctcaggcgtaagatgtggcttcagaacctgaggtttaagttgatggtgggtggtgctgttgcggcgttgattctcttcctctggctgattatttgcgggggcttcaagtgctagaacattgaaagcctttttctttgttttgcattcgatgtgtttaccgtgtcgtgtgcatatataacgaccagcaaatcctgctttcgatatgcttcgtgcagagttaaatctccttatggacctttattccttgtagcctgttctcatgtttcatagtattacaataggggggctctggaaatggaatacttgtgtaaacaaaccttgtgaaaggagacaacttagctatctgtattatgtacattctgaaatgctaatagcttatttcaatctcaaaaaaaaaaaaaaaaaaaaaacgttgcgagtttgagcacttctctctgaaacaacgaagtgagccgcagatgcaagcctttagggatgtggtccagagatgtgaactccatgatctggggttctcgggggtgccatacacttacgataacaggagagaaagccgcggcaatgttaaagtgtgcctagaccgcgcccttgcagatgatgggtggaggggactgttctctacagcacaggtgtttcatctgtcctctcctagatcagaccattgccccatccttgtcaaattttattctgaagatcttcgcaggaattttgcgaagtgtgtccattatgaaatttattgggaaagagaccatgcaatctctgaagttatagcagaatcttggggcgtttccggagctaagcaggatctgagcgacattaatcaagctctgtttaggatgatgtctaaccttcgcccatggagtaagaaaaagttcaggaatgtcagccgggagattgagaaaactagaaagaaactatctgaacttcttctaagtaataccgacagcagggaaataagacgggtgtctgatcaaatgaacgaacttctgtaccgtgaggagatgatatggctgcaacgatctcgaattgcttggctgaaagaaggtgatagaaatacacgtttctttcacagcaaagcagtgtggagagcaaagaagaataagattacaaagctacgggatagtgacggtactgttcacaatacgacaaaagagttggaaagcatggcaactgagtatttccaaaggctgttcactgccgaccccagcattgatcattcgagagtcactagcctgataaagccgaaagtcacggatgcgatgaatgaggaactatgcaaaaccgtcagtgaagaggaaattgcaaatgccctgttccaaattggtccattaaaagcacccgggccagatggattccctggtcggttctatcagaggaattgggctatactaaaggacgacattgtgcgagcagtacaagaatttttctcttcgggtaccatgccttcgggggtcaatgagactgccattgttctgataccgaaaactgagcaaccacaggaactaaaggatttcagacctatcagtttgtgcaatgtggtctataaaatagtgtctaaatgtttggtgaacagactaagaccaatcctggatgatctggtgtcgcagaaccagagtgcttttgtccctgtggcaaatgatcaggcggtagtgatgaaagaagttctcaaaacatatgcttcctgcactgggcaattgataaatccttccagatgctccatcatgttcgggcaaagctctcctactgctgtccaaaatcagataaagcagaccctgcagataagtaactcctttgaagataaatatttgggctttccgacgcctgagggaagaatgaccaaaggaaaattcaaaagcctccaagagagattatggaagagaattatgctgtggggtgagaactttctgtcaaccgggggggggaaggagattttgattaaagctgtcctacaggccatgcctgtttatgttatgggactcttcaagctcccggagtcggtctgcgaggaattgacaaaactggttcgtaatttctggtggggagcagagaaagggaagaggagaacgcactggaaatcctgggactgtttgattgatcagaagttaaagggaggctggagagcgatcgaatatggtttagaattactaaagaagggcatcatatggcacattggcaatggtaaatcagtcagattgtggaaggatccctggattccgcggagctattcaagaagacccatctcagctaaaagaaattgcagactgagatgggtttcagacctgattgatcagtccgggtcttgggataatgacaaaatctcacaccatttcctgcccatggacgctgaggccatcctaaacattcatttatcttcaaggctggaggaggacttcattgcttggcatccggatagactggggagattttctgtcaggagtgcttatcatttggcagtagctctagcacaggttaatgatggctcgagttcatccgggaatggaagtagcagagcttgtaatgccctttggaaatgcaatgcgccccaaaaggtgaagatttttgcctggcgagctattactaacagccttacaacattggaaaataagaagaagaggaagcttgaagtttcagacatctgcaccatttgtggggtggagtcagaatatgttgtccacgctttgtttcactgcccacatgcccggcaactctgggaagcgatgagtgatgatatgcagcttaaccctctcagcaacattcacaatggagattcgaaagtgatcctggacctgttggagcagtcgcagccggaggatcaggttatgcttttaatggtactgtggcgaatctggcacacacggaatgaaatagtgcatggcaaaccagccccaggaatgcaactagtgtccaaacgtttcattgaaagctatgtcctctcccttgctgagatcaagcaacacccccaagcaagtcctgagaaggggaaacatgttgtggatgtggtcctaaagaagtcgcacagcatcaaacggagtcgagaacctgctcctgacaaatggtcgaagccgctcccaggaagcatgaagctgaatgttgatggctcattccaggagagtgacggcaagggtggtataggcgctgtgttgcgcaactgcacaggagaggttatttttgctgcttgtggacatgttgatcgctgtagcagtgctttggaaacggaactcctcgcctccagggatggtcttgccctcgccctacaatggaccctgctaccaatagtgattgagacagactgcttggcgatggtccatcttttccgcgatgctacaggtgctaaatcggagctggcgtttttagtcacggagatagattctctcttggtgggaaatagggatattagcttcagtaagtgtcttagaagtcaaaatcttattagccactgtttagcaaataagggccgttgtgacaagatcacacagttctggccggacaataagtgtacttttatctcgcagtttatctgtgaggaggctaatgagtaa

SEQ ID NO: 63196 - DNA, 549 bp, Oryza sativa
  Clone ID: PAT_MRT4530_64462C.1
acggcacgaggggtatacataccggaacctcatctatccagccagacaggttagacatacctgtattaatttttgctcttcacatccggttctacagtaacatgatactgcaccgttgttacagaactgacaatttctctggtttaaactcgtagaattttacatgtataaacattgtggagaggagttctagttttgcaatccgtatgaatgacaatgatttcgttaagactgaaatacttggtaaccgttggaatatgtgttatgtgtgatttttagtccttattgataaatcaatatactcaattgacttagattggaagttgaaccctgctaattaaaaaaaaaccttatgttaaagaaatgaggagatacatggttctatctatggcttcgaatatttgacttttaagacaagatttggttgagcttttcgaattgagaccaaatatttagaagtgatggctcaagtccaagctcaatgttttattcaataatatccattaatactggcttgagaactagacaacatgtaaatacacttcaatt

SEQ ID NO: 63197 - DNA, 1553 bp, Oryza sativa
  Clone ID: PAT_MRT4530_64463C.1
aaaaacgaggcccccattccctcccctctcccctctccgccctagagctcgacggcggcggcaacaagggctgggggatgaagatatccgtgaagacactcaagggatccaccttccagatcgaggtggactccgcgcagaaggttgctgatgtgaaaaggataatcgagactactcaaggacagcacatttacccagctgagcaacagatgctcattcatcaggggaaggtgctcaaggatgacaccacattggatgaaaacaaagttcttgaaaacagcttccttgttataatgcttagacagggtaagggctcatcaagttcagctcctgctacatctaaggcaccctcaaatcaggctccccctactcaaacagtgcctgcagctcctgcatctcaagcaccagttgcaccagcaactactgtacctgtcactgtcagtgctcctaccccaactgccacagcttccccagctcctgctgttgctgtatcctctgaagctgataactacggtcaggccacctcaaaccttgttgctggcagcaatctagaggcaacaattcaatcaattcttgaaatgggtggtggaatatgggatagagacattgtgctgcatgctctaagcgctgcattcaacaacccggagagggctgttgaatatctgtactctggtgttcctgagcagatggacattccagttccacctccgagtatacagccagccaatcctacccaggcttcacaggcaactcaaccagcagctccatcaattctttcgtctggaccaaacgctagtcccttggacctctttcctcaagcccttccaaatgcttccaccgatgctgctggtctaggaaatcttgatgctttgcgcaataatgcacaattccgaaccttgctttctttagtgcaagccaatcctcaaattttacagccattgcttcaagaattggggaaacaaaatccccagattttgcagctgattcaggaaaaccaagctgagttcctccacttaatcaatgaaccagctgagggtgatgatgaagagaatttgctagaccagtttccagaggcaatgccacagaccatagcagttactccagaggagaatgaagccatacttcgtcttgaagcaatgggctttgaccgcgcgcttgttctggacgtgttcttcgcttgcaacaaggacgagcagctggcggcaaactatctcctagatcacatgaacgagttcgacgacgaggggccaccataagacacgcggatggaatacttgtcaagctcaaacctggtatcattggagcaaagggtttgtgacccgtagtccgtagagcaaaaggcttagtaaaacctttttattttattttatttttttgtggattcgtctccttctgttccttcttttctttcattagtctgtaattcttttcagtttggcttttactttcttgcgtacatactctagattaccttttttacagacttgataacggaggtataaaaaggttcagagcccgtctgcattccaaaaaaaaaaaaaaaaaaactcgag

SEQ ID NO: 63198 - DNA, 200 bp, Oryza sativa
  Clone ID: PAT_MRT4530_64464C.1
gaagggcgattgagtatgatagacctttatactaggcgaaccacacgaatccacggttgatgaatttcactgacactaacacagatacatcacataacacaaattcatacgtttatacacacatagtcgaacgaatccaccagctccttaatcaatcaataacacacagttttaattcagctataatcagcacacacaca

SEQ ID NO: 63199 - DNA, 960 bp, Oryza sativa
  Clone ID: PAT_MRT4530_64465C.1
atggacgccttgccggcgccgtcgccggagaagacgacgacgagggactggtcggagctgccggtggacgcgctctcggtggtctttgccaagctcggcgccgtcgaggtcctcatgggcgccggcctcgtgtgccgcccatggctcgacgccaccaagctgcctcacctatggcgatgcgtcgacatagctgccatgaagaagaagagagccgtgctgtgcgtcatggcggacgaggccgtcaagcgcgccgacggccagctcgaggcgttcatggcgggagccttcgtcaccaacaagctcctcaaacatgtaggggacagcgcgcccgctctcatgagcctttggctcgagtcgtgctcattggtgaccagcaatggactcgcccagatgatcgccatggctcctcttctcgaggagctcgtgctcagctactgccgcaaggtccgcggcggcggcggcggcggcggtggcgtctaccccgccgtcgccgaggcgtgcccgcggctgaggcggctcgaggttcgcagataccccgcgtggcgtgacgacgacggcggcggcgaccaccaccgccgccgcccgctcgggatcgcggcgatgcgcgagctgcgccacctgacgctcgtcggcgtcgccggcgccggcgacgacgagctggcggcgatcgtggacggcggctgtcctcacctggaggtcctccacgtgagcgagtgccccggcctcgccgccgtcgacgtcgccgccctgcgctccaagtgcggcggcgtcaagtgcggcggcttcacccctgcgtcgcggccgccgatgacgaccagccggcgactgcgccggcggaagtccggcgaccgtctcgcgaccgccggcccaaccggaagtactacgggccagattggaccacctgagaagtactcggcccagttaaggccagctacagtgctattcgctaatcgctactag

SEQ ID NO: 63200 - DNA, 559 bp, Oryza sativa
  Clone ID: PAT_MRT4530_64466C.1
atgaggagcagcgaggccatggagctcctgggcctcccagcgcacacccgcccgtcgccttccgaggttaaggctgcgtataggagaatggtgatggaatcgcatcctgatcgtgtcccgacgcatcagaagtctcaagccgagtcaaaattcaagcagatatcagaagcatattcttgtttgaaggatggaagaagatatgggagtaggatggaagtacatgtgatgaggtctggtgttccgacgggatttggacgatcaaataagacattggttaaagccccttttctactcataatttttgcagcggtttcattgggtggattcagcgcttcaagagcataccagcggcagaaagcaatgtgttcctctcagaatccatttcttccatagagcaaggcaattgtagcatttccctattgacaagcggagcagagttatgtgtacattgtaaaacaatcatgctgggaacagaagcaccaaatgcaagtcccatgtacattgtaaacaatcatcaagtttgtgaataaaagcatgagttgctctttgtggtttacca

SEQ ID NO: 63201 - DNA, 344 bp, Oryza sativa
  Clone ID: PAT_MRT4530_64467C.1
cggggggtcaggcgggctgggcggagcatgggtccgagtcctacttcctacgggaggtcggcggggtacggcacactaaggtggggacgcgcatagaacggtggctcaacgtctattttctcgagcggttgcgcacccctgcgcaggggagcgaaagacattgggggagggatttcaccaggtcaagaagtcgggggaagtgggacctggaagtggaaggggcagctccaccgccgccgacgcggccttcctccgaccgcattcgcttgcctctttccctttcacttgcaaggccgcattcgcttgctgttttcccgttcacctacaaggtcgcctcagcatag

SEQ ID NO: 63202 - DNA, 1353 bp, Oryza sativa
  Clone ID: PAT_MRT4530_64468C.1
gattattcataggtttaagaagatctgtagagaactgcagagtacatgtataattgagtccgaatcagaattcagagtgaagtagtagtagaaacatagttgtgattcgcaacatctgtggtacagactacagaggatatgttcgtcgttgaacattgcagaacaaattatctctctgctatgttgcaggcacagttctatatgtgcgatcatcaatttatcatgatatatatctctattcatcgttgcctccttgattccacctgaatgccgaatgaactgaaagaagcttcaccaacttggaccattttacaggtggtatagatgcaacttgtaggatcagtgaatgccaactttgcaggtatcatatagtcaaaggcttgctgatctgaactacaaaacaatgagtcctgattggctatggaaaacctcgatctccatccgaactgatgcccagacatgattgcattgcttgatcttctcattcatgtgtgccagaaatgatttcgcccatggttcttcatcacgtttggtgctcatgtcacaaggaactgaaaaactcatcagttcctgttctgactgtttggcagctgattgacgacatctcacagcatatatcctatagatatgcagagagtgcttggagagattttgtgtggcagtttccgcactttcattgcaaaacaaatatgttacaggataacccaaaagccacccattcaaagaaggcaatgcaatttgggcactctcaaggaaggtgctcagatcaataaccagtgatgttccgtcagcaatccgaaagccaaaattatccatagtggttccctctggaatttctgacatctgcccttttgcttcaggttgtataataggcagatctacatctgcatctacagggaagttggctgaaaacaggtcttggatggataaaaactcatgcagagcaccattctcttcggtttctgaaagcagtttgctacagcttttctctaggtccacaaaagcgagcttgtgctgtgaccttgcacttggtgaagcatgctcagcaagaccctttgcatgaatcaagtaaagcatatctttaataaccatcagccttagtggactcaacatgcttgactcctgccgagcatgatgcagcagggagcagagattgtcctgtagttcaggcattgtgccaccgtaatccatcagtaccacaggccgcaacccactgcagaggaacagtatatcgttgaggaggcggcgcttggagtggggccggaggcgccaccggatgcgcgtggcgatcgcctccaccacccggagcatctcctcgtactcctccgccgtcgccgccgccgccgccgccat

SEQ ID NO: 63203 - DNA, 248 bp, Oryza sativa
  Clone ID: PAT_MRT4530_64469C.1
tcagtggtaacgcccagaatctggcgcccgacatcaacacacaagcgcatatcggtgtcggcggaggtgaagggctggcggggagacgagcggcggtgaagcatgcggcgggagtggaggtggcgccgggcgatggggatgaagtagcaggaaggaaggcggtggggggaagccggcggcgggcggcggtgaagatcgcggcgcacggtggtcggcgtcggcggcggacggcggcggtgaaggagtga

SEQ ID NO: 63204 - DNA, 399 bp, Oryza sativa
  Clone ID: PAT_MRT4530_6446C.1
atgaagctgttgccctccacgctcaagctgtcattgtcctcaacgtcaaagggctggtgcggtctcttcctcgtcgtcttcggcaagtacgcgctcacggatcacgtcctcgctgacaactctcacctcaaccacaaaccattcccatcgttcatggatgcacgctctcagctcccgcttgaagatatcatgaagggctctcaaccggcagaaactgcttccgtgttcgtcgcagacaccgtcagcggcgcctctcgtcccgctagcagcaacaacggttctggtggcgttccccagaactcgaccaacggctccgtctccggcaaaaacaactcgcgaaaccacggctgtggccacagcaactccgatggctccggcggaaacaacggaggtggctag

SEQ ID NO: 63205 - DNA, 315 bp, Oryza sativa
  Clone ID: PAT_MRT4530_64470C.1
atggaggccggccggtggcggcccgacgtgaggcagcgggatgagaggccagccggcaccggccgggcgtggggcggccgaatggaggccggccggcggtggcccggcggggcggcgggatgggaggctggccggcaccggccgggcgcggggcagcaggatggaggggcaaggaagcagaatgggtcctacaacgttctccacttccttttccccgtttttgtgtttgtgattcatgcttatgtccaggcctttgctgaattagatgatgatgatgatgaaagagtgatgatcagctctgacatagagctgtga

SEQ ID NO: 63206 - DNA, 279 bp, Oryza sativa
  Clone ID: PAT_MRT4530_64471C.1
ctattgcagttgcaggtaatcttgagtcccaacaacccagaagtcatatccatcgagatgccaagactgcagctcgttctccgtgttctggaacaccacctcgatgaactcgtgcaggctgagcctcaccaccggcgtccccgaccgcggcgccgcgccgggacgcggcgcggagctggcgagcatcagcgtcctcgacgtcgcgatggtgccgtagtggaacgacccctgcgggttgggcctcgccgcgctcgccgtcaggttccaccggaacgacat

SEQ ID NO: 63207 - DNA, 666 bp, Oryza sativa
  Clone ID: PAT_MRT4530_64472C.1
atggagcaacacagccactgctggtactacggcggcggcatggctgtcaccgcagccgccggtgccggcgcggcgtcgtcgacatcctcggaatcgcagccgtctggctacgactacgagacggcggggagcgccgaggtgtcggcgcccggcggcggtgcgggccgcgagagggcggcgagaaaggaggagggcggggcgggggcggcggcggcggcggcgggcttcatcggcgtgcggaagcggccgtgggggaggttcgcggcggagatcagggactccacgcggaacggcgtgcgggtgtggctcggcacgttcgagacggccgaggccgccgcgatggcctacgaccaggccgcgctctcggcgcggggcgcggccgcggcgctcaacttccccgtggaacgcgtgcgcgagtcgctccgcgcgctcgcgctcggcgcggccggaggctcgcccgtgctggcgctgaaggggcggcactccaagcgaaagcggcggaagagatcagagctggccggtgccacggcgacggcgaacaagacgacgacgacgacgtccgccacgaccggcggggagcacaagcagatcgtcctcgagctggaggacctcggcgccgactacctagaggagctcctctggatgtccgagcaaactagccattga

SEQ ID NO: 63208 - DNA, 2237 bp, Oryza sativa
  Clone ID: PAT_MRT4530_64473C.1
acgagggagagagagagaactagtcacgagttttttttttttttttttcaccattttctctcctcaatcaggtagagtgatgatgcttgagtacggcatcagaaacagagcactctgcaccattaagcctgaggccttgtccacaggctacaaactcaagagaaaaacactgacatatgatcaaagaatagcacatcagttttagctacaacaaacatatatccgaaatcgtaattcttgatgagaaattcaagaaatcgaaatcggagatggcagcgttgaacagagcaaatcttggcgtgttcatgatcgagctcaaatcggagcaggtgaagaaggtagcggagggtggtagattctacaccatcttcccatacatgagcttcgcagagtatggcgttggtcgggatactgtactcattggagaagctctgctgcggcgtccacactctcatgtacagctgctggccgaggtattgccggtcccagttcgccgacctcaggttccacatcccctggttgtccaatgacaccaagattgccgaccatccattcgggtaaacctgaactgtatgcctcgcttgcgcatcaaccaagttgtaggttgtccgctgattctcagtccactgaccattgccatacccaacaacccagaagtcatatccatcgagatgccaagactgcagctcgttctccgtgttctggaacaccacctcgatgaactcgtgcaggttgagcctcaccaccggcgtccccgaccgcggcgccgcgccgtcgggcctcgccgggacgctgtcccagccgatgacattggcgatgttgtagttgtccacgagcttgagcggcgtgtcggggacgacgaacgacacgccgttgacggcgtaccggcgctgcccggcgagcaccggcgcggagttggcgagcaccagcgtcctcgacgtcgcgatggtgccgtagtggaacgacccctgcgggttgggcctcgccgcgctcgccgtcaggttccaccggaacgacctcgcctggttcatcgaccactccgcctgctccggcggcggcgccgggagcgggccgggcgccctggacacggcgctgctgtagtgcagcgtccccgtcgccatcagcggcgacgcgcccgggctgaaccgcgcggacgccacgacggcgtagtcctgcgccgccttgtcgagcgtgacgaggaacgccaccgactggccgacatggacgtcgagcgagtcgtacacgttctgcaccgggtgcgtcccctccacctccaccaacctcagcgagtgcccctggatcctgacattgacggacgtcttcaccccgacattggacaccctgaacaggtacgtcctcccctggtcgccgacgaacgccgccgccgacggcatgccattgatgagcagcgcgtcgggcggcgggagcgcgccaccgccgccggcgtcgagcgcctgcctcagctgcttatgcccggccttgtaccagtcgccgacgaggagcgtgaagtcgccggcgggcggcgggtacgggacggggatggccgggcgctggtagacgttgagcgcgccgaagccgccggcggcgcggtgcatggcgacggaggggaagtagacgaaggtgccgatctggtccttggcctggaacttgtaggtgtagttggcgccaggggggattgggcagttggtgcccagcacgccgtcctgccacgagttcttgcgctgcttgatgccattccatgtcaggaggaacggctcgtccaggttgttgaacacgttcacgatgatgttgtcgttcgtcacgcagtcgattcgcggcccaggaaactggccattgatcaagatgccctgctgcggggtggagccgagagggttgatgctgccgtaggtgacgttccaggtgaagaagcggtaggggtcgtcggcgccggcgagggtggcggcgacggcgagaatgcacgccgccaacgccgcagctgcagccggaggaggcgccattgctggatctagagctgagctagcagagagagagagtgtgtgtgtgagagagtgagaagcttttatagctgaagcagctgagctgagcttgtgctgtactcgtacacaaaattacaactggaaagcaaagcaaagaaaagcaaaatctacgcgtagatggatggatggatggatggagaagaagaatgctagtggtggtggagaagatggacagatggggcgctttaaatggaaggagaa

SEQ ID NO: 63209 - DNA, 1185 bp, Oryza sativa
  Clone ID: PAT_MRT4530_64474C.1
atggagaagaagcggtgggacagcatggagtcgtggtcgatgctgctggacacggccatggggccctccggcgagccgacgtcgagccgcgacagcgggcggcgggaggagtggatggccgacctctcccacctcttcatcggcaacaagttcgcctccggcgccaacagccgcatctaccgcggcatctacaagcagcgcgccgtcgccgtcaagatggtccgcatccccgagcgcgacgaggcccgccgcgccgtcctcgaggaccagttcaactccgaggtcgccttcctctcccgcctctaccaccccaacatcgtccaggtcagctttcttttcccatacacccgccaagtgttcgtccggtggcgagctttcttttgccttacaccacgcccgccaagtgttcgtccggtggtggcgagctctcttttgccttacaccacacccgctaagtgttcgaccggtggcgagcagttcatcgcggcgtgcaagaagccgccggtgtactgcatcatcacggagtacatgtcgcaggggacgctgaggatgtacctgaacaagaaggacccatactcgctgtcgtcggagacgatactgaagctggcgctggacatctcgcgggggatggagtacctgcacgcgcagggggtgatccaccgggacctcaagtcgcagaacctcctcctcaacgacgagatgcgcgtcaaggtcgccgacttcggcacgtcctgcctggagacggcgtgccaggccaccaagggcaacaagggcacctaccgatggatggcgccggagatgaccaaggagaagccctacacccgcaaggtcgacgtctacagcttcggcatcgtcctctgggagctcaccacctgcctcctccccttccagggcatgacccccgtccaagccgcctacgccgcctccgagaagaatctgcggccgccgttgtcgacctcgtgctctccggtgctgaacaacctgatcaagaggtgctggtcggcgaacccggcgaggcggccggagttcagctacatcgtgtcggtgctggagaagtacgaccactgcgtgaaggaagggatgccgatcatggcgcaccaggagctcaggatctggagctccttcgccaagatcttcaggatgggctgcatcaccaacaacttgtccataccggtgcatgcttga

SEQ ID NO: 63210 - DNA, 471 bp, Oryza sativa
  Clone ID: PAT_MRT4530_64475C.1
aaccatccaaccccattcggcgaaattattttatttgatttggaatttggcttaaaccggggggtaagggcaaaaaatccctttcctgcttttggccagaagaaatgggccatttttggagggagccaagtattattatttaatgggttgccaaaattttttaagggtgggttcatttcttaattgaaggtttaattccctttttcgaaaaaaaaaaaaggaaaacaaattggagggccgaaatgaccaaattccttggaggaggctaccttgcaagtgaaaaatgggaagtaaccgtattccaaccttgaggcgatcttccgccttcgattttccggaaacttaatttcagcagctgcccagttggttcgacgtcgtcttcgttgggttggtgcaagtagcatttttatagcagcagcggcagctatgtcgatgtgggcggcctcgtcaggccgcggcgagcgtgcctcc

SEQ ID NO: 63211 - DNA, 324 bp, Oryza sativa
  Clone ID: PAT_MRT4530_64476C.1
atgtcagcgagctcgcccgatctgatgcctggtggcggtggcggcggggccaggcggagctgcgtcaccgacgccggggcccgggcagcagggctgccagatccagccttaggtgacgacggagacgggcggagcttcggcgccgacgccggggcggccaagcggctgcacggccagatccagctccgtggggggcggccctcgcctccttcctcggccggtgcctctcctcccctcccagtccatggagtgacctcgtcagcgacgacctcaagttggctgtggcgcttcgacctgccgggacggcgacgagccctgcgatga

SEQ ID NO: 63212 - DNA, 750 bp, Oryza sativa
  Clone ID: PAT_MRT4530_64477C.1
atgcggctaacgccggtggcgcggccgcggccggcgccgacgacctccggcgtggaggacgcggccgccggcgacgagctccggcatggaggacgcggccgccggcgagctccggcgtggggcatggtcgcatggacggcggaggatctgcgtgcgtggaggacgcagctgccagctgaggcgtggacgacggacgtgactgccggtgacgagctcccgacggaggacgcggtcgtcggcgatgagttccgatgtggaccatggacgggggaggatgcggctgccggcgacgaggttcgggttcagtgtggagcgtggacgggggaggacgcggccgccggcgacgatgcctcgacacctcgacgcctagctcctgcgggatcgacggccggcgacgaaggagccgaccggagagggcccgcgacggagttggggcgccggtggagggcgcaccggccggccacgcagatggagccgagggtgggcgttaacggcggcgccgtggatggcaggcagcggtgctggagctctcggcggcaatccggcgaccacatcatcgacagccacgtcaccggtgacggagttggggcgctggcggagggcgcaccagccggccacgcggatggagcaccaggcggcaaatccggcgaccacgtcaccggcggccgcgtctccgcgtcgttcctatttggatgggaaaggtggacgaagggtatcccgtcgatacccttcccgacagtataccggtag

SEQ ID NO: 63213 - DNA, 907 bp, Oryza sativa
  Clone ID: PAT_MRT4530_64478C.1
cccacgcgaccgtttttcgcacgagatggatgcctccccgctgcacgtcgtcgtcttcccgtggctcgcgttcggccacctcctccctgccctcgagctcgccggccgcctggcctcgcgcggcctccgcgtgtccttcgtctccaccccgcgcaacatcgctcgcctccgccgcccgtgcccgtccgtcgagttcgtcgagctgccgctcccgcgcgtcgacggcctccccgacggcgccgaggccaccaccgacgtccccgatcacatgtcatccgctctctggaaggcctccgatgggctcaccgcgcccttctccgccttcctcgacgccgccgccgccgcggggaacaaggtcgactggctcatcctcgacggcatgctttcctgggccgccgcctccgccgccgaccgcaaggttccctgcgtcctcatgatgccgtacacggcgacggcgtgcgcgcatttcggcgtgccggatgaggcgcgggacgccgaccgtttcccctccgccatagcccggcggttcgtcttggccttccggagcagcgagcttctcgccgtgcggagctgcgtggagttcgagcccgagtcggtgcctctcctgtcgaacatcttcggcaagccggtcgtccccatcggccttctcccgccgccgcaggttgacggcgacggcgacacagctctcatgtcctcgtggctcgacaggcagccgcccaagtccgtcgtctacgtcgcgctcgggagcgaggcgccgctgaccgcggaccagcggcgcgagctggccctcgggctggagctctccggcgcgcccttcctctgggccctgaggaagcctcacggcagcgacgacgacggcggcctcctcccgccgcgaggcgaggagcggacgcgcgggcgcgggatg

SEQ ID NO: 63214 - DNA, 1188 bp, Oryza sativa
  Clone ID: PAT_MRT4530_64479C.1
acgcggccaccggagacgcggccgccggtgacgtggtcgccggatttgccgcctggtgctccatccgcgtggccggctggtgcgccctccgccagcgccccaactccgtcaccggtgacgtggctgtcgatgatgtggtcgccggattgccgccgagagctccagcaccgctgcctgccatccacggcgccgccgttaacgcccaccctcggctccatctgcgtggccggccggggagcaaagagacaagatggtgtgcaaagaacttgttaacttggtcatggctggctgtggagtgtggtagaatcatcttctacgtggtatcacatgatcctcccaaagtatcacctatgaaacctggtgaaactggacatgatactaaggaggatcatgctacctcccaggtatcatgcgattctaccatgtatcaggtatcagacgattcctatcacgtatcaggtgatactcgtgaggtatcatgtgatacctatcaggtatcgtgcgatttctacgacgtatcggggtgatacttgtgaggtatcatattcatatgatacctactagataccaggagctaggcgtcgaggtgtcgaggcatcgtcgccggcggccgcgtcctcccccgtccacgctccacactgaacccgaacctcgtcgccggcagccgcatcctcccccgtccatggtccacatcggaactcatcgccgacgaccgcgtcctccgtcgggagctcgtcaccggcagtcacgtccgtcgtccacgcctcagctggcagctgcgtcctccacgctggagctcgtctccggcgccgccgccatcaccacgcaggatcctccgccgtccacgccccacgccggagctcgtcgccggcgtcgtctctgtcaccacgcagatcctccgccgtccatgcgaccatgccccacgccggagctcgccggcggccgcgtcctccatgccggagctcgtcgccggcggccgcgtcctccacgccggaggtcgtcggcgccggccgcggccgcgccaccggcgttagccgcatctgtgctgctcccacggtggcctacactctcgcgtctgagggaagtggacagggagcgatcccgttgggatactatcccaacgcgataccggtatataaagtgtcatgcatgtgtcgacttagaagtatttgtaggaagtttaatggg

SEQ ID NO: 63215 - DNA, 336 bp, Oryza sativa
  Clone ID: PAT_MRT4530_6447C.1
tttttaatccaaacaccatgccaccactttatcatgagctgaacataatacagtacagcgatgagtattctgaagttctctacaaattcccatcggaaatgtcactttttcaagccgttgcctattgaacatgctcacaattcaacaacatttattaacatggaaaaaaatagtttcctgaagttctctatacgcccccaatgaatcatgactctttattcaagtggctgttttttttttgacacactcataattcaatattaccatttgacaagcaagagggcatttttgaagcgattttgaattaccctcactgttcgatggctcttcatctct

SEQ ID NO: 63216 - DNA, 514 bp, Oryza sativa
  Clone ID: PAT_MRT4530_64480C.1
cctgacccattcggcttctccggcagctgccccatcaagctggcctgcaacgagagcggctcgacggcggcgctgatcctcccagacaacgccgctgcggatacggcggcggagtcgtacaccgtcgtggcctcctcgttcaaccggaccgcctccaccttcgtcgtctccctcccgccggcatgcaaccgcaccgtcgccggggcgaggcggcggctctccggcgccaactacggcgtgtcgtcgcgcaccggcatgttcctccgcggcggctgccgcaacgcgacgggcgccaccgcctgcagcgtccccgccgaggtcatgtccaagatgctccgcacggcgcagtgcgccggcggggacgaggccgcgtcggcgtcgtccctgacgtgcatcgcctcgatcccgcccaacttcacggccgaggcgctcggcgtcggcatgttcgcccggtgggacacggtcgaggagccccggtgcgacaacctgctgacgtccgtcttttaccgggaga

SEQ ID NO: 63217 - DNA, 377 bp, Oryza sativa
  Clone ID: PAT_MRT4530_64481C.1
ccccaggcaaaaggaaaaagaaaaacacaaacccccaaaaccaagggccgaaaagggccttattttgggtccttaaaaccaaaagggaaaaaaagggggaaaaccacaaacgaaccctttactaaactaaagaacaaaaaaaattttccttcccccaaaactggaaccaaccccaaaaggggggattttggctccttaaaaaaatttcccgggggggggggttaaaaaaaaaacggcaattgggcaacgggaaaagccccttaatccgggcctttaaaactgggtaaccccccaacttttaaaaagcttccaaagctggccaaaaaaaccaggtttttttccttttcttcccttggcccgaaaaaaatttttttcct

SEQ ID NO: 63218 - DNA, 387 bp, Oryza sativa
  Clone ID: PAT_MRT4530_64482C.1
gggggaacaaatgagcaaaattccacgttttttagaatttagggactttacaaccatacccttaggcatgggggttttcaaattaaagaaatgatctcgctttgatagaatcacaaaattttttgttccccaaatttaacttccataactttcacatccaaaaaagggacaaaagggcaagagaagcaacaggccattttcacttaaatacaaagttttaattccaaagatcccttttttttgagccatgaaatttttgcattggccacgtcctgtaagcaggaagttttaaaatgatagaaaaggagggcctacccaaagtcttgggttgcattgacttgacagccaccagtttcgtaactttaacactggatagctcttttaggg

SEQ ID NO: 63219 - DNA, 1829 bp, Oryza sativa
  Clone ID: PAT_MRT4530_64483C.1
tcacatcttgtcatcctcgatgggattcggcgcaagcaataattatgggaactcacccacataaaaagacgtcaagggaataggaaacctccacggccgtgcatcctcttaatatgaaataataacagctattagtaaggtagttttacaccctaacaacaaacctctccgattttgctatcctacaccaacgctaccactaacaccatccaagatctgagtcgcagaagaagcagcatccgctgttaccgcttcgtggtgaaacgaggcaacaacgacgagagaaaaagaaaggcagtgaatggcgtaataactttactcttcaatgataaggtcagtgcatggtgggaccatagctccatccgccgagaatgtgcggccctccgccacgtgcccgttgatggtcaccgtcgcctggtacgcgtactcgtcctcgccgtcgtcgatggacgtcacgcgcacgcacctgaacaccgccggcgcgcgcacctgccttggcaagctctccctaaacgacgcgtcttgatggctagcgcctccagccgtcgtcgactccctggtcgtacaggaaccccttgaacacgtgcccggttgatggtcaccgtcgcctggtacgcgtactcgtcctcgccgtcgtcgatggacgtcacgcgcacgcaacctgaacaccgccggcgcgcgcacctgccttggcaagctctccctaaacgacgcgtcttgatggctggaggtggtgtcgaagctgcggggcgtggtggcgttggaggtggaggtgtgcgacgtcgtggtttgggaggtgagaaggcggggcttcttggaggccgcgccgccggagccggacgatccgccgccggtgtcgagcatcgggaggggcttcttgaggtaggggaaggcgctggagctagggttagggttaccacccgccgccgatgacggcagctgcggcggcggctgccaaaattggatcgcgctgcccgacgccgccgacttatccggatcaagcacgcaggggccggcggagagcagcgggaagataggatcggcgccgccggtgtcgagcatcgggaggggcttcttgaggtaggggaaggcgctggagctagggttagggttaccacccgccgccgatgacggcagctgcggcggcggctgccaaaattggatcgcgctgcccgacgcccccgacttatccggatcaagcacgcaggggccggcggagagcagcgggaagataggatcggcggcggcggccgcattgaagccgagggagaggtcgtcgcctcggccggcggccgccgccgccgcggaggaggcgacccagtccgcgaaggcgccggtgtcggatgggaagcgccgtcccgaagccacacttatatccgcggatttcgcagcaccagcaatcaggccggcggccagcgaggcgccggagggggccgcggccgcggcggtggcattgaagccgagggagaggtcgtcgcctcggccggcggccgccgccgccgcggaggaggcgacccagtccgcgaaggcgccggtgtcggatgggaagcgccgtcccgaagccacacttatatccgcggatttcgcaggcagctgaggcctcctcaagtaaaggctgagaagtctcctcgatctcccgtaagtgcactagactggcctgtctctatctccgtctacgatagctgctcgctgcagctagctgcggctgctacgactccagctcgtccgctatctccaagaagacgcctatagtactactactactactaccaccagcaatcaagtgaaggtggggaactcttctcctcgtgccgaattcctgcagcccg

SEQ ID NO: 63220 - DNA, 4086 bp, Oryza sativa
  Clone ID: PAT_MRT4530_64484C.1
atgcggcgccgcggcggcggagactgggggcgcgaggcggatcccgcggagccctcctcctcccacgcgttcgacggcggcagggacggcgacgacgatgacggcggcggcgggtggcaccaggcggcgatgaaggcgggggcggggaaggggtcgtcgtcgtcgtcgtcgtcgggggactcgctgtggcagtggcggagccaggggctgtccgaggtggtgctctcgtggtcggtggaccaaatcctcaacaaggacctgctccgcgacaaggtggctaagatcccagaaacattcagcagcatggagcagtacatgacatcatttttcggtccacttttggaggaagtcaggggtgacatgtgttcaagcatggaggacatttccaaagctccatatgcaagtgttctgtctgtcaatgcaatgaggaaggggaaaggatcatatgagatcaagcttgacaaatggaggggggtgtctcatggttgtgcgatagaaggttataagcctaaagcggcagatttgctactgatttcagaaacgagaccggcaaatcaatctgatattctcaaacagtctaaatcctgtgtcattgtatgggttggtaaggtccagggtaataagatgacagtcaaggcatcacggaggatggagacaggggttcatggagatgaacgacaacaaatgggcatgaacaggtatgacaagttgtatgcggaaggttttgacaagtcttgggaaatgctggaccaagaagcagttgctccagaatctagcaactcatttatgcatgaaaatgggcgtaaagaacattcaaaagttcgaaagtgctttgagaagtgtagtgatctgcaagaacagaatgagatggggacatgtggaaattcatcgaagcgatggtccttctgtgctacctacctgactaatatgataacatatgatcgtgtttgggttgtgctccgaaggggtttgacaatggattcaaaaattgttctcagtatgtttggcaaaaaaaaaaaagagcagagaattcttgcatgtgctccaaccaacatggctgtcttgcaagtggcatctcgtcttattgagctgattcaggacttctcttcaagtcattgttattcatttggtgacattgtcttatttggtaacaaggaccgtctgcacatcggaaaggagttgtcaaaagtatatttggatgatcgtgtccataagctgctgaggtatttcaaacgagaagatggttggaaggcacgtgtggattctgtcatgaaattccttatgaattgcatttctcgttaccaaatgtccctagatatacagcaggcaagcagtgatggatgcaatcttacctttaagaagtatttcacaagtaaattcagcacattagtaaaagaattagcaaggtgtattgatacattctttgatcatcttccaactgattccctgggcaggaatttggacaggatgatgtttgccaaaagtttgttagataaattgcaacaactgctgtgtgcagatgatgtctctgatgagcttcttttcacaattttcaagccttccgatgaacctattgactcttttgatagccatgaccagacagatgatgcaactgttgatcttcatgaccatgatatctccctagatgaccctttggagataaagtctctttgtatcaaaaccctgatggatctttcaaaaatgcggcttccttgtgaagacaatgagagttcgattcgggacttatgcttgaaacgagcgaaactggtattctgcactgcttctagttcatttgagttgttcaggttgcaaaacgtgatgcctataagcatcttggttattgatgaggcagcacaactaaaagaatgcgaagcactggttcctctcttgctcccagggatagagcacattctgctgattggagatgaaaaccaattatcatcattggtaaagagtaagattgctaaagatgctgactttggccgaagtctctatgagagattgtgtacaatgggttatagaaagcatttgctggaagtacaatataggatgcaccctggcatcaacaaatttccaaatgccaacttttatgataaccgaatttctgatggtcccagtgtccaacaggaagactatatgaagagttatctccctggccctatttatggtgcttattcattcattcatattgaaaacgatatggaaatgcttgatgaacttggccagagttccaaaaatatggttgaggttgctgtagcgaccaatattgttgaaagacttgcaaaagagtgctctgagaagaggcagcgaaccagccttggtgtgatatctccatatactgcccaagtaattgcattgcaagaaagacttggaaaacagttcaagaatcatgagtttctgtctgttacagtaaaatccattgatggatttcaaggtggagaggaggacataatattgatttcaaccgttaggtccaacaaaaatggcaaagtaggattcctctcggatgctgggagaattaatgtggctctgacaagagcaaagtattgcctttggatccttggaaatggagccactttgctggcaagcaattcaatatgggcagaattagtccatgactcaaaacgacgtggatgtttctttaatgcccttgacgacaagaatttagcagaaataattatgcatgcaaccaaggagggagagcagaggaaccaaagagaacagaggagtgcccacaatgcaaatcgatggtcatcagggtcatcgaggcatgacataattgctgctggcaacagtcgaccaatgagatggagtcactttccaggttctggaaacacaaggagaagcaatggccacgattcacgactaaatgtgtgtcacacaaaagaggacatgcatagaacacactttcagcaacgcaagtcctatagtggtgactattcacaagttgctcctcctaatcaatattggcacaatggcaacagaccatcccgtggcagttatggttatctggaagtgtttagagaacatccaaatcatcattctggtcaggactcacgtactagaagttatcatgaaaccatgtgcagtactcctcaaacaggcaatgggaggtttccttattctggatcaattcagagggagaaatcacagaggcaaactagtatccttggtgaacggcaacctttaggaggtgacggcaataaaggatttcaggatgggacttctggttatccatgccggcgcaattcttctcaaattaggccaaatacatatgaagccggtgctcctgaacttcaaagtatgaataagcacagggagttcagtagttatccacaacaagcaccatataggacttttggtggtcggggtagagggagacctacatatcatggtagaggtaggggaggatggtatgaacggaccaataaccattggatggaagaacctcatcaggtgcagaatgccacctgtaacatgccagttactatgcagcaagggatgaaaagaaactggtgcgaagcagaagcatcagattcaccccagcaggtcaatgcaaaaataagatccgaaagtgcagatcgacctcatttgcatgacgaacatggaggttatggaactgcatctcaccaactgcctgcaattaagcccgaagatgtttccgagcagcagtgtgagatgaaaacagacagctataaggcagaagcatcagaatcaccaaatgacagcacaagagtaaggcctgaaagtgtagagcaaccttattgtcaggcacagggtgacagttctggagctgcttcccaggaaccggttatccctgagcagagagggatgtcaggtgacttgtgcgaagcagtatgccaccagagcaacacgtcaggttcaccaaacaggggcagtactgaagtaacactcgaaggtgcagaacaacctcattgccaggcgcagcctgacggttcgggagttgcttcaaatgaagcgcctgttcctgaacagcgatggacggaaggggacttgggtgaagcagcagaacctggccagggcaatgcagaaaataaagctgaaagtgcagaggcagatagctag

SEQ ID NO: 63221 - DNA, 887 bp, Oryza sativa
  Clone ID: PAT_MRT4530_64485C.1
ccggccgggaccaactctccctctccctcgccgccggcgcgcgagcttcaccagccatggccgccaccgccgccgcctccgtagccgcgatttcgcctctccccggggcatccctcccgcgccccgtctccgcgagggttcctcttctccctagggcttcccctcccacatggcgcctcagcgtcggctcggcgcgcgcgcggtcgacgcggtgccttgcggcggcggggggtggcgggctggcgccggagatgagggcgacgctggacaaggtggtggggtcgcacaaggtggtgctgttcatgaaggggaccaaggacttcccgcagtgcggattctcccacacggtggtgcagatactccggtcgctggacgtgcccttcgagacgctcgacgtgctcgccaacgaggcgctccgccaggggctcaaggagtactccagctggcccaccttcccgcagctctacatcgacggcgagttcttcggaggatgcgacatcaccgttgctgcttttgagcgttttggggcctgctgcccattgcgcatattctctgtgaacaagaccacaacgagagcatggcctcctacgcgcgcatcggatcttgtcaagaccattctcgtggactcggccgcagtgaacgcacacttgcgcgagctgctccacctccatggcgtcggcgctgttgtcctcctgcgcgaggtggtccacgatgccgcccgtcatcatgtcgtccaccggcgcaacctcagcatccatggcgccgatggtcacttcgtcttcatgcgcgacggcggcgtcctgcagcttgacatccatgatgctggtgcgcgacgagcggcgttgtcaagaggcgaagcgacgcaatggccagaggcgagcaactag

SEQ ID NO: 63222 - DNA, 180 bp, Oryza sativa
  unsure (1)..(180): unsure at all n locations
  Clone ID: PAT_MRT4530_64486C.1
atgtcgttggcggcgcccgcggagaccgggagcaaggccaccgtccgccaccgctcgcccttctccttgcaggcttgcatggcgaagatgttgcatgccaaggcgcggcgaggcatgagagcgaacgtcctccggccagnacgtggaggccggatcgagaatcaagccggtggcggttaa

SEQ ID NO: 63223 - DNA, 605 bp, Oryza sativa
  Clone ID: PAT_MRT4530_64487C.1
atgttggctaagagtcacctgcagtttcagagagacatgatgaagctggagcattccatattccttcttcccaattttgctccagaagaaaagggacctgtgggtgctgtgggaggtgacaggggacctgtggatgctgtgggaggtgacagggaaccagtgggtgctgtggggggtgacaagggatctgagggacagctgaacctgtaacattcaaaagctgattttggtggaggggacttcaactgatgcaaggatggacctgagctgtgcttcttcaactgaagcaagggatgacctgagtgtgttttttgggctggttaaaaaattaagcagttatgtgacctatactctattccaactcacgtatgtgctctgtggttgctgatccttggacacaatgctgaccatgggaatgcgggatgggaacactcttactactcttgctatgggtatcacggtactaacttctttgcgcctagtaaccgtttcggaaccccggacgacttgaaatctctgattgttcatactcacgaactcgacttgctagctcttatgtatatgtgcctcagtcctgcctctgcccttccctgtatggcttgaat

SEQ ID NO: 63224 - DNA, 1065 bp, Oryza sativa
  Clone ID: PAT_MRT4530_64488C.1
atgccgactgatgtaaatggtattgttggccagattgagacatttgcttcctttcttagtatcacaatatcccactcactcgctttgatccggctttattcggctaaaaagaggccgtcgtatctgctcgcccccttcttcattcatccaattaggtcagaatggatccagggaacccggctcgggaactgccctgagaaaaacacagtaggggtcaaggaccttatgggactgcaatcgtgcctgccaattggggaaggacgcgggcctggcaaccgctcggctctagtaagggaaacagattgtgtgggtgttcagtctaccgctcatgttcgacgctattatggaccgagaagaggaatcaacgaaaaacccaggaaagagctgcgaaagaaaagcgtgacgagcaaagtcaagtctccacgactcgacatgttagaaggagctaaatcaataggtgccggagctgctacaattgctttagcgggagctgctgtcggtattggaaacgtcctcagttcttcgattcattccgtggcgcgaaatccttcattggctaaacaattatttggttatgccattttgggctttgctctcaccgaagctattgcattgtttgccccaatgatggcctttctgatttcattcgttttccgatcacatatttcttggtgtagatatctctctttgcaaatagagataccgaggccccccaacctactagttgttggtgggggaaagaagagtgggaacgtgggcttctttcacaaaagtgctctagacatcggttcatcccgagcaccacatagtttccagatgcaagctggcggggaagagtttatggttctgagaggacattcttttgttattgaatttaggattgggaaattgatgtatgtcagtgaagaatgcaagttgaccaatagcagctatgaagaacagcacctgtgcacattcccgtatattgaagccgctgaagaagctattgagacttccttccagtcactcgaaatttggaatgctaattctgtttctgagggcggagctatgcccaaagatgtctga

SEQ ID NO: 63225 - DNA, 410 bp, Oryza sativa
  unsure (1)..(410): unsure at all n locations
  Clone ID: PAT_MRT4530_64489C.1
tttttttttttttttttttttttttttttttttttttttttttnnttttttttttacgnggaatcatccattctttcttgccatttctgnggtattcttctttcttggncaggncagcacaggtgagagatggtacctctcacacctgtgntgtcctntccaagaaagaagaagaagaagaaaaaagagaagaaaaaggggagaagaaaaacggncgntcatgnggtagtccatgtnatatagaatcacaacaagnaggntcaccaaacttttccctgttggaaaatnttatatgcttgggcagcattgacantggttntgaaggcangttggcaantggcaagcatagtggcgtttagcccttctcctctggctgtaattattcccnaaattttggtatcttcnctttt

SEQ ID NO: 63226 - DNA, 176 bp, Oryza sativa
  Clone ID: PAT_MRT4530_6448C.1
gaacataaataataaaaatagcatgtcccggttttcagcaaattgaaccccctctctttaattttcaaattcccaaaaaaaaggttcattttttattacccaaacccatttcccgttttcatttccgttgaacaagccgattgccccaggccaaattaaaaccttaggatttgcca

SEQ ID NO: 63227 - DNA, 399 bp, Oryza sativa
  Clone ID: PAT_MRT4530_64490C.1
atgccgctcccgccggcgccgcctaaatcgctgcgccgcccgttgcttcccccgcgcgcgcgccgtggtggccgaccgcctggtcaccgccgccgtcagcgcctgccgcacctgccccgcgtctgccgcccgtctcgccgcttcactccacaccgccccgccgtcatcgccgtcgtcatcgacccggccccgccactccgcgcgctagcttccaaggaatggaggctgagctcctcctcctcctgccgcgtcgccctctctccctccttcttttcccaaagaagcaaggggcaagccccctttctttcttcctttttttcccttttctcttccaccgtcggcgtcatcctccctgtcgccattttggccgcgagcgccgagcgccagctcgctccttga

SEQ ID NO: 63228 - DNA, 468 bp, Oryza sativa
  unsure (1)..(468): unsure at all n locations
  Clone ID: PAT_MRT4530_64491C.1
acgatacatcgcttcgccgtttacgtcctccttgctagtgaagcgtgcgtgcgcctctccccagcacggatgtacgagcacgaccgtataggctgctgccggctagcatcgcgcgccgtcctgatacagtagcgcgtgctcaatgcatataaccacatgctgaggatcatctacggcgtgagcggcgccccctactctgaataccctgtggtcgaactgatacacagctgacgctgaggacacatcgagctcgcggcgcagcaccttcactatcatgacattgacaacgttcacgccgtagcgcacgaggtacgatactggctaccgggagctgtctactatgatcgtgaatggacttaggcataggctgtgcatgcttgtaacgtgccaactaaataaggtgtgtaccctatgaactatggngcacccagaaccattaccgccctagtcggaggctcgtaatgagaa

SEQ ID NO: 63229 - DNA, 858 bp, Oryza sativa
  Clone ID: PAT_MRT4530_64492C.1
atgcggcggatcgaggacacgacgaggcggcaggtgacgttctcgaagcggcggaaggggcttctgaagaaggcgtcggagctgtcggtgctgtgcgacgcggaggtggcgctgctcgtcttctccccgcgcggccgcttcttccacttcgcctccgctccctcgtacgccaccatcccgccctcctccttcttccctactactgcatggctacctccttgttgtcatcaaggagggccagctccttgccggcggtgggcgaccggttgcagcaacgctggggacggcggttgcagcggcgccggggacgatggtgatggggacggaagcgctaggacaccggcagtggaggggcggtgggcggttggacgaggcggcggtgctgcaggcaacgaagccaggacgccggcggtggaggtgtggttggcagagcatgggaagggcggcggcgctgcaggcgacggcgccagtacgccgacggacaccgatgatggaggcattgtgagcggaggacggggagggcggcggcgcggcgggcaacggcgccaggacgccggcggtggaggcgtggtgggcggacgatggggaggacggcggcacagcaagcgacggcgccaggacatccgcggtggtggcgtggtggtgaacgacggggaggacggcggtgcggcgggcgacggggtcaggatgtccgcggtggaggcctggtgggcggacgaagggaagggcggcggcgctgcgggcgacggcgccaagatgccggcgatggaggcatggtggggggcggagccaggacgccggcggtggagtcgtggtggccggatgacggggagggcggcacctggtcgccggcggtga

SEQ ID NO: 63230 - DNA, 234 bp, Oryza sativa
  Clone ID: PAT_MRT4530_64493C.1
atgaggtccgccgcgaagttgagttacatggttgacgagacctacttcactattcaggcggagcttgaggctcagttcaaggaagtttgggccaagatcgactggagcggcatcgagactgcagactgggatgacttcaatggccccaactatttattctctggtgaatgttctatgttaatgtcatgttctagagctgtctattttaaggatgccaggtacttgcttgggtga

SEQ ID NO: 63231 - DNA, 408 bp, Oryza sativa
  unsure (1)..(408): unsure at all n locations
  Clone ID: PAT_MRT4530_64494C.1
atccccgggctgcaggaattcggcacgaggctctcctccctcaaaatccatgcacgagtagggaatttgtcatcgaaggatctgtaggggtgcaggtactgcataagttttagcgggcaaatcactgaccatatatgccatcaatgaaatgcatcagagagacttgccatcaataaagtttccctgcacatgcacaagttgtaagtttttttgtcaatgttctttttattgtactaggggncattttacctgaacatttgcggcaaaccaaaactacaaatatcgcatgtttaacatcttttatctatcaaaatcattacaaactccccattgaccaaaaccatgctggtgaaatgtgtacaagtgaacatgttgatgagtcagcactgcttagcacataattataag

SEQ ID NO: 63232 - DNA, 129 bp, Oryza sativa
  Clone ID: PAT_MRT4530_64495C.1
aggaatacggcacgaggggtacatccaagggcacgaagctataggataaggaaaggatagagaggtatcaccgataagaaatagtgtctatagaaatctcaactttaatcctaatgcggtacttcgagc

SEQ ID NO: 63233 - DNA, 300 bp, Oryza sativa
  Clone ID: PAT_MRT4530_64496C.1
atggaggccatggacgtcaagtacaagccgctcgtgttccccaacggcgccatcaagaaggcggcgaagccggcggcggtggcgcctgcggtgggcggcggcggagggggagagacggtgtaccgggagtgcctcaagaaccacgcggcgagcctgggcgggcacgcgctggacgggtgcggggagttcatgccgtcgccggcggcgaaccccgccgacccgacgtcgctcagatcgctcatccaagaaattaaccccaagaaaggacgccgcggctgcagatcagttcttgatgcctag

SEQ ID NO: 63234 - DNA, 246 bp, Oryza sativa
  Clone ID: PAT_MRT4530_64497C.1
atgtggacggacgcgacgcgccaggctgggacaattggctccactccatccaaaggcgtctacgaaggcacgcagcgcgcgagcgaagaggaagacgagccgtcgcggacgaacagggagcagtcgtgcaaagcgcttcccaaaaaccttattgttgccttctcccggtgcaggacgtcgaaggcagaggtttcggagacctgctctcccgatcgcaggtgcacgccagcgagcgggatggagtaa

SEQ ID NO: 63235 - DNA, 1559 bp, Oryza sativa
  Clone ID: PAT_MRT4530_64498C.1
gcacgaggttgaccctgtcgtcccatgctaaagccaaagcttaggcagcagcagtaggcttaagcttggttggtcaagggcgagtggccatggaggccatggacgtcaagtacaagccgctcgtgttccccaacggcgccatcaagaaggcggcgaagccggcggcggtggcgcctgcggtgggcggcggcggagggggagagacggtgtaccgggagtgcctcaagaaccacgcggcgagcctgggcgggcacgcgctggacgggtgcggggagttcatgccgtcgccggcggcgaaccccgccgacccgacgtcgctcaggtgcgccgcgtgcggctgccaccgcaacttccaccgccggctgccggaggggtcccccccgccgccgccgccgccggcgctgctgcccgcgccgcccatgccgccgcaccgcggggaggagacgcccgaggtccgcctccccggggtggatggcgacgagtccgactccgactcggacgggtcggagtacgacgacgagcggtccgtgtccccgccgccgccgccgctggcggcggcggtggcgcaccaggtgtactacccttcggcgccgcacatgctgctgtcgctggggtcgagcgggcaggcgcagaggctcccgccgcaggtgatgtcgccggcggcggcggccgcgcctccccccggcggcggcggcggcgggatgccgaggaagcggttccgcaccaagttcaccgccgagcagaagcagcggatgcaggagctctcggagcggctcgggtggcgcctccagaagcgcgacgaggccatcgtcgacgagtggtgccgcgacatcggcgtcggcaagggcgtcttcaaggtctggatgcacaacaacaagcacaactacctcggcggccacagcgcccgccgcagcgcctcctcctcctccgccgccgccgccgccgccccgccattcaaccctcccacctcacctcctcctcctcctcctcctcctccacacgccaccgacttcaacatcaacggaacagccaccgccgccaccgccgccgccgccgccaccatcgccgccggcaaccaccaagagaacggagcatcgtcgccgcaatcagcataaaaactagagagaaaaagagacagcaagtagccttcagtgatcattccattttcctttttttttgcttcttagatcgctcatccaagaaattaaccccaagaaaggacgccgcggctgcagatcagttcttgatgcctagttacagcaaaagaaaaaaaaagaggagaaagaagtccaatctttccttatccctgtatgttcttgggatccgatgatgatggagaattagggattttaattagattatctcatctcaaaagtggcacctctcttggctgttcttgtcctcccttcgaagcagaggtaggaggagagggttcttccttctagaattctaggatctctcttctctttgagaaaaaatgtatacaaaaatggaagcagcctcacctcttgcactctgctcacttaattagtgttattattattattattattattttt

SEQ ID NO: 63236 - DNA, 513 bp, Oryza sativa
  Clone ID: PAT_MRT4530_64499C.1
ggaagtcacaaccagtgacccaatctcttgcattcaaacatgttaaaaatgttatcaaatgatcaaatgaaaacatagatgataatttacatgtgtacatcctaaatagaacctaaatcggcacgtttagccgatttaggatcgcctgtgccaatacatggcacagcagtaagcatctgataaattcttgcttctggtcctgaagcaaccacatgttactgggatccgttcttcttcatcctcagaaagctaactaatgtgagcctggagggagcaccggttcccggtctcctcttaattgttgtcgtcttccacagctttccatctctcatggtagtcgtggttgtagatgatacgttatagaactgcatacagacaagttgtgactggaacttaaaatgtttggatgaagatttaagttctcaagaattgttgagaaaatatttacctcacatacaccatgcagaagcaacctctgaaacggatcctggacattcagtacaagcacatctt

SEQ ID NO: 63237 - DNA, 561 bp, Oryza sativa
  unsure (1)..(561): unsure at all n locations
  Clone ID: PAT_MRT4530_6449C.1
caatatccttttgtcatataacaagttgtttctagaagagtcaccatgttctgcctacagctacactttgtgagagttgcagcatggcctgtaacccatacactattttcattgaacttctttgaatgcgatatctctattttggcaagggtaagaattattatggattcatccatgtttattaagtagggcagtatctattttggcgaggataagggttattatggacttaccctgtttattgagtaggggaagtaaaatctagtgtaagttctttgaaatgagcttttagacttagtgattcattaaagccaatatagcactggagaaacgtcaactttcccttattgcgcatcatcaaggcgatggacacnccttggtttcaccctgnngtgacctntcatatataacccctgaatatttccggtattttagtttcctatatgtcattttgattctctgatcaattttttttattttaaacagtggtaattgtatgatgactccctatatttgtatgatctccntttatatatgatttaaaaaaaaaaaaaaaaaaaa

SEQ ID NO: 63238 - DNA, 240 bp, Oryza sativa
  Clone ID: PAT_MRT4530_644C.1
atgtggcccgacatcacgccgccgctgggggattggtcgcgggcggtagaagtgttacgcggcgggcatgagcatcatgacagcttcagcgtcgtcctcctcgaggtcacctgcggccgtggttctgggacacgcacggcggcagcatcctcgacgcggctgaacggcgagttcgatggcgcagagaaggagcgcgcgctggtcgtcgggctctggtgcgcgcaccctgaccgcggctaa

SEQ ID NO: 63239 - DNA, 311 bp, Oryza sativa
  Clone ID: PAT_MRT4530_64500C.1
atatatatggagaacaaaggtaggctgaatgtcccaggagaactattgatgtacaagctagctgatcacaacataagggatggaaaggagaggacctagtgagggagctgacatagatgaaaactggaaatggcactgatttttttctagttctgaaaccggttgcggctgatgtatgaaaggatgcctccatgggtgaagagagccagttcgacctttgggcgaaagggaagagttcattttaacgattgacacgggcaggatgtgactgtcatgcactgcctaggactgatagagttgacgtaggccgg

SEQ ID NO: 63240 - DNA, 186 bp, Oryza sativa
  Clone ID: PAT_MRT4530_64501C.1
atgagagggggcgctgcggcagggacagctgcacggcgcggcgcggcgcggctccgacgcgacagcgacggcgacggcacgctctcttctccggcagttgtctcctccggtggccaccttctccccggcatggcgggggacgccgcagcatcacaccccctcacggtggtgccgttgaagctctag

SEQ ID NO: 63241 - DNA, 417 bp, Oryza sativa
  Clone ID: PAT_MRT4530_64502C.1
ctttggcacccaagagcgtctcccctgcacatccgaattatcacgaaccggagcttgaatgttcttgaagaagctataagtggaacagatacattgagatcgctcccagttggatcatcagcagcaggaaaggttgacaagaaatgtgctcttttttttatggtgtaacaataagtgaagaacaagctcggtcaggcattgtagtcagagtcacctcagccgcacaaagtaaatttaagctacttttcttcgaacaagaaattgatggaggttatggactagctccgcaggagtggcaaagaattttataggattcaaattccaacggatttttcttcctatgtttccctttggcttataggactatgttcctatgcttcactttcatgggaaaaataccaagaggtataacctctt

SEQ ID NO: 63242 - DNA, 339 bp, Oryza sativa
  Clone ID: PAT_MRT4530_64503C.1
atggtgccgcaacaaatgagcggatctgaaccgatagagatggctagcaataaggcgacggtaacgctccacggctgtgacagcacggggatagcgttgaaggtcaagtgtgccatgggccgcgatcgtgaccatgctcccgatgaagccatcgtctcagatgtcatcatcattcccgatgtcacagaccgctacatccttgtcatgtcgtcacgtttcttccggcggagcgatcagactgaagtatgggtgaagatgaaggtttgtgttttgccgttacggagtgggtgcattcttcatggttgccaggatggttgtgttggccctaaccaagcttag

SEQ ID NO: 63243 - DNA, 2091 bp, Oryza sativa
  Clone ID: PAT_MRT4530_64504C.1
atgaacaaaagcacgataggaagggcaaaagcatctatcaccctgtctacgcaggttgctgctggaagcgtctcccaattcacccttgctctcgctgttgtcccagccgacgtccttgccctgttagtgatatgttgttacgagacacagatgctggaagcaaaaggcttccctagtgtttggtgtgattggatcatgagatgtgttgaagagggtaaagtggcagttaagtttattgctgtccgtcctgttgggccacagtgcgaaggtcaggcagatagtcatccattactgatgggggactctggaaatgccagtcatcgtgatcacacgatcgacatactgagaaatgatgcaactttcccatcaacatctcatcaggataatcataataacttggatgagttgcaccaaactagagggcctctaaatgatgttcctcatgtcccagaaagttctgctagtgcaactcctgcatctatctcccgaaacgcttcttttgcaagaagagatcaaggacaccgtcaaccaaatcctttgaattctggcttctggatctcaattgagcttattgtaagtttaagccagattatagcagctattactgtcctgtcagtatcaaggaacgagcatcctcatgctcctttggctcagtggcttattggttatacgataggttgtgttgctactcttcctcacctttattggcgatttctccaccgcaatcggcagaacacagagcaagaatcaacaaatcaggtttcatctgaaagggacgtatatgagcctaattcttatgtagtagtttcgtctgctcatggatcagaagttgtggacagtggtaataatggtggagtagcaaggattgcaagtccaagggtctacgcattggttgcgtgcttcaaattggctctggattgtttctttgctgtgtggtttgttgttgggaatgtgtggatattcgggggccgtacttctctccatgacgctcctaacttgtacaggctgtgcatagtattccttgcattcggcttcatcggctatgccctgcctttcatcctatgtacaatgatatgctgctgcctaccctgcattatctccatgatgggcatccacgaggatttggattttaacagaggcgctactgcagaagcaatcgatgccttggtggcatacaagttccaatcgaaaaagtttcaagatggagaagcgggagaagataatggtggagtattggcagctggaacagacaaagagcgaactatttctgcagaagacgctcatgtttccacatatgcaattgacacctatggatctctgggctctgcaggcaaatctaagatcagcaagaagtgtagtacacatcttggtgcagagagatcagatgacaaaaacctgaagactgaagagagtagctgtatcatatatatccccgatgaaaacatccgggttctatgccaactggcaactatgggctaccaaccagctgcttctcagaatagacccatggtggaatttgccagcggtgtgaaaggaatagccttgaatcttgagaatgagaatgtaggtattgttgtctttggtagtgataccgctattaaagaaggagatcttgtcaagcgcactggatctattgtggatgttcctgcgggaaaggccatgttaggccgtgtggtcgacgccttgggagtacctattgatggaaaaggggctctaagcgatcacgaacgaagacgtgtcgaagtgaaagccccagggattattgaactgcgtgatgggcccaatgcaacgtgctactgggcctcgcctctcactgccgccggtccaaaccggccaccaccaggcagcagcgatacgtccaaatctctcgtgcgaaatgcaaaagctggtcatgcactcatgcgtagtatatctggctggcagacgtacgtaccccgcattaccgttgctaagcttcttcatgccccagcttaccatccctcaatcggcctcatggctcatgggcaccaccatccctacctccaaactggtcgggaccccactccccatttcaaccctggttcaccgctagtaactaaacagcgacggatc

SEQ ID NO: 63244 - DNA, 261 bp, Oryza sativa
  Clone ID: PAT_MRT4530_64505C.1
tcattccaaaccatgcagccaatcgccgggaacgaaagcctcgccgatgacgccctgaagcacgcatcggagcgccgctgtttcgtcatcattgtcgccatcggagacactaggagcacggagaacacgcccctttttcctcggcgccgatctgaacctgccaccgtcgctactgccgaatccatcctctccggtgagccattgctcgattcctcgcacatacgccaccatagggacctcactaacacttgatgactgcat

SEQ ID NO: 63245 - DNA, 645 bp, Oryza sativa
  Clone ID: PAT_MRT4530_64506C.1
cgtggagctgacgtgccaacgccgagcttcaccctcaactcctctcagacgcgtcgcccagccacactcaccatcccagagccgacgaatccgagagagaaggccctctgcctctccgctgctctcatctccagcagccaatcgccgggaacgaaagcctcgccgatgacgccctgaagcacgcatcggagcgccgctgtttcgtcatcattgtcgcctggccgaatccatctatctcaagccaagccgctgcgccgtgaagtttgcctcgacttcctcttcaagacgcctcaagaatcaccatcggagacactaggagcacggagaacacgcccctttttcctcggcgccgatctgaacctgccaccgtcgctactgccgaatccatcctctccggtgagccattgctcgattcctcgcacatacgccaccatagggacctcactaacacttgatgactgcatgcatgccagttcttggagctgttcaagctatcatcgtcgacccagaggagattgccgccgccgagcagttgcacgagtcgccgtcacccaccaagctttgccagtcctgtctagcacctaagcacagccgtcgctcagacccgccgccggcgctactccaatgtcccataaccaagaaaac

SEQ ID NO: 63246 - DNA, 479 bp, Oryza sativa
  Clone ID: PAT_MRT4530_64507C.1
atctactgacatgaagcaggaatattgtctaccccgcatcgactaggtagtcgactccacagctggctgcaagctcctctccttcctcgacgtctactcgggctgtcatcaaattgcccttaaagaagacaactgcctcaagacctcattcatcactcaattcggcgcctacagctacatcaccatgcccttcgggctcaagaacgtcagagtcataataccaacgaacaatgcagaggtgcctacacaaccaactcacgcaacgtggaggcctatgtagacgacgccgtcatcaagacccgaatgaaagaagacctcatcaccgacttggaagaaaccttcaacagcttttgcgccttcaagacgaaactcaaccccgacaagtgtaccttcggcgtaccgtcgagtaagctactcggtttcatgaccgatgtaagggggcagaccgggagccctgaaaaaacttatcccagaaatgg

SEQ ID NO: 63247 - DNA, 398 bp, Oryza sativa
  unsure (1)..(398): unsure at all n locations
  Clone ID: PAT_MRT4530_64508C.1
atctggtcgatcgcccataaccgcgggcacggctattcgaataattttactctggccagaggtgcagaactgtacccacaagacacaatccaccggcatgtcaccgtgccatgcatgacatgtcaccatgtcgagtgattttgacaagacccttcatataaccccctctgaccaagcacaccacacctcaggtttcacccccactcctcaacaggcagcgggcagtcccttctcgtgctagatgaatccagaagcgacanaggttgtcgcaggggccatcccgctccatcacacccactcttgcttggatgcttgatctcgatcatcaaagtaacacaagctagtcgatttatcacccaaggttgagaaaggacatgtatcaattaatatggcacaag

SEQ ID NO: 63248 - DNA, 124 bp, Oryza sativa
  Clone ID: PAT_MRT4530_64509C.1
gatcactggtcagatcggattcgacgacggggaaggagacactcgtcgcgggcagcagcacccgacagaagcacgcggggacgtctccccgtcggcgccagctgccttgcaaagccaaaactaa

SEQ ID NO: 63249 - DNA, 1862 bp, Oryza sativa
  Clone ID: PAT_MRT4530_6450C.1
atgtggcggctgaagatcgcggcggagagcggcggcggcagcggcagcagcccgctgctgcacacgggcaacggcttcctaggcagggcagtgtgggagttcgatcccgacgccggcacgccggaggagcgcgccgaggtggcgaggctgcgccgcgacttcacccgccaccgcttccagaggaaggagtcacaggacctcctcatgcggatgcagtatgccaaattagggcatctacaaccagatctttcggctgtcatagttgaagataatcaaaatgttaccgaagaaactatattgtcttcattgcgacgagctcttaatcaatattcgactttgcaagcacatgatgggcattggcctggtgactacagtggaatcttgttcattatgccactcctgatattctccatgcatgttacgggaacgctcgatgtcgtcttgtcattggaacataaacgagagatatgtcgatacatttacaatcatcagaatgaagatggcggctgggggacacaggttcttggccagagtaccatgtttggctcatgcttgaactatgctacattaaagctccttggtgaggccctacataataacgatgcattagcccaagggcgtatgtggattttatctcatggaagcgcaacggcggcacctcaatgggcaaagatatggctctcggtcattggtgtatacgattggtcaggaaacaaagcaataattcctgaattatggatggtgccgcattttcttccaatacatccaggtacattttggtgctttgtccgtatgatttacatgtccatggcatatctttatgggaaaaagtttgtcggcccaatcactccaactatattggaaataagagaggagttgtacaacataccatacagtgagattgactggaagaaggctagagattgctgtgccaaggaagatcttcgatatccttgttcatggatacaagatattgtgtggacatatttaaacaagtatgtggatccaatgtttaatgtctggccatttaataagctgagggagatatcgctgcgcaaccttatgaaacatatctactacgaggatgaaaataccaaatacatttgtttgtgcccaataaacaaggcattaaatatgatttgctgttggatagaagacccaaattcagatgcattcaagaggcatcttccaaggatttatgactttctatggcttgctgaagatggcatgaaggctcagtatgatggctgtcagacatgggagacagcatttatagttcaagccatttgctctacgggcttagtagatgagttcagtacaactcttgagaaagcctatggtttcctgaaaaattcgcaggttcattattcttgaactttttgcaactggaaagttatgaacactttatcaaaaggttcatggactctttctacagcagacaatggttggtcagttcctgattgtacaggagaaacacttcaggcattactagggctgtcaaagatttctcctaaacttgttggtgatccaataaaagaaaaaagtttgtatgacgcggtggactgcctgctgtctttttcgaacaaagatggtaccttctcctcgtatgaatgcacaagaacagcttcgtggacagagattctgaacccttcagagagttttcggaacattgtcgttgattatccacatgtcgagtgcacatcatcagcaattcaaggtctaatatcatttacagagttatacccagggtaccgtggtgtagaaattgaaagttgtattaagaatgctgtaatgttcattgagaacaaacaacaaaatgatggctcatggtatgcaaagttcaatgctaggtgtgtgtcaaa

SEQ ID NO: 63250 - DNA, 276 bp, Oryza sativa
  Clone ID: PAT_MRT4530_64510C.1
atgggaggaggactgaaggagcacgcccagccgccgccgcctcaacccgcggtggagcacaccgcgaagccgaagctgccgccgccgccacctcgatccgcggtggagctgcgccgacaccgctgccgcctccgctgggagccaccgccgccggctcgatccgccgtggagccgcaccgccgcaggccgggagccctaaagccgccgccgccatttgaacgcgagcaagtggagcgctcgaacaaggccgacccaaaaacccctagggtcaactga

SEQ ID NO: 63251 - DNA, 610 bp, Oryza sativa
  Clone ID: PAT_MRT4530_64511C.1
ggatccccgggctgcaggaatcggcacgaggcttttctcttaaactactcatctgatatacgatctgattacaccgttgtgttcggaagcaattaaatctttatgacaagttctcacatgattatattttgatgaaaaattataaattacttttataatatatctaaattgcttttaaatttcactaaattacttcttggactaaaaaagtaattcaataaagcctaaaagttatgccatcaatgttatttacaatccatgaaatgttttcatcttctttttgattaaacggatttacagagagttacttctcaaccatggaaaagttacttctaattaacattgaagttacttttaaaaacatgttaaacttacttgtgttgcatctgtactgattacaatttaatttctagataaaatcatatttttatccctacaatgaatttacttctaatattgtgataaagttacttctgttttgttttaagttacttttataatatatgtaaattacttttagactttattgaatttacttttatatgtctaagaagtaatttagtcaaatctaaaagtaacttatatatatgataaaagtaacttacgtata

SEQ ID NO: 63252 - DNA, 1025 bp, Oryza sativa
  Clone ID: PAT_MRT4530_64512C.1
aactattaattatatttattaatacatattaaaaatttattaaattaattataattgcagacggacgctcaacaaaggcaaataagttaagaaaaaccgctttgtcaatatgggactatgacagccataggtagaatcagtaaatgcacacagttataaaacagaaacagttcattttctccatgcacataagagtccgtgcactagtccgcgattgaacaaaaaatgttcagtgttttcttcatcattttgctgtgacgggttctatacgggctggtcaccactgacgggccttcacccgtcaaaggtgaggagagtcatcactgaccattaatctctgacgaggggctgaatccgtcagaggtgacggtttaggcccgtcacagctagcctgaaccggcatagtgtgtagacttccaaattccaacagatactcctaatatccagatccgctgtatgttttaagcatgtttagtgccatagtagttccagccaacctccttggagagctggccgaggaggcagtacttgtgcccaggctgcagcctcagaaccttgagcgcgtcggggatgaccatgcgcttggtcctgtcgtacggcggcggcacgccctcgtacgccttcagccttgccagcgccgcctctcccctggtgtaggcaaggtggccaagcatgtggtggcgcgcgtcagatttgagagagggagagggggtggtggcggcgggggaatgtggagggaggagctagggagagagagctaggactaggcggcggcgcggcgacggctgcagactcccacagccgcgcgacgacacctcccggcggcgcgagaatggctacaggcggcgctcccgacccccggccgcgtgacgaccccggccgcgcatcgacggagggggtgggacgaaggaggagtcggcggtgcgctgcgcgcctggtggctgggcaggctaccggagtggctggtgcggcctcctcgcgtgcagcccggaggagaggctgccgctggaatggctggatctata

SEQ ID NO: 63253 - DNA, 2211 bp, Oryza sativa
  Clone ID: PAT_MRT4530_64513C.1
atggccccgagggccaagctcagccagatatttttctcttcctgggaacctacaaaacccatgacgactcgagtcttcctggccacgaatttgatccgatcctcccgtacctcacctcctcctattcctgcatgcagcagagcagtaatgaagcggatacgggtgcgaggatggatgcgttttggtgcagctgcagctgcctgcaggatcgaggagcaacaaagaatggggggcatggagaaaggtggttgcgaggtggaggctcggggcatcaaccaccacatccgcatccccatccccattcccaagcgcgctcaccctctcatgatgatgaagatatggagcagggaggaagacgaagacgagcagcagccgcccaccaccaccaccacccgccacgttctccgcaacgtctcctgccgcgcccgccccggcgagctcctcgccatcgtgggccccagcggcgccggcaagtccaccctcctcgagatcctcgccggccgcctccacccctccccgcttcccgaccagctcctcctcaacggcgcccccgccaccaccgccgacctacgccgcgtctccgcctacgtcacccagcgcgacgtcctcttcccgctcctcaccgtccgcgagacgctccgcttcagcgcccgcctccgcctcggcgcccgcaacgacatcgacgcccgtgtcgacgccctcatccacgacctcaccctcgcccgcgtcgccgacaccagggtcaaggacctctccggcggcgagcgacgccgcgtctccatcggcgtcgaggcagtccacgaccccgcggttctcatcctcgacgagcccacctctggcctcgacagcgcctccgccctgcacatcgtcggcgccctccgcgccatggccgacactcgccgccgcacggtgctgctcagcatccaccagcccggcgcgcgcatcgtcaagatgttcgactccgtcctcctgctcgccggtggctgcgccctccaccacggcaccgtcgacgccctccgctccctgctcgcctccgcgggcctcgcgctgcccccgcacgtcgacaccgtcgagttctccatcgactccgtcgacgcgctccgccgccggagcgccgccgaggcacgcgaccggtgcacgctgcagcagctgttccagctgcacaaggaggacgtggagatggagatggagatggagattgagaagaagagccggtacgccaacagttgggcgcgcgaggtgggcgtgctggcgcagcgcttcttcaagaacgtggcgcggacgcggcagctgttcgcgtgccgcacggtgtgcatgctggtggccggcctggcgctggggtccatcttctacgacctcggggaggagaaggtggcggagcgcgtcggcctcttcgccttcctcctcaccttcctgctgtcgtccaccacggaggcgctgcccatcttcctgcaggagcgggagatcctggccaaggagacgtcgtcgggcgcgtaccgcgtgtcgtcttacgcggtggcgaacgcggtggtgttcctgccgttccagctggcgctggccgtggtgttcgcggcgccggtgtactggatggcggggctccggaggacggcggcggcgttcggctacttcgtggtgctggtgtggctgatcctgtacacggcgaactcggtggtggtgtgcttcgcggcggcggcgccggacttcgtggtggggaatgcggcgatacagggggtgatggggtccttcttcctcttctccggctacttcatcgcgcggtcggcgatgccgtcgtgctgggtgttcatgcactacctgtcgctgttcaagtggccgttcgaggcgctgctggtgaacgagttcgcgggcggggggaggtgcgtggcgcgggtgatgggcgcctgcgtggccaccggagacgaggtgctgcgccgggaggggctcggcgacgagtgccggtggcgcaacgtgggcgtcatgctgggattcgtcgccgcgtaccgcctgctcggctacgccgtgctcagggcaaggtgcacccttgcgctcaggcccaggcccagcaggcccacccggggcctcatgagcaccggatcctcgccgtcgtctacctccccctcctgaccatctactactgtactagcacctagtactactgtttccctttacgcgatcgatcatgtttcctcgtttcaaaaaaaaaaaaaaaaaaaa

SEQ ID NO: 63254 - DNA, 424 bp, Oryza sativa
  Clone ID: PAT_MRT4530_64514C.1
gtgtattttttttttcactttgttttttttattcattttttttgtggggtgtttttttgggagactcagagcattcaagtttttaaccgaatgggaataaacgaggtttaaacgactaacatagggcacattgggaggagaatttaacgggccatggaacgagggccatgggcgggggcaaaacttaacgaacgctaagatatttaaaatgcagccagcataacccccactttaacgatggttatttctttttggggggagccttgggcaccttggcaccggggggggcctttttctccacgttcttgatgacgccaacaggcaccggttggctcatggcacgcacgggaaaaccaccaagaggaggggcctcagagaagggctccacaaccatggggcttggggggaattattttaaccatac

SEQ ID NO: 63255 - DNA, 5115 bp, Oryza sativa
  Clone ID: PAT_MRT4530_64515C.1
atgtcgtcgccggctgcgggcgaggccgacgccgccgcccgcgtgctcgcccgcgccctcgacaaggtcatcaagcactcctcctggcgcaagcactccgcgctcgtcgccgcctccaagtccgccctcgacctcctctccgcctccccggatgtcgacgaggccgcctccgcctccgcttcccctatccagggggtcgccgcggccgccgccgacgcggcaatccgcgctctcctgatcgcgctcgacccggcctcccccaaggtcgccgagcccgcgctggagtgcgtctccaccctcctctccctccgcctcctccacggcgaggtcgtagccgtcgctgccgctggcgctgctgacgccgacgacgccgcctcgccggtatccaagctcttcgcggccgtggtctcctgcggggggctcggggacgagggcctcgagctcgccgcgctccgcgtgctggtcgccttcgcgcggtgcccctcggtctccgtctccggggactgcctgggccacgtcgtgagggcgtgctacaacctatacctcggcagcgcgagcggcgggaaccagctctgcgcgaagctggcgctcgcgcaggtgctcgccatcgtgttcgcgcgcgtcgaggcggatgccatggacgtgcgcgtgcgcaccgtctccgccgccgacatgatggacctctccgatcgcagcctgaatgactccagcgtagtgcaggcggcacaggcgttcataaacgaggcaatggaggggagcgatgtgccagaggaggttcccccatcggatttgccagctgaggcagatgaaaatggagatgatgtggggatgagcaggatcagggaggatgggctggcattgttcaaaaacctttgcaagctgtcgatgaagtttgccacgccggataaccccgatgatccggtgctgctgcgggggaaggttttgtcacttgagctgcttagaacagtcgttgacaatgcagggccattctggaaatcaaatgaaatgtatcttgaagcgattaagaagcacctatttttatcattgctgaagaacagtgccttgtcagcaatgagtgttttccagcttctgtgctccatttttgttggtctgctgtcaaggtttagatctggcttgaaagaggaaattggattattttttcctatgcttatcctaagagttcttgaaaatgtccttcagcctagctttctgcagaaaatgacagttctaaactttttggagaaaatatgtaaagagcctcaggttatcattgatatttttgtgaactatgattgtgatgttgatgcgccaaatatttttgaaaggattgtcaatggactagtaaagactgctttaggtgtccctgctggatcaacaacaacattaactgttgcacaagaccaaacatttcgaattgaatctgtcaagtgccttgcagttattgttaagtcaatgtgttcatggatggaccgacaactgagaattggtgaattttccctgattagttcagaaactccaggctcaatggacaatcatactaccaatggagatggaagtggaatggattatgacatgcaacctgacacaagcagctctgacatatctgattcttcctcacttgagcaacgacgtgcttataaaatagaacttcagaaaggaattgccttgtttaacaggaagccttccaaaggtatcgattttcttgtccgcagcaagaaaataggccattcgccggaagatgtggctcttttcttgaaaaacactgctggcttaaatgcaacaatggtaggagactatttgggtgaaagggatgacttccccctaaaagtcatgcatgcttatgtggatgcactgaactttaaaggcatggacttcggtgaagcaatcaggtttttcttgcaaggtttcagattaccaggggaagcacagaaaattgaccggatcatggaaaaatttgctgaacgctactgtaaatgcaatccaaatgcttttactagtgcagatactgcctatattcttgcttactctgttatcttgctaaacactgatgctcacagtgtcatggtgaaagataagatgtctaaggctgatttcatgcgcaataaccgaggaattgatgatgggaaggacttacctgaagattatcttagtgcattatatgaccaaattgtcaataaggaaattaaaatgagtgctgattcttcaacgacacaaatcaaacaacccaatagcataagcaagcttcttggcttagacaatatcatcaattttgtcaactggggacaggcagaagacaaagcattaggtgcaaatgacttgctcattaagcacatacaggagaaatttaaagcaaaatgcaggaaatcggagtctgtgttctatactgtttctgatgcaaccattttaagattcatgatggaggcctgttgggctcctatgatggcagcattcagtgtgacactagaccaaagcgatgataaggcttctgcagcgcagtgtttaaagggattaagatttgctgtgcatatcacatctgttatgtgcatgcagacacagagagatgcttttttgacaaccatagccaaattcacatccctccattctgctgcagacatgaaacaaaaaaatgtcgatgctatgaaggctattatatccatcgcaatcgaagatggcaattacttgcaggaagcatgggaacatgtattgacttgtttgtcacggtttgagcatttgcacctgcttggagaaggggtacctactgactcgtcgtttcttacagtacccttagttgagtccgaacaaaaaaatcataagtccagctctggtctatcttcaaagagaaccaatgctcttcagaatcctgctgtaatggctgctgttagaggaggttcttacgacagcacagtggcaaaaaccagtgcctcgtcattggttactcctgaacagatcagtaatttcatatcgaacttaaatttgttggaccagattggtattgttgagttaaatcatatatttacccacagccaaagattaaacagtgatgccattgttgcttttgtgaaagctctttgcaaggtctcaatgactgagttgcagtctccaacggatcctcgtatcttctgccttacaaaaatagtagaaatcgcgcattacaacgtgaaccgcatacgtttggtgtggtctcgaatttggaaagttctgtcagaattttttgtatctgttggactgctagaaaatctttctgttgcaatatttgtgatggattctctgaggcagctggcaatgaagtttctggaaagagaggaactggcaaactataacttccagaatgagttccttagacctttcgtgattgttatgcagaagagtaatgctccagaagtacgagagctgattgtccggtgtgtctcacagatggttctaagtcgtgtcaacaacataaaatctggctggaagggtgtttttatggtatttacttctgctgcagctgatgatacaaaaagtattgtcctattggcatttgaaactatggaaaaaattgttcgagattactttccatacataactgagacggagaacaccacattcactgattgtgttaactgtcttattgcgtttacaagcagccaatttaatagtgatgctaatctcaatgctattgcgtttctccgattctgtgctgttaaacttgccgatgaaggatttggttgtcaggaaaagtgtactgatgaacccaggaatttaggcatgtcagatggaaatgccactgtggacaaggatgattctatttccttatggattcctctccttgcaggtttagctaaattgactagtgattcaagatcaaccatcaagagaagtgctgtgggagtactttttgacattttgaaggatcatggacaactcttctcagagtccttttggaccaacatccttgaatctgttatttatcctctatttagcagtgaaaggtcttcatcaaatgatccgacctcaacaccgagtatccctgaggatgacttttcaaatcttgaaacccaaacattggcagtgaaatgtttagtgggtttgtttattaatttctttgatgtgatgcgtccagaacttgctagggttgcatctatagtcacatattttatccgaagtccctacaaacattctgctagcataggtgtatctgctttgatgcgcttaattgagggagttggtggtgaactttccaaggaggaatggaaagacatattgctgcgcttcaaggaatcggtggcacatacttttcttgtattctccaaaattgtgagaatgatgcaagatattgaaattcctgatagatttgaatcttattcagaaaatgatcagtactcagatcatgaaaattatggtaatgaagaagaggaagctaatatggagacaacttcttatgctattgtcaaactgaagaatcatatggctctgctcctcttagttgttcagggaataattaaattatatgaagaacacagaaaatatctgtcttccgatcatattaatattcttttggagatgatatcagctattgcgacacatgcaagtgaatttcataaagcatgttcccttatggaagtatctgagccagcaattgtccatttcgaaaatgagtcataccagacctacctcaagcttctgcaagcgctgtttcgtgactatccatccatgtcggaagaaatggacattgaatcacaaatacttcgtgtttgtgagaaaatacttcggatatatctacagtgtgcacagcgagaaccatccaatgaagctttgcacagaaacgcatctatacattgcatagtgccactgggtgctgctaaaaaagaggaattggctgctaggacttcattggtcctcctcgtgatgcagttactgggaaacctggaggaggattcatttaggagagtactgccctggtttttcccgttgctagttgatctgatccgttgtctacgattttgttactctattttgttcacgttattccagttaactaagggggcccaggactatctttcgacatccttgatttatcttatctgtttcgaaatcctggagttcaagtttaatatgatcaatccagatacgtga

SEQ ID NO: 63256 - DNA, 504 bp, Oryza sativa
  Clone ID: PAT_MRT4530_64516C.1
cagttttgctatactgagtatccaaaccacagtgtctggcaaaacatgtctgcagcagtctggtgggctgcaccacacaatgctgcacctgatgcaaggacacagtagacacgtggtgtgacaaggcacataagcgctaggcaaggctgacacgactgccctagccaagtgtttgggtggatgctgctactgtggatgcggaatgtctggctgcaaagctgcaaagctgctgattgggctgtttgaacgtggccaatgtctgaggatgatgcggtgatgctgacccctgagggtgactgatggtcgcaaccccagtgacccttgaccacccctgtggcaggtggtgctgtggtaatggagtgtgttgaaccagtgatgagtgggtgtgcaggaaagttgaaaaatgaagctgccagatatcatcagaggtgacatgtgaaactttgggggatataaaatagaaataaagttgtctttcatatgtaaaaaaaaaaaaaaaaaaaa

SEQ ID NO: 63257 - DNA, 897 bp, Oryza sativa
  Clone ID: PAT_MRT4530_64517C.1
ccggccggggtgaaagagaggaagcaagagaggaagaagaatatatccatagttctatacacaaagcgtacctgttctttcggtgtctttgttccagaagccagaaaaactgcgagcatgggcaaattcggtggagctgcggtccttccagtataccgtgaagaagaagatgaagacttgttcgagacatcatcgtccatctcaggcgactccgatgatgaggctcaattttcagacagcgaggaagctgaagctcaagaagaccagtttgcgcagcagccagcgagaaggatgaattcagatagcctctacgatctgtcatctatgaaggcacaactccctgtcaagaaaggattatccaaatactacgacggaaagtctcaatcttttgcatgtatgtctgaggtgagatgcctagaggatctacgcaagaaggagaatccatacaagaagatcaaatcatccaagagctatgtagcactggatgggaaccaggaagcttgtcatatacctggcgcaaacagcacatcaatagccaagaagtctggaagttcttgcgcaaatctgatggccaggaataacaccaaaagcatgctctataggcctcccccaattcctgtaaacaaaagcggatatcatcagtaggaacagtatcgaaatgttttttttttggggggtcagggtttcatctctgttcttttttcgttgaggattttgttgacaagcatattagcctgtcacggatgtaagaggatttcgttctctgccatatacagagagtcgtcttgttcaaggagacatcgattctgtttgtaaatactacaatgaaatttttcattggactgaaaagggatgatgaacagccttctgtcgaaatttaaaaaaaaaaaaaaaaaa

SEQ ID NO: 63258 - DNA, 261 bp, Oryza sativa
  Clone ID: PAT_MRT4530_64518C.1
atgacaacctgggccacgggtcattgggattgggaggaaaagggtaggaagacgcagggagggagggcacctactccgctgccgccgtgcgcagccacagccgagataggtgggaaaaaccggggtggagggttcctccgccagcgtcgatcgctctaccccacaccgctcccatttttttttaatctggaccatttggttgggctcaagctcaaggtgaaatgggaaccagggtacccattcacccggcaaaacgattag

SEQ ID NO: 63259 - DNA, 1604 bp, Oryza sativa
  Clone ID: PAT_MRT4530_64519C.1
aactaataaccacctcttctctccggctctccccttcccgcttcgccgccgcgcgcggaacggcctaggtttccctgtacggcggcggggggatggccggggcgccgccgccgccagcgcggtcgctcgccgacctcgacggagacgtgctggcccactgcgcccgctccctcgtcgcccgcgacgtcgccagcctcgccgtggcctgccgcccgctccgcgcctccgcctactgcgacgccgtctggtaccgcctcttcaggaaccaatggccatctcaacaagtacctcgtggagctttgggacttcgagagctatatattcgcaggcacactgaagtacatcagatgaaatttgttgatcccatttcggctttttattatccaaatcccacggaagtgacaccaagccatctaatgctggataggaactacatatggttatctcaaggtctaatggtcagaagattgagggttgattgtccagaaatcgaattagtggaaacctacaagtctcatggtgcaaggatcacttgtatgagattattcccactgattgatatcccattgtttcgaggtgattctcaaacaaatgaaaaggcattagtcacttcaagtgcagataggacagtccgtctttgttggaagggccactcacggtgttttaggggccattcagggcccgtgactgctctgtctgacaaattgcttggtgatggtgaatttaaactacttgcaagtggaggggaagactgcactgttcgcctctggtctatgagtacaagaggcaaaaatcaccctctaatatcaacatttcatggccatgaaaaagcactgtcacttctatctgttgccaggcacaaaccctccctgctggtcagctgctccaaagattcaaaggttaaactttgggacacaatggcaccaccttcctctggttcatcatcgtgtgttgggagtactcacctaagcacaaacagtgcaccaattgcagtgaagtgccatgaatccctttgttacattgctgctgggtctgaagtgacgacaattgatttgaggacaatgaagaaggcttctgttcttgcgcttcgtgaccatagaatactatcttgtgaaatgctgccttcggaatgggctcttctgtgggacatacgcaagtctcaagaactcccaaatatagtggcagaattgcaatcagaatcagacgaacccgtgacatttcttcacttggatccatacaaggtgataactggagcaccatcagatggtcaggtccatgtctgggaaacacagacgggccactttgcgaacacactgagctgcggtgagcctgctaaatcggcagacagaagcacactatcagccatggctgtggacgggtgtaggatcgccatggcggggagctccgccgaagtcgacatggttcactaccgagactttctcatgtcatctgtccctgtatctttacctggcaacagcaaggaggtttccaggttctgggggccccaagaatacagtgacgatgaggacgaggacgaggatgacagcaacgacgaggatgacagcgacgaagaagaccatgatcatgcttggctcgtggactaa

SEQ ID NO: 63260 - DNA, 666 bp, Oryza sativa
  Clone ID: PAT_MRT4530_6451C.1
atggcgccgtgctgcgccgggagagctccgtcggccgttcgatcaggcggggatgacaggaggttgccgacttgcaggccctcctccgccaacgccgacaccctcgtctccgcgtgcccacaactcgtcggccacctcgtccgtctcgaccgcctccactttgcccgcccggtgccccgcgccgtcgggatccgccccgtcccatcctcccacagtgtctccttcgtcggcgacccggagccgctcatcgcccgccccaccgcgaaatgcgtggtgcccagccttgttgcggccaaggaggagaatcgccgcacggcgaaggagccggcgattatcgtgccatcgaggtacaggcaggtcggaagcggctgcggtggcggcagggacagtggtcggaagcggcggcgatggcggcggggacagcgcggagaaagagctccccaccgctgccgtccacggggagaggatgtcgccgggaggtcgcgtgctgggaagagagctgtccccaccgccaccgccgccgcttccaaccgccgtccgccgtcgcttccgaccgctgtccccactgccaccgccgccgcttccgactgccgtccccaccgccaccgccacgacttccgaccacctgcgccgttccccaccgccgttcccacgcgcaagagatga

SEQ ID NO: 63261 - DNA, 484 bp, Oryza sativa
  unsure (1)..(484): unsure at all n locations
  Clone ID: PAT_MRT4530_64520C.1
ggaagcaagagaggaagaagaatatatccatagttctatacacaaagcgtacctgttctttcggtgtctttgttccagaagccagaaaaactgcgagcatgggcaaattcggtggagctgcggtccttccagtataccgtgaagaagaagatgaagacttgttcgagacatcatcgtccatctcaggcgactccgatgatgaggctcaattttcagacagcgaggaagctgaagctcaagaagaccagtttgcgcagcagccagcgagaaggatgaattcagatagcctctacgatctgtcatctatgaaggcacaactccctgtcaagtaagttcctggggaagaagagttgcatattagtatcaatagatgtactagcaaaaggaaaattttctcacagggcaagtgctntgttgttctttgcaggaaaggaatatccaaatactacgacngaaagtctcaatcttttgcatgtatgtctga

SEQ ID NO: 63262 - DNA, 231 bp, Oryza sativa
  unsure (1)..(231): unsure at all n locations
  Clone ID: PAT_MRT4530_64521C.1
aggatancatgcataactatatttacaggggggagaatttaaaagagggggagcaacaaaccagaattaatactttcaaatgttacatatgaacacaaagatacagcgcataaatagaacagacgtgggatacacacttcaatcatttaccaatagtttcttacagatagaggaaaaggcacggaagatgaaaaacaccgaaaggtcttgggcaagtgactttactacaag

SEQ ID NO: 63263 - DNA, 397 bp, Oryza sativa
  Clone ID: PAT_MRT4530_64522C.1
agggcaatcaccactggccatataaaaggtttccctggtgcgagcggctcacagaccgtatggattcatgtccacattttagcaccaaactcactagatcgccaaggacaaatcctgaacagtgtatagaccgactggaatgttacacgtctagcacagcccaatcatgaatatattaagacgaactgataataaagccctaacattggacactccctaaggagtacgaatccaatttgggtgagaatctgaacatagccatctaatacgtgaagacacatacgctgttcatagtaggttgattactccggtttcgacaggaggcaagatttattctgaagtgaacctatgcccataagaatgagtggagttttcctgaccagcaaaaacggctacc

SEQ ID NO: 63264 - DNA, 189 bp, Oryza sativa
  Clone ID: PAT_MRT4530_64523C.1
ctccgcgccgaggccgccgcctccgcctccgcgtcaccaccgccgtcgcagctccgcgcggaggccgcctccctcagtcgccgcctccgtgtcaccgtccgacgccgccgtagctccgtgccgaggctgccgccccagcctgcagatgaccggggtaattcggacgaccgcgatagttcatgtgggtaa

SEQ ID NO: 63265 - DNA, 303 bp, Oryza sativa
  Clone ID: PAT_MRT4530_64524C.1
atctaccgtacgtacttcaggttcgactgcgacagccttagatgactcaagatgacgaacgacctcttgaccaaccacaacaatcagatcatgaccaatatctccgagctacagtccaggtgcaagacacgcccgcatcatgtacgcagactgctactacggagcttactacatgggccgcacacccggctactaccgattgagcacggagctcgaaacgtgctgccgatcacgctgcggaacgttcaactacaacaacatcgcaaggtgacgcacgttaggcgcatcacattgctgcaaccc

SEQ ID NO: 63266 - DNA, 399 bp, Oryza sativa
  Clone ID: PAT_MRT4530_64525C.1
atgcagctgcatatggaggagatcagagcacaagatcgagacaggagatcaagagacatgtcgaaattcaagattaagcgaaaaagttttaggctttgctaccgtgaccaatatggtacgaccggtgcctgtgatgaatctttcttgctcagaatgacaccattgcacaaggaactatctttgcgcacagaagcgatatatgtttcagctttctacgaaatgttgaaggcaaacggtatgcaccagtgggtggtttttcatgagcataaaaacaccatcaagaaatcactcgataatttaaaacatgcgcttcgtagatataaaaagcaatcgaataaaattggggctattctacttggtgccaaggaaagacggcaagtttggattcatcgtccgtag

SEQ ID NO: 63267 - DNA, 107 bp, Oryza sativa
  Clone ID: PAT_MRT4530_64526C.1
tcgttttccgatcaacgtcaccgcccctggccgacagcgccagcgcgatccccagagacccgccctcgcctgcctcggtgaaaggatgagcaacagaaacacgttcc

SEQ ID NO: 63268 - DNA, 1527 bp, Oryza sativa
  Clone ID: PAT_MRT4530_64527C.1
tcccccgggctgaggaatcggcacgagggctgcacagtacgcgcgctgctcctaaacccaaaccctaaagccgccgattcctctcctctgcctctccacaccagctcgatcgcgatcggggtcatggccgccgccaccgcggcgccgtcgatcgacgaggccaaggcgaagagcgttctccgccaggtggagttctacttcagcgacagcaacctcccgcgcgataagttcctgagggagacggtcgagcagcgcgaagatggattggtaagcttggctttgatatgctctttcgcgcggatgaagtcgcacctcgggctggacgccgccgtgaagcccgaaactgtgccagaggagacagtgctcgcagtagcagaggtgctacgtcgttcccagatgcttcgtatctcggaggatggaaaaatggttggtcgagctagtgagctgttgaaggcagatgaaatcatcaagcaagtggactcaaggacagttgctgcgtcaccattgccttacaatgtaaagctggaagatgtccaatctttctttgcgcaatatgcaaaggtaaatagtgtcaggctaccacgccatatctcaaacaaaaaacacttctgtggcactgccttagttgaattttcagaagaggatgaagcgaaaattgttttggagaataatttgttctttgcaggggcaaatctggaaataaaactaaagaaggaatttgatgctgaaacagaatctaaaaaagaagcatatgaaaaggcacatcctaagaaggacgagcagaatgaaggctatcctaaaggcctaattgtggccttcaaattgaagagaatcacggttgatggtggggtgcaacaaaactgtgcagacaatgatactgccactgaagaagaaactccaaagtccatgaagaaaacatcaactggggaatctgaagagaggactaccgtgaacagtgatatggaggaacagaagtcatcagacgacatgactgaagcgaaagaagtgaatgctggggaagctacagaatctggtgacaagtgcacagttgatgccttgctagaaagtgaaaagaagggtgataatgaaacatcgatcaaagatgacagaggcctctctggcaaagcgaatagtccaatctcaagggaagatctaaaagaagcgttcaaaaaatttggaacagttcggtatgtggacttcagtatcggggatgaatcgggataccttcgtttcgaggattctaaggcagctgaaaaagcccgcatgtctgctgtattagctgatgaaggtggcttgatagttaaagaccacattgttaccttggagcctgtgactggtgaagctgagaaggattattggaatacaatacgtggcattcaagggaaatacaaggacaataggagttacaaaggaaggactggaaagagctacagaggaggaaagcagttcaatgggaagcgaggccgacattctgattcctccgaaaagggtgcgaataaaacacagaaggtcgaagctgctgcttag

SEQ ID NO: 63269 - DNA, 335 bp, Oryza sativa
  Clone ID: PAT_MRT4530_64528C.1
cccacaggacattcgagtgtctgttctcctgcaacctcttctgatcgtcgcttctaatcaccaactactgtagattcgttggtatcctgaagagatagcagagccaagactcagatggttttatcagtgagatctaccctatcgcccgtgggtgaaaaactctcttcatacctcataccatataaatttcgcttaaaacatctatattatcgaacctcataattcttcttcttctttcattgttgttttatacccctctatctaattataatatcaatcatacccgaagaacccctcttgtttctccaatcaattcaaaaaaaaaaaaaaaaaaa

SEQ ID NO: 63270 - DNA, 186 bp, Oryza sativa
  Clone ID: PAT_MRT4530_64529C.1
atgtcgagtgattgtgacaagacccttcatataaccccctctgaccaagcacacaacacctcagggcccatcccgctccatcatgcccacccttgcctagatgagtcagccagaggaaagctatacttcaagtcaggtagttacccattcccgcttgtggcaagcgctatgcttaagcatggctaa

SEQ ID NO: 63271 - DNA, 423 bp, Oryza sativa
  Clone ID: PAT_MRT4530_6452C.1
tcgattcgacataggcataactatgctcatgtgacaactcacactgcacaagattgggccgaaacttttgtatgtgagttaaatgagacagttgctgaagctcagctgagaacaagacaagttccacctgatctccctagtcaagcagcaattcaacaatatctgcattccaaaaatcggttgctcatattggggttcaattcaacattgactgagccagttgaatcctctgggagaaggggtggtgaccaaatcaaggaaatggagctcaagttgcatcctgggttgaagggccctttgagagccctctgtgaggatgagcatactacagttattgttcttagtggaagtgacaggagcgttcttgatgaaaatttccgagaattaatatgtggttagcagcaaagcatgccatgtttttac

SEQ ID NO: 63272 - DNA, 1122 bp, Oryza sativa
  unsure (1)..(1122): unsure at all n locations
  Clone ID: PAT_MRT4530_64530C.1
gcagcaacagcatcatcatgcggcattcacttatcaataaacaggtcacagaactcagggacacccaaattatgaaactacagttaagctatcatcaacatcatccacgctgggaacgttttcctgtaccaggcaaaaagctaaaacacgctgacactcatccagtccacactggctacaactgaacgagccaacagcatcaatgaagttcgttcttttgcctagactgatggaaacgttcccaaattcgggcaaatgataagttaacgcgatcttggacctagcctagctcttcatctgcactgtacaccctccacgttttgactttgcaccagcaatgaagagctgacgccataaacagtgcatctcctcaccaaaaatgaaataatagtaggctgataccagttgacaagctaaaaccttgaatccacttaggctcatactttgatgatgctggatatgcatgtgaaggtctctttgcaccgttttccttgacacaatctgagcacacaaagtgatctagttttttggcctgctcaatcgtcattcccatacatgaaggatgaaaccagtccttgcagccatcgcactgcaccatgagatcatccgggttgtatggcatctcacacttgcagtatacggcgacgcggtcgggggtgaaggcgccggtggcggccttgtactcgaagcggcagaagaagtcctcggggccgacgttgtcgagcttggtgtagttcttgaaggagtggacgacgcacttgccctcgatggtgtgggcgctctgggtgtcgaagtggtcggagaggaacagctccttggcgccatggaactgcctcctcccgcccttggactcctccggccggtagtaccaccgcacccgcacccgcacgctccccctcccgtccgtctccagcctctccaccctccccacgtacggctggttctccgagtccgccgcccgcatcagcacgcagtcccccactcgtacgatcttgttggtgccggagatggtgtaggagtcgacgtcccgcttgccctgcttggtcttggccatggaggggattgggaggaaaccctagaggaggaggaggtggggggagaggtgtggnccacagctccccc

SEQ ID NO: 63273 - DNA, 918 bp, Oryza sativa
  Clone ID: PAT_MRT4530_64531C.1
cgttgcgacgtcgacaggaagcccgccgccctcgtcggagatgcgctccacttcgcccttgcggaaggttctggaatcatcaagtacaacatgtggagagtgctcgctttctcggatccatccacctgttgtgtacaagggaggcattgtggtgatggcaatggggggcaatctgctcgggctcggcggtatcgagggttccatcctctcaatgtggtctagtgatgtgagcctggatggtggtgtcagatgggagaagaacagggttatcaagttagagagcttgctaccaagtatcgattgcgtagaggcagtagcatgtgagcttgcacaaccagcaccgattggctttgtggatggtgctgatatcgttttcgttagaacagatgctggcatcttcatgattgagctcaaatcaatgtgtgttaggaaggtttgcgagggaggcttcttcaaagccgtcttcccctatacgagcttctgcactccaggcgtccatctccagcaaaacagagttcagttcagtaggaagcggttgctggaactaagagaaggcgatgtggcaacaggtatgcaatccaacggcaagagccacaaggggcgacagccgtgacggccaaagaccacctacaaggatggtgctggcaatgggcagcgagctctgcagcattttgttgtctgcgtcagagtaaaaatggcagggaaatgtttggacatgggagagagccgattgcttcttcccatgtgagtgaaaaatttcatttcaaatatgcacggtttgcttgcatttcaactaaaatgtgaggtacttcctccgtttcacaatgtaagactttctagcattactcacattcatttagatgttaatgaatttagatgttaacaattagaccaaaaaaaaaaaaaaaaaaaaaaaaa

SEQ ID NO: 63274 - DNA, 595 bp, Oryza sativa
  Clone ID: PAT_MRT4530_64532C.1
ggcagcaacagcatcatcatgcggcattcacttatcaataaacaggtcacagaactcagggacacccaaattatgaaactacagttaagctatcatcaacatcatccacgctgggaacgttttcctgtaccaggcaaaaagctaaaacacgctgacactcatccagtccacactggctacaactgaacgagccaacagcatcaatgaagttcgttcttttgcctagactgatggaaacgttcccaaattcgggcaaatgataagttaacgcgatcttggacctagcctagctcttcatctgcactgtacaccctccacgttttgactttgcaccagcaatgaagagctgacgccataaacagtgcatctcctcaccacggatggctcgtgtcacagcaattacctcttccgcttttttggctcaaccttagaatcagaatttgatgatgctggatatgaatttgaaggtctcttcgtgccattttctttgacacaatctgcgcacaggaaatgatctaattttttggcctgctcaatggtcattcccatacaagatggatggaaccagtccttgcatccctcgcactgcaccatt

SEQ ID NO: 63275 - DNA, 1240 bp, Oryza sativa
  Clone ID: PAT_MRT4530_64533C.1
ggccggaaggagataagctaagctagtagtacactactggagtacatgagaaattctcgatcatcatcagtcacagagcctcacaagggctcacatctcacaaaggaaatgttgctgacaggaattaagttaacacacacacactgcacgcagagctaaccaagtcatcaatcaccacaggtgttgttggtgttcaactctctccccccacctctaaccaaacgaccggcgcagcaaagccgtggccgtagcgacggctgagctgcgccgaagccgttttcctaacagcaacacaacataatgttcttttttttttcttttcttgaacaggctaagaggcggcgaaggccgaattctgcagacgccttggttctcttgcactgtacacctcaaccttcgccacggaaaagcacaaggtatccctcagcagcagatgttacccagtcaagagttttcacctcctctgcctttttgactcagccttaggctcatactttgatgaacctgcatatgcatgtgaaggtctctttgcgccgttttccttgacacaatctgagcacacaaagtgatctagttttttggcctgctcaatcgtcattctcatgcatgatggatgaaaccagtccttgcatccatcgcactgcaccattagatcatccgggttatacggcatctcgcacttgcagtatacggcgacgcggtcgggggtgaaggcgccggtggcggccttgtactcgaagcggcagaagaagtcctcggggccgacgttgtcgagcttggtgtagttcttgaaggagtggacgacgcacttgccctcgatggtgtgggcgctctgcatgtcgaagtggtcggagaggaagagctccttggcgccatggaactgcctcctcccgcccttggactcctcgggccggtagtaccaccgcacccgcacccgcacgctcccccgcccgtccagctccatcttctccaccctccccacgtacggcggcttctccgtgtccgacgcccgcatcagcacgcagtcccccactcggacgaccttgttggtgccggagatggtgtaggagtcgacgtcccgcttgccctgcttggtcttggccatggcgagggggcgaggttttgggaggtggaggaggggggaggtggggagagaaaccctagaggcgacgacgatgagatgggtggggagctgggagaaagggccgcgttccgatccggccggaggaccgggccgtct

SEQ ID NO: 63276 - DNA, 1771 bp, Oryza sativa
  Clone ID: PAT_MRT4530_64534C.1
tgggtgtcgaagtggtcggagaggaacagctccttggcgccatggaactgcctcctcccgccctggactcctccggccggtagtaccaccgcacccgcacccgcacgctccccctcccgtccgtctccagcctctccaccctccccacgtacggcgccttctccgtgtccgacgcccgcatcagcacgcaatcccccacttccacaccaccaccatcgtcaccacccttcagaaatcagaaaccgcccttcttcgggtccgactccgacgccatcgccgccgccgccgccgccgaaaccacgaaccctaccccccggcggcgccgcagccgccgcgccggagatggcggcgtacctgagcatgggagaggcgcaccgccgcatcgccgactacctctcccgcgtggcggactccgtctcctcgtcggacggcgccgcgctcgcctccctcctcgccgtctcctccgcgcaggcccccgccccgctctccgacgcgctctccgccttcccggacttcccgcgcctcgccgccgaccgctacccgcacctctccgacctcctccccccgctcctccgcgccatccactcccactccctccgccgcttcgccgacgcctactcctccttcgagaaggccgccaacgcgttcttgcaggagttccggaactgggagacgccgtgggcgatggaggcgatgcacacggtggcgcttgagatcaggctgctggctgagaaggcagatagggagcttgcaacgagtgggaagaaccctgacaagctgcagtctgctgggtccttcctgatgaaggttttcggtgcactcgcggttaaagggcctaaacgcattggagcactctatgttacctgccagctatttaaaatttacttcagacttggaacagttcacctttgtcgcagtgtcataagaagtattgaaactgccaggaattttgattttgaagattttccagtgaaagataaggtcacttatatgtattataccggcagattagaggtgtttaatgagaactttcttgttgcagatcagaagctaacttatgctttggtgcactgtaatcctcagtatgagtcaaatttgaggagaattttgaagtttcttatcccagtaaagctttcaataggtgttttgccaagaataacactactggagaggtacaatctgcttgagtatgcagatgttgtgacctcacttaagagaggagatctcaggcttcttaggcaagcactcgaaaggcatgaagaccaattcttaaaatctggtgtctaccttgtattggagaagcttgaacttcaagtctatcagagattagttaagaaaatccatatcattcagaggcagaaggagccagccaaggcacatcaaattaagctagaagtcgttgtaaaagctttgaaatggcttgaaattgacatggacgtggatgaggtggagtgcatcatggcgtgcctaatatacaagaatctcattaaaggatactttgctcataagagcaaagttcttgtcctcagcaaacaagatcctttcccaaagttgaatgggaagcctgtctagttcatagtcgcccctgaaaagaattaactatctcctattctgttgtattcggcacatgtttttgtaaaacgttgaaaaactattgcctgacagtaacatttgtattattgtaacagtggtgtttgtactagtgtaacaaagagaccatttcgcacggtaataaatgacacttatctaccaaaaaaaaaaaaaaaaaaaa

SEQ ID NO: 63277 - DNA, 186 bp, Oryza sativa
  Clone ID: PAT_MRT4530_64535C.1
atgagcgatgaatacttcataggcaacgtcttcaaggaggtcatgacaccaaatggcaccactgtcgcatgtctagatgaatcgggttttcacccagagagtcttaccatgaagagggggttggtagctccacaacactttaaaggggatttcacaacattcagagatgtcatatttgctggctaa

SEQ ID NO: 63278 - DNA, 777 bp, Oryza sativa
  unsure (1)..(777): unsure at all n locations
  Clone ID: PAT_MRT4530_64536C.1
tgaaataaagataaggagtccagtgatccatgcttcattagtgaagcaactcgccggaaaaaacactatttacataggtttcaacttgttgccacccaaaaagtctcagcacttctcgtgatgcttagatctggtgttcccattgtagagccagtagataaacagtgggagcgttagggtgagagggcttgtcaaagacttgagcaccgattgtgtttgtggcaatattggttcctgggtgaaaaacactcctacatacgtgatctgtacttgccggcggggacggagttgttagcgtcgccggcgtctgcggactggccggaatcaagagagacctctgggacttgctagatccttgtacaggagacccaccaggaatgacaggggggcttaatagggagtgaccaaggcctttatgactgtgggggtgcgcgcctagcatgatgcgataaggggtgggggcagcgccatgatctttaactatgagtcggaatggggggggactaagaaagggggtgcgattgatatggagtatgagatcagacactgggtgagcgcgagatgaaggggcgcagcctgtataaggcctggtgttcgcgggcgtggagagacaggggagcgggcgggctgcgggcggcggcgaaaggacggtgggggatgggattgttgatttttattggatgaagggcggtgacggcgaggtacgagtaactgattcgagcttgaaaggtgctcgatggcgtagacatagacaacacattaaccccgggcctcatn

SEQ ID NO: 63279 - DNA, 452 bp, Oryza sativa
  Clone ID: PAT_MRT4530_64537C.1
tgagtgtcgcatcaccgatgaacatatatatcctattgtgtagtagttagggatgaaactggttcggatagtttccgtccgtccggaccaattttaggattcggaaaaattcggtcggaactgtccggaatttctcggattcggaaacgaattcggattttttttctcggatacgaaaacgaatacagtaagggtgatatccgacggaatcggaaaatggtcggaaactatccgggattttttttcggatatccggagtacacaacagccgctgcctcccaaatcccccacgcatctaggcggccgccgccactgcccaccgctgcctcgccccttcgctgccgccgccgtctcgtctcccatcaccacagccgccgcctcttcgtcggcgccgcctcctcgcccgccacagcctccggcgccgccgcatgaggccggcggcgagcgggtag

SEQ ID NO: 63280 - DNA, 469 bp, Oryza sativa
  Clone ID: PAT_MRT4530_64538C.1
atctatctcctctgcctctgcgcccatttctgctatccacctgcgatccatccgttcccgcgaggaggtgggagccgtacgcctccgccgcgagagcacgggagagaatgataggaggagatctccgtctccctctgcatcatcctctgcgatctactaacgggatcggatgtggtgctcacgttcacgtagctggtcaccctgctttgtaagaagatggagatgtggatcctcatggtccgtctttatgcggaccgtgaatccaccatgctatacatgctcatgcttgacgagttcgtcaccactattgacaccattggttttatgtctaaactgctgacacaagaacattaactctaccggttgcgatgtgggtggtcaagacaagatctggcccctttggaggctctatttacagaacaccccatgccttattttttttgtggacagcattgacagagagcgcgtt

SEQ ID NO: 63281 - DNA, 207 bp, Oryza sativa
  Clone ID: PAT_MRT4530_64539C.1
attatgggggacacattactcctgtggaattttcaatctgcatttggggggctcaccttacatccagtcccgggaaaacaacgtggccacaccacaacacaccaccacaggtgccccagtggtctgtgaattcttcccaagcccccatatctggattgtttaacgggcgccctcgggcgccgaattttgtggccctctcgagggcgc

SEQ ID NO: 63282 - DNA, 222 bp, Oryza sativa
  Clone ID: PAT_MRT4530_6453C.1
atgaagataaatactaaggacctatttggttggggaagaaacaaaaatcaaccaaactcggcgtccactccagatgcggatgcggatcctctgactttacttgctaaagtcacgattagaggatcagcaatcaaggcatttaatggctcgaaagtagcccgcgggagatatcctccgttggatgagtcggacaatagagattggccgaaagtcacaccgtga

SEQ ID NO: 63283 - DNA, 532 bp, Oryza sativa
  Clone ID: PAT_MRT4530_64540C.1
gtggctggctgcacggtccgtcgtctgaccccgtcggagattgatgaacgccgacgcaaggtcttatgcatcaactgcgacgagacctactcacgcggccacaacaaggtttgcaaatgcctcttccttcttgatttggcttatgatgatgatgaggaggacgagggggacactacaccggccgccgatccagagacgcttcgcatcttcctgcatgctgtcacatgtgttcgtccgtccaacgccatgcacctctccattcgtctcggcgacgccaccctccacgcgctggtggacatggggtctacgcacaatttcctgtcacaggagtccgccgcacgcgacgcccgcatctccatcgactccgaggtgttcgtcaccgacctatacgtccttccactgggcagctacgacctcgtcctcagcatgcagtggctgtctaccctgggccaaatattgtgggattttggccaactcaccatgtctttctggcacaaggaccacatggtgttgtggcgcagtctgcccaccg

SEQ ID NO: 63284 - DNA, 174 bp, Oryza sativa
  Clone ID: PAT_MRT4530_64541C.1
atgcgcaagggccaaggccgtcacgatgcaacggaggtggcgccagagctggaggagaggttgtgccggcacggttgggcagcgtcggtcgccgtcgtggcgaggaatgtggcggctgtgcgggagccaacgacggcgaggcttgcagtgaagggcttagttctattaatctag

SEQ ID NO: 63285 - DNA, 501 bp, Oryza sativa
  Clone ID: PAT_MRT4530_64542C.1
atggcctctggttctggcccctgggactatgtatatataggaacgtgccatgcttacgactacgaccctatttcaaacatggcctcggtgagagttgcgagttgggacaccgctcttctcaagccatatgtcgggcagctcaggccattaggatttacactagctcatgcaattccccgtggatatctgtttatgatccgtcgcgccggccggccggccctccctcagcgccccaccgcccgccgccgctgcgccggccggccggccctctgcgcccgccgccgccacgccggccggccggtcctccgcgccccaccggccgccgccacaggccacgcctcaccacgcgcatcgccgccgccgcgccagccggccggccccaccgcgccccgccagccgccgccgcaccggccggccctccgcgacccgccgccctcgcgccggcttggcactagagaggagaaggagaggaatagagataagaatgagaggagaagataa

SEQ ID NO: 63286 - DNA, 786 bp, Oryza sativa
  Clone ID: PAT_MRT4530_64543C.1
atgccgcaaatcaatctggagtccctcttctgcggcggcggcgaggcggggtcgagggtggcgtgcgagaccatcgcgctccccggctgctccgacgccccagcggagtcgcgctgcgtgcggataggggacggcgccatctgggcggagttggccggcggcgcggtgctggagagggatggctccaccaagggcagctctaatcccaaggcggccgctgcgtccgggaaggggaagaagggcgggccacggccgtcgtcggctgagtcgaggaggctgccggtgaccggcaaggcggccgtcgtgatctgcggtctgccggcgggaaagatggtcgcgcagaagaagcggctgtccccatgccttggccgcggatggcgccgggcacccgcggcggcgggggccagggtcttcgcgagcgaggcggtggagacggatcccgggtccccgaaggtttcgtgctttggggccgtgcggtcggagaggtcgccggcgacggcggcggcggcgcctgcgcctcccgtggaggacgaggagaggaacggcgggtgctgggcgagcgtggctgccacgctgcgtcacctatgtcgttcttccagcaatccgctcgaaggtgagctggagacgaacgagtggaacgcaacggcgacttcgtcaccgacggtcgccgctctttcgccgccgcggccggtggcggttgggctgggagagatgaagcgccttgcttcacggcggtggccggagaccatggcagtggctgggcagggaccagtctcggcggcctga

SEQ ID NO: 63287 - DNA, 197 bp, Oryza sativa
  Clone ID: PAT_MRT4530_64544C.1
tttgatgtgaaggcaaggcataggtagacctcaccggacgccgacgcggaggagctcatcactggccagctgccgccgccgccgccaccactgctcacgctccgatagctgccgtctctcctcgcggggcgggtggggggggggaccgctgcttctctccataacgcctctggcgaccatgcccctgaccgtgcaaa

SEQ ID NO: 63288 - DNA, 536 bp, Oryza sativa
  Clone ID: PAT_MRT4530_64545C.1
catgaatcctttcttgatctctatagtcccatcatctatgctccttcttgcttaggtaagtccttcgccctcccaagaagaagaagatgtcttgctgctacgccaactgcggctgcggcagcgccctgctcagtgcggcgcaggatgaggccgatgcaacgatgttccctgatgcggaggccacagccaccaccaagaccttcgtcctacctgctccatccacagggcgagctctgtatgaatggatatggtggtggacagcggcgagaacggcggctgcggctgcaacacctgcaagtgtggcaccagctgcaacggcatgctcctgctgctcctgcaactgaatctatctgtgatggcgcccgactgcatgatgattcatcgcctggatgctgctaatgtgcatcacagctctgatcgagcgccttaatctgcttgcattaatacccagcttatatgtacgcaggccttgccttttgctctgacacctaaataataccgtagcgcgtcgttgccagagaacgtcacgctgctcg

SEQ ID NO: 63289 - DNA, 411 bp, Oryza sativa
  Clone ID: PAT_MRT4530_64546C.1
atgaaggaggaggtcaagacatgtggcggtgacctcgaggacggcaaggcgcgcggcgcggtcagagtcaccgacttgggcggggacgacgcggaggaggtggagacaagatggcggtggcctcatcggcgagagagtgtggtggaaggagctcggatcgatctggtcgccgtcgaaggcatccagcacggctcagatctggtcaccgttgatcccgttgctggcccgcctggacaggaggaaggcgaggcacgcggcgcaatcaaagtcaccgacttgggcagggacaatgcgaaggaggtggagacaagcggcggtgacctcgtcggtgagagagcaaggcggaaggagctcgggtcgatctggtcgtcgtcattgtcgttcccatcgctggtatccgacgcagcttag

SEQ ID NO: 63290 - DNA, 366 bp, Oryza sativa
  Clone ID: PAT_MRT4530_64547C.1
atgaggatcggctggcagaaaaggcatgtagcggcggtggccacggctcaacggatgcagcaggtggcgcacaacgtgccgtccacccacaccgcatcctctccctctcctgctgcccgcaccgtcctcctccgccccccgtcgcatcgcatcccagcgagcgtgcttacgcctgcgccccgtggcctcccgcgccgggcgatcccgcttgcagtgccgcaggtgccctcctgccccctggtcgccatcgcatgcctcctctgcttccagtggaactttctctcccgcgtcgcttcttctcccgtgcctgcttgcctcttcgagtctgctgaggggacagggatgcgatgcagtgcagatggttga

SEQ ID NO: 63291 - DNA, 879 bp, Oryza sativa
  Clone ID: PAT_MRT4530_64548C.1
atgatgaacttctcctcgtacttctactcgtcgtcggcggcggcggcgggtggtggtggtggtggtggggagaagaagtcgtcgtcgtcgtcggcgtcgaagaagaagcagcagcaggcggcggcggcggagggagggaataaccagacgaggtaccttggggtgaggaggaggccgtgggggaggtacgcggcggagatcagggacccggcgacgaaggagaggcactggctggggacgttcgacacggcggaggaggccgccgtcgcctacgaccgcgccgcgaggtcgctccgcggcgcccgcgcgcgcaccaacttcgcctacccggacctccccccgggctcctccgtcaccccctacctctcccccgacctctccgccgacgcctccgatcagctgctccagccgttctacgccaatccctccgccgccgccgcgctgcccactccggcggcggtgatggccggaggaggaggagtcgaattcggcggcgagtacatgtacggcggcggcgtcgacatgtcgtcgctgatggacgacattgcggccatgcccgacgacctcccgcccagcgtgacgggcggcggcggcggcttcgccagcagcgacgaatactccagcggcggcggcgggatggtcgacgacgtctccatgtactgcggcggcaatggcggagggtcgtcgtggtgcgacgcctccgacttcgcctcgtactcgtcctcctcgccggcggcggcggcggcggcaggctcgcacgggatgtacttcgaggaggggtacgtgcacagcccgctcttctcgccgatgccggccgtcgacgacgccggcgccgacgggttccagctcggcggctcgtcgtcgtcctactactactga

SEQ ID NO: 63292 - DNA, 264 bp, Oryza sativa
  Clone ID: PAT_MRT4530_64549C.1
atgaccacagccctacctccttgttcccttcgattgctgctcctccaagactccacccccaccactcacgaagcagccagatctgaggtggcacccgtagcacctgctgaagaaaacaacgatggaggcgtcgatgacttgggaggagtcaagcatgcaaatggggtgagggaggtaaggggatatgcgacccctcttgcctactgcacgcgcgcatcccgctctatacatgctcgtccctacgccaacatggcctcggcctag

SEQ ID NO: 63293 - DNA, 891 bp, Oryza sativa
  Clone ID: PAT_MRT4530_6454C.1
tgacagttgtccaccttgcagtaaccatattgccccagatcatgatccatttatcttgtcaacaaaaattgctggccacgcaatatcaagttttacgacattgccaataattttgtagcctttgtatggcctgatcaattcttcatattttgccaatggaaaatgaacatgcaccatcaagtattcagttcctagctcaatacctgcaactttgcgtgttggatcacagcttacaattgaagcaacaaccacattcttatttcgatttttccagcttttcaagaatacattagttccaatctccaatgaattggcatccataatgtccactatgttgcactgttgtttcttataagcattagaattattcttcccttgttgcatgtgatcattctggttcatgtttcctttattcattccaagaaatttagacaaaattccagcttcatctcctactgcctgattgagatcattgcactgaaccacaatcctaagacctttcggaaggttccaaatatctttcagttttgtcttcccacgtgtttcaattgttccattttcatctcgaacattaattttaacatcatcatcagattcttcattgccttctccagcattcatactagcatcgtcatcagtatcttcattgacttctccaacatcgtcatcagtatcttcattaccctcttgaacatcactaggattgatcactgcatctgatccaaaacagccaccgggcatgaggcgtcgccgcgtggccctcagcggccgtgggggagctcgcctactcagggttgttggtcggcggggaggcgtaggtgcagaggatggcagccaacacagattgggagaggtgtggacacgcggagcggctggccagcaaatcaccat

SEQ ID NO: 63294 - DNA, 1066 bp, Oryza sativa
  Clone ID: PAT_MRT4530_64550C.1
cgcgcttgcaccaatcgttcaagaggtttcggcaaggggatgcctagacgacatcttaagggagagaagcgacgggaaaaccgccaccgccgtccgttagggtctcaaaagagccaaggttgggctttcacccggcaaccccccttaaggagtgagacgacacgctgatgcaccgatgctccaccactgttcaaactctgccgacatgtggggccactgcaccggtgccccctgccggccagccttcacgcgccaaagactgcgccacacccgccagcagctccttgcaccgtggtcgcctgcgttgcgccggtctcctccaccggatgcacctctcgcgtcaatctggcctccagcccacggccgcgcctttcgtgccaagccggcctccgtcgcccccagcagcgcctctcacgccgtgccgacctcctccaccggacgcgcctctcgcgccaatccggcctcccgccatcgactgcgtcaagccgacctccgaccttcctacaatcgctgtcgcgccggccagatgcggccgtcttccttgccgccggctagccgtccgagaccgccatgcctcctccaaccgcagtctgccggatccgccacgctgacgccaaaccgtcgccgttgccaaccctgccgtcgtcgccatccccgccgccaccgccatctccaccgccgtcgtcgccattctggccgtcgtcgcccacaccccccttgcccctaccgttgccgtctccagccatcgccggacgccgcgaacgcgatggagcccggcaatgccatggactctgcgatcgagtatgctcgcgtgtccagcgacgccatggattccggcgcgcgcgtcgacgccgcctaccagtgcgttttccaggaatacgacagggacgcgctcaaggccaacatcacggccatggggcccctggtgctgcccacctgggatgagctgctgttcgtgctcctccttcctcctcttgcttgtctgctgaagctcatcacggccatgaagctgaagctctgctgttgtttgttttctgctgttaaatgtactcttaagatgaattga

SEQ ID NO: 63295 - DNA, 375 bp, Oryza sativa
  Clone ID: PAT_MRT4530_64551C.1
atgtggggccactgcaccggtgccccctgccggccagccttcacgcgccaaagactgcgccacacccgccagcagctccttgcaccgtggtcgcctccttcaccaccggccgcgcctcatcgcgttgcgccggtctcctccaccggatgcacctctcgcgtcaatctggcctccagcccacggccgcgcctttcgtgccaagccggcctccgtcgcccccagcagcgcctctcacgccgtgccgacctcctccaccggacgcgcctctcgcgccaatccggcctcccgccatcgactgcgtcaagccgacctccgaccttcctacaatcgctgtcgcgccggccagatgcggccgtcttccttgccgccggctag

SEQ ID NO: 63296 - DNA, 280 bp, Oryza sativa
  Clone ID: PAT_MRT4530_64552C.1
gaaacggagtaagtgaattggcatttttgacatgaaatgattcaaacctactaatgtactcaaatagggtctcaatgctttaaattttaattattattaatacttaggaaaactagagcgtttgacatataatcttatgcttttgaattctagcagagttaattatctcaatatcattagatggcttaggcttgcttgactacacagcgataaatgggatatcatattatgtgagctgtagacatttaactgtttcagagctggatctagcttgatggaa

SEQ ID NO: 63297 - DNA, 2206 bp, Oryza sativa
  Clone ID: PAT_MRT4530_64553C.1
ccctcgaccaaaaaccgaatcgaacgccgcgtgcgtgagagagagagagagagagagagagagagagagaaaccaccccaaaattagcgaggcgaggaggaggaggcggaggaggggagccgcaggaatggcggcgatgcagagctggcgcaaggcgtacggcgcgctcaaggactccaccaccgtcagcctcgccaacctcaactccgacttcaaggatctggatgtggcgatcgtgaaggcgactaaccacgtggagtgccctcccaaggagcgccacctgcgcaagattgttgccgcgacgtccatcgctcggcctcgggcagacgtcgcctattgtatccacgcgctttcccgccggcttgcaaaaacacgcaattggattgtagccttgaaaacacttgtagtgatccatagacttcttcgagagggtgaccctacttttcgagaagagcttcttaattttgcacagagggggcgtattttgcagctctcaaacttcaaggatgactccagtccaattgcttgggactgttctgcatgggttcgtacatatggtctgtttctggaggaaagattggaatgcttcagggtcctcaagtatgacgttgaagctgaacgtttgtccaaacaaggtcaaggtcctgaaaaggggcacagcagaaccagagaattggagtcccaggatctgttagagcagttgccagctttgcagcagttactatatcgacttgttggatgtcggccggaaggagctgcaaataataactacttggtgcaatatgctctagctttggtgctaaaagagagcttcaaaatatattgtgcaataaacgatgggattattaaccttgttgataagttttttgagatgccaagacatgaagcactcaaagcccttgaaatttacaggagggcaggccaacaggctgggagcctatctgacttctatgaaaattgccggggtctagaacttgctaggaatttccaatttcccactctgagggagccgccacaaacatttcttgtcactatggaagagtatgtgagggaggctccacgcatggttccagtgcgagaaccattggaattacctgagaggcttcttctgacatataaacctgaagaacaagaggaagattctgtgcctgatcctgtcgaagaggaaaaaccacctgttgaagaacctgttccagtaccacctgttactgaagctgtttcacctcctcctcctcccaagactaaggtggcagatactggtgatctactgggattaaatgatccgaaccctagtgtatcagcgatagaagaaagcaacgctctggctttggccattgttccagcagatgctggtgcttcaacatccagcaccgctacatggcaagataaaggatttgatccaacagggtgggaactcgcccttgttaccactccaagtaacacgaattcatctgctgcagatagtcaactgggtggtgggtttgacaagctcatcttggaaagcctatatgaccagggggactacaggcagagacagcaacagcagttatatggttcttcagctcccaacccgttcatgtcaaatgatcctttcgtaatgtcgaaccaagttgctcctccaccatcggttcaaatggctgccatgtctcagcagcatcaacagataccaactatgatgcaagcgaatccctttggaccaccaatgcaaccgcagcatgtgggcatgggccctgcaacaaacccatttttggattctggttttggcccattcccaatggcgaacaacgggcatcagcaagccaacccatttggtggcacccaacttctgtaggttgcatagaagaagagcatatcgtgtcctagcaaatgcgattttcgtgtgattatattatgcattgtgcctggccttacttgtatgtcactcgtgtaattgattttgtgtattggcctcgccacacggggctggcaagcaacccttgtaaagaaattagtggcctgtgtagcatcagttatatgtcaataaatagtatgacatgattacaaaccaaaatggctggttgaacaattatctgttccctccatcgtccccgcccgtccactgctcgccgtcgtcaccgatccccagaatcgcacgcagaggggcctcgcgcacaaccgccgctcccgcggcttctcccgatcccgccgcgccgtcgagggcgcctaa

SEQ ID NO: 63298 - DNA, 1023 bp, Oryza sativa
  Clone ID: PAT_MRT4530_64554C.1
atggaccccgggaaatcgttctctgcggcggaggaggaggcgacggattcggtctctacgaagccggaggaggttgcggcttaccagagcagcgaggccaagcaggcgaagctacagtccatgctcgccgccctcctcgacgaccccatactcgccgacgtgcccaggaagccctccctcgccgacgtcgacacgctgatcaacctcgagctcggcagcgccatgcggctaaccgtcgtcaagctggatggcacctccttcggtactgatgttgcaatgttgaacacagccactgtcaaggatttgaagatggctatcaggaagaagacggatgagattgaacaggaaaagatgggccatcgtcatatctcatggtttctatttttctttatggctttttttcaagaactatcagatcccttcacagcaagtagtgatcactggaaagagatcccaacactactaccactaaatttgcatatatggtgcctgacatgctgggggtttgagccacagcccacagaatacgttatatgtttatttctcgccgcacgttatgtccagggtatatcgaaagcactcaagaagaagaaaacaccgctttttccatggtcttcataggaaaatgtgatcccatcttgtttatttgagcctggtgttggggagcagcatggtcacatcagagaccaagaggtggccaacctttagttctattgacatgagggaagccatgtagcatgaaacccttgttctgaaacttcttcgataatcctcagctggaaaagagctgtaatatctctcttttttctttagaaccagacgcagatcgtgcaagcatttcatatgttcttatattgtagctactttcagtcatgtaagttttcagtagttaggacttaggcgtggtaatacatctttcacttgtactatcttttgagggggctaatattatggaaccattcctcagctatgtttgatcttaaaaatgatgctctcagttcaagtaaaaaaaaaaaaaaaaaa

SEQ ID NO: 63299 - DNA, 801 bp, Oryza sativa
  Clone ID: PAT_MRT4530_64555C.1
atgcggctctggcgcgcggcagcggctggtgaaatggtgctctccgtcgcaatgaaatcgcgacgccgcagcggaagcagcagcggcgcggtctacgcaggcagcgagcacgacgacaaccacaaaccacaacccacggctacgtacgcgcttcggcaccgtgtcggcgtatgcgtatttggcatttcgatgacgagcacactacgccctcccgcctgccgcccacgaggccacgaccccactcgagcgatcggcagtgcagtgcggcacggcacgggagaggagagcggcgtgcgtgggtttggtgttgcttttgcggtgtacgggggatcgatcgtggggccgcggaaacaaacggctcgtgcacgcgagcgtcaggcccgatgcccccccattcgctgcatgcggtcctgcggcttggcatggcatggcaatggcagcttctctcggtctcggccgctgctgtgtgctgtgctgcctctgctcgctcccccacgcggcgcaggcagcggcagggaggaaaagggcactcgcgtgccgacgcgcgggggcacgcacgcagagtgtgacagtagacagtgcgacagtgtgatatggagggtggagctcgtcaggctcggcggcctttttcttcgccacccgtgtcgcagctttcatcgtggtctgtttcctccacgcattttcagttttgggatacagcagctttatgttctagaactagtagtgcgtgttcaggctttgagctgcatatgccattgcttccagcctttccagcacaccatgggccttttcacgcaatga

SEQ ID NO: 63300 - DNA, 258 bp, Oryza sativa
  Clone ID: PAT_MRT4530_64556C.1
atggttgagttggatcttggtggtcactcaattctagaaatttgcctaggggtgtttggggttgaaggctgtggatttcctcaggggccggaagttccggagttccttaccaggaagttccgggtgaagggacgcgacggcgaagcagcgctccagcgagcaggccacctcgacaccaccgccgccgactccccacggcgcagcctcgccccgtcggccggcggcgccgacctgccaaagccgcaaagagaagattga

SEQ ID NO: 63301 - DNA, 683 bp, Oryza sativa
  Clone ID: PAT_MRT4530_64557C.1
atgaatggagtgggattaatattgaaaaacattgttaaacccgcccataatcgcaagcacagctattcaaataggtttactctagccagagatgtaccactgtacccacaagacatagccccaaaacatgttaccatgccctcagtaccaccacggtacctcgaaacgagactgtgacagtaccctccgcataacacaattcacagcagtgcaccgttcctggatcataatcaacccctttaaccaaggtatagactccccagtgaccccacggacttatcgccgcttcacagtctagtgccccgcaatgaaccatgctatacaaaatggctgtctcgtgggcgaagaggcgacgtggcactgaggtggcggctgactggcgataatgtggacacgccacacgggatcaacggcggtaactttggatggcggcggtgacggtgtacggcggccagcgacgggagagaccggcggcgagctccggatccacggcggtgacgactttccggcgacgaacggcggcaacagaggggtggccgggcttcttctcgctgctgcgatgccgaggagggcaatggcattgactgggggcgactgaggcggcggctagcagcggctgaaaccacggcggtgctcggatggcgatggcggtggtgctacgggcgacggtgaggtcaggcgag

SEQ ID NO: 63302 - DNA, 702 bp, Oryza sativa
  Clone ID: PAT_MRT4530_64558C.1
atgcagagggggagaaagaatggtgccacacctgaaggagatgtacagcagcctggccgcgtccaaggagctcgtcaaggctctcttcggtatctggggccccggcgatggcctgaacctgtcgacggcgtcgatgctctacctggcacgcgcccacgcgcggcagctcgccaaggaggaccggcggcgtggcgacgaaacggtgcagatgagggcgcagctcgccgaggaggcgcgggagtggaggagccagcagaggaagaaggttgcggcgacggtgcgcgtggcggtgcggggctcgacggcgagcggaggtcgaggcatcacgccgagagggtgaacgccaagctcgggaaggcactggccgacgcggagagggagctggagagggagtggaggtcgagggagcggctggagaaggtgtgcgacgagctcgtcaggggcggcctcaccggcggcgtggacggcaacaggggaggcaaggaggaggtggaggagatgaggcgggaggccgagagggcacaggaggagctggagaaagagagggagatgttgcgcctcgccgacgagctccgccaccgaggccttccgacccgcggcgctgctcaccgtcacaccaaggcgatgaattgtggcgaccagcttcggcgaagcagcacaggggcgtactctcacctcagtttctctctccgttttccatga

SEQ ID NO: 63303 - DNA, 293 bp, Oryza sativa
  Clone ID: PAT_MRT4530_64559C.1
ctcggtttgtgtagtagtatatacttgctgtttgcccccaccacccatgcgtttattagcgttgtggtgtgtagttttccacttttaagtttcagagtttctcctttgatcctctgggacttaatttgtatagacatgtatgatgttttacttggaaaaataagggaaaaaatagaatgatggatgacttaattaagttgcttgaattactctcttgtaagtggaagtggttatgcacccacaactctgtaatatatttaacttcatttttttccaaaaaaaaaaaaaaaaaa

SEQ ID NO: 63304 - DNA, 460 bp, Oryza sativa
  Clone ID: PAT_MRT4530_6455C.1
atggggatgcctagcgtgcaagccgcattgcgctgtctcccgccgctaatctggccgcactctgccaccgttaaccccgctacactctgatgcctcctgccgctaatctcaccaccgaggccgccacagccatgtgcgaaggtatatgtgtagggggctgagcacaaaagtattgcctacgtggcatgccacattggtggtcaaacgtggtcaaaggacgattgtaccgggggtggtacattaaaccaagttcacggacttaaacgtgcaattttaaagttcatagacctaagtgacaccacccacgagtttaaggaccggccatttatttcactcttaaaattttatttattcttcattaataaaataaatttatccattcatcagatcgtatcgctctcctactcctcaacggcatatcattccgcgcgtggcgcattattactcatgtagtttcact

SEQ ID NO: 63305 - DNA, 811 bp, Oryza sativa
  Clone ID: PAT_MRT4530_64560C.1
cgcgctttcatgcacggcaaggtttaatccggaccgcgagagagccgcgccaaagaaaagaaaagaaaagaaaaaccacccccacaccgtaccgtacgaacagtcgtcccatccccggaacccacgcagcttcgccaacacaagagatggtaagctagctaggtatagtacgttcaaggaggagaaaggccggacgcgagagatggacgccgtcggcgcagctggcggtggcgccatgctccccgccgccgccaggcgcggccagccgccgcagccaccgtgcatgacgacggcgccggagcagcaggccgccgccggaggcgccgtgatctggccggcggcggcggcggcggaggccaaggagaagatggtcgtcgacgcccggaccatgcagctcttccccacgcgatccgcagacggcgtcgtcgtgtcgccggctccggcgccggcggcggcccaagaacgacgacggccggaagtgcatgtgacgccgtcggtgccggcgacggcgccgacggcgccattgaccatcgtctacggcggccaggtgctggtgttcgagcactacacggcggaggcggccgagaagctggtgcagcgcacgcagcatctgctggctgcggccgccggcggcggcggtgggaacaaaaacaataatgtcaccgttgtgactcccccgccggacgagccgcccatgctgctgccgccgccgcagatgccggctgcctcgggggtctccgccggcggcgtgatgccgatcgccaggaaggcgtcgctgcagcgattcctccaaaagaggaagcaaaagtga

SEQ ID NO: 63306 - DNA, 379 bp, Oryza sativa
  Clone ID: PAT_MRT4530_64561C.1
gataacccaacccactgctggaagcacctggaattgaatcataaggctcactgctatttgacaccggattaccttgacaccctttgcttcttcttctgcttctccatctgtcgctcaacgccaccgaaaagctgaaatcctccacttgggaggcgatttccacattaactttaccattttcttctctttcctttctaaatatttatatccggtagtacgatcaccatcactttttaccgctttatgctgttctttttttatttattataatttactatcccccctcgttgcactcttttcttcaatggaccttatgcctgtatgaggtccctttaaacatgatcatcaattaattttgcactcaaaaaaaaaaaaaaaa

SEQ ID NO: 63307 - DNA, 177 bp, Oryza sativa
  Clone ID: PAT_MRT4530_64562C.1
atggccaagccaacctcgcgcgctcctgctccgagcgtcggcctcgccagcggcggcggcggcggcggcggccgtggcctcgcccatgctactgccctcccgcatggccgcgcctgcctacgggtcttggaacggccggcgggggcaaccaccacgcagatgccggtagcggggtag

SEQ ID NO: 63308 - DNA, 324 bp, Oryza sativa
  Clone ID: PAT_MRT4530_64563C.1
atgccgtcggtggagagaggtcaagctctaactaagactctatggcatccattgtggaaggacggagggggagaggaggacggccatgactgctcgagggaggagtggagttggatgggggatagagatgtggaagaggtcgccgatgaggtcctctcaagagaggttgccacggtagggcgtggtgtcatcgcggggatccgccactacgcgatgacgacgtttgctctgacctgccgatgtccctcccttggcaaacgtcagacgggcagcgagcacaacatggtcaaggttgttgtgcaggagatcgctgtcagggagtag

SEQ ID NO: 63309 - DNA, 487 bp, Oryza sativa
  Clone ID: PAT_MRT4530_64564C.1
gggggggtgttttttttttttttttttttttttgtgttcatactttctttcttataaatggtaacacaataaattgaaaacccaaacgttcacttgccaacgacccgcgaaattccggcaccgggacctgcaggcctaccacctcaccctaaaggggggggggggggggcccgcctaaaacatcgtcatagctgtatgctgagagaaattgacatcgggaaacaattacacacaacatacttacccagaagaaaaaagcggaaagcctaaagtgccaaaccagggggcccacacacatgaactgacttacactaactgccctgtgcccactggccaaacctcaaatgccaaccccattaatgaatctgccaaaacgcatcgagaaacggtccgcgagaggcgcaccagggagggggcgctcgggacgagtgagactggcaacaggtgacggcccacaaccgactggccttgacagactggccccaag

SEQ ID NO: 63310 - DNA, 263 bp, Oryza sativa
  unsure (1)..(263): unsure at all n locations
  Clone ID: PAT_MRT4530_64565C.1
tagatggccaccacggagtgtgacgccacattgtgggtgaaattgcacggacangacacagtggatagggtatagtttacccgtggctgacgtgtgcttgcgcgagtgtggatagccctggctggagggtgtttagaccgtggcacgtgggtccataatggctgtgcgcccttggtgtggtgatgatgatgtgaaatgatgatggcccctggtggttgtgtgtggaatgancanggcatntttaaaaaaaaaaaaaaaaaaaa

SEQ ID NO: 63311 - DNA, 1107 bp, Oryza sativa
  Clone ID: PAT_MRT4530_64566C.1
atggcggacgccgccgccgacgacgatgcgcctccctccccacccccttccgcgttccaccccgcgtccgccgatacccccatgtccgacgccaccccatccgccgccgataccccaaatctccccgacacccccgcctccgcctccgccgaacccgagacccccttctccgacgccgcgctcgccgatgcatccgatgctgatgcctcgggcgtcgccgcgccacccgacgacgacgggaccaacccgttgggcggcgccatgaagcacatggccctcgcgcccccggcgccgccgagcaagaagtccaagaagaagaacagcaacagcgtctggaccaggcccaactcccgcaagggcaagaagaaggccaagcagccggccaacgccctcgccggcggcagcggcggcgccaacggccgcctccccaagccctccagcggcgaggatgagctcgtcctcaccccggcgccccgattcgccgccgagcgcaacgacgacgcgcccgatcggcccgtgctcctctcccgcgtcttcaagtccgacaaggtcgaggtctccgacgaccgcctcaccgccggcagcacaaagggctaccggatggtgcgcgccacccgcggcgtcgctgccggcgccttggtgcacaaggcatggagggccaattacgctgagcaaggctatggcgatggcgatgtcctcggcttctacattcatcttcctgacggggagctgtatgagcccaagcagcccttcctggttcactacaaggggcttcctttccgcgcagaagctcccaaggcggctgagcagaagacgccggatccagttcctggtagcgagatatgctacttcaagaatgggatatgccagggcactgcttttgtggacattcctggagggcggtactacccagctgcgtcaatgtatacactgcctgaccaaccaaactgtcaagtcaggttcaactttggtcccaattttgagttcttcccagaagattttggaggtcgattgattcctcgaccaatgagtgacgtgccttatagaccatttgagctggcgaatggcgggcctgctgaaaatggtactgctgaaaaaaacatttaa

SEQ ID NO: 63312 - DNA, 324 bp, Oryza sativa
  Clone ID: PAT_MRT4530_64567C.1
ctagctccatgccagacaccccgctgtcgtcttcctcgtcacggcgacgatgcctaaccctccttccagctcgatgaactcaccgtcgtccgaccactcctcttcctgcagcggcttctcgacctggcgcagagccctgacccggccaaggcggcggcgcacggctacctgccaggcatcggcgtccgcaactcgctgttcacgctcgccggctgcagcttgctcggcttcctcctcaccttccgtcatctgatcactcgtcttcctgcagcggcttctcgacatcgcctttgtctggcgaggaagccgcacggccgacgccat

SEQ ID NO: 63313 - DNA, 1154 bp, Oryza sativa
  Clone ID: PAT_MRT4530_64568C.1
ggcaggcgtccgcccacgcgtccgcggaaagccagctctcatctccaaactaatcaggcccatgagccgaagacctctagttggctttagcaatgtcatcaaaaagctcgccaagggaactgactggaaagaagaaactgactaaacatgacgatgaagcattaaggtttattgagctggctgagaatggtaccgaccccgcaactatcgatgcatccgaaggtatgtagaacctaccatttacattgtcattacaacattttttttctgtttcttaacagccaaggtatgcagaattggcaaagaagccgttatgcacttacacatataggacactttttcgcacttttaactacaaagggatgcatgtgcctcccgtgccgacgccgtcgaccaccgtcgcctcgctagctgcattctataagcagtgccctggcataccccattcttgaagtagcatatctcactaccaggaactggatccggcgtcttctgctcagccgccttgggagcttcagcgcggaaaggaagccccttgtagtgaaccaggaaaggctgcttgggctcatacagctctccatcaggaagatgaatgtagaacccgaggacatcgccctcgccatagccttggtcagcataattggacctccatgccttgtgcaccttggtaccatccatgtcgcgatatccgaatccaaacacatagtagccgacgggtgcgtggatgtcagctctgtcggtggcccatccaaggcgggtgtggccggtgctgccgaggtgaaggaccttgacctcgaagtaccaagcgccggcagcgacgccgcgggtggcgcgcaccatccggtatccctttgtgctgccggcggtgaggcggtcgtcggagacctcgaccttgtcggacttgaagacacgggagaggagcacgggcagatcgggcgcgtcgtcgttgcgctcggcggcgaatcggggcgccggggtgaggacgagctcgtcgtcgccgctggagggcttggggaggcggcccttggccttcttcttgcccttgcgggagttgggcctggtccagacgctgttgctgttcttcttcttggacttagattttgtgcacactcatgcagtctttgtgcgttcctcctgccaaacgctgtaaactt

SEQ ID NO: 63314 - DNA, 1468 bp, Oryza sativa
  Clone ID: PAT_MRT4530_64569C.1
aaggtgataaaatctttaataaccagacaaactaaccaatcagcctgcgcgctctttaaccggataacatgattatgctctattctacactaactaaagcagaattttcactgcagttaaatgtttttttcagcagtaccattttcagcaggcccgccattcgccagctcaaatggtctataaggcacgtcactcattggtcgaggaatcaatcgacctccaaaatcttctgggaagaactcaaaattgggaccaaagttgaacctgacttgacagtttggttggtcaggcagtgtatacattgacgcagctgggtagtaccgccctccaggaatgtccacaaaagcagtgccctggcatatcccattcttgaagtagcatatctcgctaccaagttgtttcatgaaaaatagcatttgttgttttcctggctgacaatctaccactagtctattgaaaagtgtagagtcaaacacaatggtagtatggtactgaccaggaactggatccggcgtcttctgctcagccgccttgggagcttctgcgcggaaaggaagccccttgtagtgaaccaggaagggctgcttgggctcatacagctccccgtcaggaagatgaatgtagaagccgaggacatcgccatcgccatagccttgctcagcgtaattggccctccatgccttgtgcaccttggtgccatccatgtcgcggtatccgaatccaaacacatcgtagccaacgggtgcgtggatgtcagcattgttggtagcccatccaaggcgggtgtggccggtgctgccgaggtgaaggaccttgacctcgaagtaccaagcgccggcagcgacgccgcgggtggcgcgcaccatccggtagccctttgtgctgccggcggtgaggcggtcgtcggagacctcgaccttgtcggacttgaagacgcgggagaggagcacgggccgatcgggcgcgtcgtcgttgcgctcggcggcgaatcggggcgccggggtgaggacgagctcatcctcgccgctggagggcttggggaggcggccgttggcgcccgccgctgccgccggcgagggcgttggccggctgcttggccttcttcttgcccttgcgggagttgggcctggtcccagacgctgttgctgttcttcttcttggacttcttgctcggcggcgccgggggcgcgagggccatgtgcttcatggcgccgcccaacgggttggtcccgtcgtcgtcgggtggcgcggcgacgcccgaggcatcagcatcggatgcatcggcgagcgcggcgtcggagaagggggtctcgggttcggcggaggcggaggcgggggtgtcggggagatttggggtatcggcggcggatggggtggcgtcggacatgggggtatcggcggacgcggggtggaacgcggaagggggtggggagggaggcgcatcgtcgtcggcggcggcgtccgccat

SEQ ID NO: 63315 - DNA, 186 bp, Oryza sativa
  Clone ID: PAT_MRT4530_6456C.1
atggctttttgcgtcgctgctcctggtgcacatcgctcccgcgccgaacaagagggtctgccccgcgacagccatccgctgccacctaccgccggcctgctgcccctgccgctgccgcctaccgctggccggctgcccctgccactgcggcagacaaggtccccagcaggcttcgcccttcggtag

SEQ ID NO: 63316 - DNA, 398 bp, Oryza sativa
  unsure (1)..(398): unsure at all n locations
  Clone ID: PAT_MRT4530_64570C.1
gnnntgcncatgaaatggaattgggtaacccaacacaaacacgtacttacacttgcagtaaaagttttatgcatctgctctaccgttcttttgtaccttacagaatttgaacccatggatctcatgtcatacgtcacagctaccctaaaaagcacgtatatgtatcagttcctgttgaccgcattgaagttgtagacggctacctccatgcctacatttatgaacagcaccacgcccacaaactctatgcttaccataatgttgttgagcgtactacacagctcggatcttgacatccttagctaagttaccgccaaggtctgcgtcacacggttgaacgctcttaaatacaccaatcaccttgccggtctctgacttgctcttggtgacgctcaact

SEQ ID NO: 63317 - DNA, 1062 bp, Oryza sativa
  Clone ID: PAT_MRT4530_64571C.1
atgatgagtggcatgcagacgccagtagtggccgtgggcgccacggactgggcgtggcggctcggcgccctcgtcgctggcgccgtcccgctgctcgcgctcgccgtctggcactgcaccgacgccttccaccgtgccgccttcgcgttccgccgccgcgggacacgacgcgcgagacggctcccgccgggccacatgggcctgccgttcgtcggcgagaccctcgccctgctctggtacttcaacctcgcccgccgccccgacgccttcatccaggccaagaggcggcgctactgctacggcgacggcgacgacgacgccggcatctaccggacgcacctgttcggctcgcccgcggtgctcgtctgctcgccggcgtccaacgggttcgtgttccggtcggcgccgcccggcagcttcggcgtcggttggccggacccggagctcgtcggcgtctcgtcgatcgtgaacgtgcacggcggccggcacgccaggctgcgcaggttcgtcctcggcgccatcaacagcccaaactccctccggtccttcgcggaggtcgtccagccgcgcgtggcggcggcgctgcggtcgtgggcggccaagggcaccatcaccgccgccaccgagatcaagaaagtgacgttcgagaacatatgcaggatgttcgtgagcatggagccgtcgccggcgactgccaagatcgacgagtggttcgccggattggttgccgggttcagggcgctacagttggacatcccaggaaccgcgttccaccacgctcgaaagtgccgtaggaagctgaactcggtgttcagggaggaggtcaagaggaggaagttgaaggcgaagttagaggagcacgatgatgttatgagcgggctgatgcggatggaggatgagcagggtcggcggctgggcgacgacgaggtggtggataacatagtctcccttgtcttgggaggctacaagtccacctccagcgccatcatgtgggcaacctactacctcgcaaaattgtccgctgtccttgccaagttaagagtatgtaaaccaataaaatga

SEQ ID NO: 63318 - DNA, 1245 bp, Oryza sativa
  Clone ID: PAT_MRT4530_64572C.1
atgcgctgcccgcgccttcctcttcaccctcacccgcgttgccaccgccgttccagcccccgccccccgataccccgatatccgacgccaccccatccgccgccgaaacccccaatcttcccgacacccccgcctccgcaacccgactcccccttatccgacgccgcgctcgccgtcgacgccttcgatgccgatgcctcagccgtcgccgcgccacccgacgacgacgggaccaacccgttgggcggcgccatgaagcacatggccctcgcgcccccgccgtcgccgagcaagaagtccaagaagaagaacagcaacagcgtctggaccaggcccaactcccgcaagggcaagaagaaggccaagcagccggccaacgccctcgccggcggcagcgccggcgccaacggccggcttcccaagcccttcagcggcgacgacgagctcgtcctcaccccggcgccccgattcgcggccgagcgcaacgacgacgcgcccgatctgcccgtgctcctctcccgcgtcttcaagtccgacaaggtcgaggtctccgacgaccgcctcaccgccggcagcacaaagggataccggatggtgcgcgccacccgcggcgtcgctgccggcgcttggtacttcgaggtcaaggtccttcacctcggcagcaccggccacacccgccttggatgggctaccaacaatgctgacatccacgctcccgtaggctacgatgtgtttggatttggataccgcgacatggatggtaccaaggtgcacaaagcatggagggccaattatgccgatcaaggctatggcgagggcgatgtactcggcttctacattcatctacctgatggagagctgtatgagcccaagcagcctttcctggttcactacaaggggcttcctttccgcgcagaagctcccaaggcagctgagcagaagacgccggatccagttcctggtagtgagatatgctacttcaagaatggggtatgccagggcactgcttttgtggacattcctggagggcggtactacccagctgcgtcaatgtataccctgcctgaccagccaaactgcgaagtcagattcaactttggtcccaattttgagttctttccagaagattttggaggtcgatcagttcctcaaccaatgaataatgtgccttatcgaccatatcagctggcgaatgaggtgcctgcagaaaacggtactgctgaaaaaaccattaaactgcagtga

SEQ ID NO: 63319 - DNA, 522 bp, Oryza sativa
  Clone ID: PAT_MRT4530_64573C.1
gtcgacgccgccgtctcctcgagagagagagagatattgagagagagctccgcgggagagcgcgtctaacatggtggatcgtgctgacctaccggtaagtggcacagctactgcacgaaatcctgccataaccgcgtcgtctagacccccggtggtgaggcttgtgtaccatgacaccaagacagcgggctgagcgcgcgtcgaaatgaccagtcaccggagaagaatatccatagagttccacacctgatagctgctgagtacaagaggttcggattgtcaaggaatcgtgggaccgcgaagcggccttacggtggtgttgtgactggaactgtctcactaccagaggattttccagcgttttttggattgtgcagcaactactgctgcaaaagggctgtgtattctactttgatcagactctcggttaagtgattgctttgttgagattatgcttggatgccatatgtgctacatatccgatctactacattgctccgaagttttcttccgccgttgggg

SEQ ID NO: 63320 - DNA, 418 bp, Oryza sativa
  Clone ID: PAT_MRT4530_64574C.1
ttttgtttttttttttttttttttttttttttttttttttttttttttttttttttttattgcagtttagtattggaccaatccggccttctgccctcaaacaaacaacagaaaggggaaagcaaacatggccaggggtacagacagcaacaaggagcaaaaaaggggggaagggcataacaagacacaactaaaaaaacaaaaaccacaaaaaacagcagaggtgaaagaaggcaccaagaatcccgaaggccgccggcccccgggaaccacgattgattaacctaacccttaaccccactcggccgtactggtacgcgatgccggggccccacgttgcaccccggggggggggggcaacaaacaacaaacatgagccgaacgcaaaacggccggagaacggacaatggagggcgga

SEQ ID NO: 63321 - DNA, 319 bp, Oryza sativa
  unsure (1)..(319): unsure at all n locations
  Clone ID: PAT_MRT4530_64575C.1
atggatggaggtggcggcggggggacggagcatgggggtccgccagccgtcgacgtggaggggtttgctcgcgcggccttcgactcgtcctccatagccttctcctccccggcgccctcccatctcctctacgcgctcgagccagcgactcagcgagctcctaccccgcacacgcccacccgacaaggtccttcccgcgagcgctcggcggacgggatcctccccgcgcgcacccggccggcgagctcctcccccgcgcacgacggccggcgagctcctcccgcgcgccccgccggcaagctcctcaccctcccccctn

SEQ ID NO: 63322 - DNA, 631 bp, Oryza sativa
  unsure (1)..(631): unsure at all n locations
  Clone ID: PAT_MRT4530_64576C.1
gggcaaccataagggtgtcattttggacccggttaaantnagttcggtttgaggnggggnttggggggaaacatttaaaacgggaaacagtntgaccactagcgcgcacgccgggacggcgcgaggccggcacagaggcggccggggaggatgaggcgaatctccggtgacctcccgccggcagccacggcgcacgacggcgcgggggcgagcggcgcggcatggccgccatggccgagctccggggtgcaaggggatagggcggtagggggggacctcgccggcggcggaacagcagccgggccggcacggccatgggtgctaatcgcgtgggatggcgagtcggcgaaacgcggcgtcgcggtggggaggcggtaaggaagcagaggatgccgacggcggcgagcgcgcagccgttcgtcagcaggtcctcgagttccagcagcacccggcgttgatccaaggcagcagcagcagtagaggcgtcccgagccacggttcccgcagtcagctacgccggcttcggctccaaccagtgatgatgaaacatgctcacaaggtgttcgatgaaatgtattcgaggaaaaggcagataaggatggagtttttagggggcttggcttggggataa

SEQ ID NO: 63323 - DNA, 253 bp, Oryza sativa
  Clone ID: PAT_MRT4530_64577C.1
cgccgcgacggcggcgatagcggccgcagtgagaaagcacggcggcctcccggcggagctccgcggcgtgcagcggccgtgcgcgggcgtcgacggggaggtaggggtcatcgacagcaggtgtgatgccgtcaaggtcgctcacctcgtcgccgcgcgggatcttcatcctcgagctcgcccgcgccgccgccgccgacgcctcccgggccactcagacggtccgaccacgaggtcgcacgggatgccttag

SEQ ID NO: 63324 - DNA, 924 bp, Oryza sativa
  Clone ID: PAT_MRT4530_64578C.1
atggtgaggttgaggttgagggtgcctcctcggtcgccgccgccatgggtcgcccgtcaccggctgccggccaccgctgctcacgagagaaagatgaagaggagaagaggggaaatagagagacctcgcccctcctcgccgccgccgccaacctcatccctcccccccgctgccgccgacctcgaccctccccgccgccgccgcaacctcgccttccgccgcctccgcccgcatctcacgccgccgccgacctcgcccatccccgccgctgcagccgccgccgacctcgaccctccccaccgccgctgcaacctccccttccgccgccttcgcccgcatctcgcgccgccgttgacctcgcccctccccgcggcagccgccgccgacctcgccttccgccgccgcaaccgccgccgacctcggccctccccgccgccgctgcaacctcgccttccgccgcctccgcccgcatctcgcgccgccgccgacctcgctcatccccgccttccgccgctgcagccgccgccgccgacctcgccttccgtcgccgcgctctcgcctcttgacctgtggctgtcgctgatgcgcggtgaagcgacccgacctcgggcgctcgccctgctcgcccggccgctcgggcggttgcatccggcatctgcgagtttccacggcatgcggtcaggtccagcgtttcccaaaccgcagaggacggggttaccgcgccccggcgataagcacggttactgcgcggaggttaccgcggtttttctattactgtacctcgcggtaaggccggtaaccacagtaaccgtgcggttgtacctcgcggtaagatcggtaaccgcggtaaccgtgcggtgcggttatgaacggcgtattgattggtggggcatcgtgtggattggctgcctgatcagtgactga

SEQ ID NO: 63325 - DNA, 606 bp, Oryza sativa
  Clone ID: PAT_MRT4530_64579C.1
atggtgtctgcgtgtggcggatccagcggcgctgccctcgggagggccggatccgccgccctagggagcggctgcggctatggcgacggccggcgcgcagcagggtcggcggatccagcgaatccggcgagtgggcagcctcgacgacctcgggtcttccacgacggcggcaggagcgggcggcgacacgagcggtgggcctcctcccgcccggatttggcggcgggaacggtcggcgaccttgggccttccacgacggcggcgggaatggtcggcgccttccacgacggcggcgatgcggcggcgacgcgagcggttagcctcctcttgcccggatctggcggcgggagcggtccttgggccttccacaacagcggcgggagcggtcggcggcgatgtgggcggtgggcctcctcccgcccggatctagcggcgggagcggtcggtggtgacgcggtcggcggcgggccttgtcccgcccggatctggaggcgggagcgggggcggccggcggcgggagcgggcagtggcggaagcgggggcaggtggcagcgggagagggaccggccggcgagctcgggcgacgatgccgctgcctgcggctag

SEQ ID NO: 63326 - DNA, 1662 bp, Oryza sativa
  Clone ID: PAT_MRT4530_6457C.1
acattaaatcttctgcaaatttgatcactgccgttgcaaagaatgttgggttggaaaataccactacaagaagatcagctacaaaataccatcacagggaaaaccccacggccgccgccaaggtgttcggcgaccagctgcgcgagctgacgcacgacatggaggactgcattgagcgcttcctccaccgcgtgtcctgcgccgagggagcgtcgcgggcgcgccggctcggttcggggacaagatcaaggcgcttaacaggcgcctcgaggagctgaccaatgaacgcctgtgccagttcgtctacgacaagcccccgccgccgccgccactggcgccggcggcggcacaacaacgcgaacatgttcaactcaaccccgtgggcgtcgagggagaaagtccggaggagctgagggttatcgccatcgtgggttttggcggctccggcaagacgaccctcgctaaggcagtgttccgctcaactgatgatgatagaatccgggtgtttcgttcctgccgtgcatgggttgatcgagccaaggagaaaaatgcgggggagattttcagatcattactccagcaatttggctatcggggtcagggattattggtcgatgacgagcaatatctccaagcccagctcatggactacctcaggggtagaaggtgagagaatttctgtagctgtttcccagttaaatttgtcagatacttgattgttattgatgacattgggaatgggcaatggaattctataaaatcagctttcgaagaaaatagtagaaacaacggaagcaggataatagttaccacaaccattaagtcggaagcgaatacctgctgtggcaatggcaaaggtttcatataccaaatgcaaaatcttgaagatcaatactgcaagacaatagctcttggggaggcaccttcacctgagttgcagatgggctcggaagaactacttaagaaatgtgatggccatccactttcccttgtttgtgtggccaattatttgggagtacatgacaatggtaactttgaaagactcaaaggcgtgatcatggataattacacaagtctttcaaaccacgttgtcagggcctgcttgctatatttgagcatatttccaaacgatgttccgctcgagaagaaagtgataatcaggcgttggatagctgaaggattcgcaaggagcgaagatgtggacattgatgaccagactattgcacgttggaattttgagacgtttgtagactgggacatctttcatcctatcattgacacaagcaataatggcgatgtcaagatgtgcaagactcgcagtatcgtgcacgagtatatgttgtacaaggcgtcgagacttgagaggttcatcatgtcctttcctgactggcgaaggaaagttcgtcatctctgtatcgatcataggacacctcacaagcgcagaactacaacagatatggatttgtcatgcgtccggtctttgacgatcttcgggacggcaggtgacaccatttgcgagtttcacaggtacaaggttttgagagtcctggatctcgaagaatgcaatgatgtcaagaacaagcacctgaaaaatatacacaagttatggaatctacaattttgtcatttggaaggcacgaatggaggcctacctccagtcgc

SEQ ID NO: 63327 - DNA, 948 bp, Oryza sativa
  Clone ID: PAT_MRT4530_64580C.1
aaatttttcacccgtctctttccctatctgatatttctcccctctactctctttctctcctatcctctcctctcgttctctctcctctcctcctccgaatccacgtgggcggaagcgggcagcgacgccgatgaggaggctggctgttgggtgcggcggcgggcggacggtgagggtgcgacggatggtggctacgcagcctccgcaacggtggcggctctgccgccctcgggtgcggctgtggcttggcgacggtaggcggcggatccggcggcgccgtcgtgggtggcagcgggcggcgacgtcgacgaggaggccggccgttgggtgcggcggcgggcggacggtgagggtgcgatggctagcggctacacggcctctgcaacggtggcggatctgccgccctcgagtgcggttgtgtcttggcgacggtgggcggcggatctggcggcgccgtcctcgggagggggagggggggtgaatccgtcgcacttgggtgtagcggcgacctcggcgacagcgggcagcgacggtgggtggtgagggcgatggatctggcggcgccgccctcaaggaggggtggggggatctgccgcccttaggtgtggctgcgacctcggcgacggtgagcggtgagggcggcggatccggcggcaccaccccgtcgacagtgagacgcccgtggtgacattgtatctcaaaatgtgtcagcttagtcttttggaggtactcaaagaggtagggtgtacgtgtgctgtgtttctcacatataggagttttggataaggaaggatgagtatagttgtatacggaaatgacaaggactactcgaattgtatccatattggacaaggggctatccaatatgatgcctgcggaggccgacaagagggatctagcaccatctctaaactcgatgagttcgtacttgaggaggaagactaccat

SEQ ID NO: 63328 - DNA, 276 bp, Oryza sativa
  Clone ID: PAT_MRT4530_64581C.1
atgacaagccgtgaccggatgcctcatctgttacgggctgccaatggacccatcaaagcgaagattgcatgggttcagtttcgtggtcttcgttacctgcgggatgggttaagaaaacaacactcatatgtcttcaattattaccgtgtatataagaggacgtcaggcatgacgatggtcaaggaaacagacaacagggaaatgtttgcaagaagagaatcctgtggcatccatggaggtgtgagaagctcaggtggccttgctcggcacttgtag

SEQ ID NO: 63329 - DNA, 235 bp, Oryza sativa
  Clone ID: PAT_MRT4530_64582C.1
cgctgaacggaggaggagaagcgccaaggcgggggccacggcgcacccgggggcgccgcggacgagcaactccggcaggactgctgccggcagatagacgggggagacgacagggggtgcaagggctaggggctcaaccacataggaggaggcaagaacaggagcacggcgccaccgacgatgggcaccccatggacgaggaggaccccggctggcagaaaggggactgggagcg

SEQ ID NO: 63330 - DNA, 329 bp, Oryza sativa
  Clone ID: PAT_MRT4530_64583C.1
atctcaaaaaccccttttatatttatgattcatagcaacaatatcttatttggatttgatttataaccgggggattagcattttattgcctgaattattgggggtattatttatcaaggctttgaacctaaatcatcaatgggtcctacaatatggaaacctttgggcacccaatacaactaaatatgcccatcaactgggtagtctgcagggggcttcttgattggttccctcaacaatcgcttttgctcttttagggtggagggaacttcatcataaacatcagggaaaagttcagcgggggggggttttggaattttttttgctac

SEQ ID NO: 63331 - DNA, 2253 bp, Oryza sativa
  Clone ID: PAT_MRT4530_64584C.1
atggagcaagcgctgctccgaatcctccgaaccctcggctccaccgcccacctcacgcaggcccacgcccgtctcctcgccgccggcctcgccgccagcccgcgcctcctcccggcgctcgtcgccgcggccttctccgcccactcccctcgctacgccgccgccgcgctccgcgccgccggccccgccgcctccaccgtctcccacaacaccctcgtcgagcgcctcgccggggccaggccgcgcggccgccgccccgcccccgcacccgcccccgccgatgccctcgccgcctacgccgccatgcgcgcccagggcgtcccgcccaacgggttcaccttcaccttcctgctccgggcgtgcgcgctcctggggctcccgcggccgtgcggctgcgtccatggccagatcgtcaggtgcgggttcgggagcgacgttttcgtccagaacgcgctcatggatgtgtaccacaggtgcggtggcggtggcggtggcggtgttggggccgctcggcaggtgttcgacgaaatggttgacagggatgtggtctcgtggaactccattgttggggtgtacatgtcgagtggggacgctacgggagcaatggggttcttcgaggcgatgcctgagaggaatgttgtctcctggaacactgttgttgccgggtttgcaaggatgggtgacatggtgacagcgcgggctgtgtttgacaggatgccttctaggaatgccgtttcttggaatttgatgatttcgggttatgcgatgagtggtgatgtggaggctgcacgttccgtgtttgatcggatggaccaaaaggatgtggtttcgtggactgctatggtttctgcttatgccaagattggggatctagatacagtgaatgagttgttcgatcatatgcctgtgaagaacctggtttcatggaatgcaatgataactggatacaatcacaactcgcgatacgatgaggcattgcgcacatttcagctgatgatgcttgaaggacggttcagacctgatgaggcgacattagtgagtgttgtctcggcatgtgctcaattgggcagtgttgaatactgcaactggatcagttctttcattggtaaaagcaacatccatctcactgttgcactaggaaatgctctcatagacatgtttgcaaagtgtggggatgtaggaagggcagagtcaattttttataaaatggaaacaagatgtatcattacatggacaacaatgatttctggctttgcttttaatggtctttgtagagacgctcttttggtctacaataatatgtgcagagaaggagttcaactggatgacacagtttttattgctgcactcgctgcttgcgctcatggaggtttgttgcaagaaggttggagtatatttaatgaaatggttgagcgatataacattcaaccaagaatggagcactatgggtgcatggtggatttacttggtcgagcagagcttatagaatatgtcagtaagaagataactgaactagaaccatttaattctagttatcaagtcctggtttctaattgtagtgctttggaaggaaggtgggatggtgtgatcgatgcacgcacaagcatgcgtaattggggaattgagaaagtgcctggaagtagctcaatccaggtaggcagtgaggttcatgagtttttggctaaagatacaaggcataagaggaggaaagagatatatgaaacagttgacggtttaatggccctcatgagacatacagagcaagcacattgggacctttttgtggctaggtactggggctattcaatgcttgatagggcaacaactgttaacatgggtaaaggggatcttcctattgttctacaactgtatcaggaagatcatcgaagttttgatcaccaggctgctgtccgaggattaaaactaatcagtccttcaaattcgtgccagcgctgggagcaaggacaaccattggacaaattggtggtcacaactcacaagagccatcatcatcctggggtttatagaaaccagagatctccacacaaagcattgatcagaagtatactggcctactgggataccagaaacacatggaaccattttcaccttgtgcattcagagacctgtcccgccctgtctcccctgctccccaaagctggagcagggggaatgaagctgggcgattgttgcttggaggggccgaggattcgctggtggctcaattatcctggagttcattctgaaatctga

SEQ ID NO: 63332 - DNA, 328 bp, Oryza sativa
  Clone ID: PAT_MRT4530_64585C.1
gggcgccgtcgaggggtaccgcatcgccggcgggccgctcggcgaggtcggcgacccgctctaccccggcggaaggttcgacccggtcggccttgacgacgacccggaggccttcgcggagctcaaggtgaaagagatcaagaacggccgacttgccatgttctccatgttcgagctttttgttcaggccaatgtcaccggaaagggccccctaaagaaccttgacaaccaacttggcgaacccgtcaacaacaacgcctgggcctacagcaccaactttgtgcccgggaagtgagcgcccgccccgccgggcttgcatggggacgca

SEQ ID NO: 63333 - DNA, 354 bp, Oryza sativa
  Clone ID: PAT_MRT4530_64586C.1
attccaggtggccagcgaccgaaggagataaccggaggagggtggcgctcggcgggagaggcgtgcagcggtcggcagtggcactcactggcggcagcggtgctcgctggcgaagacaacgatgctgagccgatcaaagatgaggaagcagaggcagcgttcgctcacaaagatgccacgtggatccagcaccggatcttccactccaggacaccctcaagccgaggtgcttgggatgcggtagcagggacaggtgacgggggatacggtggcctcttgagatgcggcgacaaggacagtggctgggatgtggcggtgaggacggtggcgggggattcggcggcctacacatga

SEQ ID NO: 63334 - DNA, 402 bp, Oryza sativa
  Clone ID: PAT_MRT4530_64587C.1
cctctctcactctcacctctcccttactctctcactctgccttctctctcatgtgtgtgcgagtgtgtgcggcgagcgcgaccggcgatgggcggcgaccgcctcctcgacaccttcctctgccttgccgacgcccacggaagcttccaagagaccgtcgccacgctcaagcaggacgtcgccgaggcgctggtcaccatctgccgccgcaacgacgcgcgcctcgcctccgcggtgcatttacagcgcaaggctggcaagaagctcgcctaccttgccgctgcagcgagggacggcgccaggccgtctcgccttgggctcggcaggaactcgacggaggtggaggtgaccgggctgctgagtgagtcggcggctccctcgccctcccccgagaagatctga

SEQ ID NO: 63335 - DNA, 160 bp, Oryza sativa
  Clone ID: PAT_MRT4530_64588C.1
cgccacgcgatacggaaagaggtcatattaacgagagggtgatacgtccgtctctatctcatgctgtctttctctttatctcaacccgcagaataacacagattctaagaggcagacgcagggaaaagacacgcgagccatgaacataccaaggacgatg

SEQ ID NO: 63336 - DNA, 1806 bp, Oryza sativa
  unsure (1)..(1806): unsure at all n locations
  Clone ID: PAT_MRT4530_64589C.1
agtggatccccgggctgcaggccgaaaggcgttgcaacggcggcaaatctagactaatcccccagttcatcccatctcccaacaagcgcaccagataaattgagaggataatatcacaatagtttttcatcanggagagtcggttacatttgggtgagcgagccggccggatcagagtccgggaggaagacatggatgggagtaatgcaggggcattgcccggcggcgcgtcggcggcgtggtcgtgcaggcagaggaggacggcggcgggcgccatgggcgggtacgagctcgtcaggagcgacgacgccgcggcggccggcccgccagatctcgagctcggcggcagcggcagctgcaacggcggcggcgtctcggccaagtcccggcctccgtcatcgccgccgtcgcagggcggcgcgcggcagcggctcgtctccctcgacgtcttccgcgggatcaccgtgctgcttatgatcattgtcgatgatgctggagcttttctcccagcactgaaccactctccatgggacggcgtaaccattgcagatttcgtcatgccattcttccttttcatggttgggatctctctaacgctcgcgtacaagagggtgccggacaaattggaggctactaagaaggctgtactacgtgccctcaagttgttctgccttggccttgttctccaaggcggttttttccatggtgtccgcagtctcacttttggtgttgatattacaaaaatacggttgatgggtatacttcagagaattgctatagcttatcttttggctgcaatctgtgaaatttggctcaagggagatgatgatgtagattgtggactcgatgtgatacggagataccgttaccaattggttgtagcattgctcctgtcaaccatgtatactgttattttaaacggtgtctacgttccagactgggaataccagatatcaggtcctggttccacagagaaatcattctctgtgagatgtggagtaagaggagacactggtccagcttgcaatgccgttggaatgcttgaccgtacaatcttggggatcgatcatctctacagacgaccggtttatgcgcgtacaaagcaatgtagtataaactatccgcaaaatgggccccttccacctgatgctccatcatggtgtcaggctccatttgatcctgaaggcctcctcagctctgttatggcaattgtcacatgcttgattgggctgcagtttggacatataattatacattttgagaaacacaagggaaggataataaattggctaattccttccttcagcatgttagcactggccttctcaatggacttcattgggattcgtatgaacaagccgctgtacacgataagttacgccttggctacctctggtgctgcagggcttctttttgctgggatctacacactggtggacgtgtatggattcaggaaacttaccatccccatggagtggatgggtaagcacgcgctgatgatctacgtgctagtggcatgcaacatcctgcccattttcatccatggtttctattggagggagcccaagaacaaccttttgaagttcatcggagttggggcatgaagcttgttcgtctgcgcaacagtacttaggccatagataatttcctagataattagacatccgtatataagattatttggatggccaggatatggagataaaaaatgttcaggccgtgttattttttctacgtggttagagaacggcaatgttcagcttctgacactactgaacaatggtcgttgccacatgccagagtgta

SEQ ID NO: 63337 - DNA, 304 bp, Oryza sativa
  unsure (1)..(304): unsure at all n locations
  Clone ID: PAT_MRT4530_6458C.1
gtgttgggttttttttttttttttttgtttttttttttttttttttnaaaggaacaggttcaaagaattttttggtttaatcaaaccagtttttgttggtttaatttggaacatccaccagttgcttgcttagagggggcaccctggaaaaatacaatttttggggggaacttgtatttaaccccatttagggctttcttcccaacaaagattcagaagccccacattttttttgcccaactaaagttttgtttaattgaaagagcctgggggggggaggaaaaaatttccaggaaaaaggatt

SEQ ID NO: 63338 - DNA, 510 bp, Oryza sativa
  Clone ID: PAT_MRT4530_64590C.1
gcggttccgcatcgcttctccaccgttgcagcctgccacccgtcgtggcagatctcgtcgtcgtccgtcgcggctactcctgagtcctgtagccacgcgccatcctcgctgccggggaagaccgtcggggcgtccaatccgccgtcgactgctggccaccgcgtcgatctactccgtcccggcctcgccttctccgtcgcgtagcggcatcgctgcccatcgcggctgctgcccatccatcccgcacttgccgtccactcacagccgtcgtgagtccacagcttgcgtgttgcagctccatcctcactgctcaccgtgctgcagcctctgctccactctgctacagtgctactggtggtaaccctctatttctctttaaactgctacggctcattcgacattaagctgccactaatcaagctcgggggaaatcaagctcatctttgcaactgactgttgctgccaacctttgagctgtggtcgaatcatacaccgaggtgacttttactg

SEQ ID NO: 63339 - DNA, 195 bp, Oryza sativa
  Clone ID: PAT_MRT4530_64591C.1
atgatccgagaccgtggacgggagagctttaaggaagcattggggaaatacatcctcctagtcggttgtgtagaacaccctgtcaaggcgttccagcgttgggttcaaccaaccattcgaccaggtgaaggagcgaccattcgggttaaagtctccgaccaccacccacggtcccgaatggctgcttcggattga

SEQ ID NO: 63340 - DNA, 1075 bp, Oryza sativa
  unsure (1)..(1075): unsure at all n locations
  Clone ID: PAT_MRT4530_64592C.1
atgggcggatgtgaggttaatttggagcgtcacgggctagttccggtcgggactggttcggggcgtgacaccctgtgtgacgtctcgtccttcacggttcgactacatcggcttttcggcgtcatcttcctcaacgactgccgtgattgtgtcaccgtcttcgtctccagtgcatcctcgcgcaccttgcttcctgacttcggctacaacgaccacggctactctacacacggcttcatcaactacggctcccttgcacccttcgctttggctacattgactacgcaacgcgcaggaaatcatctgtttaagtatggtgacctcatggtcaccgtcaccgaggcaacgtatggtgacctcatggtcaccgtcaccgaggcaacggctacaagcaagaaggtgcaggtgcagggtgcggccatggcgaactaccaccaccaggagtactaccagatggcggcggcggcggcggtggcgtggccgagggagccggacagcccgcagctgagcatcatgagcggctgcagctccctcttctccatctccaccctgagggacgacgacgacggcggcggcgtccgcctcgccggcgccgcgctgcccgccacgccggtgtcgctcgccgggatcgccggcggcgccagtacccccggcggcgacgaggtggacatggaggtgcggcagcagagcggcggcagcggcgacgaccggaggaccatccggatgatgaggaaccgggagtccgcgcttcgctccagggcgcgcaagagggcgtacgttgaagagctagagaaagaggttcgccggctggtggatgacaacttgaatctcaagaagcagtgcaaagagctgaaacaggaggttgctgcactggtgatgcctacaaagagctcactgcgacgaacttcatcaactcaattctgaaggtcgaccaaaacaagcaagattatctgacgatacaaaatcattagaaagatctaaattatgtgtatttgcaatccggtgtgcgtttgtgcaggggtcaggcatgagagaggatatngtgtgtaggtgatcgatggatgctatgaactac

SEQ ID NO: 63341 - DNA, 132 bp, Oryza sativa
  Clone ID: PAT_MRT4530_64593C.1
atgatagatcatcgtaatggcttccacggcgcgttccagcgccggataacccgagagaggaaatatatgttcgctgacaggcagagaggcgatttcggcaaatgggtcgccaccaacgttactgaaacctga

SEQ ID NO: 63342 - DNA, 1824 bp, Oryza sativa
  Clone ID: PAT_MRT4530_64594C.1
atgcaaggcgccatcacgcgcgcccgcttgcagcaccgcccagctagattccaccgcgccccgtaccggtgcatcccagtgacgaccacgacatgcttgccggaaaggagagtccatcgcggcggcggcgtccagtggtgcggcagtagtgcagccaccggcgagagggcccgggccgtctccgaggtgagagcggcgggagcgcgcggcggcgacgcgcggccgccgcctcagggggagggagatgtggcggcgggcgtggcagaggcgccgtcttcgggcggtggcgcgaagcgggggagcgtggttggcgccgccgcgctcgtggtcgggaccagcatcggctccggcatcctcgccgtgccacagcgcacggcgcccgcggggttcgttccgagcgcggcgtgcatggtcacctgctgggcgttcctggtgatcgaggcgctcctcctggtcgagatcaacgtccacctgcggcggaagaaggggaaggacgccggcggcgacggcgatggcggcggcggcgggcagctggaggtcatatcgctgaagagcatggcgcaggagaccctgggcgagtggggagggaacctggccgccgcggcctacctgttcctgtcctacacctccatggtcgcctacacgtccaagtctggcgaggtgctctccagcgtggtcgccggcgttcccgagcccgtctccggctgcgccttcaccgccgcccttgcgctcctcatcgccgccggtggcacgggcgtcaccgacaaagtgaaccagctgctcactttcgtcatgataggattactgctgacgatcgaggtgtctgcagtagcattcggtgccggcctgaccctgccagctaacaccaactgggagcaggtccctgcaacgcttccggtgatcatcttcacgctggtcttccatgatatcgcaccagtgatatgcgcgtaccttggaggggacctcgtgaggattcggctctcgatactcgtcgggagcatcgtgccattgctgtccttgctcgtgtgggacgacatcgcgctcagcatctccacggatcttgatgggtttgacatcctggatatgcttaatacagaatggagttatactgttgtggagacgttctcactccttgctgtcgggacgtcgctgatcggaacactgctgggagcttcacagttcttcattgagcagatgaccaatcttgtctcttcttcagcccaaggacatgaagaagaagcattaaggcatcgtggagcgaaaacggctgtggacaacaacaggctcagctacatcgctgcaggggctgtggttgccccaaccgtgctaattgcagctaccgttccgaattcattctccattgctactgacattgcaggcggttactgcatgaccatcttgtatggcgttcttcctccattgatggcgtgggctatcgcctccaggatgtcagattcgagagctggatctgtcgaagcggaatcatctgtcgccggtggcagtggcaatgtggacttgactagtgcaaagccagttttagtagggatgggggtgttctctgtgctcatggtctttgagcaaatgtcccaagatttcgttagttttcagtcctatctccttgcatggacaggctagattgcagtatagaaagaagtagctgctagcaagtgtacaccgaactaatgattcagagaataatcgttaggtttaaacatgtaaaaaaaaaaaaaaaaatgcatatctcctgaaaaattagtatagattgtatatacgattgtacgtatgtaaataaatcgcttttgttcgctaaaaaaaaaaaaaaaa

SEQ ID NO: 63343 - DNA, 354 bp, Oryza sativa
  Clone ID: PAT_MRT4530_64595C.1
atgggcatcgacaagtacgacggcaagacccgggacagactccaacagactcttcagactcttcattatgagtctatgacaacgggaccccgccgctctcttcacattgccattgctcatcccttcttctctcactccggcgctcaagagcaggcggcgagcgggaggcagcggcgatgctcgctgtcgttatgccctgccgctgcggccacgggcgagcagatgaccgggaggaggaaggggtgggggcgatggaggcctgaggcggagatatttacgacggcggcgacggcagggctgggtagcgaccgtgctgctgcgtcagatgtggaggtggcggctgctcgaggctag

SEQ ID NO: 63344 - DNA, 303 bp, Oryza sativa
  Clone ID: PAT_MRT4530_64596C.1
caagtctagagagagagagagagagagagttgctggattggacgccattgatgctgtagcagagaggtgccaaggtccaagaaagtgagagagagagagattgattgaatgaacatggaggctgcaagaagagtatgaagaggaaggcaaggtggtggtttgctgctggaggttcttgccgctcatctgttttttctccttgcattggcgcgcggcgcgagcgcttgggcccacggcgggcttgtcggcggcgccggctttttttctaaaaaagccgaaagttcatggatcttgatataagga

SEQ ID NO: 63345 - DNA, 1281 bp, Oryza sativa
  Clone ID: PAT_MRT4530_64597C.1
atggtctccatgaggaagaagaagaaggcctttgctgttgcagctgcaaccaccttgctttcccctcctcggtcctcctcctcctcctcctccacggcgtcctcctgcattgtgccgccgcgcactgagagcggcaagaagaagagtaagcacaggaagagggccaaggatggcaccggcggtgacgacgacgacgccgccgttgctgctgcgccgaggaagggatcctccatctacaagggcgtggcaaggcacaggggttcagggaagtacgaggcgcacctgtgggacaagcaaggctggaacccaaaccagacaaggaagagaggcaggcaaggagcttatgacacagaggaggctgcagctcgcacttatgatcttgcggcactcaagatctggggctcagaccatgtcctaaacttcccgattgacacgtacaggaaggagcttgagaggatgcagcgaatgacaagggaggagtacctggctactctgaggcgcaagagcagtggcttctccaggggtgtctccaagtacaggggagtggcaaagcatcaccacaacggccggtgggaggccaggataggccgagctgtaggcaagaaatacctctacctgggaacattcgatacccaggaggaggcagccacggcctacgacctggcggcgatacagctccgcggccgcagcgcggtcaccaacttcgacgccagctgctacacctacacggaccacctgccgccgccgccgccgccgcagccaccgtccgtctgcaagaccgagccggagctggagccgccgcagccggcggcgcctccaggctcggagtcacttctccggcccaagatggagccctgcgacgactgggagccgccggcgatttgcccgtcgctccgtgacgcggacgacgcggaccacgccatcgccgagatcctgccggcgctctgcatggaccgcgccgacttcgaggccaggtaccctgcccgccgcgcccgcgacgccgccgccgacggctggtcgacgtcgtcggacgacgtcgccgccgcctccgtcgacgatgacgtgctgcgtagcctgccagacgacgtgggcttcgtcgacgacgtcgagagcctcttcctggacgcgcccggcccggccgccgccgccgccgccgccgcgatgccagacgacgtggaacgcgcggtgcagcgcgcgccttctgccgcgtctcgtcgggccaacgccgcggcggtctcctacgcgatcagctcgttggcgtccgggcgctggtggtattga

SEQ ID NO: 63346 - DNA, 522 bp, Oryza sativa
  Clone ID: PAT_MRT4530_64598C.1
atggggtggcgactccccgctaacaccaccggcgcacatgacccggggcggtcaacgcacactcgggggagcaaggcggggccgctccacggggttgtggtcgcctacggcttccccctcctgcttgggcgagtttggtatgaggggaggggaggcgctgccggacgcccggcaccgccccgcaccggcgttgcccctaccggcttccccgcctccctgctccggccaaatatgggagggagggggcgaggggagccgccgccagccgccccgcgcgcgtggtcgccgccgccggctgccccgcgcgcgtcgtcgtcgccgccgccgccgccatcccgcgccgtcgtcgccgccgtcgccccgctggcctccccctcgctcctccggccagatctgggagggagggggcgaggggagccgccgccgccgtccccgccgcgccgctgcatggagtcgccgtccctgccgcgccgccgttcccaccgcaccgccggagaggagaggagagtcagcaccgcttaa

SEQ ID NO: 63347 - DNA, 270 bp, Oryza sativa
  Clone ID: PAT_MRT4530_64599C.1
aaaaaaaccctccttgaaaatttggaaattggacccgaaacgattcaaaggcagaggaaacacgggtgattccccctcagattccccccaatccaaatcccccgacaaacggcctaaaaaccccccaaatggattaaaaagtaaaacgggtttgagggatcttccccccgggacggactaaacctaaccacaaacaatgggtcccacgggccccagatttttcaaaaccagagggctatgacggatttggtcctcgcaacggaagggaac

SEQ ID NO: 63348 - DNA, 1812 bp, Oryza sativa
  Clone ID: PAT_MRT4530_6459C.1
atggagaaagcggtgataactgccttcgtgaacactgtcatgccgccgctgtttaaggtgctgtcaggcagttgtaagatggtcatgaacgtgatcgatgatagcgactcaatgagacgtaaactagttctgctcgcagcttccatggacgacgacctccggcggacgaagaaccccacggccgccgccaaggtgttcggcgaccagctgcgcgagctgacgcacgacatggaggactgcattgagcgcttcctccaccgcgtgtcctgcgccgagggagcgtcgcgggcgcgccggctggggcgcttcctgctcaccatctgcacacgctaccggttcggggacaagatcaaggcgcttaacaggcgcctcgaggagctgaccaatgaacgcctgtgccagttcgtctacgacaagcccccgccgccgccgccactggcgccggcggcggcacaacaacgcgaacatgttcaactcaaccccgtgggcgtcgagggagccaagggggacatcctcgcgatgctggaggaaagtccggaggagctgagggttatcgccatcgtgggttttggcggctccggcaagacgaccctcgctaaggcagtgttccgctcaactgatgatgatagaatccgggtgtttcgttcctgccgtgcatgggttgatcgagccaaggagaaaaatgcgggggagattttcagatcattactccagcaatttggctatcggggtcagggattattggtcgatgacgagcaatatctccaagcccagctcatggactacctcaggggtagaagatacttgattgttattgatgacattgggaatgggcaatggaattctataaaatcagctttcgaagaaaatagtagaaacaacggaagcaggataatagttaccacaaccattaagtcggaagcgaatacctgctgtggcaatggcaaaggtttcatataccaaatgcaaaatcttgaagatcaatactgcaagacaatagctcttggggaggcaccttcacctgagttgcagatgggctcggaagaactacttaagaaatgtgatggccatccactttcccttgtttgtgtggccaattatttgggaggtttaaatgagcctactgggcagcgctgtcgcgaattgtgtcgctacctaggttcaaaaatacatgacaatggtaactttgaaagactcaaaggcgtgatcatggataattacacaagtctttcaaaccacgttgtcagggcctgcttgctatatttgagcatatttccaaacgatgttccgctcgagaagaaagtgataatcaggcgttggatagctgaaggattcgcaaggagcgaagatgtggacattgatgaccagactattgcacgttggaattttgagacgtttgtagactgggacatctttcatcctatcattgacacaagcaataatggcgatgtcaagatgtgcaagactcgcagtatcgtgcacgagtatatgttgtacaaggcgtcgagacttgagaggttcatcatgtcctttcctgactggcgaaggaaagttcgtcatctctgtatcgatcataggacacctcacaagcgcagaactacaacagatatggatttgtcatgcgtccggtctttgacgatcttcgggacggcaggtgacaccatttgcgagtttcacaggtacaaggttttgagagtcctggatctcgaagaatgcaatgatgtcaagaacaagcacctgaaaaatatacacaagttatggaatctgtgtgaaaccatgtgtggttatagttcttttgtgatgggaaattga

SEQ ID NO: 63349 - DNA, 297 bp, Oryza sativa
  Clone ID: PAT_MRT4530_645C.1
tatttccaacgcaactagacatctcacgggggtatataaaaaacatatggggattcaacaccatactcatacacccttaactgacataagatggcataaaaatcttcccaatcaaagtaatagcacaccaaataagctgtgccactaattgattacacaagacccttaaagatattaaggagttccaaaatcaaccaccaacaccagaatactaaaattaaagctactccaggaagctattaggccttcaatattagctttgctcctcggccccagcctccgctgccgtggcctccc

SEQ ID NO: 63350 - DNA, 1168 bp, Oryza sativa
  Clone ID: PAT_MRT4530_64600C.1
ctagacggtggggtagaacggcgagacggcgaggccgcaggtgccatgcggcgatgcgacgtccttctcgagcaggatgtagccctgctgtccccacgtcttgccccacgagttcttggctatccagtacttcttcccggacgcgccgtcctggcagtagcccaccagcgtcacggcgtggttgggcttgggcgccgccgtgccgcgcgggcccgggaacacgccggagccgtagaactggaacgccggcccgctcgcgtcgacgtacgccgtcacgggttgccgcgccacggccgtcgccagctgccgctcgtcggcgggcggcacggcgcggtagccgccgacgcgcgccgcgtggttgaacagcatgtcgtccacgcggcacctgcccttgtacccctcgtaccggtactcgctctccgccgtgatgccgcccttgtcgacgacgagctggaacgcggcgtccgtgtgcccgccgccgcacccgtcgctgtcgccgccgccgtcgacgcagtccaccagctcctgctccgacagcggcgtcagctgccccgtcctgatcttcatcagcccctccatcgccgccaccgccgcgaacgcccagcttgacccgcaggcgccctggtccttgacgccggtgacggcgcccttgaacctccagtcgatgcagcacggcatccagatgggatccacggggcggggcgcctcctcggggtgcgggtgcgggtgcgtcgccggcggcggctgcttgacgccggtgtaggtggcgacgaactcgccgttggtgaggtcggcgaactggttgatgcgcacggcggagtcgtaggtcgcctccggcctgtagctccggatgaagcggacgttgtcgcggaagacggcgaagcggtgctccttctcgccgtggcacttgtacgtcttgccgaacttggccatccactcctcgaacatctgcatcgtcacgctgtcgtcgccgccgcccccgccgttgttgtcgtagtaggcgtccgccgccatcatcaacgtgcacacaaccaagaggacggcactagccattggacgcgaaggcgccatcatctcaagtgtgacttatcacttctaagctacaacacaatattgttttctcttggtcaagtttgatactttgatctttttagtgtttaaactggat

SEQ ID NO: 63351 - DNA, 583 bp, Oryza sativa
  Clone ID: PAT_MRT4530_64601C.1
ccggccgggttgagaggtgtaggataagtgggagccagccgaccagcgcgcagctttgccgcggaagagttggagggagccgccgctcgccggagatcatggactcgttctcgtcgccgtcgtcggcggggtcgactgcgtccacggagcatctcatggaacagatcaaggcccagctcgcgcaggcctacgcgcaggagttcctcgagactgttggaaacaaatgctttgcaaagtgtgtcactaaaccaggaacaagcttgagtggaagtgagagtagctgcatatcacggtgtgttgatcggtacattgaggcaactggtattgtcagccgtgctttgttcagttcacagcgctaggaagcattcaggaatttgatggctctcaatggtttcttaggatgatgaaagtgaacctatcagaatatggcatccatcttttattttttctgccatttgtcttctaagaaagtgctatgcttttctgcatactaatttagaaaaggcacatggtgataaaccataaatgtgcaatatttttgtatttaagttcatgcaaaaaaaaaaaaaaaaaacccgcggcc

SEQ ID NO: 63352 - DNA, 137 bp, Oryza sativa
  Clone ID: PAT_MRT4530_64602C.1
attaaaaatgaaaattttttaattggtgatgatcacaatgcattggtttttcaacaacaaattacaagtgggtgattccaatggtccaacaaattaatgcggttgccacaaattatttaaacttacacaagcgggcc

SEQ ID NO: 63353 - DNA, 1257 bp, Oryza sativa
  Clone ID: PAT_MRT4530_64603C.1
atggagagagtgttgatggcatgtcttgagctggattcttcacaattcctactgaatggggatggcagtgtgatcggcagcccatttgatatccagcttgagtgcaatagcttcacaggctccaaagctgttcaagatcatagccgatatactcttccttcacagtgcactaatgcccctgatccacctccattacccggaacttcttatggcacacacagaacttccaggaatgcaaaggcttgcaggtgtgtccctgaagagatccaggatttctgggacaggatgttcttcgaagcgtatcaatatgatctccgtgttttgacggaagatggcaatgagatcatgtcacattcctgcgttgttggtattaaatctcctgttctaagagctatgttggaagaagctaaagtacaaggtggcatccgacacatcctgatacctggtgtaccatcagaagcagtacatgttttcatcagatttctttattcctcgcgttttgagcagtatcagatgaagaggtatgtacttcatctgcttgtactctcccacgttttctcagtaccatctctgaagagagtctgcatcaaccaactggagacatctttgctttctcctgagaacgtggtagacatactacaacttgctagactgtgcgacgcgccgcggctctccctcgtatgcactcgtatgatcatcggagatttcaaggctatcactcaaacagaagggtggagagtgatgagacaagccaacccaagcctggagcaggagctgcttgagtccctcgtcgaagaagatacaaaaaggcaagagagagcaagaaggctggaggagaataaggtttatctgcagctacatgaagctatggaagctcttattcatatatgtcgagatggatgcaggacaattggccctcgagatcaaacgctaaagagcagtcaggccgtttgcaggtttcctgcctgcaagggcatcgagctgctcctgcgccatttctcggcgtgcaaaatgcgggtgcctggtggctgcgctaactgcaagcgcatatggcagcttcttgagctgcattctcgcatgtgctctgcacttgaaacttgccatgttcccctctgtaggcatttcaaggagaaaatgcaacatctgagcagaaaggaggaggccaagtggaatcttttggtgtccaaggtgttggagagcaaagcaacaaccagttccatctcagaaaggagaaaatttccatccctgaaaacatag

SEQ ID NO: 63354 - DNA, 1362 bp, Oryza sativa
  Clone ID: PAT_MRT4530_64604C.1
atggcgagaccggcggcgacggcggcggcgccgaaggcgccccctccgaagcacctgattgcgctcgccgtcgtcgccatcctcggcctcgtccttgtcgccgacttcctctgggcctcctcctcccccgccgcccccgcctggtcctccaggatcgatctccccggccgcccggccgccctcgtgccaccctcggggaagaagcaaacaaaggaaaaaatatctataggttccacggacataaatgcaacctttgcagatttgccagcaccagaactacaatgggaggagatggctgaagcacctgtgccacgtttggatggtgctgctatgcaaattaagaatctcttatatgtgtttgctggatatggtaccattaaccatgtgcattctcatgtggatatttacaatttctcagataatacatggggtgggaggtttgatatgccaaaggaaatggctcattcacatttggggatggttacagatggaagatatgtttatgtggtaacaggacagtatggtccgcaatgtagggggcccacagcacgaaattttgtgctggacactgaaacaaaagaatggcacgatttgcctccattgccagttcctagatatgctccagccacacaactttggagaggcaggcttcatgtgatgggtggcagcaaggaggataggcatgaacctgggcttgaacattggagcattgcagtaaaggatgggaaagccctggaaaacgagtggaggagtgaggtaccaatcccacgtggaggccctcatagggcttgtgttgttgctaatgataagctacttgttattggtggccaagaaggagattttatggcgaaacctggatcacctatatttaaatgtgttagaagaagtgaggtggtctacagcaatgtctacatgcttgatgatggaatgaagtggaaagaatttccacctatgccaaagccagattcacatatagagtttgcttgggtgaatgttaacaattctctcattattgctggaggaaccacagaaaagcacccaataaccaaaaaaatggttttagttggtgaagtgtttcggttcaacttgaacacactggaatggactgtgattgggcggttacctttccgaatcaagaccactctggtaggatactgggatggctggctgtatttcacttctgggcaacgagacaaaggaccgaaagacccttctcctaagaaggttgtcggatgcatgtggagaactaagttgcacctaatgaccgacttttacgcaattttgtacagagaatcagagataattgatcttctgttcagtgattggagtgtgacagatacatttgcacttgagttactctag

SEQ ID NO: 63355 - DNA, 168 bp, Oryza sativa
  unsure (1)..(168): unsure at all n locations
  Clone ID: PAT_MRT4530_64605C.1
cttanaatattccaatggtggtggcattgaatgggccacctcacccactccttttgtagattttacatattaccccttgaacttttaatgttacataacaactttattcttgtgggattgccacatatacaactaaattaatgtgggtatttttctataacattttga

SEQ ID NO: 63356 - DNA, 941 bp, Oryza sativa
  Clone ID: PAT_MRT4530_64606C.1
atgtgtggtggagagaagagggggaacacgcgcgcgcttgctcgcctggcctggtaggcggcgcgccgtagactactccataccgctcgctagcgtgcaccggtgatcgggagagcaggtctccggaacctctgccttcgacgtcttgcacgagagaaggcggcaataaggtttttgggaagcgcttcgcgcgactgctccctgttcgtctgcgacggctcgccttcctctccgctcgcgtgctgcgcgcctttgtcgacgctcgcaaccgcgagtatttcctgcttggaatcggccacgtcggtgaccatctcggtgtcgacggtggtgctcttcttggcggtgccattgacgccgccgacgcagagaggcttccgcaggccgagcatctccttccaccggctggatcccttggccgacgccctgtcgtcgcagcgaagctcgtcgcggagcgtggtgggaggccggccggaggagaagccgccgtccttgaggggaaggatcctgcccttggagaagagctggtcggcggccatcatggggtggctacccaccgagaactcgaagttgatatcctcctcctggcaccgcaggttcatcgcccggttctgcaccggcggcggtggctcgacgacaaagtcgctggagaaggagatgcgcgggcccagcgccggcggctggccgcccccgaacgccgcgccgccgtccgggttgtacatgttgatgcatgccattttgacgctctggtggtggtcgtggcctctcctcgcgcgcttctgctccctctcgtgctctcccttctccactgtgagctcaattcgcttcgagttgcgaggatggaggtgatcaggcgtttaaaaggtggttgtgtgagcaggaaacgggctcgttgttgaattgaatcagaaacaggtcaccgaacgcgtgggcgtacgcgtggg

SEQ ID NO: 63357 - DNA, 1854 bp, Oryza sativa
  Clone ID: PAT_MRT4530_64607C.1
ggtacgagccgacgaaccatccgattccgtggtggcggtagtggtggtcggcgacgagccggcggcgctgtacggcgcgaggtgggcgaacgggttgcgcggcgcggcgatgtggtcctccccttacagcatccgtgccacgttgcccagggacggcctgtcctcccgccggtactgcacgccccagggagaaacgatgcaaactctactcgccttctccctcttcctcccgccgcccgccggcgccgccgtcccgcgagccagcacggcctccgtctcgccgggctgacgtgcccccccacccacgcgggtaccgctcctggccgccgtggccgtgcggccccggcccggcgcggagctccaggttcggccccctcccgagcagctcgcacagcaccatcccgtagctgtacacgtcgcacttgtgccccggggaggcgtcgggtccggccccgacgccggggtgccgcgtgccgtcatgtcgggcgtctccccctgtcgcatgacgagcgagtccgaagtcggatccctgttgctctttcctgactctaatgggcaggttggccgtctgcttgtcttactatttgatccgctgcgcgtactcctcgtgcaggtaccgcaccgccttcgccgtcccgacggcgatctcgtggagcttctcgaacccgatcctctccgccgccggcgacggcgacgagtcgaacaggtagcggtccagcgagcccttctccatgtactcgtacacgagcgccttcacgtcggcgtcgaagcagaagccgtagaggcggacgaggttgatgtggtacgtcctcccgatggtgccgacctccgccatgaactgctcctcggcgcgcttcccgagcgtgctgttcagcaccttgacggccaccggcgcgccgctcgggaacacgccgcggtacaccacgccgaacccgccggagccgaccttgtgggcgtagctcttggtgaaggcgcgcagctgccgcgcgctgaaccgcacgggccgctcgttctggaggccctcgatgaagtggctcatgctgcccatctcgacgacgtccgcgtccgcgccgccgattccgccccggctgctgctgctgccgccgccgttggcgatgggcgtgtgatggtcacgactgctactataccacattttgatggcgatcttggcgcacttgtaaatcgcaactatggtcacgactgctactataccagtcgtgatcaccccaatgagtgctaaagcaagacttccattggcgatggccatcatcgcctcggccgttgactccggcgcaggcgggtacggcggcggcgggtgcgggggcggtggctgcggcggcggctgcggcggttgacgcgtgacgagttgttgcttatctgctcgtgttcgtatttggttactatagtggttaggcaggctgtcagcttctctaactatttgctcttatttgtttattcgcacgattatttgtaatgcatgattacatcgtgaaaatatataaatatgatttggaatgcgtattgtctatggtgtctacaagactcagaacgatgtttttcaagaacacgcaaaaggcttggtctgattccactgaaaaggagaagaacaaccagtagaacttggtttgcagctgaggaacccagaagaagatcacaacacaactgaactatgaaaaccaagtgaagaagagatcaactgggcacagagaaaaaaaaggcttacttgtctagtagaatctagataacttccttgagcttgatgttcttcattcttactgcatgtcgacgcagctgtttttcgcagctaaatcaagagatagaggatccaaaatgataagaggccccgcctcgtgc

SEQ ID NO: 63358 - DNA, 487 bp, Oryza sativa
  unsure (1)..(487): unsure at all n locations
  Clone ID: PAT_MRT4530_64608C.1
ccctggtattaatggggccttttgttggccttncccacaataaccccacgccttggtggtttaattttgaagaattggggtaatttttttttttttgtttccagggaatttttttgttaagaataaatgaaattggtttaggcctttggatttaaacctaatttccctggattggcttttatttttccgggagtttccccaaagataattatgtggcattcatctttattgagaagtccttgtccaattttggggaaatgccactacgtcccccagggccgccaaggatcaacgccgacaacaccccccgggcccaaacagttagaataatgccaggatttgttttttcttttgttttcagagtctgtttaaagtttgttatttgatcttaatctctaagagtttgttagatgcattgtaatctttacttaaaggccntactggcgcatggaataaacaagcatcagaaaaccaaaaaaaaaaaaaa

SEQ ID NO: 63359 - DNA, 1702 bp, Oryza sativa
  Clone ID: PAT_MRT4530_64609C.1
atggcgagtcacggaaaagcctcactcgctcttccttgcgcgctttgcctcgcgcgcgctctagatttcaaggggttctgggagtccagattcgggggcaagaaggagcaggagccggagcagaacgggcacgccaatggggtggcgaacgggagcgtcaggaagaggacgtccgatttggcggtctacgagcagttcgagcagcaggtgttcttggacaggcgtctcgtctcttgtgtagtccttgatcctcgatcggtgttgctgtttcaggccaggcagacggaggtgcgcgccgcggcgattcgcgatgggaatgctgatgcgatccagaagcccctcctaccttcgtttgagtcagctgaaatgcgtaatcttgcagagacattgttgcgggacattattcgcggcagtccagatgtgaaatgggaaagcatcaaaggactggagaatgccaaacgccttctaaaagaggcagttgtcatgcccataaagtatcccaaatacttcactggtctcttgtcaccatggaaaggcattttactttttggtcccccaggaactgggaagacaatgctggcaaaggctgttgctactgagtgtaaaactacattcttcaacatttcagcatcatcaattgttagcaaatggcgtggggattcagagaagctagttaaagttctgtttgagcttgctagacatcatgcaccatcgacaatatttcttgatgaaattgatgctattatcagccaacgtggtgaagctcgcagtgagcatgaagctagtcgacgcttgaagactgagctactcattcagatggatggcttgacaaagacgaacgacttggtatttgtacttgcagcaacaaatttaccttgggaactggacgcagctatgctccgccggcttgagaaacggattctcgtacctcttcctgaggctgaagcaaggcatgctatgtttgaggaacttttgccatcaactacctcaaagctagaggttccatatgatactttagttgagaagactgaagggtactctggttcagatatccgtcttgtgtgcaaagaagctgccatgcaaccactaagacgtcttatgtcagttcttgaagccagagatgagctggtgcctgaggaagaattgcccgaggttggtcctctcaaacctgaagacatcgaagttgctttgaggaacacaaggccgtctgcgcatctccatgcacatcgctatgagaagtttaaccaggattacggaagccagatccttagtcaggagcaagcctgaacttctcaaagttcagacataccattttcaggacgcaacattttttctgcagcagtttaagttgtgaggcgaacgttacaaacggatgttgctgctgcagcagttatgaaataaatagcatcatgaatatcgaacgcaattgcctccttttatatgtgctccgcatcgtcgaagcaaaaaaatggatcctatgctgccggggggcccgtgacccaattggcccataatggagtcgtttacccgcgccccactgggccggggttaccaacgggggactggaaaaaccctggggttaccaaataattgggcttgaaacaaatccccttttggcacgtggggtaaatacgaaaagagccgccaccgatgggctcttccaaaatttgcccaccctaaatggaaatgggaccccctcttg

SEQ ID NO: 63360 - DNA, 622 bp, Oryza sativa
  Clone ID: PAT_MRT4530_6460C.1
cggaattccccgggtcgaccctacggccgtcccgtagatagcgccaataggcccatagtaagcacccgtaggggtgtaactcttttttgagcacctaggtaggtataggggtagcgcaatacccataggatattcttggccccccggacctttccaaagaaaaggatgaacccaggaaagggcccttgttgggattgccttgaagtttggaattccaaaaggccttaattccggaaggtttggtcccccacagaccccttggaaattccccttattccttggtgccccgtttcttcttcttccagggaaccggccgaaccaagccccccaatgaagatgaaccaatttcttaaaatttaatccggttaaccaattttccaatttcttggaaggaaattccttttgccttaagttggttggttttcctggtaacctttcctggaatttggtaaccccggttaagtggacttctcccaatttcctttaaattcctccctccaaatattaataaaaagattaaaaaaagaataatctaaccttgttgttccattgtacccgaccctactcatcccaaccataccattgacccatattaacctattcccttcaaaaaaaaaaaaaa

SEQ ID NO: 63361 - DNA, 108 bp, Oryza sativa
  Clone ID: PAT_MRT4530_64610C.1
atggcggatccgtctcctggtggccggaggcggcggatccacggcaccatcgggcacaagggcagtgtcaatgagcgcgcgatgaagacctcgacctcgacagcatga

SEQ ID NO: 63362 - DNA, 211 bp, Oryza sativa
  Clone ID: PAT_MRT4530_64611C.1
ggggataccgttctactctccttgaagggtaaacgttgctagctggtgcaacttctacttgaaataaatatggaggggctaaaaattctccaaattgattatgaaaccctggaaaccagaatcaatggcggattttccttattcagaccttttgatgaagcccttgaagggggggagaaccatgaagcggttgtaaaagggatcactgatg

SEQ ID NO: 63363 - DNA, 1032 bp, Oryza sativa
  Clone ID: PAT_MRT4530_64612C.1
atggaatcgaggaaaatttcaaagatagtattgaaaggacaaaaaattagaatcgatgagattttcagagataccaggaaagatactaatattgcgatgccttcagctaagtctgagttattacaaaatgaatgtattgttgtgcctattgctttggatactaatattttgcaggcatctgagaccaaccaagaatgttcaattggaaaagcacctataatttatgaagatgagaataataaaggtaatgataatggtgctacaactactcaagaggaccgcatgaatataagtaattatctatctagttcctctagttgtttaaatgagttacaggttggtttgcaagaaggagagtgttgtagtttttcgactacaaagattttaggatccaatcatatggtcatcaagaaatgttcagcacaggatgttgtaatagacaaagataagtacaatacgctccatgacaaggtgaaactgaggacagtttccaatcaagaaggggaggatgatgaggacacaactagctcagatataaccatgactatcttatgtattaatcaaccaaagtcagtccagcttctttgggaaaccatgaacattttcggttctgtcatcgagagccttgtcaacctcaaatctttagctctagctgctggcttcttgaacgggacatcatccactgctcatttcagttcagctactacaagaatgtcatggcaaatgtgcactcctcctcggttgcttcagagaattgatctgtcacctcatgtctgcacattctccacgcttccaaactggatcagagagcttggcagcctctgcattctgaagattgcagtcaggaaactcggtgatggcgacatggatgttcttggtggattgtctgaactcaccgtactgtcgctccatgtcagtgacgcccctgaagaaaggatcatcttccacgaggcaggattcccggttctgagctacctcaagctcagatgcagcgtagcaaacctggccttcgacgaaagagcaatgccgagg

SEQ ID NO: 63364 - DNA, 1113 bp, Oryza sativa
  Clone ID: PAT_MRT4530_64613C.1
atggcggcccattttttgtgggtgtttggttgctgggcaggggtgggatggggcggcccgaagaggaatattctcctcagatgctggatggggggatccgaccgatttgcccggatccagccgcccgagcgcccgggcaagctaggcaagcgagggaggcggtcgcgtcacccgcgagcgagggagggaggcggtcgccgggcgagctggccggcaggatgcgggcacggtggccggcgcgggtgcggcaacgggaagcgggagcggcggcagcaaggagaagagggggtggcggtgagcccgaaggcggcagcagcgggaggagggaaggagacgacggcggcaatgcgagttcggcggcggcgggaggcaagctcggcagcggcgcgggatgcgagctcgtcggcggcgggaggcgagctcggcagcgacgccagatgcgagcttagcagtggcgggaagaggagcgacggaagtaataaaatgtataatgtgcagggtaatttgatgctgactggaccgtacagggccatctcagccgacgggagcttcctgatcgaagttcataccaacaatgctggcgatgttgatggtacgctgttttgggactgctacgacgaccgcaacgaccatgagcacgacataacattgactaacaccatcaacacaagccttggccccgttgaggtgacctacgcggtgctgaccgacgcagtggaggccaccgtgcaggtcaagctgctgcatgcttctcgccggatacagcaccgccacgcggtcgctgccaccatcttcgtctacggtgatatcaccgcgcgcagcgaatgcttcagcgtcgggagcgtgctcttcagccgtggctcgcagaacaaggtggcgctcacctcgggctccacccttcttccactgtcgcgatgcgttgttgcggtgccacttaacgaccaggtcgagatagaggtgaagctgtatgttggaacttccagcgaagagagtatcaattacacttttatccatcgtattctcgtgttctactcgggcggtgaacagctggcacaacaaatattcctccatggcaacccagcgattgaagtcacttggacaccgtacttctga

SEQ ID NO: 63365 - DNA, 316 bp, Oryza sativa
  Clone ID: PAT_MRT4530_64614C.1
gtaatgatcattgttactttttttatcagtggtttctttttttttctttttcataaagacctcacaacttggcatctcatggacaatcttattggcacgggcattctggagacactgttaaacttgaacgacacgaggggaccaggggatcggtgacagccctaaaagatgacgcttttacagtgggttgaggacctattcaccaccatagatggggaattggccccctttctcaatgttagcaacagtaaccttggggctgtaagtaaggagcgcttcccggttaaaacgaataccatttgcttcctccgaaagg

SEQ ID NO: 63366 - DNA, 613 bp, Oryza sativa
  unsure (1)..(613): unsure at all n locations
  Clone ID: PAT_MRT4530_64615C.1
cccacgcgtccgcccacgcgtccgttcatcacatctacatctcatgctatttgaattggtgaagaactccttgcgtgcagtacaggaacgatatatgaattccgataaagatgttcctccagttagaattatcgttgctgatggggcagaggatgtaactatcaaggtattcatctattacatcaccaaacatctgttattaatagcatcctagctccctgggtatgagcagtcattaaatgagttgtacctttacaagtttttagactcaaatgactgtaatggaagttccactggcaccaatttatcatacgattttaacattcttggcataaatagcaaatatgaataactctgacttatatagttatatcgaattagttgagttggatggtgactggcagaaggatcaggtaagaattagcgctggctgctgaacaggacatgtctcaactttaaaccaatctggcagtaagaaagatgctatattttatctttgaagtggatgcaaattgaatggttttatttgttctagtaatattgacnaacagaaaatttaattagcttgaagacattattttgtttactggtattatgggatgcaggtaaggct

SEQ ID NO: 63367 - DNA, 367 bp, Oryza sativa
  Clone ID: PAT_MRT4530_64616C.1
accaaatcgaccgaggttttaaccctaatcaaccggggttttagccaaaaacacattaataccactactaccggagagtgagcgagtgtgtagcagcggcgacagtagcagcagcaacgcctccgctcgctcgatcgatcgatcgatccatctcctcgtctagctccatatgcgagctggggtgcggcttaagcaactccagctcaaagtaatcttctcactagcaagcaagctctctctcatgtcgtgaggtgtagataggggggaggatttgttcttcttttttggtctggttttttttgtggtttcttgatcgttttggggggtaatggcgcaccggggcgaccggttcttggtggtggtggtg

SEQ ID NO: 63368 - DNA, 903 bp, Oryza sativa
  Clone ID: PAT_MRT4530_64617C.1
atgaggatcatggtgcgcacgctgcgcggggaccgggtggcgctcgacgtggacggcgccacgacgacggtggcgcaggtcaagggcatggtcatggcccgggagcgcatcgcggtggccatgcagcggctgttcttcgccggccggtgcctcgacgacgaccaccgcacgctcgcggactacggcgtgcgtcacgactccgtcgtcttcctcagcctccgcctcgccaccgacgcctatcagacggagatgcataatgtgcggttgatgcagccggagacggcgacggcgaagcaagaaatgcatcagcagcagcagcagcagttgcatgtccatgtcgccgccgacgacgaggagaaggcgatcaagaggaagccggtgtcgcggcgcgcgctccgcaagatcctgtcgcggctgcaggtggacgcgtggacgagccagcacgacgccaagttcctcgacctgctgctgcgccacacgggcggcggcggcggcgcgaggaacgtgggcgagctcaccggcgaggactggtcatccatccgcgccgagctgaacgccgccaccgggtccggcttccccgtggaggagctccagcggcggctgggcgagttccggcgggagttcgaggcggcgagccggatcaagaaccacccccggttcagctacgaccctcgccgccgcgtggtcgtcgccaagcaggccgactggaagaactacatactggagaatccggaggcggcggcgtacgaggggaggagcccgcggcatctgggccggctccgagcaatcttctccggcgacggcggcggcggcggcggaggaggagccaagtgccgcgagacgaaggcgaggagttgcctgaggaagctgctgcggaattttaggctgcgattcaagctgtag

SEQ ID NO: 63369 - DNA, 167 bp, Oryza sativa
  Clone ID: PAT_MRT4530_64618C.1
ttttgctcgaacgaaacgcgagggtttcgcatgtgcgtctacgcctagaggaaggagggatcccccgcccgtagcccagccatgccgaagaacaagggtaagggagggaagaacccccagaaggtgtagaaccaggcccaacactacaagcccgagctggtgttcaa

SEQ ID NO: 63370 - DNA, 477 bp, Oryza sativa
  Clone ID: PAT_MRT4530_64619C.1
ggggtttgtcgcgtggcggcgcggtggtggtggtggtgggtggggcggcccagcgagggagtggtggcacggcacggcgccgcggcatcgtgggggcgaggcgagagatggagcggcgcgcggcgtgggcgtgggggcgtgggcgtgggcgtgggcgtgtgccgtgtcggatcggggtgggggggtggtggcctggtgggtgggtggacgtccctctcggctagtgctttccgtttccgccgcgcggatgcggtgcggtgcgatgcgcccgtggctttttcgaatggggaggagccgcgccgtctggtctgtgccccgtctcgacccgtgaatctgcgatggcggccgatctcgcctgctaatttattcgcgcggcgcggcggctacggcctacggccaccacgcccacgcgcgtgccgtgccggcgtggctgcgtttggtttcgccgtgcagctagggcccatttggaagcgttga

SEQ ID NO: 63371 - DNA, 302 bp, Oryza sativa
  Clone ID: PAT_MRT4530_6461C.1
ccggctcacaccacccagctcgtaaacaagtcctcattcgtgcgcacccgggaagcctgcttacatctgatagcttttataggtcatagactgtcctcacagaccaacacaagtcttttctgcacactttgtcctcactcgtgcgcacccgggaacaatttcccggtcggtcacccatcccaaattgctccaagccaagcacgcttaaccctagagttctttggagatcggcttctgaaaacaagttgcagcttattgatataagtattctattaatcaatctatctccacgccagaacaca

SEQ ID NO: 63372 - DNA, 162 bp, Oryza sativa
  Clone ID: PAT_MRT4530_64620C.1
ctcagatactcgattcccgaaggtcgtcctcgtactcgtccatggcggcggcggcggcagcgaagacgacgacgaggcggcggcaggctaggggtgctggagcctggcgcgcacttcgtcttcttgcgcttaaactacccgtacccggcgaaaccaacccac

SEQ ID NO: 63373 - DNA, 152 bp, Oryza sativa
  Clone ID: PAT_MRT4530_64621C.1
ccgagcggcgccggcaatttctcaccggaccatcgcttggcctcgaagcatctttgtacccaagtgataagctagacgcgctggagtgctggaccgtgtgggcgccctgccgtgccgtgatcgcgttgccgatcgcgagcggcaatctttga

SEQ ID NO: 63374 - DNA, 1996 bp, Oryza sativa
  Clone ID: PAT_MRT4530_64622C.1
aaaagcatggcaaaagaattttgcctaatatatttatggagtggaagattgataataaatcaaaagattacatcagcaaagaatacattaggagaatttgcatacatgtttcattctgcgctaacaactgggacaacgactttgctactatcattctgttcgattagctatatatattctaatgtacagaagtaacaggccgaggccgtccagtaacgttcacttttttgtgctttaaagaatgggaaacagtataatctccacagaaaaaaaaaagctaataaacccccagccacaagccgcagtagccagccatactgcaagttcttctcctgcatgatacggcctccactccacagtcatcatcggtcctgcatctgtgggtaggtaacacgtctggtacatggcatgcactctcccacgggtagctaacattatgccggaaaattgattttgaactaatttaaggtaccaaagtgcacaggcctgaggcctgtctatcaactgttacgtttttccggtgccttaacacaagtgtgatcacagtttaatctcgacaggtaaaacaaacagaaagtggatgaacccccatccacaaagtctcagttagctagccaaaacttgcatgatcttatccagcatgaagatagctgccgctctccgtggcaagaatggtactgcaaatatggtccagtgtaactcttatgtcgccctcgaaaggactcacccacgcatcaacctaagatttgcggttaactgatttcttgagaactcctcttacaaccacctacagattaccttaggttgcctgataaatgtaaacgatagacctagcgtacgcgcagcttccatggtaatcattttgtgtaatgtgcaacattccggagtccaaaagatatctttccggaagaacaccaaacctttgccatacattgtaaaattcacgatgtgatatatttgcagcagcaacatctcctagaagtgtctgaagacctggccagaaggcttgaaggctagttagttgccagtgtgttgcttctccggtcctcatatcagcctcatgataccatgggccatgtcggaaatacttctgcactgcaaggtaagctgaatgaaacatatcccagtattcttcgcttccgaaaagaacatacgctttaatcaaatactcataaaatgaatcaactccagcaccaatgcctgacgaatattcaatccacttgccagtcaagacatcaagggttgtgcgaagagcacgaagagctgcagcctcatatctagaatcacccgtcaaacgtgataatgcacccatttcaagaatcagagaaccacaccctgatgtgcttgtctcagttgtttcattttccatcactccatacttaagattgatccatgcgtatggcaatccagtaggtgtctcaaaagctggtagaaaacgacttcctaaattttcagcaagatgtagtaactggtcctgatatggtccatctttaagatgactgctgtgctcctttgcaagaatatgaccagaaataagccccccaagaagtcttatgttgcactcaaaaagatttattcgagcatcaacatcaaatgttaggttctctgaaagccagagaactcctctttcaaactccgtgaggttacctaagacaacaagacttgacaacgattcgactagtgtaagtgcagatccattgtaatcatttggcaaatgttcaagatttaggttgccaagctcactaagggagtcagtgaaacttttggttagaggcttcaattcatcatgtggaaatgcataagtcatatagttgtcataagcatggtaaaacatctccaggaccttgttcctcatgtacagcctcctgccgcgcccgtacccatcgccggcgatggcggcgcccgccgcggctcccccggcgagagccgagaggaggaccgcagcggcgacgagccgcgccggcactgggcggcgcggccggggaggaggtcgcat

SEQ ID NO: 63375 - DNA, 328 bp, Oryza sativa
  Clone ID: PAT_MRT4530_64623C.1
ttcatttttgcagcgatggatcaaagttggatgtatgggaaaactgtaaaacatcatagcaaggagtatagaaatggcgcattaaattttataaatgccacggaggaggattggaaaagaagaaacaacgattacatgtgttgtccatgtgcagattgcaagaatgaaaatatgtttgatagtagagtggatgtacacgcccatctgatataacgaggatttatggagggctacacatgttgagtgaagcatggagagcaagaatcaggaagtggcgcagctacagacagaagtggtgcacaaaatcaggaagatgaagatgagcatg

SEQ ID NO: 63376 - DNA, 455 bp, Oryza sativa
  Clone ID: PAT_MRT4530_64624C.1
ccgggggctctttccactccgactcgtcgctgctagacgacgcgttccaccgccggctatcgtgcggcggcaggccaccggcatgtacgccgccgagttcttccagggattttgccgagtcgatggtcaagatgggcggcgtcggcgtgctcaccggcggcgaaggcgagatcaggaagaagtgctacgtcatcaactaataattaatctacgtattatagcttaattaagcaattaagctcgtaattatgtgtcttaatttttcctgctgattattgattaagtgttccctaattaatcatgcgtgtaactgatgtatgtgtagagtggtggcgacatatcgatctatactagttttacttggattactttgtttgttaattgtattattatgcaatgtaactaagaaattaatcaaataatgaatcaagtattgcacaaaaaaaaaaaaaaaa

SEQ ID NO: 63377 - DNA, 266 bp, Oryza sativa
  Clone ID: PAT_MRT4530_64625C.1
tctactagttctagatgggatgggccgaagaagtcgctgatagcaacgtaccgtttgcatatagctattacgcttttgtcgatggcgaatcgtgggtcgtgcccaggcccgcggaccatatcgagattcacatgtgatgatccatatgcgtgaggaataccaccatattgccacacgatatatctcgcacttcgatggtctcataagtacttatctgtaatgataatgtatttatagcagaggatgtgaacccgatccaaaaataa

SEQ ID NO: 63378 - DNA, 252 bp, Oryza sativa
  Clone ID: PAT_MRT4530_64626C.1
atggccatcagagggatgggcttcctggtggttttgtggactaccttcatcctcctcggtggcttcgtctccatgctcgagaaggacttctggagtctcaccgtcatcaccctcgcacaaacaactggcactgatgtcagagattccaggacagctgtgacgtcaaagagcgacagggagggacagaataataaagatgaagtaatgggcgtggttgactggctaaccacgactgtgtttaggtcacactga

SEQ ID NO: 63379 - DNA, 308 bp, Oryza sativa
  Clone ID: PAT_MRT4530_64627C.1
ggcagaggtgacctacttggggcagctccaccatgagaacctggtgaagctggtgggctagtgctcggattccgacagcaacaagctgctcgtctacgagtacatgctcagaggcagcctcgagaaccacctcttcagaagagggacgcagccgctgtcgtgggcgatgcgggtgaacatcgcggttgactgtggctagggggctgtcctttttgcacgggctggagaaccccatcatcttcctggaccttaagtcgtcctacgttctttctcgttctctactttccgtgccatttttgtcttgactt

SEQ ID NO: 63380 - DNA, 279 bp, Oryza sativa
  Clone ID: PAT_MRT4530_64628C.1
atggcttgccactgtcatcggcctcatccctaccccccaagtccccagctgatcgtgcgcgccacaagctctgctggtctccttgacacgctgcacaagcttaggaacgtggccgctgagagcaagcgtaataggaagctcctcgcagccatccccggcatggtggggtactggacttgccagtgcctgctcgccacctaccgtgccactgcccacgaacccggcgaccacacccctcctagcctccgcctgccctctcgtgtgcggcgccggctctag

SEQ ID NO: 63381 - DNA, 180 bp, Oryza sativa
  Clone ID: PAT_MRT4530_64629C.1
atgaactcgacgccccaccatggccgctgcttgttgcccgagctctgttgcccaccaacattcgcgcccacgagcctcgccaccaccaaatccactgcctccgtcgtcatcagagatgtcatcgctgtcaacgtcgtggtcgtcgttgctgagagcaccatggtggaggtaggagggtag

SEQ ID NO: 63382 - DNA, 180 bp, Oryza sativa
  Clone ID: PAT_MRT4530_6462C.1
atgggcctctcacaagtgaaggttgaagcgaacccgatgaataacagaagattcagtctaaccttaaaaaaggaagaagacctctcaccgttgggcaaatatgctacacttgttgactcaaacaccaatgaagaaccccgtaccagccttctagatggcacaaggcaaagcaatctatga

SEQ ID NO: 63383 - DNA, 318 bp, Oryza sativa
  Clone ID: PAT_MRT4530_64630C.1
atgacgggggagaagggagggcgtcggcgtcggcgacggcaggacgcgggagaaggggagggcgtcgccgcgtgggcgaggtcgaggatggagaccccggcagcggcgaggtacaacttcatggtcctattactcgcgctcgtgcatgtcaactcaacaatcaggaacgatggagaggatccaaaggggagaggatttccgcgggacgagtgccctcgtggccggattgacgcgcaccacaagttcacggtgaccattggagacggtgtatcggttgctaaggcgcaacgtctttggacggttttagtcgggccgtga

SEQ ID NO: 63384 - DNA, 266 bp, Oryza sativa
  unsure (1)..(266): unsure at all n locations
  Clone ID: PAT_MRT4530_64631C.1
atcaaatgcaaaaccccaccnngaaacaacgaaaggagcaatagattccggagcaacatccacgcctaacannagcanccanggccnnngaaagacnggacagcgcggggaagccaccgaacggcccaacccaacgagggagagaagaaccaaacgnccnccagangcnganacaaaaacaagcancacgcaaccggaaagcacaaacgggcaagaagaaaagggcaaagcaanccccgaaccgacggccgctgaaggagcgaagc

SEQ ID NO: 63385 - DNA, 736 bp, Oryza sativa
  unsure (1)..(736): unsure at all n locations
  Clone ID: PAT_MRT4530_64632C.1
ggggggttgggaggggaatttcccgggganngaaacnnccnttttgggggttcctccntccgaaatccctccnagcggaaaccnantgtttntgggcnttaattgggggggggnaagtttttcaangggacnaaaacttcctccccaagaaantggctggcccttacatttggggccctcccctgggccaagggggttttccccttggcttggccanaatgaaattccacttggggccacccatttggggcaaaccggctttttgcccanccattccnattgttcnaanaaacgtttgnanggnaaaaaacggccgctcttcttccgcgaagctggcttctttccaccaaccccctgggtggcccctccccagcaaccctaaanttgggtgttgattccctccttcccaagggaaaaaccctgtttncccanaaaanaacccaagggaacggggggnagcccctttccgtccnaattttcnctccaaagggagggggtgggtgtttcctccccctgggccattccaaagggttgnaaaaaangggtttcccgttttgnaanggtttgcccnggcncccnnncnnaannaaaaaccncccnccccnnnggggcnccnaaannaatctttgggcnaagccgntttgncgccccnnntttnttnacnaaagggccgggtgcccccnctttccccccnaanttgggnggtttcttgttccnccnannaatttggggcccc

SEQ ID NO: 63386 - DNA, 457 bp, Oryza sativa
  Clone ID: PAT_MRT4530_64633C.1
aactcacaaattggccaggtaaccttgcaatttttgttgtaaaacaggtggagccacatttgtttcagaaatggcatgtccacggggagttgctgggattgcgtgcatgctagaccaaatccataatggattgtggtgattaattcccaaccagatctcttgttccaccaacaggcattcagattattgttgattggtctttttgatgaaaaagcatagaagaccttttttttttctttcaagtgatacgtctaatgattggatcgaagaacggcttccttgtaacggcgccatatttgatttgtgacttgaagccttgttggactactagacgttaagtgcttatgtagaattttatttagtgcataagttagtatattgttgtgtgttatgtgaagtaaagacctggatgttccatggtatattatgcttttgtgaaaaaaaaaaaaaaaaaaaa

SEQ ID NO: 63387 - DNA, 1414 bp, Oryza sativa
  Clone ID: PAT_MRT4530_64634C.1
atgctcctcgagatacacgccaacgtcgtacacgcgtcgggcctagctgtccctcgccacacaaggcgacaaaaaatacgtattggtttcaacgttttcaccgtggcggtcaaaataggacggaaaaaagaaattgtaacgctgcccgtttgccacctcccgtcgtccacacgtgcaagcacaattgcttttcagataaagagtagtacaatgtttggtactccgtcaagcacattgtatgagtattatactggagtaggagtagttattttaagcaaagcagtatctgtcacagaggagaggagccaccaccaccgcctcgacgccgagaaccagcctcgccgtgacccccggtcgccagtttttctggtcacgatcatgttgatcaaacgacagccaccgctcatcaaagagcaagccatggaggaatccaatgatcagggccttgcacagaagagcactgcccccactgggttcttcagggtccccggcctctttgtgaggctgagcagcaaaggattgaacgcagtggaccctgattctgcctggagcccaacctctccattggatttcaagaacctgtcatcgagcactggaagcacaaatctcaaatcctctgggctactgggtgtcgaggctgatcagaagttcagaactaaccctcccagagtcggcctcggcctcgtcgacgccctcaccgccgacgagagctcctcgtgcttgggtgtcacgagctcgtttcttgattccatcaggccatttcttgagctcgggttgccgaaggcggcgagtgatgctgcaatgcagaagaacggttcaggtagcgtcactctggacgagattgcagactttgctctgtctgaagagtacacctgtgtgatcgagcacggcccgaacccgaggacgacgcacattctgggagacgagacactggaggtgtgcaagggtgtcccaaggagttccaagaagtcaatcttcaccatcgagcccatcggcgagctgccgtcgacgctggcgtgtgctgtttcccgctcatgctgctactgcaggaagaggctgcagcaggacagggatatctacatgtatctgggagagaaggcattctgcagcaacgagtgcaggagggactacatcgatgaggagatcgaggaggtggaggagctcatgatgctggattctgccggttcttctgccctcttggcttgcatttttctttcttttctggttggttcgtcattttactttctgaatcttccgtcggtgcgcttgcccatcatgccgatgtttgatgatgggtcactgtgcccttcgagcagtgaaaaggagagcttggaggtgttctgtgcatcaggctcaatcagtagtggccttgcgccgtactcgaaaggcctagaaggtatccaatgggcaatgg

SEQ ID NO: 63388 - DNA, 488 bp, Oryza sativa
  Clone ID: PAT_MRT4530_64635C.1
atcgcattactcttggtgaaggtcttgtatgcaacacattgtccacaaagaccatggtgcagttcgagttttcatgcacaaaatgtagacaacaacataaacaattgataagcatgataatattaattcgtactattctacatttgataatacaccacaaacaactttatcacatacttacaagatgataaacttgttgtctcatggtatagtaaacttttgcatgcaaaacaaccttttgatatgtcacaataactgaacatttagtacagaactaatagataaaatcacaagtgtatctcagtgtggggacaagaacaaaattaccccaaataatatctttaccttaataaaattgccgcaaataataccttaaattgaacaaaattgccccaagaaatagctatgctagagatatttagcgtttgtatgcagtcaaatcacagaacttcatttacatgaataagattgtaaatcatgatagctat

SEQ ID NO: 63389 - DNA, 1134 bp, Oryza sativa
  Clone ID: PAT_MRT4530_64636C.1
atggcagtaggattacatgtagctcttatgcatgtcgctcttgatgttacagacaggacatgcttcatggattttgttcaatcagttgttgacaagtatcccccagggtacttggaggttgcacatgtccagcactatgatgtcctcaaaacttttccagaggttaactcagaccaagagttgctagtcatgtttgatctgcacaataagaagaaggttgtagaaatgttcattgtttattctgatccgtctgagccattcaagcctatcaatgagtgggaatttgaagaggaagagcaacctgacaacaacatagaacccgatggtgataactatcttagtaatcctaatccattgaatgagcatgttggtgttgatgaggagaccaaacttaaaggaagcattatcgaaggttacaagacagaggaggcaattgagttctacatggattacatgtatgagaccaatctaataggagttcccaggccctacgccgatatcacgagaagcgcatcagagcttgtacacttgccatcggcgattacgtcctccgacgagttcaaacccaggcatggcggaacaaactctcgcagatcccttaccacgataacaccaaatgttgcaatcggacctattgaccctttacgccattccgacaagcctccaagaaacccacgggaatttcggctggggatgcccagagcagataaggggctggagtctaccacgacggccattgctagttcatggacgagaagaccctctcagccaaaggagcaaaggaacacgccagctgcagctattgaggtacgagttcaaccagacttcacgacctcggagcgcctctatagcctggcaagggttcaaggaaattcgcctcgcgagaacaaaaaggtagagagcgaaagtcctaagatatcccacctgagttctcttggaggagcgaaaccacgcctaaacccgacggcgagggaccacattcgtgccctcaaacacgatgatatccccgacaacgtcggaagcgggtgccgtggctggcaaagccggagcgatcatcgcggtatcaaggcgtccgccttgctggacgtcctcggtatcaagatatctatgaaggaaaaacaagctacaaattaa

SEQ ID NO: 63390 - DNA, 595 bp, Oryza sativa
  unsure (1)..(595): unsure at all n locations
  Clone ID: PAT_MRT4530_64637C.1
gcacgagcagccttcttgcggagcacggggttcattgatcatgtctgcacaagctacgacgtaccttgggtttgttatcctcacggccaattcgatcgaggcgatccgcatngtcacacggagaaatcaccgatacatcgttcgtcgtcgtgtcgtacctctgcctggtgctcctcttcgtgttcctgcgcctcttccaggccgcgccgccaaattctccggcgaggggcggcaccaaggccggcgtctgggtcgccacgacgctgctcaccgtatagttctcgtggagggtttccgcggcacgccgtggccggtggatgtgattgtttggctgatggccgcttcactgatcttgggggattctacactttgttncttcaccgtgccggtggagactgaagaacaagatcgatcgagacatgttgaagcaatattgccaagtgtgctacgtaccggttgtgatgcaacacttattctaactggcttatatataatagccctggaaatatcgtttctataactaatgggatggtcccatgtttggttctttttacatggaaaaggtttgaacataaacccgttttattttttgctt

SEQ ID NO: 63391 - DNA, 380 bp, Oryza sativa
  Clone ID: PAT_MRT4530_64638C.1
aatctaacatactcaaactggttttattacaatgttggcggaaaacaatgggaagtgggattttgggcacaataaacattgacagtggagacctgacacatgaagtgccataacgcccagcattggaaccaacacggatccctccgggcattggaccagagaatatgcaaacataaccacatggggcgcaagggaataacccgagattacgaaccggatcctggatgggctccatatgaccctatagggcgttagattaaagctgggcccatataagggcactggaaggctcactgcgtgaaagtgttaatcctctacaatgccccacaagatatccgcacgaaagcacttaagggctaagcctggggggcctaatgagg

SEQ ID NO: 63392 - DNA, 399 bp, Oryza sativa
  Clone ID: PAT_MRT4530_64639C.1
gacaagagaggtttctattggaatcaaagatttccatttggtgttgatgactgataaagagccggaagaaaatattgttttgagctccgttcaagaagagaccagttatatgtttggtgctgctgataaagatggatttttcggattcaattgggggtgaatattttaatccgttgagtaatcaaaatgcagacgacgacgaaactaccagagatgctactcctcgtaatattcccaacctatgtcctcttcccaccacctgttccagtcactcctgcacctcagattacccagtatctaaaggccaccagaatgttcctttagagagttataatacctctagtttatttaaaattatttattttaataaatcataaaatattacaaaaaaaaaaaaaa

SEQ ID NO: 63393 - DNA, 643 bp, Oryza sativa
  Clone ID: PAT_MRT4530_6463C.1
gctgcaggatcggcacgagggcatgttcttgtggatccaagacagtatggggtgctgatggagagcttgtgcgcgggtggaaagtgtgatggtgctgttgaggtgatggatgagcttcttgagaaggggacactgttgagcccaaagagccctgtgcttgaagggccagcttataatccagtgattgagtatttgtgcagcaatgggaacaccagcaaggctgagactttcttcaggcagctgatgaagaaaggcgttgatgacaaggctgcttttaacagtcttatccgtgggcatgcaaaggaaggtgtgccagaagcagcacaggagattcttgccattatgacacgccgtggtgtccgtactgaccctgaatcgcatgcactgcttgttgatagcttcctgaagaagaatgagccagctgatgcaaagacggcacttgacagtatgatggaacaagggcatgtaccgagcccatccctgttcatgtctgtcatggtagcgcttttcaacagtggccgggttcagactgctagcagggttatgaagagtatgattgagaagggggttacagagaacatggacatggctcataagattctggaagctctcttcatgaggggccatgtggaggaagcaatcg

SEQ ID NO: 63394 - DNA, 318 bp, Oryza sativa
  Clone ID: PAT_MRT4530_64640C.1
atgccgttaatatcagaacgccacagtaagaaggactgttgccttccctactgtcagaaggccgccccgtgcggccggatacactgcccatacttaacaacaacggccgcggcgaaacccgacggcggcaccgatcacaagaggaaggcggtaattgtaagcagcgcgcagccggcgcgggcggaaaggacgacgaccggcgaaagcagcaagcggaaaggacagggcggcgaggctctgaatgttcatggagcaatcgctagtagcgccggcggcgaccatgcaaggaagcgcttcaggatgtggggtctgtggtga

SEQ ID NO: 63395 - DNA, 182 bp, Oryza sativa
  unsure (1)..(182): unsure at all n locations
  Clone ID: PAT_MRT4530_64641C.1
gattnatgaacagaggatggggctgtttttaatcacaggagtgtacaaagtatattaactgtcagttttacatgaatctgcagtctccaatgcgaaattgctgcagggtgctgtcgtctcccaaaggacaggaaggaaacaagacgatgaccttagtacgtgggtgagtacaatggttggga

SEQ ID NO: 63396 - DNA, 495 bp, Oryza sativa
  Clone ID: PAT_MRT4530_64642C.1
atgtctggttcctcagtgtatcccgaagcagattccgccgttcagcttgatgatttaacatgtggtgatgaaaacatgttagccatgtttaatgttctaaagaacaaaaaatctgcaaggctcgaaaaccttgtgttggctagaaattcattttctagaactgtatacaacataaatactttgtcaaatcttgtttatgttggaagggtacaaataactgtggatggtgatggccgtcatattgtatacccaaggaatgcaccaacggcagaagacatagctagtggaaagatgatgaaagacatggttgtagatggcgaagagctaatgcacggtcctcagctcaccacacatggcaccaatgccagcaatacgccaccaatcgtagtcatccaggatgaggaggcggcggccaccacctcgtgtgagaaaatggagatgcgggaggctcgccacaagttgaaccgtagtctcttccaagacgatgacaaataa

SEQ ID NO: 63397 - DNA, 362 bp, Oryza sativa
  unsure (1)..(362): unsure at all n locations
  Clone ID: PAT_MRT4530_64643C.1
agcccctgagtgtgtatgatgatgacaccacctgtaaggggatatgcgccctctgtgggtgtgtgtgccaggtgtgaaatgggtgatgtgtgtgcccaagagaagaaaaaaacttgttgctgtgctatgctgttgattgtatgctgttgtttaatgtgttgtctgggtggccttggattggagccgatgggccatgtctcgccacgggtgagtgctggcctggtgcatgcacagtgctttgtggaaaatccaaattgttggcgccctcggtgtggaatgtctccacggacccagttaatgagtggtgtgagccttgagtggggggaaagaaaaatatccnccaaaaaaaaaaaaaaaaaaaa

SEQ ID NO: 63398 - DNA, 625 bp, Oryza sativa
  Clone ID: PAT_MRT4530_64644C.1
atataaactccttatatttcttaatatatcacagtaggagcctctcatgctgtttctcgtaaaaaaaaagtgaatgtaattatttgtcatcgtcttggaagagactacggttcaacttgtggtgagcctcccgcatctccattttctcacacgtggtggtggccgccgcctcctcatcctgtgacgtattgctggcattggtgccatgtgtggtgagctgagggttgtgcattagctcttcgccatccacaaccacatctttcatcatctgccagtccctaaaatccgtcctcattataaaatggatgttttttacctttccactagctatgtcttctgccgttggtgcattccttgggtatacaatatgacggccatcaccatccacagttatttgtacccttccaacataaacaagatttgacaaagtatttatgttgtatacagttatggaaaatgaatttctagccaacacaaggtttttgagccttgcagattttttgttctttagaacattagacatggctaacatattttcatcgccacatgttaaatcatcaagctctgcttcgggatatacctgaacggcggaatctgcttcgggatataccgaggaaccagacat

SEQ ID NO: 63399 - DNA, 359 bp, Oryza sativa
  Clone ID: PAT_MRT4530_64645C.1
ttttttttttttttttttttttttttaaactaataaaatttttttgatatataaattgtttacagttatctttatatttaaacatgcataacactaaagaaacgaaacagaaaattggtacaacctgtacgaataaaccaagtacagaaaaagaaacagaaaacaagaaacggggggatcaacgccattatagcaccctacaaaaaactggtaatcttttataattgccaacagcaaattaaaccgtagaataaaaaaagtagaatggtgtgccataaagagtgaactaataacaaaaaatttaaaacaataaagtacacgcagtgtggtaataaaaattataactgtcataactaatt

SEQ ID NO: 63400 - DNA, 127 bp, Oryza sativa
  Clone ID: PAT_MRT4530_64646C.1
acagaccgaaaagatatgcatttatccacgtcggaaaacaaccgaacgcgttgagagcggcgtcaagcgtcaacagtgcaatatacgcacaataacaacatttcaaaagctttaggaattcctgggc

SEQ ID NO: 63401 - DNA, 449 bp, Oryza sativa
  Clone ID: PAT_MRT4530_64647C.1
gttgattgctgcaaagaaagctaaaactaagagcacatcatacgagatcgataatgattttgttacctccagatcaaaaagggatggcaataaaaggtctagggaatctactgatgctgataatagtgaagaggaacctacatctgacagtgagcttgatgcacaaaacaggaagcagaaagcagtcactgaatcacctgctaatgtaagaagcgagcctctgacaacacgtcgccgtgcccttcaatcatggatggatggaaacagcaacagtgctattgagttccctgatggtttgccaccagctccttcaagaggcaagaaggataagctttctgatgcggaaatgcttgccaagaaggcagaagctgctcagcggcgcaagatgcaagtcgagaaggctactaaagaaagcgaggcttgagctataggaaaattttgggcctgga

SEQ ID NO: 63402 - DNA, 723 bp, Oryza sativa
  unsure (1)..(723): unsure at all n locations
  Clone ID: PAT_MRT4530_64648C.1
agacccacacataatccccttccatcgctagctctgtctagctctagctacctacactggcatccacacggtcgtcttcttcgcggcggcgctacctggcggcacctggtggcacctctccggcgcgccccgctgaccgccnacgtttcggacgacttaccggttcaccggggaccaccggcaccgtgcccccgccggggacgggtgcacggaccacgccccgctggaccgcgtgccggcacggtgctcgacccggcacgctcacccggccgggacgacggttcccacgccgactggttcccgcccgcccccggggncgccgcctccggggccctgggcgggaattgccacgctgggctgggccacgccacgcctggcacgggaccgttgaccgcccggcgacgttgcccgcctggcgcccgccacttccgccggactggtgacggacgctacgacggacgacgcactggccgactggcccctggaacgcccacgggcctgggttcgttccgttccggtccggtccgggaagttaccctaccggggcggggcgaacgggggttcgttccgtccggacgcagggggtactacggcgacgggtccgtcggacgagggcactacggcgacgcgcgcagcagccgggatgaccgcgtgacgctgaccagggcacgcgtacgcgggcngcgccgtcatgtgcccgtgacccacatgcctttgcgcgcc

SEQ ID NO: 63403 - DNA, 186 bp, Oryza sativa
  Clone ID: PAT_MRT4530_64649C.1
atgaccaacatgaagatgatatcacccatcagagccgatgaagatgtcagtggtgtcaatagcagagtaatagctgatgatgacgacgaggtcacctatcagcaattgcgtagtaggccaaccgtgaagataatagtagaacttggtgttgaagctgttggagatgcttctcttggaggaaaatag

SEQ ID NO: 63404 - DNA, 398 bp, Oryza sativa
  unsure (1)..(398): unsure at all n locations
  Clone ID: PAT_MRT4530_6464C.1
cccgcgtccggtctcctcagtgtcagtctatccatcagaatttggacttgagcgcatgaaaattgagtcaactaagggcccagctgcccttgttgatgtcaatggtagtgatggtgaatatagtggtggtgatgatggtggcggcggtggattcgtcgttcatagtggtgtccctgcccatgtttcctnggctgtgcgtagcgccttcttccttttctcctccgccgccgggatctggcctttttttccgttgggctcctccctcgncgcagctctctctgtctcctcccgcccccggtgcgtgcgccgctgcgtctcctggctgcccgcattcttggccaggttgctcctcctgctctccggccggctggggttgcccctgcttggtcccttccccc

SEQ ID NO: 63405 - DNA, 681 bp, Oryza sativa
  unsure (1)..(681): unsure at all n locations
  Clone ID: PAT_MRT4530_64650C.1
gcacgaggatgttgcactcgcccacccacgccgctgacgatgccacagaagacacccacagtcgtcggtcggctcgcgcctactcgacggcagcccgatcttcatcgtggtgctcctatccgtccacgtgctagacctggtgtactggatgtacagggtagccttggacaagcaggcggcgcggaggaagacgcattaggcaccaccaccacgggtcccgaccgctttgtgcttgactttgagtagcccaacaaatggagagctgcgtgagaaagatcatacctctagaaagattaagttgatattattgacgcacagattgtgttttcgattgttttatggcaccagngacacttggtatattatgaagaagaattagaggaggacttgttggatcaaccgccttgggatctttttaagaagaaaactccacaattgggctgcgacaaaaaataactggngaggggatctcaaaaaaatattctttggaatatggtaccaaaaaaaaaaaaatgcatgtttgaactttggctcccaagggggcgccccgccccaattgtgattttatgggttcaagttgcaccctctctccggcccgttaatttaataaggcggggtgggaaaaacgctggggttacccaatttattattttaataacaaaccccattggcgggacaggg

SEQ ID NO: 63406 - DNA, 408 bp, Oryza sativa
  Clone ID: PAT_MRT4530_64651C.1
atggagggaaaggccagccacgacaacggagcgaccgacgtgcgtggatccatcactggcagctccttcatgggtggatctgtcgtcggcagccccgtgaccacgatgtccctgcttcatgcactgacgcttcgaggggtggaggtggtgggcttcggtgggggccacgagacgggtagatcggccgccgttggccttgggaggggtggattctcctgtgcctgcctcaagagtttaaaggacgacggtgacggcctcagcagaggtggatccgccatgctggtctgggtgcgagaagaggaagaggaggcgatgaagggcttcgaaggcttactcatagtggacgtgagagatggtgagctcgtcgtggaggtggcccaggtggcttcaacctcgcagtggaggtag

SEQ ID NO: 63407 - DNA, 657 bp, Oryza sativa
  Clone ID: PAT_MRT4530_64652C.1
ccacgcgtccggctgccttttactcctaatttctttgttaacgtattctcgaactgaagcatgtatttactcaagcttcatcagctaatttataggatatatccacttcataaatcttgatgtcaccatttagtgatggtcacttgcaagttgggtcgatgaacccgacaatgaataagagtgcgcaaaaactgacacaaataaagtaacaaatgtcctttggctcaattcaatacttcaatatacaagtaaaacaagatggagatgcgattgaaggacggtttgcttttttgcgccaagttatagacatgctgcctttaacatttgtgagtcaatatctctctctggggattactattgacttactttcactatgtaaggtttggtttgagatctgaatgttaaatggccctaatacatgtttacatccttagcaagcatgagtaaatgtaaggtttggtttgagatctgaatgttaaatggccctaatacatgtttacatccttagcaagcatgagtaaacaatctgccaccaaaagttccatctgcttccaccaaaaatgtctttcacggattacaatacatgcaagtaatagtaatattcagtaagtgtgaagttgacactaaaataacgctgtgatgaatacagtttgcaat

SEQ ID NO: 63408 - DNA, 374 bp, Oryza sativa
  Clone ID: PAT_MRT4530_64653C.1
acggcacgaggaaaaaaggaacacatttgttcgtacaatttcaacatatatatagtataagacgatcagtttaactggataaaggtggttgtttaagctgcagagatagtatttggattttgagttatgacaacatgcaaatgattttccgaatgtaaattataaattaaattttctttcagaacttgaaaatgggtggtgtaaaaaaaaacatattcttcatgcaagggaaccgtgaatagttcaaagcatagctcaggtgacgtggtgcgagggtgttcgcccagtcaacctgggtcttggttttgaatcctaaatcggacttgtcgggcctgttcactttgatgtcattttcaaccttaccaagttttaat

SEQ ID NO: 63409 - DNA, 348 bp, Oryza sativa
  Clone ID: PAT_MRT4530_64654C.1
cttcctcctcgtggcactggccggcgagctcccaagcagccgcccccctccttcccatcctctcctcaatccggccatcggcgcccttctcccacgccccctactccgggcgccgccctcccccaccgccggcgccgctctcctaatatggcggcatggaacacctccatcctcttgtcgccgccgccgccgttgttgtcgcgtgctgccgtcgcgacgcccgcgctcaatccgtaccctctccgcctgcaccgccgccacccccaaaagcccctctgccttccatcggagtcgtaccctgcggataccgacgccgacgcctcgtcggcctccctcgactcgaggccc

SEQ ID NO: 63410 - DNA, 1109 bp, Oryza sativa
  Clone ID: PAT_MRT4530_64655C.1
atggccgacggggagctcctgtggcgcgcgtcgttcgtgccgcgggtccccggctacccgtaccggcgcgtgcccaaggtggccttcatgttcctcacccgcggcccgctcccgctggcgccgctctgggagcgcttcttccgcggccacgacgggctctactccgtctacgtccacgcgctgccgtcctaccgcgccaacttcaccaccgactccgtcttctaccgccgccaaatcccgagtaaggttgcagaatggggtgagatgacaatgtgtgatgctgagagacgccttctggcaaacgctctgctggatatatccaatgagtggtttgtccttgtgtctgagtcatgcattcctatatttaatttcaacactacataccgatacctccagaattcaagccaaagctttgtcatggcgttcgatgatcctggaccatatggacggggcaggtacaactggaacatgaccccagaggttgaactcacacaatggcgcaaaggctcgcaatggtttgaagtaaacagggagcttgccatcgaaattgtgagagacacgctctattacccaaaattcaaggagttctgcaggcctcattgttatgttgatgagcactatttccctacaatgcttacaattgaagcaccacaaagcctggcaaatagaagtattacttgggtggattggtcaagaggaggtgcacatccagccacctttggaaggggtgatatcacagaggaattcctgagaagagttcaagagggccggacttgtttatacaacggccagaactctacgatgtgcttcctgtttgctcgaaagtttgctccaagtgcgttggagccattgttagagttagcacccactgtgcttggttttggttgatgtatggttgaacaggtgcaccccctgtaattttgatacgagatcattgtaggattacatgggtagagaagtgggcttatcttgatagatgaaagcctgcacgtcgcccatctctgctccattgtgttatatacacaaacttgtactgttttgtacagtaacgtgacattgagtcacatgaggacttcttatcttagaatattaccctgtattttttgtta

SEQ ID NO: 63411 - DNA, 1053 bp, Oryza sativa
  Clone ID: PAT_MRT4530_64656C.1
tcagcgcgtcctcgccctgccctcctcaccgacggcgctctcctcaccgcctgccccaacgccgagcggcggcagcatcctcgggacctggcgaagaagcggcggcggaaagacggcgacggcggcgcgtccttgccccaccctcctcaccgacagcgacggcggcagcggcgcgtcctcgcctgccctcctcaccggcgacggcggcgcggatttgagctggacccggagtcgtcggagtggaaggagttctggctcgggaatcaaggtcggcctcctccccttgtaaacaaggcatggactccccagcgacccccgtgggcttatctccgccacttcacagtctggtgctccacaatgaaccacactatacaaaagacggtctacaaaacgaacggccgagatctaatctaatccaaacgaacggccgagatctaactgatctaccgcggtctacggctgacatggcgctgacgtcgacgatgacgtcatcaccggcggcgactcggcacctcgtgctcgccggcgaacgacggcgcggcggcgcaaacggagggcaccagcgggtagtgggcgacgcggcgaactcaccgaaggctcggacgacggcggacggcaaaagacggcgacggcggtgaggtcgaagcggcggagacgttcgggtcgacgacgacggcgatgctccggtggtcctcggcggaaacgaaggatgggacgaggacagcgacgacttggcgaacccgatggcggccttcccgagcgacgacgacaaccggagcggcggcgacgcacgactggacttgcggcggcgacggcggcgcacggcttgacgcggctagagctctaccggcggtggagggctaaggcgagggtggcgacgaagagaggaggtcccgggggtccttatatatggggtagggggcagcgatggaggcccacggcggccggcggcgagatggaaggtttaaggttaggaaagaaaatcaaatccgaatcgagatcaaatccggcgatttccaaacgaaattagatgaagtttccaaaagagaaaag

SEQ ID NO: 63412 - DNA, 1413 bp, Oryza sativa
  Clone ID: PAT_MRT4530_64657C.1
tctactgttttacaattattaactgtttgctaaatgttgcttttgcaaatgagccctatattatgctatcctttggtatccttgtgcacttgcatatttgctgttgtacctcggctgattactggacgaggatttcatgcacaaataagttcggaaattactagtgaatttctgggcgtgacatctatggcagtgtctgaagtacaagccaatgatgatggggggacttaggtgaacgaatggggccacattgagaagagatgcagggtaagggaagtatcatgtccaagggtaagagtaagggtaagtcctaaggtaacgacgaactcaagaaggttataggtgacacatctgggggaaagcaggataactgctacagatgtggaggcaaaggacattggtgtcgtaactgtcgtgtccctaagcacttggttgagttcaatgagaaatggagctaacatgagtcccacttcatcattgagcctgatgttcatattgaaaagcatcatgacatgcttatcgatgctaaggatggtgcagacgtccatatggacgatgatgaggacaaaccttcttgaagaagagaatggcatatttaaggacctgaaaaaaactagatattttcataccttaactaagaaaactaaaaatattgtgaccattgcaggaagcaatgctcatatagtaggcactgtaagttctaatctagttctccctatggatactctagttcaaagcgtaccctcttaagctataatgatatctgtgcaaacgatttccatatagaaaccgaggttgagcaagatgttgaatatcttctcatatccaaaatagatggatatcaaaagcaagtcgtgtaaagactcccttcatcgccatcgggttttgaactacacgtacataaaacccactaaagaatatgatgaaaacaatattttgaaacccaaagttatttaaaatttggcatgacgggttgggtcatcctaggttgggtatgatgagaagaatcatcaacaattttgctggccacattgttgaaactagagacttccctaatcctgaagattttatttgctttgcttgtgaaaaaggaagttgatcactagaccatccctcctgaagattagggatgagtcaccttttcctggtaaggatacaaggtgacatatgtggacctatctagcccctgtcgggacagtttaggtattttatggttcatatgtatgcttcttctaggtggagccatgtggtcttgttgtccataggaaccatgctttttcaaaactaattacgcaaatcatcatgctagaagctagcttccctaataaccgcgtacaatccatttggatggataatactggtgggttgaggtcaaaggctttcgatgattattgttttgccatgagtattaag

SEQ ID NO: 63413 - DNA, 461 bp, Oryza sativa
  unsure (1)..(461): unsure at all n locations
  Clone ID: PAT_MRT4530_64658C.1
tttgtctctttcacattttcactccaacagcacaggttgttgtgtatggtttctaaattatataacatcattttgttaaagagtctaattggacatgcatctagccatccccacacttgaataccatttatttcatgctgccctaatggaaaaggtacattaagtgctttgacattctaccccatttagaaatttgggttgtttgctataatctttagttcctgttgactatttctgttatatccaaatacttgaaattatagcatcatttatcttcatatatgattggttgtacaatcatgcatgtgcgcctctagccctgtattagctntaattacgtatataatgccattgctgaagcaaacatgtgagatacactattttctacaattgggaactcattgatttttctctaggcacacaccgttcttgaaatgacttacaccgaacaacaacttaca

SEQ ID NO: 63414 - DNA, 1280 bp, Oryza sativa
  Clone ID: PAT_MRT4530_64659C.1
cgcctcccaccgccacgattcccagtttcctaccaaaaacttgtttctcctcccgtcggtcgagtccgagtccaccgctccggccgccgtctccatggccgcctcctcctccaccgccgcagcgtcatccatgtccggcgccaacggaggaggaggaggagggagcgtgttcccaggccctcccccgccgacgccgtcgaaccaccaccacgcgctcccgtcctccggcgccgcgggtgggggcacggacgccgcgctctcgacgatcctccagcgcctgctcctatcctctccggcgccgattctacgctccccgctctcctctcgctccagggccccgccgtcgctgccgcctctcgtttcgcttggctctagcggcaccctttcgtctcgacgccgccgccgacgtggggtacttccacctcgagggacacggcgtcccttcccagctgccgtcctccgcgctcgccgagctctccctcgtcgacgcgtccgcgcgccgcgcgtcgaacctcctcacgctcggattcacggaggaggatcagcaggaagcggacggcgccgaggaccccgccctggtgttcgacgtcgacgacgagggggagatgggcgcgctcccggctgcggcggcggagtacgcgcggcggatgcgggacgtgggcatgcaggtggtggcgatgatgtccgggtgtcccgaggtgggcttcggggaggcgccgttcgcggaagggaggaggaaggcgaggtgcttgatgtgggtctccaaggttgccgctggcgaggcggcgcctccggccgccgggaaggcgaaggcgtacccgtacgtcgtgggcatccattgccagtgggaagcgtccgggaaggaggcggcgccggcgagctgggtgatggacgacggcggcgagtggacggccgtaggcgcgcgcgacggcgcactccttgtcaccatcggcaacattgctcaggtgtggagcaatggaaagctgaagaaagtgagagggatggctcgccccgtttcttctgcacccggagcagggcacggcgccgaggctgaccgcttgtcagtcaccgtgctgatcactctccccttggacagtgtcatctcgccattggtcccggtcacggatgccggagaagagggcggcgacgacgaggtggatggagccggcgatgatggggatgggtggagatttcactcgtttttactcgaggaccttgcgtggagggtgtataatgggcggcttcagttcaaggacccgctggtccggtatcggatataa

SEQ ID NO: 63415 - DNA, 2053 bp, Oryza sativa
  Clone ID: PAT_MRT4530_6465C.1
atggagtcggtcggcgacccgcgggatgggccgtcgacggagcgcgcgttcgaggggcagcccgtcccgccgtggacggagcaggtgacgctgcgcgccgtggtggcgagcgtggcgctgggcgtggccctgagcagcgtgatgatgaacctggtgttcacgtcggggatcatcccgtcgctcaacatctccgccggcctcctcggcttcttcctcctctacccctcctcgcgccggctcgaccagctcggctcgccgggccgccccttcacccgccaggagaacgccgtcgtccagacctgcgtcgtcgcctgcgccagcatgacatacagcggtgggtttggatcgtatctgctggccatggatcggaagacggcggagaagacgagcaccggggacgactccagcgcgagcgtcagtgagccggagttcggtcggatgatggccttcttcttcctcgttagcttcgtcggtctcctcgccattgtccccatgaggaagtggttctacaccggaggtccaaactgcggcttcacttccttcccaacgtttgggctcagcgccttcaatcgcggtttctacatcagtttgaacggaacttatgtgggaatcgggatgatcagtcctcacctgataaacgtctcgatgctcttcgggtccatcatctcctgggggatcatgcggccgtacatccggagcaaaagaggaatctggtacgacgccgatctccaggagacgaacttgaagagcttcagtggatacaaggtgttttgcgccatagcaatgatcctcggcgacggcatcttccagctcgtcgcgatctcgctgaggacgatacacacggtgcgccaccaccaggtagcggcggagacgctcaggtccttctccgacgtcgacgccatgccgcggccggtgatgagcttcgacgaccgccgcaggacgcaggtgttcctcagggagcacatcccgagcaccttcgccatcagcgggtacgtcgtcctggccaccgtctccaccgtcgtcatcccgctcatgtacggccaggtgaggtactaccacgtcgccgccgcgtacgcgttcgcgcccgtcctggccttctgcaacgcctacggcacgggcgtcgcggagaccaacttctcggcgcagtacaacaagctggtgatcctcatgttcgcgtcgtggatcgggatcaagaacggcgggatcgtcgggagcctcgtcatctgcggcatcgtgtcgtccatcgtctccaccgcctccgacttcatgtcggacttcaagacgagctacctgacgctcacctcgccgcgggccacgctggtgagccaggtgatcggcacggcgatggggtgcgtcgtcaacccggccgtgttcaccgtcttccaccacttctacgagatgaaccccaacaagacgtaccaggcgccgctggccaagatctaccggggcatcgccgtgctcggcgccggcggcctcgagctgcccaagtactgcctcgccatcagcgccaccttcttcgtgctggcgctggccgtctgcgcgatgcgggaggtggccgcgcacggcaagtggcgcgccgagccgtacatcccgagcgtcaccggcatggccgtgtcgttcctgctggtgccggcggtgtccatcgacatgtgcatcggcagcctgatcgtgttcctgtggaaccgcaacgacaagctgggatcgcaggtgttcgggccggtgctggcgtccgggctcatctgcggcgacggcctcttctccataccgtacgcgctgctcgcgaggtacgacgtcacgccgcccatctgcatcaggttcctcggccgggtgcagaacgacaagctggacgctttcttggcgagtaaggctaaagctggatgatcctgaattcttgatcgaggaagaagtgggcacaattgtttattccgttctttttcttccaacacctgtagattatttagtgatagaactgatcttttcatgtagagcaatggactttttgtgcttttcaaacagttgagatttcaatccaacgaacatactatggcagccg

SEQ ID NO: 63416 - DNA, 432 bp, Oryza sativa
  Clone ID: PAT_MRT4530_64660C.1
atggtcaccgccggcgaccaccggcgcggcggagcggcgcccgagagagcggagagaagggggaaagcgaacggcggtcttcggctcaccccgggacaacgacgacgacgagaacggcggccggagtggaggaaagcggcggcgcggctcgggatgacgatggcgacggcgctccgacgggacggtactagcctttcccggataccacccaaatccaccatccgccccggtctaaaacataggtttttaattcctttcatgtcaccattatcatggcaatgtggtgctcatgcctccacatgccgcatctcaattaccttcccaaagggactcatacgtaattatggttacaaggatttgaaggaaaacaataacaaggcatggcataaccacaagtgggatgttgatcattgcatgcaatcttgtttgtaa

SEQ ID NO: 63417 - DNA, 174 bp, Oryza sativa
  Clone ID: PAT_MRT4530_64661C.1
atgcatgatgtagatcccgccatcgctgtgtcactgtcgccgccggtctactccaccgccaccccgctgcccgacctcaccggagctcgtcaacccttggccgaccccctgtccttgagtagcccagctgccgacgagttcccggccatctccgtccaccgccggctgggatga

SEQ ID NO: 63418 - DNA, 388 bp, Oryza sativa
  Clone ID: PAT_MRT4530_64662C.1
atgcgtcgtcctccgcttgctcgcaaaaatcgccctcccccagggcggcaagggggccgcctgcaaatttccatgccccccctcaacgcccatttgtaggcggccccccgcacagtgtaaaatcgccctagcggagggcggcaagggggccgcctgcaaatttcattgacggccgtcacccgagagcgaacggccgtctgccacgtcacattcgccgccctctgggaggcggcgggtgactacttctgtcaattttcgaaatagaaaattattttttgaccacgcctttcaacgacaacggacaacgccttccaacgaccaacaatggacaatcaacagttcaacacgccttccaacgaccgattcatcctgcacgaataacactgaa

SEQ ID NO: 63419 - DNA, 3918 bp, Oryza sativa
  Clone ID: PAT_MRT4530_64663C.1
tcacttgtaataggaggtggtctgccctgatgagatccagtcacccagttgactagtgagcctactatgctgttgagccccagaagcaccgcgtacgcatggctcacaatgggcgaggcgaagattgtagtgtagatactccatcgttctgaacctctcttgctcaggatatgtcctcttcacaacatgcagctgctcggatatgctccggtcaatgttgtatatggaagcaccgaagcatgtttggctcaagatcctgatcgcaaacgtttgcagctcaggggtgtcagtcccatgtgccgaccaccaacgaacttgtggtatttccattgtttgctgaattgctgagtctgaatcaaaaggagctgatttgcgtcgatacctatccatttgtatggccactttcttaggatcataatggtttttggccagacgggttacacaggcattggtcccacttttgatttcagtatcataactgaatctttctgtgtaaaagatccttggattcagaatataaccggcagcatggactggggtatgcaagtaatgatcccatatctcatcaaccataggccaataatcaccatgtttgtctcgaagattgcactttatgtcttcttttgcgcaatccatagcatcatacaagatacctattgggcaattatcagcttccagtttgtacaacacagtgataagtggatccgtaagcttcaaaatatcagcagcagcactccaaaatgcattatcagtttttactacttcatagacatgcctgaatgaacttctagaagccaaatcagaggaagcccattcaggcgagctaaacatctccaccaaatttattctctcagatactaacttccctaatgtgatgaacattgccacaaattttaaattagaactgctcagaatctcgccgccctgaatatacttccctttcagttccattggcactgcatggctataaatgaacctggtaatttctcttgccttgattaggacctcattgacatgatcaagtgctgctatgttctcaagcagaaggttgatgcaatggtcagcacatagtgtgaagaagaacgagtagccatatctctttagcacggcatgctctgctgcttgcatataaggtgactcatcatttgtgataacctgaacaatgttgaggacaccaacctcttccaccacacggaaaagcattactgctagctcatccacgtcatcaatgatatcagagacatccattgatttgatgaacaacatgcctttactgcaatgcaccaaaacactaatgaagcttttaccacatcgactctcccaggtatccaaaattacactgcagccattcatttcccagtgtttcttgagatcccttgcatggcattgaatttctcttagttgctcctccataatcgattcataagtagggattgccacctgggcccaggcaagcacatcaaccatgtccttgaaagatggcaagtggagaataccaggctcaagtccagcttcaaagatgagcttgcctattgactttcttgcctgagaattcaagtaatcattagttggctcctttgaggattccgaatcttgcatctgtgatgaagaattctccatagagaaactcaatggatcaattctctgccctgaagatatttccggtggcttattcatcatacacggattttgatatggaggcctagttacttctatagtctggcctcccttctgagatgaacttgcattgcaagaaacatcatgggcatttacttgtgtagtttccccgggctgcaccaaattatttgtgaagtgaacaaagcagcggtgccaactaacagagccttcttgatccgtaccggatgtaattggctgcaaaagaggtcggcaggcatgagcagatgtgagggatagatttcttactggaggaagctcagaagatttatgttttcctatttttcgggctatccaatctttcttgcgagcctctagtgaactctttatgctttgcctgacactgtcaggtactaagctgcaaggataaacattgcccctgatgcccgctaagtggtgctccagacggttgtatgtcctaaccaccttcccacagtaattacagctcaccttctgtgtttccttatcgacagttttgccatgcttttccttttcaagcctccttctctgagtatcttgggtagtgcaaaccggcggcgacgacttgcattctgcgtctggtgatttatcctcggatgatggctgagctgaagtggcggcgcctgcttcggattcggcctccttcttttctgatgttggttttggcgattccggttgcgattcggctgggggtttcagtgagagggagttgctgctgatgctgaccttgtgctgctcttccagtattctctgcaggtatcttgcgtgttcttcgattcgcagctgcagttgcctttgcacctctaactgttcatgaagctgtttctgaacctccatttgcattcgtagagcttctgccacttgtaagttcttctttttgactgaatcatttccactgctacctgactgagatttcttatcctctgaggatgccttcttgtcttccttagtctctgggagatattttgcgaggcgatacttctgcaaatgactctttacatggtagatagtcaggccttctactttcataagtttcagcacacctttaggagttgccttttcaggtccatctagcttgttcacagcctctacaaaacgctcatggagctccagtgtccacctcaacctcgccttgttagttgtcgcggatcccgaagatgaccgaggcgagctaagctgaactttcacaggagatcctgctttctgtacactctggttggagcaagatgatactggaagtgatgaaagttgcggcggcgtgccgtatatgtcatctaaccgagggctctcctcattgtcagtgatggcaatccctagctgctcagacaagaactggaactccatctgctcagcaaaagccatggcattgttttctccatggaagctgccatcagaagcatctcctccagagagattgaggaaatccttcagatcatctgactgttcaggttcatcatgagcattgccaatatcaccatcaccaccaggtactagcagggaggagcttgatgagtgccctgctgaaacctgctgctcacacttaggagggtgaggcaggaatggtagagtgcccaattgccggcacggctccgtctccatcgacgacgacgaaaacaaacttgtgcagaaggttgaagaatttgagtaaactggctctgaaacattgggatgtgaaacatgagacagtggactttcaggttcaggttcagagcttcttttctgaaacggcagtatatttggcaagcttgatgatctgatcagctcaatcttgatgcttgaggactgactggaggatgacaaattgtcatctatcaacccttgaaaatccggtttaacatcgaacagcttatgtgcagaatgttttgtggatggacaggtttccactattttgtccggagcagtaatctgcttcactgcaacaacactctgggagctcatgctggttcagttgattgatggctttatcatccactggccagtgcatcacaatggatgcttgctgaaagcccaaagaagataacaggaagtaggcttgcaggagattcagaatctggatgcttccaatcctctcacccccactgtctccactctcttctcctatccaacaccaaatctctctctctctctctctctctctctctctctctctcagcctctcagggaggcctaagacctatatctgttactactgcaaatcatcgctggccagtgactactccttcctttggtgtcatggtgtgactactactcagaggtgcctcgtgc

SEQ ID NO: 63420 - DNA, 463 bp, Oryza sativa
  unsure (1)..(463): unsure at all n locations
  Clone ID: PAT_MRT4530_64664C.1
ccatctcttaccccttcatacaatgaggggcctattatttcacgggataaagttaaggaagccctcctgagncttgttcagaatgaccagttcatcgatttagtctatcgggagttgcagaatgcacagtatgtagactaattattaagctgtatggagttgtggccgccacaagagtgcttgtgttctttgtgagttttgtatgctttagtgcttggacttctgtatagctgtcttcattgtggtgatgtagagtccttatagcagtggttggcagtatttataatattccttatttcacgtactgtcaatgtcatagtatatttatgtaacaaaaaacggaagtaaaacaggacttgtgtaagggtgttaaatatcataatttttcgtgtgatttactgagcaatgaccaccccggtgtcggggttttcataaaaaaaaaaaaaaaaaaaaaaaaaaaaaa

SEQ ID NO: 63421 - DNA, 312 bp, Oryza sativa
  Clone ID: PAT_MRT4530_64665C.1
atggggtcaatcgagcagcgccgcacgcccgcccacaccgcattaaatgcggcgcgagacggttggggcaccgtgcattgtaggcgcgaagcagcgtctcctgctccgcctgacctccccgccacgtggtggccgggctggggcctcggggtggcgcacgctgaggacccgagggtcgcgatgtggcaccccgaggtcccctggccgcgtcagcgctacctgaccgcctcccccgagggggcgggggaaagccaggctgcacagccacgtggccagatgggaagtggtgttgatcagccagagtcaatgtag

SEQ ID NO: 63422 - DNA, 1068 bp, Oryza sativa
  Clone ID: PAT_MRT4530_64666C.1
atggcgacgaggtggcagctgctggggcaggcgtcggggtttctgcaggacaaatacaagcaagcacggctggccctgggcgacgtgacgccggcggagctgctggtgcaggaggcgaccaacaacgacggcggagtgggccccgacgccaggaccctggccagcatagccgacgccgccttcgacatggacgactactggaggatcgcgggcgtgctgaggcggaggatggcccgcgccggcgactggaaggagtggaggcccgtgtacaaggctctggtggtgctggagttcctgctcacccacgggcccgacgaggtcccacgagacttcctgccggacgttgccgccctgcgcgacctccgcggcttcacccacgtcgacgacaggggcttcgactggggtgcctgcatgcagaggcgctgtgacagcgtcctctcgctgctcaccgacgccgaacgcctccgcgacgcacgacgccgcatccgcgtctcccactctactcacgagctggtgcagcagcatggttccccttcctcctcctcggggtccccctcctctgcttcctcccggacctcctcgcagtcgcacgccagcagctggtccgtcgcctcctccgatagccccaccatggtctgccactgtgccgccgccgccgactaccgccacgacaagaagttcgacgcctacacggcggacgacgactggatgcagcacctgcaggttcacaacaccaccactacgctggagtacgacgacgaccacgaccacgaccacgactgcccgaatcatcctcctctcactacaccccgcagctgggacgcccacgacgaccacgactgcccgaatcatcctcctcacactacaccccgcagctgggacgcccacgtccacgacttgtccctgctgcagcggcgcggccgcccaggaacagatgccaccttctgctccaggatgcttggcgccgtcaacgtcagcagccgggcatccggcttccagagcttgtcgcagccggaacggaggtccgccagcaagaagctccagcgtcagctttccatggaatattga

SEQ ID NO: 63423 - DNA, 154 bp, Oryza sativa
  Clone ID: PAT_MRT4530_64667C.1
atggacactgtcgatggccgctattgtcaccatatatacgagcccccacgtcgcgcaggaaccacgcccgtctgttcggcgccggtgttccaggaggtgcacccgccgtctgaggctaccatgcagtggcggacgcaggatttcaacaatgggg

SEQ ID NO: 63424 - DNA, 355 bp, Oryza sativa
  Clone ID: PAT_MRT4530_64668C.1
agtagccaatagaacctgcttacctgcatcgacagcaaccgagatagcaacagaaagttcaagcctaattgcactggattagctaaaagattgcgacattaaccacaggttttatacaaaaccaggaggattaaacgtacgccacaacacaaagtaaaagagctaagtagaacatcatcatccacgaaaatgtcgtcacatgcatacatctaaaacaccatttttctgctgccataagcgccccactcttacttattcagttcaggacttcaggcgaaggctacctcttaccttcaggcgcggtgaccttacctactgggtcttcgtcgatttgctttttgacggctgggccttt

SEQ ID NO: 63425 - DNA, 181 bp, Oryza sativa
  Clone ID: PAT_MRT4530_64669C.1
ttttgggggattaaaaagacaacggctgcattgggccgatagcatgtgatgataaaaatcatttgttctacggacaagaactagcgaatgaccaacagagagtttagcagttcaactcaccaagtgctcagcatatcatgtaccgtacaagtccactcaatccacgtgctgagtctaccga

SEQ ID NO: 63426 - DNA, 353 bp, Oryza sativa
  Clone ID: PAT_MRT4530_6466C.1
ccacgcgtccgcggacgcgtgggggaggttttagggagtgtagatttgatagactacaagcatttgaaccatttatgagagtgaggtcagaagcctgggttacagagtacttttatgaaatgactgaacaattgcagagcacatgttcatataggcatacggcctgtaatggagcctagtggccatatacagtttcacttctcttgtgctgcactgacaacataaatgattatggtgagtgacttggcccaggtgctgtggatgattggtgtacggccagttgctgacaccttcggccgtgtcaaccgtgtggagcctgtcagccttgatgagcttggacgttcaatgattga

SEQ ID NO: 63427 - DNA, 152 bp, Oryza sativa
  Clone ID: PAT_MRT4530_64670C.1
gtgcacacaagaagatttctctagagttgaaaaaaacaggggaagctattgcagagttcttattgaaggctattgatgaaattggaccaagaaatgtccttcaagtaataacagacaatgtatctaacaaatataggaacacgatcctctag

SEQ ID NO: 63428 - DNA, 498 bp, Oryza sativa
  Clone ID: PAT_MRT4530_64671C.1
atggcttctcgaagtaccaggagggcatcggatagagggcggcgggcgacgggtggcggtggcggcggcgcgtggagacacaccggcccagcggcggtagcggtgggaggtagcatgcggcggcggaagggacggaagggagggggatgcggaggcggtggaaaggagaggggatctggcggctcccctccgccagatctgcctaggacgggaggcggcaacctggcgcgaggtgccgcggcggaagcggtggcgctctcttccagatccggccgggagcggtggcccggcatggaggatgaggcggcaacggtgtgtgacaattacatcatggatgagctcgcttgttcccgtgaaatcgtcaccgagttcgcgcagcatgaacccaagcccactttcatcgtcgtgctccgcaaactcccactgaactcgtgcatcgccgtttcctgctacctgccaatcctaagctccaacatcgaccagaaaaaagtgaagtga

SEQ ID NO: 63429 - DNA, 1980 bp, Oryza sativa
  Clone ID: PAT_MRT4530_64672C.1
atggcgttggcggcgaaggagaggaagctgagtaggcttgggagtaagggcagtggcggaggagggggaggtgggagtttcggggcgagggggcagcgggcgccggcggggacgcagcggcggctgttcgcggcgttcttcgcgttcctcttcgccggcgcggtgctcttcggcgccgcgcacgtcattggagcatccttccggcccgtgctcaagaccgcgtggccgtcggccaccctgaacgccgtgtcgtcggagcgcggcgcgcagcaagccggcatggtcagcgtcgacgccgtgttgccttctgttcatatccagcacgcggttgccttgccggaccatgttctcctgatgctcagagatggctcattgctgccggcttcggggcaatttgagtgcctgtactcccctgtcaactcgtcgcagctgcgtcgccagcccttgtccgtcgctaccttgccggatggacccagcctcgtccattgtcccgccggaccatccagggtcgctgtgtccctctcactggcgcagtcggttccggtggcgccgttgcaatgggatcggctggtgtacactgcacttattgacagcaaggacaactccaccgttgtgtttgcaaaggggatgaacctccgtccgggtcgtctaggtgtgccatcacggtacgagtgtgtctttggccgagacttttcgaagccaaagcttgttgtcacctccccagtggtttctgctgctcaggagatattccggtgtgtgacaccagttcgcattcgccggtacctccggatgactaccggtggcaaaaacagcgtaaacaatgatgacaagcctatgttggtctccatcaggactaagggccggggaagctctacactcccctcaatcgcgcaaccggagccgcttcctcggtacaacaagcattggagacgaaaggcacactcaatgtgtgtctgcaccatgcttcgcaaccaagcacggttcctgcgggaatggatcatctatcactcacgtattggtgtgcagcggtggttcatctatgacaacaacagcgacgatggcattgaggaggtcctcaacaccatggattcatccaggtacaatgtgacacgctatttatggccatggatgaaatctcaggaggctggatttgcacattgtgcactcagggctcgagagagctgtgagtgggtggggttcattgacatagatgagttcctgcacttccctggcaaccaaacactacaagatgtcctccgaaattactctgtcaagccacggatcggtgagctcaggactgcatgccatagttttggtccatcaggccggactaagatcccaaagaaaggtgttacaacaggctacacctgccggctggctgcacctgagcgccataagtcaattgtcaggccagacgcattgaacccatccctcatcaatgtggtgcaccacttccatctgaaggaagggatgaaatatgtgaacattggtcagggtatgatgctgatcaaccactacaaataccaagtctgggaggtgttcaaggataagttctccggacgtgtcgcgacatatgttgctgattggcaggacgaggagaatgttggatcaagggacagggctcctgggcttgggaccaaaccggttgaaccagaggattggccgagacgtttctgtgaagtatatgataacggtttgaaagattttgttcagaaagttttcacagacccacacactggaaatcttccatgtgcctgttcagttgttcacctatctgacaatgcaaacaaaatcgttgtgaagaaggctacaaccgagttcagtaaccacgagctggttaactggccgtttgtgatgcagacaaggatggctattttcactaaagctggtggaaacgtatctgaagagactgcatcaacatccagtggacaacagtgcctgaatttctggcagagcaaaatcctccactttgcaccctga

SEQ ID NO: 63430 - DNA, 450 bp, Oryza sativa
  Clone ID: PAT_MRT4530_64673C.1
atggatgggtggacggggagcgatcacccgcccattagcatttccgctaaagcgcatcccccgaaaccacacgctaacctcacaaacacgagctacagagagggaagccgaacaccgaaccggacgctgctatgcaagttcggtggccaccggtcttacaacaacaacaccatagagcggaaactcaaaaaaaatgactcctttcacgaaggttgcgacaccaaaaaaatgccgtcgtcgctcgtccaaaggaactggacatggttttcacctagagatcgtcgccgagggagaagggtacctatacagtgcccaataggaaccacgcctgaaggagtacccactgctaggctttcgcctaggaccctctgcaccgagtcgccgtggtctgtcaccagcccaacatcggaagcacgtggcctccgccacacaggaccagccaacttctag

SEQ ID NO: 63431 - DNA, 213 bp, Oryza sativa
  Clone ID: PAT_MRT4530_64674C.1
atgacaagtgttcctaagaaaaatttgctgcaatgctcctccacttactttgagcttaatgcactgttcggggtggacgcggcggacgtcggcagagggtgtagagtcttgactgagaggcgtggtcacggcctcacgggtggagaggatcccgacaacggcaacggggccgtggaggacgggcttgggcgccggtggagacatttccgatga

SEQ ID NO: 63432 - DNA, 327 bp, Oryza sativa
  Clone ID: PAT_MRT4530_64675C.1
acgggacggcccatacctaccccctcttccgccggaagcaggtgcgacgtgggattatggctgtccgttgctgacgcgaccagtgtcagaccggtcacagatcggtcattcttgtcctccacgcgtcagtttagcaatctgcatgttcgtccttcttcatgtaacatcttgcctgtaatggttgggatgaagcctggtatatatctgaccggggctaacgtgccatctctaagaggcaacacgctagctccggttagagacgagtgcctagaggctctcgtcttgacgggatggggcgaggtgtgcgtcagaccgccaatcgccacc

SEQ ID NO: 63433 - DNA, 2424 bp, Oryza sativa
  Clone ID: PAT_MRT4530_64676C.1
atggccagctacgggggcggctacaatggcaacgaaggcggcaaaggccacgatgacgacgtgtacggccacgacggctgcaccaaggacttccttgcgtccgggccttggtgcgcacgccgagggggcgcggtcggcgctgacgcggcgcatcccccgcctgattcctctagcggcaacacctcccgggtgcggttcgagtcgctcgacctcaacgacagcgacgggtggccagaaatggctacgtacgcgggcatgctgcaggccgacgacgacaacatcgaaattcctccaccgcccgttcaagttcctccccggcgaatatctcgcaccctcggaatccggcccactcgcagtgcggggggaggaggagtacaaggcgcggccgctggaggaggacgagcaggggccgcaagcgctggaggaggagtcgcaggcgcagtcgtcggaggaggaggcgtggccgtgagcgcacggcctgcatcacgcgcatcagtgtgccacaatgtctcggaccttgcggccgagcactccgatgctaacgacggtattccggttaggaaagataaggcaaattggtcagcgagaaatactcgcaccttctgttccatctggtgccatcaaatggacataggaaactgtgttcgcggtattatgcaaaaaaatggctggagggacatcattaagaggtacttccaagccactggtttagttcacaacagggagcaattcatggggagacacaggcagcttaggaagcaatgggcattctgtaataagcttcgctccagctctggcttagggaggaaccctgatgggactgttgtcgccgaagatgattggtgggctgccaacaccaagggacatcccgattggaagaagttcaggaaaggcttgcctgaatatttgcctgaaatggacagaatgtttgagggtgttgcagtggatggttctacatcctttgttgcgactgccgaccagcctgtagagtgtgacagctctgatgaagcggatgatgatgaggacgacgatgagctgactcctcttagtgtcgacaacaaaaggacaagcagcacgagcaccacagcctcgagtccaagtaagaagtctaggagtccagcagtgagggtaatggacagaaacatgagtgagtacaacgaaatttcaaggaacaaactcagtgtcctgcagaccatgatgcaagtaaagcaggatgctatgcaagaagaacgcaaagctattgagcggaaggtggcaaaggttaacgagctgggaaaggagtgtggggtaactccctctgagaccccaacattgttcatgggtgtcctcgaaatcatcaagtatcaaagtgtgatggacttgttcattgtcaccgagcctgaaggaaggatgctcatcatcaagaaatatgcaggggatgatgaccaatcaggttatgtagaggatgatgaccaatcaggttatgaggagtcgcgccgtcggcttaagcgttgggaggatgagatagacgagttgatcattgcattgatggatgatgatgacgacggttatgtgtacggtatgtacaagtatgccatgcacattgacaagcatttgactagagctgagtataggcaacctgccatgactggtttggaatggtcgtatgagcttaaatctagtagcaagtcaacctcggttgaggcacttacgatgtttctttggatggttggtgccccacaatctgttagacaagctgaggacagatttgagaggtcaatggggacttctgtcatcaagcttgccgttgatgtcataaagccggctgacccacaattcacaacaatgcatccaagactgaggaaccgtaggttctttccctacttcaaggattgcataggggctatagatgggactcatgtaccttgcgtggtgccaagtaacaagtttgtgcagcacttgtgccgcaagggcatgacaacacaaaatgtgatggctgtctgtgactttgacatgaggtttacatttgtactagctggatggccaggttcgggaaatattaccttgtcgactctgggtaccctaaccggccaggttgccttgctccttacaagggaaccaagtatcatctttaggagtatcgcgatgcccctgaaccacaaggtcattggagttttgaaaatgaagtggaggatgttggagaagatccctagttatgatcctcgtaaacaggcacaaattatagttgcatgttgtgcgctacataacttcattaggaaaagtggcatacgtgacaagcacttcgatcgttgtgactgtgatgagaactatgtgccgccacaagctagtgacgatcaacctgagaccgaagaagtgtttgatgattgtgatctgatgaatgcatttcgtgattccattgcacttgctttggtacacggttcttga

SEQ ID NO: 63434 - DNA, 2280 bp, Oryza sativa
  Clone ID: PAT_MRT4530_64677C.1
atggccagctacgggggtggctacaatggcgacgaaggcggcaacggccacgacgacgacgtgtacggccacgacggctgcaccaaggacttccttgcgtccgggccttggtgcgcacgccaagggggcgcggtcggcgctgacgcggcgcatcccccgcctgattcctctagcggcaacacctcccgggtgcggttcgagtcgctcgacctcaacgacagcgacagatggccggaaatggctatgtacgcgggcatgctgcaggccgacgacgacaacatcgaaattcctccaccgcccgttcgagttcctccccgcgtggggggaggaggagtacaaggcgcggccgccggaggaggacgagcaggggccgcaagcgctggaggaggagtcgcaggcgcggtcgtcggaggaggaggcgcggccgtcggtggaggcggcgcggccgtgagcgcacggcctgcatcacgcgcatcagtgcgccgcaatgtctcagaccttgcggccgagcactccgatgctaacgacggtattccggttaggaaagataaggcaaattggtcagcgagaaatactcgcaccttctgttccatctggtgccatcaaatggacataggaaactatgttcgcggtattatgcaaaaaaatggctggagggacatcattaagaggtacttccaagccactggtttagttcacgacagggagcaattcatggggagacacaggcaacttaggaagcaatgggcattctgtaataagctccgctccagctctggcttagggaggaaccctgatgggacttttgtcgccgaggatgattggtgggctgccaacaccaagggacatcctgattggaagaagtttaggaaaggcttgcctgaatatttgcctgaaatggacagaatgtttgagggtgttgcagtggatggttctatatcctttgttgcgactgctgaccagcctgtagagtgcgacagctctgatgaagcggatgatgatgaggacgacgatgagctgactcctcttagtgtcggcaacaaaaggacaagcagcacgagcaccacagcctcgagtccaagtaagaagtctaggagtccagcggtgagggtaatggacagaaacatgagtgagtacaacgaaatttcagggaacaaactcagtgtcctggagaccatgttgcaagatgatgaccaatcaggttatgtggaggatgatgaccaatcaggttatgaggagtcgcaccgtcgacttaagcgttgggaggatgagatagacgagttaatcattgcattgatggatgatgatgacgacggttatgtgtacggtatgtaccgaatgagtccaactatgttccttcgcctgcatgatctattggtacagtcgtatgagcttaaatctagtagcaagtcaacctcggttgaggcacttgcgatgtttctttggatggttggtgccccgcaatctattagacaagctgaggacagatttgagaggtcaatggggactcttgccgttgatgtcataaagctggttgacccacaattcacaacaatgcatacaagactgaggaaccgtaggttctttccctacttcaaggattgcataggggctatagatgggactcatgtaccttgcgtggtgccaagtaacaagttggtgcagcacttgtgctgcaagggcatgacaacacaaaatgtgatggttgtctgtgactttgacatgaggtttacatttgtactagctggatggccaggttcggtacatgacatgagagtatttgatgatgcccacacaacatacacccatgtgtttccacattcacctacagggaaatattacctagtcgactctgggtaccctaaccggccaggttaccttgctccttacaagggaaccaagtatcatcttcaggagtatcgcgacgcccctgaaccacaaggtaaggaagagaacttcaactatgcacactcatctcttaggaatgtcattgaaaggtcatttggagttttgaaaatgaagtggaggatgttggagaagatccctagttatgatcctcgtaaacagacacaaattataattgcatgttgtgcgctacataacttcattaggaaaagtggcatacgtgacaagcacttcgatcgttgtgaccgtgatgagaactatgtgccgccacaagctagtgccgatcaacctaagaccgaagaagtgtttgatgattgtgatctgatgaatgcatttcgtgattccattgcacttgctttggtacacggttcttga

SEQ ID NO: 63435 - DNA, 423 bp, Oryza sativa
  Clone ID: PAT_MRT4530_64678C.1
tcgcccacgcgttcggccacgcgttcgcccacgcgtaccatggatgggagggagatggatattctttggtattgaggatttacaggccttggtaaccaggagcctgcaatattttctgggaggggcaaggaccacattggttttggtaaaccaaaagctgatgaaaaacaaaacggggaaacttgttaagcttgaaaagcccctgaattcaaaatattttttaaggaacgaatatattccggattgggggaagattgaataccactattaagaagggaaaaggcaccaaatggaaatggcaaggccattattccgaattcaaccattacttttactggacaaaccaccaggggttttcaatgcacagccaaagcaagttgtgcagaaagcccttgataaaatcttgtcaggaaggactacaat

SEQ ID NO: 63436 - DNA, 571 bp, Oryza sativa
  unsure (1)..(571): unsure at all n locations
  Clone ID: PAT_MRT4530_64679C.1
cggacggggangnaacggcaggcatcacannaactagtacaaaagctagctgcttcttgttagttctggccttctnatagccattcctggagttnttgagccttagagttggacaggttattgcagctgttcttggngtctggtgagtnatcaantcctatggaagaagaattcaaggacaaaggcctccctcccacgctgctacacctcatccctgacgggagagaatggaaggtgaaagaagcagatggagaaggatcaaggaacacaaacttagatgccgatgaggataaggagctagagcttaagctcggcctccctggtgtccaacaggaagagagagcagctgattcaagagagaagatacagcagcaacaacgagagagttcctcagaaccatccatcggttgcttccctacacattcaaagcctaccaccagcatcggcacaactggggcaaagagaggattttttgcgattgttggggccacactagaaggttataatcagagccaccgggacacagaagaatgtgggaaggagctaacgttaggagatgaaaatatggcag

SEQ ID NO: 63437 - DNA, 191 bp, Oryza sativa
  Clone ID: PAT_MRT4530_6467C.1
cagacaaatacttttagggcgtgtgtctagttattgaccacacacacatctggctactggatcaatgatacattttaagtgctggatcgaacggtcgacacaacttatgtattgccaaacatgggttaaatcccttcacaaaggccccaatatttactgatatcggagcaatcgacaaccgactaaatttc

SEQ ID NO: 63438 - DNA, 249 bp, Oryza sativa
  Clone ID: PAT_MRT4530_64680C.1
actccaccacgccgccgcttccacgctgccgcgccgccgcctccacgccgccgcgccgccgcctccacgccaccgcggcgtcccgagggagccgcggatccgggtgaaggccaagacccacaagacctagagcaaggcaagtcatcactattctttgatcacgttgatcccaattgcgcaaaaattgttttgtttacaaataaaattgcatgcaatgatgaacatcctacttgtgattatgccatgcct

SEQ ID NO: 63439 - DNA, 246 bp, Oryza sativa
  Clone ID: PAT_MRT4530_64681C.1
atgggcagtagtgcgcgggacgggctggccatcggcgcgcatggcagcgtgcatggaggtggaggggatgggggagggcaagcggaggtggatggggaaggcagtgggcacgcggtggcgctcgtggacgggcaggaggtcgtgcgcggtaaggtggagaggatgggggagggcggaggtcgatggggaaggggaggagatggaggtggaaggggaggggcggtgggcggcagtgcccgtggatag

SEQ ID NO: 63440 - DNA, 2167 bp, Oryza sativa
  Clone ID: PAT_MRT4530_64682C.1
accattcaagaaatctccatgacagagactgatgcattatatatcttgttttttggcataaattatttatcaactggccagcatgcctttcagaagcaccaaccaaatcaatctggcatggcgagagaaatcttcacagataatctgaccacaaatcagagctcaagacaagcaaagtaatgttcgcagatagactactcccaacagtttaatattcctgtgtcagaaatctcagaattatgtcttgtatggcgaggatgcgcccccaccaacgctaccgcccaccttcatcaggctgccatcagcatttttctcaaacagatcatcgaagtatttgttagaagaaacataagatggcctgcgagctcctgcagacatcggttgcttagtgctcccgtttatcggcgattgtggcccggcacttcgaagcggaaccccgaaagaatttgattgctgtagaggcctcaaattcagtggtacattaaccggcgaggcggaagtaggttggttcttcagtgaagctgcaatgaaagggttggactcggcggtgtcctccgatgcccatggcggtggcgggtagggagatgagttgtagggcaattgtgactgggatggttgttgatgctgctgaagctgaatgcctggagtttgacattgaggctgagcccaaggagcaacatagctgttgtatgatgcagcagcaagtccttggtttgagtaactaggttgtggatgatcattggcttgcgagccaccttggttcatggtggtggtagcttcaggtgttggtggagtttgaggtggtgaagggtttgatatggtgagtgcaagaaggtcactcataacttgctcttctgcagttctaacaggagctggaggatcaggcagtgccaatgcatggctttgaacaggtggtgaaactgtagaggtaccagaagatcctgaacttgttatctcatcgtcatgggcggtcgacaaagatgttgctacgccagaaggggtgctctcagcatttgtagacctgaatttcgaattcctgcgagcgagctgagagaactcgtcatcttcatcttcctcctcttcatcgaaaacattagttggtactatagcagcaactgcagctcgaggagcccctgttgccactggagttgaagttgtttctgctgatgattcattcatgatatctgtttcttcatctggtagaggagaacctgatgcaattgcatcatgtttgccaagcagaatctgcatcctatcattcaagtcaagagcttggcccaagagctcctcatctcttaatgaagttaccaaacttattatctttttctggtctgaccggcattgtttcacaagctctgtgataatttcatcgttgacagccccacgatcatgtggattcactgctttcagcatctcgcttaatagttcaacagcacctaacatgcgttccatctccgatgaactcagggaaggcccgttagatggcattgcctcatcaaatctagaggaagaattaactggcattccgtaacttggttgatgataagattccaaagatgttgggcgtgtgattggaggagtaagtattggtgcagcatcaggtgatcgccgaggaaattccaagcccaatttcttcatttcagcatatgcccagtagtactggggatgcttcccaccattcccaccaaatgcttcttgccaagattcaaggagtactagaattttgtccctcaactgcatatcagtcttcttcttaacaattttgatcatctcctgcagtatatcacgctctacaacttgtgaatgcacatgatccccacaattcttcattagagtttccaatagcgtcaaagcaaaaaactgaacctttgaatttttgtgctggagacgcttcttcaaagctttaatcacctcttttgcttgcccgtgatcggagttgacggcgtcgcagatgtcgatgttgagggtccagtcggggccgagcagcagctcgctcgtggccttgtctacccgcaccgccgccgccgccatcggtcaccgatcgccggcgccggcgtctccctctcgcgggtggcggcggagggaatccgaaccccgcgtgggctggggcctgggtgcggtgcgagtcggagggagggagggagagacgaacaaacaagcaggtgag

SEQ ID NO: 63441 - DNA, 561 bp, Oryza sativa
  Clone ID: PAT_MRT4530_64683C.1
atggcgatgtcggatgcggggagggacgctgtgcggctcgacacgctcccctacggccacgccaatgcaaccttgctgctgctatacggctctcacctttacctcatccgcatccaggcaacactgcagcaggcgatgagaaggccaactacgggggtggccgggcagcttttgaccaccatccaccagccccgctatctcgctcctaccgccccgaaccatcagctctgctatcgggtgccggccggccggccaccgccgcgccgcctcccctccgcgccggccggcccccgcggcactacccgacgccgcgccgccgcgccgccgccggctgtcgcgccgctgcccgccgccgcgccgcctcccctcatcaccggccggcccccgcgccgccgccgcggccctccgcgctgctgcgcgccggcttcccctccgcgccagccggccaccgccgcccgtccctccgcgccgccgcgccggctgccacccggcctgctctcgctccaagcggctagcctctctcgctccgatccaagcgggctaaggaagaagaagaactaa

SEQ ID NO: 63442 - DNA, 526 bp, Oryza sativa
  Clone ID: PAT_MRT4530_64684C.1
ggatccccgggctgcaggaatcggcacgaggcccgagaggccggaaaaccctaaatcccatcgccatcggcaacgcacgccgccgctaacggcgaacggcgatctggtctgattctgatcttgttcttctccacaatggagtttcttgatatgacttgccgaaatagcagtcgaaaagggagtgggggatttcgatgtccgagagccaatttcgcataggatccggcccggccgaccgagcgccttcatccatatttatatatctactagtatagaagaaacacaagaagatcgccaacacatctgattccgatctcatccaccagcgcccgcttcaggtcatccatgaagaacaagaagggaagtcgccgcaaccgcaacaaatcagcagcatccactggttccctaccactaccagtggataggctcactaagttacctgacgatgtcctgctcaacatcctggaccgtctcaacacccccgacgtgctggttccttcttcaacgtttcagaagccaagacgtc

SEQ ID NO: 63443 - DNA, 547 bp, Oryza sativa
  Clone ID: PAT_MRT4530_64685C.1
aagggttaagaaaaaaaaaaaaagaaaaaactaaaaaaaaaaaaaaatgaaaccaaggggggaaaaaaaaaaaaaaaaaaaaaaaaaaagaaaggggacaggaaaaaagggggaaaaaaaaaaaaagggaaaaaccaaaaaaaaaaaaagggggggcccgaggccagaaaaaaaaacctgctagaaaggaaaagcacaaacgggaaacggggcccacaggggaacggggggaacgggccccgcaccggaaagcaacagggggggggggggacccccaaagaatgggaaaggaacacggctggggagccacccaggcccaacgggggcaaaaaggacggcccacccggaacccgggggccaaagggtaaggggggggggaaacaccgggaaaagaaaaaagcggggggggcccccccccaaaaaacaattaggggaaacagggcaaaaaaccggccgggggaggcccccaatggggattcgaaaaaaaaaggggtaaagagaaacccagaagggggaaaccacccacacaccccgggacgccaggggg

SEQ ID NO: 63444 - DNA, 393 bp, Oryza sativa
  Clone ID: PAT_MRT4530_64686C.1
atgagggggacgaggatgctgaccgactcactccacgctggaatgctgcgtcggagctccggcgaagcacgacatgaagcggcggtgaagctgtggctgccaagagggctcagacagcccgagaatgcaaccgacgacacggacgaggcaaacaccaacaacaacagcagcagcggaaccaacggtctaacacccaacaccacaggcgacggctgggaaccaggacgaaaccctaatcttcacttcacctcatcttcaacttcagggcggaggaactatatatatttatatagagcaagggtttgggtcgaaaagagacttgcgtctcaaatcgacttaagagagtccagctgcccagcagcacaacaatccgcttccactcgggaagcctag

SEQ ID NO: 63445 - DNA, 408 bp, Oryza sativa
  Clone ID: PAT_MRT4530_64687C.1
ctagacaccagatttaccaccgtcgagctccatgtccaccgctgccacctcgatcggctttgaaagggacggcctgatctgcccgaccaatgaggaggggacagtggtggcacctgagatcggggaagcttccttgtcttggagagcccgaagaggcgacaggcgatggcggcggctagagttgaaggcgggttggagggagggtggaactagtgcgaggagggagaagggtgaggtggcgttggtactgagctgccaccaccgcctgaggctagatccaatgagccctaggacggtttgggcgagctcggtggcgccgttgtccgcgtcttcttccgcggcttccggccccaatgaagaggcggtgatgccgcctctgctctgcctcgggttcgcgtcgccgtgcat

SEQ ID NO: 63446 - DNA, 282 bp, Oryza sativa
  Clone ID: PAT_MRT4530_64688C.1
tacccctaaacatacccttactatcacgcatctacccaagctacagcactgctccctgtagcattggcagcgtcggtggtatctggtattgaattgtaacaatatagtagtacaggagagaaaaataaactaatacatcatcgtgtgtgacaagttgaaacatcggcgtgatacaaatctgaattaaaaatgccatgcaagtttaaacataatgcctctgaaaggataaatcctagtacattgttgaaattaattaaaaaaaaaatgaatcaataataatcg

SEQ ID NO: 63447 - DNA, 329 bp, Oryza sativa
  Clone ID: PAT_MRT4530_64689C.1
tccgcctccccaatccatcccgtctcgtgacccgccgccgtagacgactcccgactactgcgactgccgccaatgcctatctatatcctgctagcaaagacgacgccgtcgttctatctttattagccgcatgatcgctcaccggtgagcatgctaatgcattccgtgcggactaaaattatggtctccttgccctccgtttgagccgatccacccaaatccgagaagcagacgttagagaccataatcctcctgaagttgtgattacgacacatcgtcggtcgcatgagagcatgcttcataaagaataatgagcggtcgtcaagaca

SEQ ID NO: 63448 - DNA, 2091 bp, Oryza sativa
  Clone ID: PAT_MRT4530_6468C.1
atgtcgaagaagaaggcggtgacgacgatgacgctcaaggacttccacggcggctccatcccctccgagctccccctcccctccgcccccggcgtctccgcgcgcccggcggaccgccccgtggcctcccaggcggccgctcccgcggcgtccgctcgcccccgcgccccggcgacctccgccgccgctgccgcggcggcggcggccgcggtcccgtcgttcctcaccaacccttcccgcatcggccgccacttcgacgaggacgagcgcacgcccttagaggccgcctccacgccgcgccgcccggccccgtcgcccccgtcgttcgccccatccccggctgcggggcccaccagatccgggcccgggaacgcctgggggccgaggagggaggcggctccgaccgcggcgccggtgagtcctgccgccagcggcggcggcggtggtcagatctggtcggcgacgcgcattgcgcaggcgagcgccgtggagaaggtgatctccgggaggtggaactcgtcgaaaccctcctctccaccggcggcgcctgtgtcggtcccagtggtggtggagactcatgttgcaccgccggagatggagaggccaaagtcagtcggggtgagagagctggatggtggcatagagaggagcgtggcgccagtgaggcctgcgtcgcatgaaggcagggttggggaggctagaggcttggaggtgcaagagagacctagggtgggtgatgtgccagagagacctagggttggtgatgtgctgccagagagacctaagttgaagctgcttcctcgctccaagccaatcgaggcttcagaaccatctcctgtctatgttgaagagaagcaggtgcatcaggttccagtggtcgcgaatactgtgcaggttgacgttattcatgatgtgcaccagaatgttgtagcacctaaagcaggagtagcaggggcagatgctgagggccgggcagtggagcgaccacgattgaatctgaaaccccgctccaatgcagtaggacagtctgatgaaagtgctccaaaggaaaggcaatccctctttggtggagctcggcccagggaacaagttctcagagagcgtggaatagatgctttagcaagtgaccttgataagacatctccagttggcaggtctaaaagtgaatttgcaaagggtgagcagaaggtcgaagctatgtccattaacccttcaggtgaaaaggctgagagttttccagctggttctagaggcccaaggaatgctgataagaaagactacaggcgggatacagaccggagtgatgtgtataggcctacacgacgggaggacaacaggagagttgctagagatgtggagaagcccgagcaacagcgtccagagcctgaaacctggcgtaagccagttgagccaccaaagcctgaggttgttgcacctcgttttgggaaaggagcatctgcattggagcttgcacaagccttctcgaagtccatgtctgatactgtgcctcagagtcgcttgacaagtgttcctagccctaaagtgccccagagtccagggaccagggatcaggttggcttctcaaggctcactgacaaccgggcattacactctagcccctcgcagcgaaagattaacggttactaacctcattgcacatgcacgctgtgctcccatgatggcacgactcaaataccatggcctcgccgaagcgcactggttttatcttcatgtttgattcttccatcatgggaaaaaaaaatcaattgttgctctctggatggcgacacacgaggggtgctgatctcgtaactggtggctcatttccactcttgataacaaagagatgagaatttatgaactatttgtgcttctattcttcagcctgctacccgtgatttaagctggggaataatttgcaacctctgtgctgctacttggatgtgccacatatgtttctggtgtgcttgttttaagatgttgccagatcagtgctatgcctatgtatgcagcatattggtttcccggtacttcattagcacgttatactttcttcttttcactatagtaaaggacataatagttgttccc

SEQ ID NO: 63449 - DNA, 387 bp, Oryza sativa
  Clone ID: PAT_MRT4530_64690C.1
atggaggagatcaccctcggacatctggcgcgccaggtagggggcgcgttcgtgatttttgaggttctttcgagcgccgatgagataagcgtcgcgccgcaaatgcgggggaaggcgcccgcctcctcaggagttccgcgccaccctaagcagggggctaggccccccacatcttcaccgggtatggctggcggccagtttcggcctagcctcaccgaaaggtaccacggtagcgtcaaccccttcgagtccctccaaatccacacgatgatcatagaggcggtgtggtgtgacgatcgggccaaggcgaatttcttccccatggccctccagggccaagcgcgggtatcgctcatgaacctgccacccgcctcggtctactcctag

SEQ ID NO: 63450 - DNA, 142 bp, Oryza sativa
  Clone ID: PAT_MRT4530_64691C.1
aaagcaccctttattaattgcgataataaggaagttgcaacgctttaaggtagagcgaaagcgagggggcaaaaagaacgggcaatataaccgggcggaacaggtcagtcaaaattattagcccgaacagaaacaggggggg

SEQ ID NO: 63451 - DNA, 1177 bp, Oryza sativa
  Clone ID: PAT_MRT4530_64692C.1
tttttgttaccttaatccgcgagagccctgtggtgaattttattttcattcaaattccgctgcttccggtttaaatcttatccaaattccggtgtggagttttaaaccggtcaattgcttctcaatttatcattgtttaacttttttcttcatccgattttcggttcggacgagagctctattgcgcgtggggcaggagaagggagcagggagagcgccgccgccgccgccgccgccgcaccggcgctgtgccgacgagatgagcctctcccaccacctccccccgccgccgggagacccctactacgtgtacgcgccgcacccctacccagatccgcagcggcagggggtactcacgctcttcgtcgccggcctccctgacgacgtgaagccccgggagatccacaacctcttctccagccgccccggcttcgaccactgcctcctcgagtacaccggccgcggaacccacgaggacgagagctctattgccgtaggagcaggagaagggagcagggagagcgccgccgccgccgccgccgcaccggcgctgtgccgacgagatgagcctctcccaccacctccccccgccgccgggagacccctactacgtgtacgcgccgcacccctaccctgctcgcccggcagggggtcctagctcttcgtcgccggcctccctcacgacgtcaacccccggctcatccgcaacctcttctccagccgccccggctcgacccctgcctctcgagtacaccggccgcgggaaccacgcgctcgccacggcgtctgtcctcaataatccggtctccctctcggaatgcctgcttgcgatgggcctgtcctcttccccgggctgcggtcgtaggtagtgtcgttcgtgtcattcgttaatcatcaggcgtcattttcggcaatggcttcattaagtgtgagtcacaccaccttggcgtttggatggggctgctgaccacgtgtatgctggcggtgggggtcttggtgttcaggcatggcgcgacgctgcttctcgtggtcctgatgctgggggctcccaggtgccttatgatgttgaacatcttatggaagaaccaatttccaccatcctttgctgcgtgacctggaatcctttccctcttgtatcttttcaacttcatatttgttaaagtatgtaatccctggc

SEQ ID NO: 63452 - DNA, 3677 bp, Oryza sativa
  Clone ID: PAT_MRT4530_64693C.1
atggtgaaccgcgcacatttcgtcatcctcgtcctcgtttaccgcctcctggtacctctctcagccgagccagaccagaccagagagtcgtatgtcgtctacatgggcggcggcggcggcggcgccggcgccggcgccggcgtggaggaggaggcggcgcgggcgatgcacatggagatgctgacgtccgtcgcgccggccggcgacgatcaggggagggcggcggcggcgctgacgcagagctaccaccacgcgttccagggcttcgccgccgagctcaccgaggcggaggccgccgcgctgtccgggcacgagagggttgtgtccgtgttcagggatcgcgcgctggagctgcacacgacgcggtcgtgggacttcctcgacgtgcagtccggcctccgctccgaccgcctcggccgccgcgcctccggcgacgtcatcatcggcatcgtcgacaccggtgtgtggccggagtcggcgagcttcagcgacgccgggatggggccggtgccggcgcggtggcgcggcgtgtgcatggaaggccctgacttcaagaagagcagctgcaacaagaagctcatcggcgcgcggtactacggcagccagcccggctcggcgtcgtcgtcgtcggcggcgggggcggtgacggcgacaggcggctcgccgcgggacgccgtggggcacggcacgcacacggcgtcgacggcggcgggcgcggtggtgcccggcgcggggtactacggcctggcccgcggcgcggcgaagggcggcgcgccggcgagccgcgtggccgtgtacaaggcgtgctcgctgggcgggtgcgcgagctcggccgtgctcaaggccatcgacgacgctgtgggcgacggcgtggacgtggtgtccatctccatcggcatgagctccgccttccagtccgacttcctcgccgaccccatcgcgctcggcgccttccacgcccaccagaggggcgtcctcgtcgtctgctccggcggcaacgacggccccaacccctacaccgtcgtcaactccgccccctggatcctcaccgtcgccgcctccagcatcgaccgctccttccactccaccatcgtcctcggcaacggcaccctcgtcaagggaattgccatcaacttctccaaccagagcatcaccggaggccagtacccgctggtgttcgggccacaggtggccggccggtacacgccggtgtcggaggcaagcaactgctaccccgggtcgctggacgcgcagaaggcggcggggaagatcgtggtgtgcgtgggcacggacccgatggtgtcgcggcgggtgaagaagctggtcgccgagggcgccggcgctagcgggttggtgctcatcgacgacgccgagaaggccgtccccttcgtcgccggcggcttccccttctcccaggtcgccaccgacgccggcgcgcagatcctcgagtacatcaactccaccaagaatccgacggctgtgatcctcccaaccgaggacgccaaggacgacaagccggcgccggtggtggccagcttctcggcgcgcggccccggcggcctcaccgaagccatcctcaagcctgatctgatggcgccgggggtgagcatcctcgccgcgacgatacccaccgccgacaaggaggacgtgcccgccggcaagaacccgtcgccgttcgccatcaagtccggcacgtcgatggcctgcccgcacgtcgccggcgccgccgccttcgtcaagtcggcgcacccaggctggtcgccgtccatgatcagatcagctctcatgaccactgcgacgacgaggaacaacctcgggcaggcggtggcgagcagcacgggcgcggcggcgacggggcacgacatgggcgccggggagatcagcccgctgcgggcgctcagccccgggctggtgttcgacaccaccacgcgcgactacctcaacttcctctgctactacggctacaaggagcagctcgtccgcaagctcgccggcgctggcgccgcgggcgccgccttcgcgtgcccgcgcggcgcgccgtcgccggacctcatcgcgtcgggcgtcaactacccgtccatctccgtgccgcggctcctcgccgggaggacggccaccgtgtcgcgcgtcgccatgaacgtggggccaccgaacgcgacgtacgccgcggccgtcgaggcgccccccggcctcgccgtgaaggtgtcgccggagcggctggtgttctcgagcaggtggacgacggcggcgtaccaggtgagcttcgagatcgccagcggcggcgccggcgccggcgccggggcgagcaagggactaagtcacaaatttctctgcggcggacgcctgattttcggtccggatgcgggttctctgttcctgtccaccgtgctcatagtggctcctctggtaggcctatgctgccaatgcatcacaaagatgaactcgatcagttcagagaaacaagttcttggcctccctgtcctcattgccaccatcgttcttggcctagcagatttggcattcctgctgatgacatcgagcagggacccggggatcgtgccgaggaacgcgcggccaccggagtcgtgcggcggcggcgacgaggagggggtcgccggagacgtgacgacgccgtcggcggagtgggtgacggcggcgagccctcacctccggctgccgcgcagcaaggacgtggtcgtgaacgggtgcgtcgtgaaggtgaagtactgcgacacgtgcctgctgtacaggccgccacgtgcctcccactgctccatctgcaacaactgcgtccgcaagttcgaccaccactgcccctgggtcggccagtgcatcggtctgcggaattaccggttcttcttcctgttcatctcgacgtcgaccctcctctgcgtctacgtcttcgtggtgtcctggctgaacatcgtggcgcataaggacggcaacgacggctcgctgctgaaatccatggccggtgagccgttgtccgtcgtgctgatcgtgtacaccttcgtctcggtgtggtttgtcggcggcctcaccgtgttccacctctacctcatgagcacaaaccagacaacgtacgagaacttcagatataggtacgacaagaaggagaacccgtataacaggggtgctatatcgaacatagcagaggtgttctgcgctgggatcccgccgtcgatgaacaacttccggtcatgggtggcgccgccgccgctggaggagccggacgacgtcagcgggcagcttccgccgaggaacggggccgatctcaccggcggcgtgaaggagaaggtggacctggagatgggccgcaacggcggcatcatcccggcgatcttgcgggggctggactacgacgagatggagaagaacgatgtcagcgtgcatatcaaggatcggggagcggcaccggcagcgccggacccattcatggccggccggtggcacaacgaggactgtgagagtactccgacggcggtgagccaccatgtaaattcagaacgattatgacgtccccagatgcctctagttgttgcaaatttaaattattctttttgggcgttttggctctaaagcaagttggagaaatcagaaaaattgtaggtgtaaattgggtacacatttctgatggttatcttgaatacctcagactgttcctttgtttgcccggg

SEQ ID NO: 63453 - DNA, 504 bp, Oryza sativa
  Clone ID: PAT_MRT4530_64694C.1
gggacaacccccaaactgggttttaaaaaagccccaaaaaaggggtcaaaaaaacaacccgggccaaaggggggaaggctacaaccaaccccggcaaaaaaaaaaagaaaaggtttttaaaaaccagccccccaaccgggtaaaaaaaaccccccccggccagatcataggaaagcgggggtaataaagctttgccaaggccccaggaaaaaacccggaacctttttagaactgggaaccctaaaaaccctgggaaccatgggaaaactgggggccgcccccctggaagccctttcccagggggggggggcccccggggccccggaaaaaccccccctcctcaaggccctgggcgaataacaaaggaacaaaggccccctgggagaacaagaggccaaacttgatgccgaggggggaaaacaccccaacaaccctgggggggggggaaaaaatgcacacggccctttgaacctgggccaggtctccccccggaaaaccctgggg

SEQ ID NO: 63454 - DNA, 1790 bp, Oryza sativa
  Clone ID: PAT_MRT4530_64695C.1
gagccttgtggacagagaaattaaacagttaagttctagatttctatcgtggtgatggcatctgctcctccagttcaggaagaagccctacagccagggacgaaccacttcaggagccggcttgctgctgctgtgaggagcatcagttggagttacaccatcttttggtccacttcaaccagtctcccgggagttctgacttggaacgatggattctacaacggcgaggtaaagacgaggaagatatccaacttagaggacctcaccgctgaccagctcgtcctgcggagaagcgagcaactgagcgagctctactactctctcctgtccggcgagtgcgaccaccgggcaaggaagcccgtcgccgcactgtcgccggaagatatcgcggacacagaatggtactacgttgtctgcatgacatacgcctttcgacccggccaagggttacccggcagaagctatgcaagcaatcgatctgtttggttgtgcaatgctcagtctgcagatagcaaaacctttctacgtgcgctcttagcgaagagcgcgtctattcagacaattgtctgcatccccttcatgagtggcgtgcttgagctgggaaccactgatccggtttcggaggacccaaacttggtaaaccgaatcgttgcatatttgaaggagcttcagtttccgatatgcttagaggtaccgagttctactccttctccagacgaaacagaagatgccgacaccgtgttcgatggcctcattgaagaggaccagatggtcatactccagggagaagacgagctaggcgacgtcgtcgtcgctgagtgcgagaccaacggcgccaaccccgaaacgatcaccatggagaccgacgagttctacagcctctgcgaggagctggacctggacctcggttcttatcagctagtcccgacgtcggcacgggagacggtggctgcggcggcggcggcggctaacgatgtcgacggcgttgcatactctcacgcctcgtgtttcgtgtcatggaaaagagcgaacccggcggagaaggtggtggccgtgccgatgactgcaggcatagagtcacagaagttgctgaagaaagctgtaggcggcggcaccgcatggatgagtaatattgatgatcgtggtagcgtggcaataacgacgactccaggaagtaacatcaagagccatgtcatgtcagagagaaggcgccgagagaagctcaacgagatgttcctcattctgaagtcactactcccctccgtccgcaaggttgacaaggcatccatacttgcagaaacgataacctacctcaaagtgttagagaaaagagtgaaagagctggagtccagcagcagggagccatcgcgttggcgcccaaccgaaattggacaggggaaggcgccgtaagatcaccgggaaggaggtctatgagatcggtgtcagtggtggtacctcgtcggtacctcgtcaacaccgtacgtatatgatatgcatgtataagatcaccgggcaggaggtctctgagatggatgtcatacggtgttgacgaggtaccgtacgtatgatatatagttatcgttttcattatggaaaaaaaattccgaattacctcgtgtactataaaagacgcgaatattagggaagaatctaatatcaaataattagaaggggtgaggtttcgaatccaggtcgtctatcacaccaccttgtgaagctagccggaaaacccctaagcgtttttttacctccatgtactattggtgccatctgaattaccgcttactaat

SEQ ID NO: 63455 - DNA, 420 bp, Oryza sativa
  Clone ID: PAT_MRT4530_64696C.1
gatctgtacttccattatattattttttctcttgtcatctgccaaaaaacaggtgtaagaatcaatttcaaggggaggatactctctcgagatatacaattggtggctgtggacaaccaaatcttcagcaaatattttcgacgccctatgctaagcttggacaggcggtgaatctctacaggaacaggtttccttttgctggtgaaaaccaaaccactgcaatgggtggaacatctagcagaaagaaacctctccgctttgacggcgcataaacatacgctactttctattgtttttcatggctgaaatgggggctccacaacacattgaatcgcgatcctgagcgtttttttcgcctacggtctgccattctgggtagtgtacagaagcgattccgactggtctctctcgacgtgattc

SEQ ID NO: 63456 - DNA, 1895 bp, Oryza sativa
  Clone ID: PAT_MRT4530_64697C.1
agataaaaatgaagctaccaacattaaaattattggagctacagcccagcaaaactcaagagctagggcttctagaattaagaatgatcattatttcctatagtttcaggcagatgtattgcttacattacgtccatttgactatgtgcagcatgcttcaaagcactgttgcgtctcaccttcattctcagatgctcgacatcatcccatctcttcgcttctgcataaacatttgatattgtgacaagtcctccattatcagttagaatcaactcacgtagttcatgaaaaaacatgtaagcaagatcgatgtgcccatgcactcggcaagctgccaacaacatcttccacagaacagagcttgctgttgaagggttttctttaatcatcagataagcttcttcaatttttccatagcggcaaagcatatcaatcatgcagccataatgcttaacatcaggaacaattctgtagtcctcaatcatgctattaaaatatttcctcccctcattcactaggccaccatggctgcaggcggtcaagacacccaaaaatgtgacaggatttggctcaatcttcatcgaatcaaagagctctagagcctcacgtgagcagccatgcacagagaaaccaacgatcatcgcattccagcatgtaatatccctcatagacattctgtcaaagaccttcttggcaagatccaacctcccacattttgcatacatatcaatgagtgcattgccaaccaagccatcagctacaatgcccttgctctgaaggtttctgtggatgtctgtccccagctccagcttgccatcctttgcacaagccccaaggactagtacaagtgtaagctccgtaggttcaatgccattctcctgcatttcttgaaaaatccccaatgcttgggtatatttgccgagctttgtgtagccactgatcaaagagttccatgatacagcatccctctctggcatttccctgaaaagccttgatgcctcatccatatacccgatactaacatttcgtgcgatctcagcattccaccatgacaagttcctctctggcatggcttgagagacgcgctctgcacccatccagtctgcagcggcacgatgagccccgaccaacgcattccacgagacggcgttcttgtcaggcatttcatcgaacgccttccgtgcatccccgaggcgaccgaacttgccatacatggagacgagcgcattccgcacgtatcgatccttcccgcagccaagcttcaagacacggcaatgcagctccatccccttggagacgaagaccgacgcgacaccggcgcgagagctgcggttgaatgcgcgagcgcaggatttgagtaacgcagggaaggtgggtagcggggtggggagggagcacgaggaggcatggttgaagaggatgagcgcggacgacggggccggagaggaggagaaggcgacgatgaccgggcagacgagcgacggcgagaggacggccggggaggcctcgagcagaagggagagcgccgacggcgaaggcgggatgcgagagaggagagcggagaggaattcagggtggtggagcaggccgagcttggcgagcagcgcgtggagctggtgaccgccggcggcgcaggaggcggtggtaggaggcagtcgtggtcgtggatgtggaacgcattggtgggctcgcctagtgggccgtggtttggttagtgggctaagaaaaagcccacgaggccagcgaatggtcgcagggggaaaggaggaaaccgtggcttgaagccgcaggcagagacagcgtcgtctcctcttcctcttcgtcttcctgccgccgccgaggagccgagcaaaatccaataatccatcatcggagacgagcaggagcacgcgcat

SEQ ID NO: 63457 - DNA, 365 bp, Oryza sativa
  Clone ID: PAT_MRT4530_64698C.1
caaataaaaggaaaaggcaatttaatttcatcagtcaccaacctggttggaccccctcctgtttttttacacaaaaattcctaaaaagcagccatatacttccaaaaggaaaatcccccttgggtttatcacaaaaatcatactggatatgccctcattttttttgaccaggcaaagttttaactttttatgaaaaaattggagcaaaatttggaccctcaaaaacctcaaactggtcaagaacctttatggttcgacggaaaagggttcccactcccgcgggcccttataaattcccgggaattctccattaaccctggatattttttccggaccaacagaaggggagggtttttaattggggg

SEQ ID NO: 63458 - DNA, 195 bp, Oryza sativa
  Clone ID: PAT_MRT4530_64699C.1
atggtcaatgactgccccgggctaatgaacaatcatggacatgatcaggtcgctcaagaacaatgtggacaaagccacagggccaacgtcaaggtgcagcagcgcggcgggcatgatgctgcccccagtggccgtgacgccgcagccctcatttggctgtcagcgtccttggtcccaccggtcagcgtcccgtag

SEQ ID NO: 63459 - DNA, 855 bp, Oryza sativa
  Clone ID: PAT_MRT4530_6469C.1
aagctcgaattggctacctcgcttattgaaaaagccaagtcaaagggagtctccctattgcttccaactgatattgtagtagctgataagtttgctgcggatgcagagagcaagactgttccagcatctgctatccctgatggttggatgggccttgatattggcccagactccatcaagactttcagtgaaactttggatactaccaagactgtcatctggaatgggcctatgggagtgttcgagtttgagaaattcgctgctggcactgatgcaattgccaagaaattggctgatatcaccgccaaaggtgttacaacgatcattggaggtggcgattctgttgctgctgtcgagaaggccgggttggcggacaagatgagccacatttcaacgggaggtggcgcgagcttggaactgttggaaggcaagaccctcccaggagtccttgctcttaatgacgcataagactggtggcaagcatatgacgcaatttccctagccttttgcggtggtcttgttcggaccttggtgtaagtttgtaagaatgcaaagtcagtcgtctgctacctttgaacttgaaataggcttcgcttcaggtattgctagatgacagtgaataataataagcttttggcgtcctcggcatgagagaaatgcccggcacaaacaaactataatggtgtactatattttgccatattctagttgcagcagtttacactaagctataatatcgctcttgctgttatgaatgagacctgtacatgttgtgtatggagacaaatgcccctgtgcatactgttttaagccttctcaggtgaagcttttgggctgccagtttggtttaacccc

SEQ ID NO: 63460 - DNA, 1515 bp, Oryza sativa
  Clone ID: PAT_MRT4530_646C.1
atgcctggcccgaagggaacaatcactgttcagggaaacgcgaagctagcggtgcagtgcgacaagcggagcctcgacatggtcgaccatactcccaaccctcccaccatagctgagccccccaagaaagtgagcaaaaccaacaagacgctgaagctagacgcggcgctgagcctcgtctcgcccggatccggcagcggcgggcctcgtcctgcccggatccggcggcgggcgacctcgggcggtgacctcgggcagcggcgccaccaccatctcctcctcaccgccgccgccgacaacgatgaggaggcaacgggccagatccggccgtgccggtcctcgtccctcccggatccggaggcggcgggcctcgtcccgcctggatccggtggcggccttgggcgaagagtgccgcgacgaccttgggaggcgggagcggccggcggtgggagcggcaacgggcggcggcgggagaggggcgggcggcggcagcgagagcggggacgggcggcggcaggagcgggggcgggcggcgatggcgggagtgggggcgggcggcagaaccgggagcggggacaggcggcggcgggagcggccggcaaactcgggtggcggctagggctgcctacctcggagttcttcgatttgtgtttcaccgggtttcggcggtctaactggcgagatacctgcggtcagaccggcgggaagcggcggtcagaccgacggtggctaggcggtcagaccggcggcggcgacaggcgcggcaggggacttcagcggtcagactggagattcaacaccggtcagaccggcggcatccacccggtagggggacttggtgctcaaggttctactgctatgacttcaagccttcccgacgataacgtcaacgccggcgtcaaccaaggagcttcgacttcgacaatgcaggtgtggactcaagtcggcgaaatagtcttcccggtctacaccacaatactgatctcgactagaccagcaatcatggggagcgagaacggcgtgattatgactccggtcgacaaccccgtgtcgaagggtcctcccgcacaagcggaggacggaacatcgacaacaactgagcccgagaaggatcctaatgcggccaaatcttgtcctttctacaagaaatacgagccgacaaggacaacttctagggcaacaagagcttggtgtcctatccacaggactagcaagcacaccttgcaagcttgttcggtcttcttcaacgtacaagctgaaatccatgcttgcaaagagcgtggaattcagcgaacctctccaactcgtgatgtccattgtcctatccataagacaaagaatcacgacctttcgagctgcaaggttcttctcagcgccatgaagacatcaccacctaaggtccagcaatcacaaatcccccctagggatacagacaaggaacaaggcctcgtcatcgacaagtacgcgacgcgacgtgtacgctatcgatggaaccaacacatccagaggcactaa

SEQ ID NO: 63461 - DNA, 516 bp, Oryza sativa
  Clone ID: PAT_MRT4530_64700C.1
atggagcgggacgggcggcagctggagtggggcggcggctggagcagacgatgggcggcaaccggactaggttggcggcaagaagggcgccaagggccaggagccgctctcctcctcctcctcctcatgggttgcgggcaggcagatgccggcggcggcctcggtggggagccgctctcgctgacggtggccgtgggaagggagatttcggcggcggccctcggcggggattcgctctcactgacggtggccgtggacggggcggcggcggtggcggtggaagggttcggcatcggggagcccgctggggcctcctcctcctccgcgttgggtccgtcaccacgcgtggtcgcggaggaggagacaatacagatgaggagcatgccggttgtggagggctgcactaggatggagtcgtgccacgtgttgctcctctcattttgcccgtcggcaactgcacgccgctcttatcccgccgcctgccgcccaccacttaactcccgccggcgtggttga

SEQ ID NO: 63462 - DNA, 1174 bp, Oryza sativa
  unsure (1)..(1174): unsure at all n locations
  Clone ID: PAT_MRT4530_64701C.1
ttaacaaaaaaaaacatcatctggagttcattgctattgcggcaactattaggagtgaatttacgacaaatgcccttaaaaatctttgtgctggtaaagatttttttggcactgaaacctcctaagggtagatttggtggtatgttgtggggtgtcgatttacagtgtgtgtggatttggcttgattgaagagggtgatttttatattaaatttcatttgtgtaataagagtgataagtttaaatgggcctgcacagaatgaatttaaacaacaattccttgctgagttagtccatttgtgtagtcatgagaatttactgattctaataggcggcgatttaatattttttgaagtcctgaagaaaagaataattctaactttaatgatagatagatagccgttcctttttaatactgtaattgatggtccaaatttacgggaattacaaatgtcgggcaagaattatacatgggcaaacattcttactgttcctacctttgaaaagctagatagaattctaatttctactgaatgggaggaaataaactctttatcttcggttttagctttatcttgagatatttctggtcatactccattattgttaaactctaactcagctttctcaagtttccttccaagtttcaaattcgaacttggttggtaattgcgagatgacttttttttgacatggttaaggaggtatgcgcaagtgttcaggttgggaatactccaacgaaaggtgacaagcgaaattacgtaggctaagataagacagcatttgagaggatnnnnaaaatatttgtggttcatttaggaaacagaaaaaagagttgttggacaggttatatagtcaggacaaaaaggcagaggcatgcttctgaataatagatcagctatgcttctaagatatgaggagattaagtggtaccaacgtgctaaagtaagggacctgttggaaggtgattccaataccaaatactttcagttgctggctaatggtaatgaggctttaaaagcaaactattctgaaaaataagttagagaggcaatttttcaaatggaacacaacaaagcttcggtccttgtagatttccaactgagttttaccaagttttttggaatgttataaaagatgattctcctaaaagtaaaataacaaataaactggtt

SEQ ID NO: 63463 - DNA, 471 bp, Oryza sativa
  unsure (1)..(471): unsure at all n locations
  Clone ID: PAT_MRT4530_64702C.1
cgtcgttcacgagccaggagtgcagggtgtacgtgccccggtcgccgttcgcgcgcgtgcgccgtccccggccacggcaggaggggcctgccgctcaagttcgaggagttcgtcaagcgcgacaatggcctccagggcctctactccgtcggcaattcgtcttctcccccaaataccccaacaagtgctactgatccattgatccatgttggtgtgttcgatcgtcgtcgtcgccaagatcagagaccgggcctgaataaatcgatcggctaggctaattaattcattgactcgatcttgcatggggagatgaattagttgctgtggtacgtagttagtgctggttttgcattggtttacgatgcttatatggtagaggagtatggctgtaataatcaagatgttatgcaattgagacagcttgtatgtttatttcgctatcgtttaattttctctgtnnaaaaaaaaaaa

SEQ ID NO: 63464 - DNA, 302 bp, Oryza sativa
  Clone ID: PAT_MRT4530_64703C.1
atgttgggttgtgagcacatggttttgagagtcgtgctcatgacaattaagagcaggtcacagagtttaggttgtgaaacataaaccgtgccaaccacaagccagcgtgggcacaggctttaccttttgtatagcatggttcattgcgcagcaccagactgagaagtgccggagataagcccacgggggtcgttgaggagtctataccttgtttataaaggggtgattatgatccaggaacggtgcactgctttgaattgtgttgtgcgaggggaactgtcacagctcctttccaaggtacc

SEQ ID NO: 63465 - DNA, 1304 bp, Oryza sativa
  Clone ID: PAT_MRT4530_64704C.1
cagcgagtagataaacgagggatcgatcgcgtccacgcacgcccgatcccggccgcgagatgagcttccgcggcgaggagagcggcggcgaggatggggggcggacggcgtcggcgtcggacctgcggaagccgttcctccacacggggagctggtacaagatgtcgtcggcgggcggcggcggcgggatggggtcgcgcctcggctcctccgcctactccctccgcgactcctccgtctccgccgtcctctgcaccctcatcgtcgccctcggccccatccagttcggcttcacctgcggcttctcctcgcccacccaggacgccatcatctccgacctcggcctcaccctctccgagttctcgctgttcgggtcgctgtcgaacgtcggggcaatggtgggcgccatcgccagcggccagatcgccgagtacatcggccgcaaggggtctctcatgatcgcggcaattcctaacattattgggtggctcgcaatatcttttgcaaaggactcatgagtgccagtttatatagcagaaattgctccacaaacaatgagaggagctcttggttcagtcaatcagctttctgttactattggcatattgcttgcctacttgttaggcatgtttgttccctggagaattctctccgttctcggtattttaccatgttcaattctgatacctggattgttctttatccctgaatcaccaaggtggctggcaaaaatgggaaagatggaggattttgaatcctcgctgcaagtattgcgaggatttgaaacagacatcgctgtagaagtaaatgaaataaagataggaattggtctccttgtactgcagcagttaagtggtgtgaatggcattctattttatgctgctagtatcttcaaagccgccggtcttacgaatagtaatctagcaacatttggtctgggggttgttcagatctctactacagggatgaccattactcttgttgttgtttctgtgtcattttttgtgaaggacaacataactaatggttctcatttatactctgtaatgagtatgctttcgctggtcgggcttgtgattcttcctgtaaatatcaagagccttgctggaagcgttgcaacccttgcaaactggttgacggcttggctcattacgatgacagcaagcttgatgttaagctggagcaatggaggaacatttgctatctatgctgctgtgtgtgccgggaccctcgttttcgtatgcctgtgggtgccggagactaaaggaagaacacttgaggaaattgcattttctttccggtga

SEQ ID NO: 63466 - DNA, 315 bp, Oryza sativa
  unsure (1)..(315): unsure at all n locations
  Clone ID: PAT_MRT4530_64705C.1
ccagaggcaggcaggccggcggagcaaagtggttngccgcagcacggcgagtactgcggtggatgcgccggcgtttccggggataacacccgctaatggcatgggttgcttgctgcctgacatgcctggtgtgataatggctgggaacaccgaagagagcatgtgttgagagaactgcttttggtggtgctggattgagctttttatataatagttttactcttctctctcaactgtaaatgatcacaactatttttcttctctttccttttcaaatcatcatcttgatactaatttgaagacaaaaaaaaaaaa

SEQ ID NO: 63467 - DNA, 1041 bp, Oryza sativa
  Clone ID: PAT_MRT4530_64706C.1
ccacgcgtccgaatcaagcttaagctaagctgggcgcgacagcgagagagaaacgagggatcgatcgcgtccacgcacgcccgatcccggccgcgagatgagcttcgcgcggcgaggagagcggcggcgaggatggggggcggacggcgtcggcgtcggacctgcggaagccgtttgttcaggtggttgctactggagtgacaacttgggtgactgacaaagctggtcgacgactcctcctcattatctctactacagggatgaccattactcttgttgttgtttctgtgtcattttttgtgaaggacaacataactaatggttctcatttatactctgtaatgagtatgctttcgctggtcgggcttgtggcatttgtgatttcattttctcttggtttgggagccataccatggatcataatgtctgagattcttcctgtaaatatcaagagccttgctggaagcgttgcaacccttgcaaactggttgacggcttggctcattacgatgacagcaagcttgatgttaagctggagcaatggaggaacatttgctatctatgctgctgtgtgtgccgggaccctcgttttcgtatgcctgtgggtgccggagactaaaggaagaacacttgaggaaattgcattttctttccggtgaagctcaggccaacgttgtctggcgatcagcctggtgcacgtcagtcggcaacagatttggctccgtgagctatcggattaggcatcaagatttgaattcttgagttcatgtgtatctaaggcaagcgtgtattggttgcatttgtaattttgtatcatgtgttcatgtatgtgcaatagaaatatagaatggagcagtagcaagagacaatataatggaccattgcaagttgtcacgcacgccatgtggatggatggaacaatgaagatgccaatatgtcatgccgtatgatgaattttgagcaaatatatagctgagggttgttagttctaaaaaaaaaaaaaaaaaaaaaaaaaaaaaaaaaaaaagggggggctcgtgc

SEQ ID NO: 63468 - DNA, 2472 bp, Oryza sativa
  Clone ID: PAT_MRT4530_64707C.1
atggcagagactgcaattcttctagccataaagaagataagtatagctgtggcaggagaaatgttaagcctgtcaagacccattattgcaaaaaaatctgaactagtcgtagcacttccgactaacatggaattggtgaaggatgaacttgagattataaatgcatttctcaagaaagttaaaactcgggattgccgtgataatgtcttggaaacttggataacccaagtcaggaggttggcatatgacattgaagatattgtggatcagttcatatatgttgttggtgaacaccagggtaagggattctggggtaatttaaagaaatttgtcaagaaaccagagtctttgttttcattggatagggttgctactgaggttgaaaaggtaaaactgaagctcaaggaactgtcaagtaggagagaccgctgggtacaatcaacgatttgcagacccgatgctgagataccaaactatgacgatgaacaaggagtgtaccaattcaggcatagccaagtaccagattatgacgacaatgagcttgtaggtgttgatgaatacagagaaaccctcacaaagctattgtactctgaacattgttctctgcgcattgttgctgtttgtggtatgggtggcttgggcaaaagttgtcttgtttacaatgtcttcaagagagagcggtctcattttgattgctcttcatggatttctgtatcacagtcatgcaaaatggatgatatcttcagaaatatgttgaatcaactacttggcgacagcagcgaagtaaactacgacacatcaaggatgggcattgaggtattgaaagaagagttgaagagatttctggaggacaagagttacataattgcattagatgatatatggagagctccagttcttttggaaattagagataccctttttaatagtggcaagggaagtagattaatcattacaactagaatcgatgaagtagctgcaattgctgaagatgcctgcaagatcaaccttgagcctctaagcaagtatgatgcatggattttattttgcagaaaggtattctggaaaacagaaaatcatgcttgctccccggaattgcagaagtggggtgaaaagatagtcaataaatgtgaaggtttgccattagctattgttgcattggggagcttactatcactaagagataaaacagaggcagtttggaaatgtttccatagccaaataatttgggagttgcagaacaatccagacataagtcatgtggagtggatcttgaatttaagttacaggcatctgccaaatcatttgcagaactgtttcttatactgtgcgatgttcccggaagatcatctccttcggaggaagaagctgatcagattgtggatcgcagaaggatttgttgaacaaagaggatcaatcagcttagaggaggttgctgaaagttatctcatagaactcgtccatcggagcatgcttcaagtggtagagaggaacagttttggcaggattcgacgtttccggatgcatgatcttgtacgtgaactagccattaaaatgtccgaaaaagagagtttcagttcacttcatgatgatacttctggagttgtacaggtagtgtcagattctcgtcgtgtgtcgctgatccgatgcaagagtgaaatcacatcaaacctagcttcatcgaggcttcacacttttttggtttttgacacaaccatgcttcaatgttcatggtcttgttttgttccacccaaatctaaatatcttgcagtgctggacttgtcaggcttgcccattgaggctatcagcaattcgattggggaattgttcaatcttaaatatttgtgcctcaatgatactaacctgaagtcactcccaaaaactatcaccagacttcacaatttagggaccttaagtcttgaaaggactcaggtaacaagttttccagaggggtttgcaaaattgaagaaactgaggcatgtacttgtctggaaattactgtacaatgagcactcaagtttcagtaactccttgggtatgggaacaattgaaggtctttggaatttgaaggaattgcttactttggatgaaattcgggcaaataaaaaatttgtcagtaggctaggactgagtttatgctggtgcgatcttacagaagacccaatcccatatctctccaagctatcaaatttaacaagtttaaatcttcggagaacaccggtgcaggggtcccacatgttggcaaagcttgtgcggtggtggagcatcgccttgttcccaaagttgaaggggatgaccttgcaagacatggtagaagttagagagatttacatggatgagggaacattgatcagtcttgagtatctaaaacttgatggtctcaaacaacttgcccatgttcctgatggtattgagtttctcatccttaaaggaggggaaatttacaagaaagtgctagaatgggaagactaa

SEQ ID NO: 63469 - DNA, 367 bp, Oryza sativa
  Clone ID: PAT_MRT4530_64708C.1
gacgtaagcaatcttggccaagcatttggatattcagcacttatgtaggatgtatggcccaatggacaaataggtgagaagcccggctatactaaagctaccaaaacatttccagccttaattgaggcctcatcaggaactaaaccggacactacaccaccctatacctaaactttgtttcaacatgaccggaggacgtttccttttaaaacatggaaaccgggtatgtcgagcttgcaactattagccttctgactggagcagggacacatgcaaagccgaacaaggaatggacgcgttttctgagaggaggagctgattagggttaaagcagaaaaccgttcaaacaaatctaaaacaaggcctc

SEQ ID NO: 63470 - DNA, 672 bp, Oryza sativa
  Clone ID: PAT_MRT4530_64709C.1
atggcagaggagaggaagaaggagaaggagaagaagaagaagcacaaggagaaggagaaggagaaggcgggcacccacggtggggaggcgcacttcaagccgagcggggaggtgaagggggtgcggttcggcggccagttcatcgtgaagtcgttcacggtgcggcgggcgtcgccgctggagctgctccggctgctggacatcccgccggcgtacctgagcgagtgccagagcctgccgttcccgtccaccacggcgtacatgcccaccagcttcaccatcctggcgcaccaggcgtggcacacgctcacgctggggctgggcaccaagaagtccaaggtggtgctcttcgtgttcgagtccgagggcatgaaggccgccgtcgaccagctctggccgtccatgatcccgctcggcgacgtcaacaagaagctcatccgggggctcaccggcagcgagatggcccggttcaagttcaggaagggctgcctcaccatctacgtctacgccgtccgccgcctcggcgccgccggcttcatgtgcgccgacgacctcaggaggatactcgagtccgtggtggagctcaaggatttcttggatcacaccgccatgctcgccatgcccagccagaagagcatcaccttgcagtcccgggtcgcagtggctcactga

SEQ ID NO: 63471 - DNA, 1829 bp, Oryza sativa
  Clone ID: PAT_MRT4530_6470C.1
tcggtagaaggtgagagagtagttcacttccctcctctcctctctcctcttctctcttcccactctcacgtctcctctcttcccctccgcgaagcaacggggggcgaggcgaggcgagccgacggcagcggaggaggcggcggcagccgaaaccccaagaaaacgccgccccttgtttctttcttgccttgcacagcctcctcctcgatccgtcgcgcgttcgtcgggcgagatccctcctcctcctccggtttccccgcgtgcgagattgagccccgttttcggtggaagcccaaccagccgcggggttggggttgcgaggcgagagggcggctggtgtgaggttcttgatttgatctgtggttgttgttgtggtggtggttgggcgccatggcggcggcgggagggctggagcagtggcagaaggacgggttcttccaggccgccgaggaggtgcaggagtcggcggacttgtcagtgcttcttctcttccttccttccttttcttgtcctgtcatgatggaatctatttatagaacttggatgcgggaacgcgatagcggagctaatttagaggagctgagcgatttgcaaagggagctgaagacagcattaggaactgcaaagtggcagttggagcagtttgagagagctataagcatgagcaatgataagtattctttggaagagggtacattggccaggcgtcggcagttcgttgtagcaatggaggaccagatttctcaagtagagaaacaaataaatgattactcgattgacaatgataggcgagggctcaactgggtaaagttagatgatgaggaacgagatgatcttgtggctttcctttcagcacctgcacagttatctcaagatacaaagaaaagagacaacacttaccatagtccatcaaaacaaaagaatgcgttgattggcgcgaatgatcccagggacatggctgcaatcagtaaagaccgacataaaactgaagcattatgcagagaaatttcaaatggtcagagtgaagcttgttgtctagccgagcagttaaatggtcacagtacaagcccgagttctggtggtgaacactggaagatcgatatttctgatgataaagacgatgatagaaaattgtcccctaacaaggtcgaggcatcaagtcaggcaactgcattttctggtatcatgaaaaccaccgaatctttcacaagagtaagatggttgaggaatagcttgtggaaagccaagagtgatgaacatcttccgttaagatatgatatgccaaatcacttagactggagggttataaccttattagcacagtgccatttctcgtgtactcagcttgacaatgctcatattggtggctgctggtgaaggagaccaagtatccgttattgtagcttgccaagccgtggtttggtgttattcacatgctcacgatgagaacccacagcgacgccgggttaatttacacgattggagctgtatcataggaggggttaaataagaaacccaacaccgggataccgacttcatttgtggagatgcgaaaaagaaacaaaacgtggaacgacttcatttgtgcaatgcaaaatttccagagatcagaaaacgtgttgtcaccagcagaaaatcatcctgagatggatccatagtttaatggctatttggagtctggttgtgatgggatgattcatgtgattcctgccaagttctccttgctgctgtaccctcaccaaggcaattgtaaaaaaaaaaaatgtagagctgttgggaaatggatttgaacgactattgtgaatgatttaaaaaaaaaaaaaaaaaaa

SEQ ID NO: 63472 - DNA, 1149 bp, Oryza sativa
  Clone ID: PAT_MRT4530_64710C.1
atggcggcggcggtgacggtggaggaggtgaggagggcgcagagggcggaggggccggcgacggtgctggcgatcgggacggcgacgccggcgaactgcgtgtaccaggccgactacccggactactacttcaggatcaccaagagcgagcacatggtcgagctcaaggagaagttcaagaggatgtatctgtatgagaaccccaacatgtgcgcgtacatggcgccgtcgctggacgcgcggcaggacatcgtcgtcgtcgaggtccccaagctggggaaggcggcggcgcagaaggcgatcaaggagtgggggcagccgcgctcccgcatcacccacctcgtcttctgcaccacctccggcgtcgacatgcccggcgccgactaccagctcgccaagatgctcggcctgaggcccaacgtgaaccgcctcatgatgtaccagcaggggtgcttcgccggcggcacggtgctccgcgtcgccaaggacctcgccgagaacaaccgcggcgcgcgcgtcctcgccgtgtgctccgagatcacggcggtgacgttccgggggccctccgagtcccacctcgactccatggtcgggcaggcgctgttcggcgacggcgcggcggcggtgatcgtcggctccgaccccgacgaggccgtcgagcggccgctgttccagatggtgtcggcgagccagaccatcctcccggacagcgagggcgccatcgacggccacctgagggaggtcgggctgacgttccacctgctcaaggacgtgccggggctcatctcgaagaacatcgagcgcgcgctgggcgacgcgttcacaccgctggggatctcggactggaactccatcttctgggtggcgcaccccggaggtccggcgatcctggaccaggtggaggcgaaggttgggctggacaaggagaggatgagggcgacgcgccacgtgctgtccgagtacggcaacatgtcgagcgcctgcgtgctcttcatcctcgacgagatgcgcaagcgctccgccgaggacggccacgccaccaccggcgagggcatggactggggcgtcctcttcggcttcggccccggcctcaccgttgagaccgtcgtcctccacagcgtccccatcaccgccggcgccgccgcctga

SEQ ID NO: 63473 - DNA, 375 bp, Oryza sativa
  Clone ID: PAT_MRT4530_64711C.1
atggatggatggcctgatatgctagctcctcgccccctcactcctgctgctcgtgccttgctgttcgctgtcgccgccgagccgctgcagcctgccacgtggcagctgcttgccgttgttgccactgcatcgtcgcttgccggcccgccgtcgccggccacgctgatagctgctagggtttgtgggctgcacaccaacggagcagctatagaaactacagaagcggcgggtgatggggaggcggacgcggcggcggtggacaggacggcgcgacatgcgttggggatcgagcactggaccaccgttgccgagttcacccagtcggcggatctgacgacgacggctgcgctcgcgaaggggactcggggacggtga

SEQ ID NO: 63474 - DNA, 1836 bp, Oryza sativa
  Clone ID: PAT_MRT4530_64712C.1
gccaacccagcagcagcaagcagcgcacaagccccagcaccagcaagctgctactcatcatcagcgagagctagctagctgtgtgtgccacttacactgctgctgctgctggttctagctaagctcaccgatcgtcgtcttcgtcatcgccggtgacctggtgaattagtcgagagagatggcggcggcggtgacggtggaggaggtgaggagggcgcagagggcggaggggccggcgacggtgctggcgatcgggacggcgacgccggcgaactgcgtgtaccaggccgactacccggactactacttcaggatcaccaagagcgagcacatggtcgagctcaaggagaagttcaagaggatgtgtgacaagtcgcagatcaggaagaggtacatgcacctgacggaggagatcctgcaggagaaccccaacatgtgcgcgtacatggcgccgtcgctggacgcgcggcaggacatcgtcgtcgtcgaggtccccaagctggggaaggcggcggcgcagaaggcgatcaaggagtgggggcagccgcgctcccgcatcacccacctcgtcttctgcaccacctccggcgtcgacatgcccggcgccgactaccagctcgccaagatgctcggcctgaggcccaacgtgaaccgcctcatgatgtaccagcaggggtgcttcgccggcggcacggtgctccgcgtcgccaaggacctcgccgagaacaaccgcggcgcgcgcgtcctcgccgtgtgctccgagatcacggcggtgacgttccgggggccctccgagtcccacctcgactccatggtcgggcaggcgctgttcggcgacggcgcggcggcggtgatcgtcggctccgaccccgacgaggccgtcgagcggccgctgttccagatggtgtcggcgagccagaccatcctcccggacagcgagggcgccatcgacggccacctgagggaggtcgggctgacgttccacctgctcaaggacgtgccggggctcatctcgaagaacatcgagcgcgcgctgggcgacgcgttcacaccgctggggatctcggactggaactccatcttctgggtggcgcaccccggaggtccggcgatcctggaccaggtggaggcgaaggttgggctggacaaggagaggatgagggcgacgcgccacgtgctgtccgagtacggcaacatgtcgagcgcctgcgtgctcttcatcctcgacgagatgcgcaagcgctccgccgaggacggccacgccaccaccggcgagggcatggactggggcgtcctcttcggcttcggccccggcctcaccgtcgagaccgtcgtcctccacagcgtccccatcaccgccggcgccgccgcctgagcgctccgccatggtcgccgccggccggcctacgtacgccacacgtcatcttttatcatcgatcataaaaaaaaattatatatatatcgatatcgatatatatatatttcctaataataactactactacaataacaacgttatcgaattaaaaagttattcccttttgccgtgtgttggtagggataaaaagtgaaaaaaaaaattattactttgttttgcatgtgtcatgtatgggtggtttggttggtagtagcatatatatgtatactgaaaagagaaagggaggtcaattaagtgtcatggatggtgaggtttattgtaaacctgtgtaagagatgcttggctgttactattcaatttgaaaacttaattaattttgtgtacctaaaaaaaaaaaaaaaaaaaaaaaaatgatctttttttttaaaaaaaaaaaaaaaaaaaaaaaaaaaaaaaaa

SEQ ID NO: 63475 - DNA, 3342 bp, Oryza sativa
  Clone ID: PAT_MRT4530_64713C.1
atgtcgcctttctctggagcatcgctggctaggtctctaagcccagacactcacccccgtcaccataggcttcgcccttctccaaatccaccgcttcttcccctacccccagatccaccagcttccctagcctctccaaccctcgagttcttccctcctgttggtccttcccgtcagccccctactcttcctagcctgggcgtccctgcttcagatccagctttcgtcagcagaagatatcgggttccggggacgggctgccctttccggtctgcggtatcctcgccagatctgcagaatccgatgctggattcgagttctgctccaaatcctcgcctgtcttctcgatgtcaaggttcgccgaaaggtgaactgccgggattcaagcgtctttactccgatgtagttactgctcctcctcaacctccagctgccaagtcttcagatttcattgcagtgcagcctccctcaagattttcaggggcagtagcaaaggacataaggatcctgcagagtggacgtctgctcgatttgtctacccaaaatctctctgcatcagcgcaaggtacaggagacattcaagttggagagaatccttggaaagaggtcaaaggaaaacgcaggtggagaaaccactccgcattcactacaccaaacaacctggagcaaatgcattcaagaaaagcaagatttcttcaacacatggaaggcaagtgtttccgttgtttgagtacaaagcataagatcgtcgactgcagggagccgtttcgatgttggcgctgcttaaaatttggtcatctggcttccagctgtagcaagaagtttgcctataagtccaccttgcctcctctgaagactcacactgaagcttttcctgctcttgctcctctttgttttcccccacgatcgtttccatcccctcccaagtccccgatcatggacgacctcacagctcgtcccctcctcgactcggtggtgatctcggccacaggggagatcgagaggaaccgggaacgcttctcggcccattccttggtggcatggcaagtgggtgcccaagaaggaagggtcgagctcaacacgtttgcagatgacgtcccctcagccttcaacatcagaagagctgacatccaattcaccaagttccacccagaagacttcttcatcacttgctccaaccaggcggctaaggtgataggccggaagtgctccattcactatgttgaagagtactctcgccgccgcaactacaaccggaccttcgatttgtggatttggacggatgagccgagagctatcccgcgtggaggtaccttcgctattacctctgctgatgaagaaggactggccacagacattcctctgccagaccttgaaccactccgcaacccgccgccgtctgagccgaagaaagggtggacatacaatgtcttggttcatgttgacaccttggaagatctcctctctcgcaaagctcgagcttacaagtgggattatgatgttcaagacgatggcactctctacaaagaatatccactgccctgcagggcagaacctgacccaacaagaggaccggcagatgatgatgaagacaaggacagagacaatcattccaggagtcgccacaggagccgctcgctgtgggaccggttgaggaggcgatcttcaagccgcagtagggagccggacagaagagacggccactgccaagacaatgaaaacagggggcgtccgcgcaaccgggaacgctccgagcatagaagcagaagctgtcgttctcgtgatcctagcgaggggagcgaggaggttcttaccctcctggagagccatctcgaccctatgcttcatgaggcaaccgtacagcactccatctattcgccagacacatcctctccgcgtgctgtttcccctgtttttgtgccttcttttgcagtacagggaacctcgcaagaggagttggcggcaacccaggcaagccctgtccaggagttcattgctgctctgtcaacaccagtgcagccgcctctcctgcctgctccggaaacacaagctcgccgtccgggaagagcaaaggtgacaatcccggcgctttcttcagctcagcgtcacagcgaacgcctgcttcgcaagcgacgagcaggggcaaagcttgaatcttttgctcaggaaatcctatctaaaaattttggtataatggacgaaagatcttcctttgatcataacatcaaaaagatttatttgcagcgctacaagaagcctctgtctccagcgtccctgaagacaattgcagaattggtggagaagggaggctgcaaaagcattcgcctgaaggcttccaagaaggcgacggtggcgcccctaggtttaaattccaaagcaaagcaggattctgtgagatgtattttacaacagcatggtgcaaccatcgtatgtctacaggaaactaagttgtcttctatcagtgatcgcattattctcaatactctgggccagagatttcttcggcactgtgtttctctaccggccaccggcacaaggggtggcgttctgcttgcttgtgatgagaattacttctccatttcagatgtactccttggcacctactctgtatctgcagtgttaacaatgaggggagaggggcttcaatggtctatcacggtggtttataggccacagttagagccagataaaatcaattttctttctgaacttgaagctctgcagacctctatgaaatctgcttggctcattattggagatttcaacctaatatataaagcttcagacaagaacaacgaccgacataatagaaggatgatgcaacgttttcgtggcctcattgacaaattgcaggtgaaagaactgtacctcccagggcgtaggtttagctgggcgggagagggcataaacccaactcaaacaaaaattgatcgcgcctttgttacaactgattgggacatgatgtttgactgctcgaatctttaccctctgtcatccgcatgctctgatcatgctccccttcttctggttggaaatgagaaaatgaatagatttccaagtttcagatttgaagctttttggctgaaaattcctggctttcttgacattgtgacagattcctggacaaatccaatcttgtcaaccaacagattagccatcatccgtttaaagctccggcgtctagctcaagatctcaaaagatggagtcgcaatcacgtgggtgacatcaagctgcaactcgctgttgcaacagaagtgatctttcaattagaggattggctgatggagagcgggctttattgtcaaaccttaaaaatagaattcttgctctgtcagtgttaa

SEQ ID NO: 63476 - DNA, 1294 bp, Oryza sativa
  unsure (1)..(1294): unsure at all n locations
  Clone ID: PAT_MRT4530_64714C.1
cgcctccttcgcttcgcttccattggtggtggtctccattgctcccttcctccctgcctttttcttccataagtagtagtagtagcgggagtggcgcgccgccgcagccatagatctgcggcgccgcgtatctcgcggctggtttggctggtgcggttagcggctagggttttggttgtttcgtctgatcgatcctccccgattttgcggcggcggtggtgaattggtgtgtgatctgatatgngctggcggcggcggtggcggggaaggggggagggggaggggagggcggcgacggggaagagggagaggatagcaatacggaggatcgacaacctggcggcgaggcaggtgaccttctcgaagcggaggagggggctgttcaagaaggccgaggagctctccatcctctgcgacgccgaggtcgggctcgtcgtcttctccgccaccggcaagctcttccaattcgccagcaccagcatggaacagattattgaccggtacaactcgcattccaagacacttcagagagcagaaccttctcaactcgacttacaaggggaggacaccagtacttgtgccagactaaaggaggagcttgcagaaactagccttaggctgaggcagatgagaggagaggagctgcacaggctgaatgtggaacagctgcaggagctagagaagagcctcgagtccggtctaggctctgttctcaagaccaagagcaagaaaattctggatgagatcgatggactggaacgaaagaggatgcaattgatagaggagaatttaaggctgaaggagcaagtgtccaggatgtcaagaatggaggagatgcagcctgggcctgattcagaaatcgtgtacgaggaagggcagtcgtctgaatctgtcaccaatgcttcttacccgcgacctccacccgacaacgactacagctctgatacatctctcaggctcgggttgtcactcttcagctccaagtgatggctggaaactaaaactgagaggaaacagctggatggcatgcctgcatcgccaaatgatcagtgcatgcactgcaagactgcaacaaataacacagttttagattgccagatgatgatgtgtgtgtgctgagagtcactggctattatcgtacacataataacaatagaacgaaaaagttcttctgttccttggatgtgaccggaaactactcccatacatgttgtcaatggctctgtaatcgagtgtctgcaattccagctgaaagcaaccgattccagggaaaaaaaaaaaaaaaaaaaaaaaa

SEQ ID NO: 63477 - DNA, 434 bp, Oryza sativa
  Clone ID: PAT_MRT4530_64715C.1
aggccccaacgaaatgccttattaaaattttacatgccccgctgccaaaaaattgggtttgggggggatggtattttgggccccggggggggccccaaaaacttaaaaaacgaaaacgttttaaaagccaaccaaaaaaaaaaaagttactagggggacctccctaaggggccgggggctttaaaagagggggggaacaaaaggcccgttttatcccaaacccacccacaaggcaagctccccgggtagggaaaaaccggaaggaagtcaaaaaaggggggggcccccaacaggggtggggaaaaacaaaaagcccctggtgtcgtttggggtggacaaaatacggcttcaccccaaaaaaaagggccctgtcccaaatttcacaaaagggagggagggcctccattttgccgggcctggcaaaaaggccccct

SEQ ID NO: 63478 - DNA, 375 bp, Oryza sativa
  Clone ID: PAT_MRT4530_64716C.1
atggacgccggcggcgaggaggagaagcaggagcgccaccgggttgatggtgcttcgccttccatggtcgccctccgctccgacgtcctccacgccgtccttggagggaagtctcataatcaggacacttctgaattggtcacactgtcggagtggtccaaaaacaaatttcctttgtatgcttatgctgctgcttttatgttcctagtcatgcaagaatatgataaaagatcacatggtattgacttcctcaatcgggactttgttgtccgagagctgtttgacaacatcctgaagcatatgtcagaagctcttatagaaggaaatcaggacattctacatacacatatgggttcttcatgttgcagaagctga

SEQ ID NO: 63479 - DNA, 302 bp, Oryza sativa
  Clone ID: PAT_MRT4530_64717C.1
cccactcgtgcgaccactcgtccgagaagtactactctctcaagtgagctctgtaacgaggctccaagcagtgtccgaaggcggccgcaacgtacagcggcgcacggcgccctaccgagctctgtccacaacggtcgcgcggggcagatcgagcggcggaagcgctgcgcaaatgttccggcggcactggccgaacccgagcgctatggcatctgttgctgtgtagctacccgaaccctaccgtagcgggatctaggtagccagatccacgttgggctcggcagatctagccggggacggcg

SEQ ID NO: 63480 - DNA, 300 bp, Oryza sativa
  Clone ID: PAT_MRT4530_64718C.1
agaggattttggcaaacaggcagtcggcgcagcggtcaagggtgagaaagttgcagtacatctctgagcttgagcgcagcgtcaccactctccagatggaggtgtcagcactgtcacctcgtgtggccttccttgatcatcagcggtcgctgctcaccgtcggcaacagccatctcaagcaaagaatcgccgccctcgcacaagacaagatcttcaaagatgctcaccaggaggctctgaagaaggagattgagcggctacgccaagtgtaccaccagcagcagatcaaggccaccggag

SEQ ID NO: 63481 - DNA, 2122 bp, Oryza sativa
  Clone ID: PAT_MRT4530_64719C.1
atcgttaacccgagccccccaagcgcagccatggtgttcgacgcgggcaccggcagcagtggcggcggctcgccggcggcgccctccccgccgccgccgtggcagaaccctctccgcgtgatcctgacggcggcgttcgcgcggcaggtggcggtggggcggtggttcacggtgttcgcgagcctgctgatcctgacggcgtcgggcgcgacgtacatcttcggcatctactcgccggcgctcaaggcgtcgctcggctacgaccagcacacgctcaacaccgtctccttcttcaaggacctcggcgccaacctcggcgtgctctccggcctcatcaacgaggtcacgccgccgtgggtggtgctcgccatcggcgccgccatgaacctctccggctacctcatggtctacctcgccgtggccgggcgcacggcggcgccgcccgtgtggctggtgtgcctgtacgtgttcgtcggcgccaactcgcagtcgttcgccaacaccggcgcgctcgtcacctgcgtcaagaacttcccggagagccgcggcgtcgtgctcgggatactcaaggggttcgtggggctcagcggcgccgtgtacacgcagctgtacctggcgttctacggcgacgacgccaagtcgctgatcctgctcatcgcgtggctgccggcggcggtgtcggtggtgttcgtccacacggtgcggatcatgccgtacccgcgccgccgcggcgggcaggagaccagcgtcgaccccttcttctgcttcctctacatctccatcggcctcgccgcctacctcctcgtcatgatcgtcgtgcagcggcagttcgccttctcccgcaccgcctactcctgcgccgccgccgcgctcctcatcgtcctcttcctcccgctctggcgtcgtcatcaagcaggagttcaagatccaccgcgagcgcctcgagctcgccagccgccgccccgccgccgcacaccatcaccgtcctcgaaatgtcgaaagagacggagcggtcgccgcggccttcttccccggcgccggcggagacgtcgtgggtgaagggcatgttccggccgccggcgaggggggaggactacacgatactgcaggcgctggtgagcgtggacatggcggtgctgttcgtggcgacgatctgcggcgtgggcgggacgctgacggcgatcgacaacatggggcagatcgggcagtcgctggggtacccggcgaggagcaccaacaccttcgtctccctcatcagcatctggaactacgccggccgcgtcgccgccggcttcgcctcggaggcgttcgtcgagcggtggcgcctcccgcggccgctggtgctcaccggcatcctcctcctcgcctgcgccggccacctcctcatcgcgctcggcgtcccgcgcgcgctctacgccgcctccgtcatcatcggcttctgctttggcgcgcagtggccgctcgtgttcgccatcatctccgaggtgttcggcctcaagtactactccacgctctacaacttcggcggcatggcgagccccgtcggctcctacatcctcaacgtcctcgtcgccgggaggctctacgacgcggaggcgggcaggcagcccggcgccggcctcgccgccggcgccggccgcgacaaggtgtgcctcggcgtcgactgcttcaagaagtccttcctcatcatcacggctgccaccgtgttcggcgcgctcgtctcgctcgtgctggtctggaggacgtggagattctacaagggggacatctacgcgaggttccgcgacggcgacggcgccgtcgccggagagggaggtgacggccggttgccggtggaccagcggcggcggccgccgccgccggaggaggaggaggagtcaacggcggtcaacggaaggaaggagtgagccagtgaggaggaggaggaggtgggagtagttggtaggttgacttggtcaatgatgacgtcatcagcggtcactggtgatggattctatctactctggctttggctgctgacgtggaatggaaattacagcatttacagaagaactggaaaagcacagcacgaaagcggctgtaaatttggtttcaccaaaggaaatgcaaatataagtttctt

SEQ ID NO: 63482 - DNA, 2244 bp, Oryza sativa
  Clone ID: PAT_MRT4530_6471C.1
gctcgggggcgggcgtcaccgctccgggctcccgggggtccgttccgttcctcgtttgccccctcctgctgcacctgggggctggcctcggcgcggttagaccgggtctgcaggaacacggcccgaccgtcgtccatcttcctcccgtccgtactcctgcgttctactagcatcaatctttattagtcctaatggcatccatgcattcaaactgtccccttggtacatatgcatacgacacgtgtgactgaaaccattttacacaagggggcatgatttagcacataattaagggcaatcagttttttcttttccgctgaaactcaaaaatctagctagctactgaaggtagttctcatcatgcattgcatctatctctctcaatttcaaatattgtttaggctccattcatcatgaccggcttcttcatctcccacgcggtgagctgcgacaccttgatctccgccttcccgttattgaaaacgtaaaggcgcgcgttcttgccgatggccagcgacgggtacaccctcgacaggatgcacgcctttcctccagccccgaagctctcaacaaccgacctgtcgatcaggctcctcagagatatcttcccgttggtgatgtccgtgtcaacgaaccctgcaaacgtcggctggtacatgttcgggttgcgcgatgacttggtggggtcggtgcacatgagcacgacgggcttgccggcgccgccgccgcgcgccgccggcctgaacaccctgaagaacacggcggtcttctcctccagccccgcggacgcgagcacccacaggccgaacggccccacgccgcccctcgcgtcggcgccccgcgcgctgcacagccgctgcgcgtcgtacgccatcgccgggtccagccgctccgccgcctccaggctccccacctcgaagctcacctccacgtcagcctgtgcagtttgtagcccggtcacctcgacgtgttcccctggcttgaccaccctgtccttgagaatgaccggccacttccctctcagcctctcgacctcctcgattggccactgcaacagttgcttcccacttgggtccagccacactttcctcggaatcgcctggattccggcccagcccttggccacgtcgtcggcggcggtgtcggactcgttggcccatccccagaggatgcggcggcgcttcgccgggtcgtagaacgtcttggaggcgtagaagttgccgtagtcgtagcggatgtggtgctcgtcgccggcggggtcgtccggcacgtaccgctcggccttccggtcgtacgttccgacggtgtagtagtcgtaccggcgcaggtcgaggctgttcttgagcacgtacttgacgcgcgccgaggcggcggcgtcgacgacggcggacgaggtgtcgacgccctcgcggcggccgtccgcggtgaccgggtagaagtccgggcactcccacatccccgtgggcgccgagtgcagcggctgcgccgcgcgcgtccaccgccggaagtccctgctccggtacacgtacgccacgccgcgggactgccccgcgaggctgccgacgagcagccgccagtggccgtcggccccgcgccacgcggtggtcgggtcgcggaactgcgtcgcgttgatgccgccctcgggcacgatcaccgggttgtggccgggcttcacccactcgcgcagcagcgggtccgacccgttcctcggcagcgccacgttctgcacctggtagttgacgtcggggcggttgacgccggtgtacatgatcaccggcgtcccgtcggccatcatcgtcgccgaccccgaccagcagccgtacttgtcggccctgatgctgggctcgatggccggcttgagcgccacccagttgatgaggtcacgtgacactgagtgcgcccacacgatgttcccccacacggcgcccttggggttgtactggtagaacagatggtaccaccccttgtagtacatcggcgcgttcggatcattgatccagttcttgggtggctggaagtgatacccagtccggagctcagagtcgacgatggacggcggcacgccgtccgctgtggtagcagccgcctgcagctcgaggtcgtcgtagacgacgtgcgacgctccggcgagctgctggagcagcagcagctggaccagccatgcccaagcgaccctactaccaagaactcccattgctctcacacttgggcacaagaggacagggggtcgacccgggaattccg

SEQ ID NO: 63483 - DNA, 363 bp, Oryza sativa
  Clone ID: PAT_MRT4530_64720C.1
atgtcctctactcaagcgaaggttgtcggcggctacgcaaacgcaccgcgggcgactgcagttgcggaaggaagtgggcgcggtggttcgggggaggtagactcgagccagtccgacaccggtgcgagcgcgtccgcggtccgctccttccaggacggaggtgcgcggcggcgcctcccattgctcatgggctcacaagcccggggtgtctccgagaaaggggatcttggcggcatgcgtgttcaggccccagcggggcgccacatgcacctgtacagaaagggaattgcacagttgtcagcatcgtatccagttgataaacggatgcagcagattacaaaattcccttgtctaatcatctaa

SEQ ID NO: 63484 - DNA, 2082 bp, Oryza sativa
  Clone ID: PAT_MRT4530_64721C.1
cccaagtccaatcgtagattacaaatgtatttacaatactacttcaactactactaccagtactatatatggaggggaaggttgctttctgctattggcctatgcatagctagttactcttatttgcttaacgtgagaaaaaggctacgagaaggtgtgacatattctcccatggctcttagagatgtcgagcgagatgcacggttaaaacgtttgtttaatggtactgaggccaattgtgtttctgagctacgcatgcaaaaggccatttttcataagctttgtggccatttcatatcgcgtgggcttttagtagacaccctgcatgtaacaatagaagaacagattgcaatgttcatgcatatagtgggacataaatggtccaatagatcagttggttttgagttttaccgatcaggtgagacggtcagtaggtacttcaatgctgttctggattcacttgtttcaatttctaaagaactgatatacatcagaagcactgaaacccatccaaagatcacaagtagcccaggaagatttcacccatattttgagggatgcataggagccttggatggtactcatgtaccagcaactgtccctgcacatatgcaggacagatttaggggtagaaagactattcccactcaaaatgtccttgcggctgttgatttcgacttgcgattcacttatatccttgctggatgggagggatcagcccatgattcacatgtgctccaagatgctctaagccgtccaagtggcctaaaaataccggaaggaaaattttttttagctgatgctggatatgcagcaagacccggtattctacccccataccgcggtgttcgttatcatcttaaagaatacaaaggtgctagagaacctgaagattataaagaactttacaaccatcgtcattcatcctgtaggacaacagttgaacgagcatttggtaccttgaaaaatagatttaatatcctcaagagtcaaccaaatctccctttgaaaacacaagtgaagactgtgattgcttgttgtgcacttcacaattggatactagaaaatggagatgatgaatatgtctatgacgaaaaaatggggaaggggaaggggaaggggaaggtggagggtgaaggttctacccgtgagagatccatcagctgggatgatgaccaaactaagttcatgcttgattggtacattgagtacaagaaagaacaacatgcaggcttcatatggaaaactcagcaccatctgaaatgtgctgatgtcttaaatagagagtttgctatgggtgtaacatctacccaagtaacctgtcactacaggcactacaaagagaactgacagatagttgagagggctttaaacaatagtggcaatggttttgatgctagtaaatgcaaattggctatatcagagtttgaaaaagctaagctcagagtaagtatccttcatctgaatttgcttgctaagccaatcaagtactttcatgagatgaagagcttttctcaggcagtaatacgaatggctctcttgccatagactagcaaacatgctgcgacattgataacaaatctggtagtagtgaccatgaaggattgaatgatgtgtctacctatgcacatcctattgacattgttgaagaagactctgacacattaccatcgcctactggtcctgataattgctctcctggaacatctggagttagtaaaaagagaccaaaaggtgtaaagtccccgagtaaaaggcagccaaaacctaagagtcgtttcacagatgccaccgagaaaattggcaatacaatggaccgtttggtgaaccagcttgccagtcctcctccacccccaatgccacaacttgacccttatgctacaatgtggaagaggatagatgcattacccattggttctaaagataaggttgctgttggaaattatttgggacgccaggagaatgagggggtgcgaggatttcttgctgcttcttgtgacacaactttggagacttgggtgtaccagttcatatgcgaccgagatggtgtgtaggataaatggatctagctgccagcattcg

SEQ ID NO: 63485 - DNA, 1452 bp, Oryza sativa
  Clone ID: PAT_MRT4530_64722C.1
atgtcttcttccactagcccgcctgccgtgccgtcagctgagtacgctgagcatctctcatacctagttgcaattcccaacctgtcgcacgcaaattactactttctctgcccagttggcaaccctgatcccaccgagttcgttattggcaaaaccaataggattcctttcagactgaccaacccagatttaggtcactggagaaacactttcaaatcctggccatctctcaagaaaacctcacccgagaaaagttggatcacatggttcaaacgcatgtcggctagcaaaagagttcattgggatgaaatcagaatcggccaagcagttgatctcaccatagccaactcagctaaagacgagcccctaatggcagctgcctcctatttttggtccaacaccatcaatgccttcttgttcaatcaagcgccgatgactccaactctcatagatatcataatgattacgggtctggacgtcacctcatcggctaaccctatgagcttgaacacgaagaagcaatatgacttcaggaccaagagcataggtggctggcaccaaagaagaaaaaccaagccgaagaaaaccaagctagctgatgatctgcctgccctagatccatccattgatcaagctctggatgaaaaacagatcgaagaagatgttgatcaagctgcagccgagccacctcctccctcttcatctcctgtgcaacgaatatcaagtgattgtactccatcggctgcagatagtcacaatgttgaggaagaagaacaacctgctgttcctaacatcccagtattagccgatctgttctcatttgatatcaaagactatcttgatgaagaaacagaaactgataccactagcaaagctctagctcccttgtccgatgatgtgaaaaaaactcttgaggatatctcccatcggctagaggcatcattagacaacttggtgactaactgtggttctatcagcgcaaggtttgcagatatccaagctctactctcagatgagctagccgatgccctcactccagctgtctaccttgaacaacaccgattcaagctggagaaggccaagcagagattagccacaatccaggcaaatcggcagcttgttcatgaagagaaggccaagcttgatctgttatctgacggcccgatcaaagccaatattgatcggctcgaatctcgcaagattgagctcttggcacaacttcaagaatgcaacgccgagctggatctggagcacaagaagctagccgatctctcacaagttgtcgaaggacagaaggcaagactaaaatcggctatcaagaatgtcgctgatctgaccaagtctctgaaagttatccctggaaccgacgctcaagatgctcaagccattgaagaagtagaacaaattaggcgaaaagctatattggctatccagagctatctatctcaataa

SEQ ID NO: 63486 - DNA, 2076 bp, Oryza sativa
  Clone ID: PAT_MRT4530_64723C.1
tcattgaaataaatagcgctggataaccgatacagccctctgcctaatttgttctagttcttcgatggcctgggcatcttgagcatcgattctagggatgactttcaaggacttggtcatatcagcgacattcttgatagctgattttaatcttgccttctgtccttcgacaacttgtgggagatcggctagcttcttgtgttccagatccagctcggtgttgcattcttgaagttgtgccaagagctcaatcttgcgagcttcgagccgatcaatattggctttgattggtccttcaggtaacagatcaagcttggccttctcttcatgaacaagctgccgattggcctggattgtgacctcgatgtcttttcgctcccgacaatcggctaatctctgcttggccttctccagcttgaatcggtgttgctcaaggtagacagctggagtgagggcatcggctagctcatctgggagtagagcttgaatatctgcaaaccttgccctgatcgaaccacagttagtcaccaagttgtctaatgatgcctctagccgatgagagatatcctcaagagtctttttcacatcatcggacaagggagctagagctttgctggtggtatcagtttctgtttcttcatcaagatagtctttgatatcaaatgagaacagatcggggccgattgaaaacattttgaaggtgacatttactgggatgttaggaacagcgggttgttcctcttcctcgacattgtgactccctgcagccgatggagttcgatcacttgacatttgctgcacaggaggtgaagaaggaggaggaggtggtggggctggtttaagtgttgtcgctgccgatttctttctcacagcagtcttctttttccttgagaagttagccggtgcaacaggagttgggggagtttgcttgggcgaggctgacggtgtttttcctccaatatcactcaattcggctgccgcttgatcaatgtcctcttcaatctcttcttcgtccagagcttgttcgatggacagatccagggcaggcagatcatcggttggcttgtgcttctttaatttaaccttcttctttggggctggagccgatgtgtccacagccgatgatctggttcttctctttttaccggcatcggctggttctctgacgagcccttgaaggagagttgaagtcctaaagtccaatggattctccagaagtgttgaatcttcgtagaggaaccaaactcgagtgtctttttggaaaccctcataaaaactacagaaccagtccttgagcagttcagccgatagctttgctcctgcatcggttggtgtggaggtatattctccgtaaaatgtgcatctacgatgagtgcgttcttctccatcatcatctacagtcggttccagtcttgggaattcggcttctgttacagatggccgattgacaaacttcataactactagattcagccaagactgtaatagccaccatggtccacctgctccgactactgagccgacggccaacttagccgatgtattgtttagcatttggtacaaatagccgaggaggattttgcctaaaggaaattgtctctttgtctccaaggctttggctgcgaactgccagttggttgtagggccacaacttgatccacaaaagaggattttttctagccacattagcagaaaagctacatgttctcgaggagtgacagaaccttggcccatatatgccgctacatagcctgaccagccgcctatgctcttggtcctaaagtcatattggttcttcgtgttcaagctcatagggttagccgatgaggtgacatccagacccgtaatcattatgatatctatgagagttggagtcatcggccctaaatctgggttggtcaatccgaaagtaatcctattggtttcgccaataatgaactcggtgggatcagggttgccgactgggccgagaaagtaataattttcgtgcgacaggctgggaattgcaactaggttggaaagatgctcagcgtactcagctgacggtgcggtagacgggctggcggaagaagacat

SEQ ID NO: 63487 - DNA, 2304 bp, Oryza sativa
  Clone ID: PAT_MRT4530_64724C.1
atgtcttcttccgccagctcgtctgccgcaccgtcagctgagtacgctgagtactttctcggcccagttggcaaccctgatcccaccgagttcgttattggtgaaacctataggattcctttcagactgaccaacccagatttaggtcactggagaaacactttcaaatcctggccatctctcgagaaaacctcacctgagaaaagttggatcacatggttcaagcgcatgttggctagcaaaagagttcattgggatgaaatcggaatcggccaagcacttgatctcaccataggcaactcagctaaagacgagcccctaatggcagctgcctcctatttttggtccaacaccatcaatgccttcttgttcaatcaagggccgatgactccaactcttatagatatcataatgattacgggtctggacatcacctcatcggctaaccctatgagcttgaacacgaagaaccaatatgacttcaggaccaagagcataggcggttggtcaggctatgtagcagcatatatgggccaaggttctgtcactcctcgagaacatgtagcttttctgctaatgtggctagaaaaattcctcttttgtggatcaagctgtggccctacaaccaactggcagttcgtagccgaagccttggagacaaagagacaatttcctttaggcaaaatcctccttggctatttgtaccaaatgctacacaatacatcggctaagctggccgtcagctcagtagtcggagcagaagccgaattcccaagacttgaaccgactgtagatgatgatggagaagaacgcactcatcgtaggtgcacatcttacggagaatatgcctccacaccagccgatgcaggagcaaagttatcggccgagctgctcaaggactggttctgtagtttttatgagggtttccaaaaagacactcgagtttggttcctctacgaagattcaacacttctggagaatccattggactttaggttcgaaaatatcaatcacgaaagatatcagaaacccagagaaatcttctcagctgtaatcagtccatgtatcctccctgttggcattcatcaaggaagaaacatccagacaacagagttctctcctcctcgccagagaaatagtggcagaaatattgagtatgccccagggctgattccaaacgggggtggaccatctcctcatgttattggctataatgcccccaggactttaactctccttcaagggctcatcagagaaccagctgacgccggcaagaagagaaaaactaggtcatcggctatagatccatcggctcaggcgccaaagaaaaaaaccaagccgaagaaaaccaagctagctgatgatctgcctgccctagatccatccattgagcaagctctggatgaagaagagatcgaagaagatgttgatcaagttgcagccgagaaaaagaagactgctgtgaggaagaaattggctgcaacaacctttaaaccatcctcaccaccacctcctccctcttcatctcctgtgcagcgaatatcaagtgatcgtactccgtcggctgcagataatcacaatgttgaggaagaagaacaacctgctgttcctaacatcccagtcttagccgatctgttctcatttgatatcaaagactatcttgatgaagaaacagaaactgataccaccggcaaagctctagctcccttgtctgatgatgtgaaaaaaactcttgaggatatctctcatcgactagaggcatcattagacaacttggtgactaactgtggttctatcagggcaaggtttgcagatatccaagctctactcccagatgagctagccgatgccctcactccagctgtctaccttgaacaacaccgattcaagctggagaaggccaagcagagattagccgatcatcgggagcgaaaaaacatcgaggccacaatccaggcaaatcggcagcttattcatgaagagaaggccaagcttgatatgttatctgacggcccgatcaaagccaatattgatcggctcgaagctcgcaagattgagctcttagcacaacttcaagaatgcaacgccaagctggatctggaacacaagaagctagccgatctcccacaagttgtcgaaagacagaaggcaagactaaaatcggttatcaagaatgtcgctgatctgaccaagtttctgaaagttatccctggaaccgacgctcaagatgctcaagccattgaagaagtagaacaaattaggcgaaaagctatattggctatccagagctatctatctcgataa

SEQ ID NO: 63488 - DNA, 507 bp, Oryza sativa
  Clone ID: PAT_MRT4530_64725C.1
atgggtggcgcgcggcggcggcgcgacggggactcgcggtggcggcacgccgcgcgccggatccgctgccacaacgactggggaggtaggatctgccaccgacgccgacaagagtggtcggatctaccgccacgacgaccggggaggccggatccgccgccgacgccgacggtggaggccggatccgccgccgtgatgatggtggaggccggatccgccgccgcgacgacgggggaggctgacggggaggtgaaggaggtggatccggcggcgaacgatgacgacggctacggctcccgtaacgacgacgacgactacagcttcctggcgacccttcttgctcgccggcacgccggtcttcttacttgccgccagagaaaccggctttttgctggcggctgcccgccgtccaccgccacggtttttcaccgccagcgaagatgcttgatcttcattggcctttgctttgtggcggcctcaaataccgccagcgaaaacccaaaatga

SEQ ID NO: 63489 - DNA, 2142 bp, Oryza sativa
  Clone ID: PAT_MRT4530_64726C.1
atgtcttcttccgccagcccgtctgccgcgccgtcagctgagtacgctgagaaaacctcacccgagaaaacttggatcacatggttcaagcgcatgtcggctagcaaaagagttcattgggatgaaatcggaatcggccaagcacttgatctcaccatagccaactcagctaaagacgagcccttaatggcagctgcctcctatttttggtccaataccatcaatgccttcttgttcaatcaagggccgatgattccaactctcatagatatcataatgattacgggtctggacgtcacctcatcggctaaccctatgagcttgaaaacgaagaaccaatatgacttcaggaccaagagcataggcggctggtcaggctatgtagcagcatatatgggccaaggttttgtcactcctcgagaacatgtagcttttctgctaatgcggctagaaaaattcctcttttgtggatcaagctgtgggcctacaaccaactggcagttcgtagccgaagccttggagacaaagagacaatttcctctaggcaaaatcctcctcggctatttgtaccaaatgctacacaatacatcggctaagctggccgtcggctcagtagtcggagcaggtggaccatggtggctattgcaatcttggttgaatctagtagttatgaagtttgtcaatcggccatatgtaacagaagccgaattcccaagactggaaccgactgtagatgatgaagaagaagaacgcactcatcgtaggtgcacatcttacggagaatatgcctccacaccagccgatgcaggagcaaagctatcggccgagctgctcaaggactggttctgcagtttttatgagggtttccaaaaagatactcgagtttggttcctctacgaagattcaatacttctggagaatccattggactttaggtttgaagatatcaatcacgaaagatatcaaaaacccagagaaatcttctcagctgcaatcagtccatgtatcctcactgttggcattcatcaaggaagaaacatccagacaacagagttctctcctcctcgccagagcaatagtggcagaaatattgagtatgccctagggctgattccaaacgagggtggaccatctcctcctgttattggctataatgcccccaggacttcaactctccttcaagggctcatcagagaaccagccgacgccggcaagaagagaaaaactaggagtttagtcccaaagctagttttgatggttaagaatgcaaggagaccccccaattcgaatgttcctaagtgcaaaaattatcgaagagagggctacccagaggttctggccggaacttccgtgcaccgtttatttgtaaaaaaattcctaaatgctgcccggaagttcctggcacttttgcccggaacctcctggcaggtttccagttcaaacttatcttctcctagacggttaggtgttgcccgtgacttccaaatatcttgtggatatcccgggaaagtttgtgaaggttttcctcacctccgcaaggaaatgagtttaaatttatctcagctgcccggaagttcctggctcaagaactccggaagttccgggctactcttcctgcccggaagttccagtgtttatcaccgggaggctgcagatagtcacaatgttgaggaagaagaacaacctgttgttcctaacatcccagtcttagccgatctgttctcatttgatatcaaaaactatcttgatgaagaaacagaaactgataccaccagcaaagctctagctcccttgtctgatgatgtgaaaaaaactcttgaggatatctctcatcggctagaggcatcattagacaacttggtgactaactgtggttttatcagggcaaggtttgcagatatccaagctctactcccagatgagctagccgatgccctcactccagctgtctaccttgaacaacaccgattcaagctggagatggccaagcagagattagccgatcatcgggagcgaaaagacatcgaggccacaatccaggcaaatcgacagcttgttcatgaagagaaggccaagcttgatctgttatctgacggcccgatcaaagccaatattgatcggctcgaagctcgcaagatttag

SEQ ID NO: 63490 - DNA, 573 bp, Oryza sativa
  unsure (1)..(573): unsure at all n locations
  Clone ID: PAT_MRT4530_64727C.1
aaatcccttaatattatggaacggagggagtatgttacaagcttaattaacacccctggtaaggcataacaaaagatgggtgactttaagtgcactacacatgcccgtctgaaatggccgctagtatacacttactgtcacctgacacccatagtcaccgaagctgaaccccaaacacaccgggagccaaacatacatagcggagtacagtaccacaccactctatggacagcggatgtacttttgtatgacgaattagaaaagcctaagcatacgttcgaatctccaatgatcgtactggacagaggatcacatggtgccaactttattcttggtagacatatcggtgtttcactttagaaaacgtacttatcctatacatgtctaggttggcattcgtctgggggaatgatatgactatgatactgtntgccttgtgtgtgcagcagacgctggcctaggagcaaaaacgagcgtgagcactctggggggcttacactttaaagggaggaaggtgactggttgtgccaggagtcggccttttatatgcgtgggacgatgacttccttttta

SEQ ID NO: 63491 - DNA, 855 bp, Oryza sativa
  Clone ID: PAT_MRT4530_64728C.1
atgactcgacgagtaaaaaaaaccaaggagcagtttctcacggagcaaacgcgtacgctaacgctagatggccttttcttctttttttttttcgatcgtcgtggtacaatgcgtgcacgtgaacatgtacaacaaccatcgtcaaagaggataggaagaacgacatactactgcagtactagtgcagtagtgctacgcatttccgcactttttactcttcgtgggatccgtccgggcagttggatccttccagatccatccgcgttcgttcacattgactctggccttggccttactgcgtctcacacactctcatgtgcgctcctgctggcaggcagcaacgaaacacacacacgacgggcacccgcaccagcacgtgtcggccccgttccgccgccccatcggacgtcctaccaccaccaccggttggattcttgtgcagcggcgcggcgcgcgtacaagcggccgtgcacggtgaacgagacgggagcacgcagcggcggcaggggggtcagtttccacccggaggaggcggaagctgcgtggaggtgtcgactcgaacgcacgcaaccgtgcacgcacaccgctagatcggactcatcaaccccggcgttttccacatgcgtgcgcacggtagctctttacacctcagagatccatcatgatacgaacgagcgatccccgccttccagaagacacattgcacatggggggcagtcaagcaaactgatcaagctgagggcgcagacaacagaacatactacggagcagccaaaaatgacaggccggccagccaccgctctgcccactgccctgcactgcacaacaacccccaccatcccaatcaaactcagt

SEQ ID NO: 63492 - DNA, 755 bp, Oryza sativa
  Clone ID: PAT_MRT4530_64729C.1
tcggcgtcgactcccgtctcgtctctcgcgagctcgcccacccgccgccctgcgccgatctccagcgattccgcgacttcgcgagcagtggcgccgtcgtccgtcctgctgcttccgccgcatcctggtttgggggttcaactgaaccccctatgtccctcgttagatccgcccctgcccgcccccgggctgcagggacacgccaagaggaacaaaattttttcaatgcgctgcgccaagtagggaagaattttgagaagattacgctgcgtgtccagagcaaaagcaaagatcaggtcagacattattactatcgtcttgttcgacgcatgaagaaacttctcggtcctgagttctcgctcgatgcaaaaaattccaaggacaccattgctgctatgctctgctggtggtctctgcttgaaaaatttagctgcagtgcatcaaaactgcatctgaagcctcggagattcaaaactttcgtagaagcattgggaaatcaactactaaaggatagaaataaaaccagaaaaaagtgtccacgtggggatgtgtgcctgtcctcttcatcttcggctgtcaacaggactcctggaaatgaatctttctcagtaaaactcctgcctgtggatgtctccaatggtagcaaagtagcatcttctaaaggggcagttttcaagaggggcgcagaaccaaattccagtaacaagtcaggtgcaactaaaggggacctctccgccacaagtactgtgaaacag

SEQ ID NO: 63493 - DNA, 832 bp, Oryza sativa
  Clone ID: PAT_MRT4530_6472C.1
acgaccagccttgctccaggggcatcggcatgctctcctcgtagatccacaccatccggggcaattgaaaaggggaggggttgacaattcggggtttttgcacctcaaaaatcaacacagcacttgtagcttttttttttttttttttttttttttaagaaaaatcttttttttttagtgaatcatcataagactatcagagttcatcatttattcaccacatatatatgtttccaagcaaaaggaaacactaattatataggtaccacacaagacacacaaggtagctatttcttagtggccagtcgcggggttcataggataactcagccagtagcaaacaccaccaatgccaatgggaatgtctacattgcaaaacgccgggaggctcgccgccacgcgtttcatgtcgcctctccggcagccagggaacacctcgtccatgggttgccctttagcgggtgcaccgagctccttgtacattccaaccaacatgtggctcagcgcggggcacctacagaagctgtcgtcgatggcggcgagctgccggcagcagtcttgccggacttgctcgtccacggcaccgccggcgcactggcgcttcgccagcgcccggcagcggggcagcgggtacatcgggtagccccgtccggcagcgcatagctgcccgggggtataaaccacctggccacggtgatccgccattgtcgtcgttgccacgagcatggagacaactaccgggagcaacaccgagaacactaccttgatgaaagccattttctttctattgttgttgcagaaaattttcccggccggggccggccggcctcga

SEQ ID NO: 63494 - DNA, 198 bp, Oryza sativa
  Clone ID: PAT_MRT4530_64730C.1
atgacgggtgggctcccgacggtgcggggcccgggcggcagtgagacgggggtgcggccgtgcgggaactggaaaacgatggcgatcacgcagccgcattcacaaacttctccggacatcacccccctgaactcgctggagacaatcaaatcttctttaatggcatatggggacgtcattgctaagtgccccatgtaa

SEQ ID NO: 63495 - DNA, 978 bp, Oryza sativa
  Clone ID: PAT_MRT4530_64731C.1
atggctgcgccaatccccactcttttcccccaaccccaagcaacgacggcggcgaatgcatatgaaggcccactcctctctcccccaagcgccaccaaggcaccaagctcgaacggcaggcaccatgtcctagcggagtcagaggcaggatggaaaggaaggctcattcagcaggcgggaaggaaaacactggttacctcagttttgagttctataccaacatacttcctcactgccttgaaacctcccaagcaattcattcaggacatggacaaaatgagaagaaaattcctctgggcggggcatcaagagctcagtggtggaaagtgcaaagtgaattgggaaaagtgggaatgtccacacaaaccgtggattggtacgcctccgccctgtgatgatcttgataggaagattttcgctacggccacaatggtctcaatcggtaatggtaggaaagcagatttctgggaatcaaattgggtgggacaccagccactcaaatatcttgcaccaacgctcttcactcattccaaaggaaagcaccgaacagtacacaaggctttgagcgataatcaatggatcagggacattaggcatgacttaaccttggcgctggttcaagaatttgtccaagtccatcaacagatttgggaaagtggaataactttagtagaggacaccgaagacactatcctttggaaatggacaaacaacgacaagtattcagcaaaatcggcatacatggctcagttcagcggcggaactggatcaagagctgccaatctgacctggaagtgttgggcaccatcaaagtgcaaaaatttcatgtggctactactgcaaaacaagatttggacagccgatcgtctacaactccgccaatggcccaacaattacttttgtcagctttgctacaggaacttggagacaacgcaacacctcttcaaagactgcccctacacaaaggaagtatggtag

SEQ ID NO: 63496 - DNA, 369 bp, Oryza sativa
  Clone ID: PAT_MRT4530_64732C.1
ctgttggtgatggctcatctgtactttgggtattgggtggattatagtggtacttgcatggctaatgatgccaaggctgaaaataaggatgaggggaggcaagtcaatggactttgtgatgtcactcgaagaccctagagtctgatgatatggttggagggcaccgaggatgcaacattttctgtgttggtgtcatagactatcgagcgctcggctttggaacgtatgattgctctaagccacttagtattgtggggaacctataggataactttcttggcaggatctcactttgttggcgcattaccattggtgctgggctggggtgataacccaatcgacactgatcgtcgaccgatgatgatgaca

SEQ ID NO: 63497 - DNA, 495 bp, Oryza sativa
  Clone ID: PAT_MRT4530_64733C.1
caggaagccatgggagccacgctcgacgagcccgaccacttttacgaggacgacccgacgccgcacgggggaggttacaaactgtttatcacctttgtccgaccgctaccgtcctaacatgagacctggtacccttgttccgctgcctccaccttctataaggccgctcactactccgacgactagacctccgcctactcgcataactctaaaacgtatgccgtctacagttggcgatccacagcatgagcagctaaaacattccgggctactttttctttagatacctgccgaatagcaatcataacatgtcctaacttaactctggctatggaacattcacatatttacgatattgtttagcgcaacaactgagggagaataacacctacgaatgctgctgtgagctggatggcggaagcactgagctatgcgactcgggttacaggacatctacagatacacttacatgaattagacatacgtcgacgagag

SEQ ID NO: 63498 - DNA, 302 bp, Oryza sativa
  Clone ID: PAT_MRT4530_64734C.1
tttggcgctcgctctcgtagccaggtgcagagattattggctcatacatctactagcaacaggggaatggagagggggggtcgtccgggagggctacatctcgcaaggtggctgggtggcgccaatgctacctaggacaggatacaaagtttgcaatgataaccttcttattgtggcgtccatgctaacgctgtttgatgtggagtttctcctatccagtaaagttgacagtgtccaggatggctgaagcctctactcatgcattggattgcacggtgctgatgatcacacacttggtagta

SEQ ID NO: 63499 - DNA, 1749 bp, Oryza sativa
  Clone ID: PAT_MRT4530_64735C.1
atgcttctcctggccgccgccgtgttcgttgggtggctcatgatgtgggtcatgttgccgaccaggacattcagctcgacgtgggcgccgacgctcgcctcccacacaaattccacctactttggcaaacaagaggagtattctgtacgagaatggcggcctggaggagacctgtgctggtggcaggcgaagctggacagagcagcgctgcggcttggccacgttgggagcttctgctgcgcgttcctgttctttccagtcgcacgcggctcgtccctgttgccgctcattggcctcacgtcggaagccagcatcaagtaccatgtctggctgggcaatctcgttatgctcttcttcacagctcatggactctgctacatcgtcttctgggcatcgactgatcaaatccacgagatgctgaaatggacaagaacgaaagttgcaaacgtccccggggagctcgcgctgctcagcgggctggtgatgtgggtgacggcgctgccgcgcgtccggcgccagatgttcgagctcttcttctacgcgcaccacctctacgccctcttcctcgtgctcttcgcgctccacgtcggcgtcgccttcttctgctccatcctgcctggcgtgttcctcttcatggtcgaccgctacctccggttcctgcagtcccgcgtccgcgtccgactcgtctccgcccgcctcctagcgtgcgacgccgtcgagctcaacttctgcaaaagcccccatttgacgcacagtccgatgagtacggtgttcatcaacgtcccatgcgtttcgcggctccaatggcacccattcacggtgacgtcgagcagcagccttgagcctgacaggttaagcgtcgtcgtcaagagagcaggaagatggacggagaagctgtacgagacgatctcgtccctgccgccgtcgcagcccgggcacctcgacgtctcggtcgaggggccttacagccaggccacaccagcaagcttccttcagtacgactcgttggtgatgatcagtggcggcggcggcatcacgccgttcatctccgtcatacgcgagctcgttcaccggagcggcacggcggcagaagccgcgacgccgagccttctcctcatcgccgtgttcaagacgtcggctgacctggccatgctggacctcatcgtccctgcctccggtgggttctccgacatctcccgcctcgaactgcgcatcgaggccttcgtgacgcgagaaagcgtgccctccgcgggcgatgtcgtcgcaatcgcgcacaaggtgcccgcagaggaggtcttgttcaagccgtcgccgtcgcacgcgcccatcgccccggtgctcggccacaacggctggctctggctcgccgccgtcgtctcctcctcattcttcatcttcctcttgctcgtcggcgcggtgcagcgcctgtacatataccccgtcgacggcaacagcaaccgcgtgtacccgtgggcggcaaggacgttgctaaacctgctgctcctctgcgtcggcatcgccgtggcggcgagcgcggccgtcctgtggaacaagcggaggagggccgaggaggcgaagcaggtcgagaacgtggcgacgccagcgtcgtcgccggcaacgtggctcgacaagccgcgtcgtggggacgcagaggtaggccgtcgtcccgatctcagaagtacgatgcaccgttcaatcttgttctccttttgggtcgaattggttctgttacctttgaagagtgcgtga

SEQ ID NO: 63500 - DNA, 126 bp, Oryza sativa
  Clone ID: PAT_MRT4530_64736C.1
atggtgcacgggctagggcagcagagctgcgagcaacagcgcaactggcacagctgcggctgtggcaaagcgggtgtgacatcgcatcggatcaccacgcgcggtcagcttgccctcatccactag

SEQ ID NO: 63501 - DNA, 333 bp, Oryza sativa
  Clone ID: PAT_MRT4530_64737C.1
gtgcagtggaagtaggtgctaataagccgaaggaacattggcgacgtagcgtgcgtcaatgttgaggaagtagtcgatcgcagcagcccgaccttctgctcctcgtgcgttcgcctcactgtgctaccacgccaattagcaccgcaaaccagcggcgcctctacaggtatccacacctgggccttcgaggcccataagagtcctactcagattcctatccgaaattcatgtacactcggctgcaacccgaaaactccttttcggtccacatgtcaacagcggctactagcagaatatattgacccatcagacatacataaagatcatatcggc

SEQ ID NO: 63502 - DNA, 637 bp, Oryza sativa
  unsure (1)..(637): unsure at all n locations
  Clone ID: PAT_MRT4530_64738C.1
gccaccgcgattcctcgcattcgtccccactccccagcggcaccgcatccgagccagcgcgacctcctcctcgagccagtggtcgcccgcccgcccgccgtcgctacctcctcctcgagccagcggctggcatagatccggttgtcgatgtggttgcagatcacggacgacgtcggccaccaggtggatgaggtcgagggaggcctggcggcgctgagcaacgatgtccaggatgcgtcagatggtgctctccgggccgggatccttctctctcgcgcctcggtgtcgtcgacggcagcgtgaggaggccacggggcacaggatggagcacgcatgggctagcgagaccgcgaggtcgtcttaggtcgtcgtccccgtctcccccgagctgccccgttgtcgcttcttcctgtgagctctgttctttgacccaacaactatnttgnggtttagtctgtggcaagtgttctgctccaaatcactcgagagattggtgtcgatctgtaggtatgattgactgatttatgccctggattgagagagtaatatgtaattaggtgctttcttggtcattttttcctggggatttaactggcatccgnagatttcctggatttgggattgatttactgcttga

SEQ ID NO: 63503 - DNA, 819 bp, Oryza sativa
  Clone ID: PAT_MRT4530_64739C.1
ttatttcctctccccttcccacgctccgccgccgccaccgcgattcctcgcattcgtccccactccccagcggcaccgcatccgagccagcgcgacctcctcctcgagccagtggtcgcccgcccgcccgccgtcgctacctcctcctcgagccagcggctggcatagatccggttgtcgatgtggttgcagatcacggacgacgtcggccaccaggtggatgaggtcgagggaggcctggcggcgctgagcaacgatgtccaggtatggtgcttcttctccacctctctccctcatctcaggatgcgtcagatggtgctctccgggccgggatccttctctctcgcgcctcggtgtcgtcgacggcagcgtgaggaggccacggggcacaggatggagcacgcatgggctagcgagaccgcgaggtcgtcttaggtcgtcgtccccgtctcccccgagctgccccgttgtcgcttcttcctgtgagctctgttctttgacccaacaactatttggggtttagtctgtggcaagtgttctgctccaaatcactcgagagattggtgtcgatctgtaggtatgattgactgatttatgccctggattgagagagtaatatgtaattaggtgctttcttggtcattttttcctggggatttaactggcatccgtagatttcttggatttgggattgatttactgcttgattcgaagctctgtttcgttaatataatggcgagaacttgaactccatctatttaagacatttttttttgtttcagctctctggatcaaattatctgagagtctcttgattcc

SEQ ID NO: 63504 - DNA, 222 bp, Oryza sativa
  Clone ID: PAT_MRT4530_6473C.1
atggccgaaggagaagcggtcggcgatggtgatggattggtggaagttgcacctttgaccttaggggcaaacaccgtctgggaagactatgcggtacacctgagtattgtaacgagggctgcggatgatggagccccaaccatgggcggctactccgtagtcagatctaactttgtgctaggcatcatgatgaaccgcgaagaaccacaggctcgcactgat

SEQ ID NO: 63505 - DNA, 1777 bp, Oryza sativa
  Clone ID: PAT_MRT4530_64740C.1
atggcctccctcctcctcctcctcctcctcgtgctctccctcgccgccgtccacaccgacgcggccgcgttcccgtcgccggcagatagcatcgtgaggcagctgtcgtcggtggtgaaatggccgcgggttccttcgtcgtcgtcgtcgtcgtcgcacgggcacaagcagccctcgcacccgcagtacgatgggggtgtggctctgcagtttgagagcggctactttgtggagacgctcgtggaaggggacaagcttggcgtcacgccacacaccattagggtgtcccctgttgagggtggagagctccttgcagtggactcggcacatagcaacattgtgcgaataactccgccactgtccgagtatagcagaggaagactggttgctggttctttccaggggcattctggccatatagatggcaaaccaagtgatgcacgattcaaacgccccacaggcgttgccgtggatgatacaggaaatgtctatgttgctgatacagcaaacttagcaattcggaagattggggaatcaggagtgaccaccattgctggtggaaaatcaaacatcccaggttatagggatggtccaagtgaagatgcaaagttctctactgattttgatgtggtatatgtgaagaaaatgtgctctttgctggttattgaccgtggaaatgctgcacttaggaaaattgcccttccgcaagaagattgtacctaccaggatgcaactcttctatcgtcagatatcatattggtcattggtgctgttgttgccggatatattttctctgttgtgcaacatggatttgggtcatcaactgctgaaaagatcgaagcacctgaagatgagcatcaggagagcagcaccgtgggaaagccacctttggttgtggagagcctgaaagaggagccaagtgctgggtggccttctcttgggactcttattggtgatctactgaaacttgttattgaaggggtggggaatcagcttctcaggctcgtcccatcacgcctgcaacatgggaagagaaaaacagacctcactccactcaaagacaggcttgtgatgcctgaagacacagaggagaccccagtagcccagaagttaagtagcactccaatgagacccgagacactccatggtcctaacccagtaaacgaaacagcaccgaaggcccagaagagtgtcaaatcatccaaatttagggattctacgctgtcaagcaagcacaggtcctccaagaggcaggaatacgcggagttctacggttcatccgaaacacctcaagtgagctcaaaggtcccaaaagatcggctacgccaccgccaccgggagaagagtggggaagctgtttatgggactagtcatccggagcccaagcctgcggaagtgaagcccgcagactacagtgacccaaagtatgatccctacaacatcagaagcaaatatggtgctgacagcggctacaggtactgatgccccgttcctgccatcgttcggcatctatctacccccagtgtactgatatcaacttccattagtcgttgtgcaaaagcacaaagctgctgccggtgcttatgggtcattttctcaccagttgtaaccacccataagatgagatgcggcagatggtcattctagttaggtggtgatcctatatcaatttggcatccggaatccctctatgcggttcaggggaaagccaaaatgtaatttcgcgcagaaagcaacccgtagcctggtagtaattttgatctgctcaatacctttc

SEQ ID NO: 63506 - DNA, 210 bp, Oryza sativa
  Clone ID: PAT_MRT4530_64741C.1
atgatggtcgatcaggtgcgcgtcgtcctgccggacaccgcgacgccaatgcaaggcccggtgggcgtacgcgtgtgcactgtttcggcaaagtcgatggcgtcgtcggcgtgcgcagctcatgctccgacgctgctccgacgaagtcacgccggtggtgtgcgcatccggcgaggccgagtcagcgaggctcgtgtaaatgaattagag

SEQ ID NO: 63507 - DNA, 222 bp, Oryza sativa
  Clone ID: PAT_MRT4530_64742C.1
cgcgcatgggggcagagagaagcgagcgcaccggcagcgggggaggggaaggagcgtttcatggcgcatctctctctcgcgcgctcgggtgcagagcagaagcgagcgcgggcccgcgccgcagctcgcgcggcgctgtgcgggacggagaaggagcgcggggcaggagaagtgagtgcgaccgcatctggcggcggcatcggtagggcggatgggaactaa

SEQ ID NO: 63508 - DNA, 386 bp, Oryza sativa
  Clone ID: PAT_MRT4530_64743C.1
ctgaaaaagcctggctgcatctgcacatttatgtatttgaattctttcgtacaaaagaaagttagttacaatttcagattcctttaaatgcctaccattaggcgtcagttataggtcagatccttcactttcaattatgtatttgttaaactaatatatacgaatcaaatgtggaggcaaataatcaaatactttatccgactacaatttcaagtcgataactgtatcaccttcaagcctcattactgctcattcctatgttgatggcagactccgaattaagctcggcgatgcaagctcatgattgaggcagtgcatgctctcgctgacatccggctgctctagcttccactttgccgctgattgcaagcacatcggtcgcgacc

SEQ ID NO: 63509 - DNA, 773 bp, Oryza sativa
  Clone ID: PAT_MRT4530_64744C.1
ctacatcccgcgggatacacgcagccccattggaaatttcgaatagacggtcaagagtacaattgtgacggcaggggatccagaatcacatataacatcctctgcttcctcagctccacctatgaggaccaacgacaagagtgaattctgggcggcaaatccaactgcaggcacaacatgtatgtcaggttgctgagtcgcaatctcaggccccgctcccaccgccgcccgccccggtcccgccgccgcctgctcccgctcccgctcccaccgccggccacccccgctctcgccggatccgagcaggacgaggcccgccaccaccggatttggacaggacgaggcccgccgccgccggatccgggagggacgaggcccgcgtcgccgccccgtcgccgcccaatcgtcgttgtcgtcgggatcgtcgttggggtcgtcgtcgcgccgctctcggccgcctccgcccaccggatccgggcgcccactcgtcgtcggggttgtcatcgtcatcgcagggtcggcggagacgtcgagccgctctctgctgcctccgcccgccagatccgggcgccctattgtcgtcaccgcccagtagtcattgtcgtcgtagtcggggttgtccgcatcggggtcgtcgtagtcgtcgcgcagctttcggccgcctccacgcaccacgccgctcccgccagacgccaccgagcgccttcagctgccgctcaccgtgcgccacgccgctgtcggccgccggcgccgccgctcgccatgcgcctccg

SEQ ID NO: 63510 - DNA, 2005 bp, Oryza sativa
  Clone ID: PAT_MRT4530_64745C.1
gaaaaaataaaattcggcaggtaaataagccggggccgaaggaagaagaaaatcacaggaaatgccactaccggcgttcgtggcggcggcggcgaggctcgccgtcctcgtggccgcggcggcgacggcggccaatgccgcctcctacgcgcggtaccggcggcgccacctccgccgcatccccagccccatcgacgagtccgccgatcccctcgccgacttccgcgcctttccctcctccgacgctgacgactcagaggaggataatttcttctttgggctagcaacagcgcctgcgcatgttgaggacaggctagaagatgcttggctccagtttgcaactgaaacttcctgcgatgacaatggaaacgtgcgcgaccagaggccagtagatgcactgatggcatctgctgctggtgatggaggctcccagcaatcttggaggtcaacaggtggggaaaatattggtgatagagagcagaggaaaccacttagggtagccatggaggctatgctcagggggtttgaaattcttgctgagagtggagaatctgctggcggcgataactgcagccacaatgttgctgcttggcataatgttccatgcccgcaagaaaggcttagattttggtctgatcctgatgctgagttgaaacttgctaaggagaccggcatcagcgttttccgcatgggggtagattgggcaaggttaatgcctgaggaaccaaccgaagaattgaagagctcagttaattttgcagcacttgagcggtatagatggatcattcaaagggttcgcgaatatggaatgaaagtaatgcttactctgtttcatcactcacttccaccttgggctggaaaatatggcgggtggaagatggaaaaaactgtcacctatttcatggattttgtgaggcttgttgttgatcgtgtatccaatttagtggactactgggtgattttcaatgaacctcacgtttttgtgatgctaacttattgtgccggtgcttggcctggtggagaccctaatgcaattgaagtagcaacatctactctgccaactggtgtatacaatcaggctttgcattggatggctattgcacattctgaagcctatgactacatacattcgaaaagcaagaacgaaaggaagccaatagttggtgttgcacaccatgtatcgtttacaaggccatatgggctatttgatgttgctgctgtcgcgctagctaactcattgaccctttttccttacgtggatagcatatgtgataaattggacttcattggaatcaactactatggacaggaggttatatcaggacctggtctaaagcttgtggataatgatgagtatagtgaatctggtcgtggggtttatcctgatgggctgttccgcatcctgattcaattcaatgaacgatataagagattaaatataccttttgtcattactgaaaatggagtttctgatgagactgatctgatacggaaaccatatatactggaacacttgttagccacatacgctgccatcattatgggtgtccgtgtacttggttatttgttttggacaacatcagataattgggaatgggcggatggctatggtcccaagtttgggcttgttgctgttgaccgtgctaataacctagcacggaaacctcggccttcatactttttattctccagggttgttacaactggaaaaattacaagacaggacagaatgtctgcttggagggagctgcaacaagctgcagttcaaaagaaaacacgtccatttttcagggcagtggataagcatggtcggatgtatgcaggtggtctagatcggcctattcagaggcccttcatattgcgggattggagatttggtcactataaaatggaaggcttgcaggatcctttgagttgctttataagatgcatttttgcaccattttcacgccaaaagaagattcactacatagaagatgatgttatttcttattctattaactga

SEQ ID NO: 63511 - DNA, 411 bp, Oryza sativa
  Clone ID: PAT_MRT4530_64746C.1
atgcaaacttgcattgcagatagcgctgccgcatatgcacgccggccacgggccacggctgctgctgctgctgctgctgcgcacagtactgctacggcggctcgcccagttttcatgtgggttaaagatcaggattggatcgtccgccgatctgcctcctcggccttgtcgcgccgagcgaactgcggcgaaccttctctgcgtgcacacggtcgtgcgtgcacagccgcccgagtgcccgacgagcatgctgttgtctacggctgcgcctcgcgcgcgcgcggtggatacacacatatggtcacttgccacacagcccacacggccacaccccgacgagtcgccagccaaggctggaacctggcagctgcgtggcccgcagtcttgcgccgagcgagccgcgagaagtag

SEQ ID NO: 63512 - DNA, 581 bp, Oryza sativa
  Clone ID: PAT_MRT4530_64747C.1
tttgctcactgctatatccaaggtgaggaaaaaaagtgcaaaattacccaataaaaacaatttgtgcttgcttgcatagtgtggatatgacccaagctctttgggttgctggtctggaacatgaattagttcccaatccgaagggattgggttaaagccctccttacatgaagaagcctaatggtttagggcccctttgatttgtaggaaaaacctaggaattttagaggatttcagtcctatagaaaaatttcctatgaaggcctttgaaacaaaagattgaatcctatcctatcctttgaaattcctatggaatggacgatcttataaatattttggaggaaacttagcaagaggtccaacctcttggaaaatttcctttgagtctatctctctcatccaatttctgtgtttttcttgcggtccaatcaaacaatatttcctgtgtttttcatgcgttttgcagtcctttgttttgcatttgcatgcctatcagcatattgtgtttttcctgttcctccaatttttcattcctactcaaagggccctactgtgtgtggctttgttaagttccacatcgt

SEQ ID NO: 63513 - DNA, 1098 bp, Oryza sativa
  Clone ID: PAT_MRT4530_64748C.1
atgagcttcgtgttccgggggagcagaggtgacatcgaggccggaggcttcccggggttcgccccggagcgccgcgccatgcggattcatgcgggtggtcggccggtgaacagcaacctggcttttcttgtcactgttcttatgttgttcatggtactgaactcacaccagatgtctccgaactttttggtttggctggttttgggtgtgttcctaatggccaccagcctaaggatgtacgccacatgccagcagctccaagcgcaggcgcaagctcacgctgcagctgccaacggcttccttggacacactgagctgcgggtgcatgtcccgccgaccatagctctcgccacacgaggccgtttgcagagccttaggctccaacttgcgctacttgaccgcgagttcgatgatttagattatgatgcccttagggccttggatgcagacaatagccctcatgctccttcgatgagtgaagaagaaataaatgctcttcctgtattcaaatacaaggttcaggcacatcagggaagtgcctctttccgaaaaagtgatggaccatctcaaccatctgtttcttctactgaatctggcaatgagaaaaagcaggatcgtttcaaggctgatgcaactgacaacaccctggaggatgagttgacatgcagtgtttgcttagaacaagtcgttgtgggtgatctattgagaagcctaccatgcctgcaccagtttcatgcaaactgcatcgatccatggttgcgccaacagggaacatgcccagtttgcaagcaccgtgtaagcgatgggtggcatggtgaagcagatgcttctaacatggttgtgatatttttggttgacctgtaccctgttcagtatgaactcacatacaatcctttttactctgtttccgtggggaaattggcgtattatgggtgtttaaggctgaagatcagtagaggatttaagatccaagagtagtggtctggtctctatttagtcttaagtaaaaatgatcttaactgttagtatatcacaagtaaaaaggagaaactgatttatgagttctaccatcattaaaaaaaaaaaaaaaaaaaaaaa

SEQ ID NO: 63514 - DNA, 381 bp, Oryza sativa
  Clone ID: PAT_MRT4530_64749C.1
gcgctttctatgctgtgccattcaatttctagggcacgtgtattggatgagagacctgacataaagtcccagtacagtgctctcctttaccaacttgttgtggacccaagtgacagggtctgttttgaggccatactctgtgtgttgggaaaagttgacaacacagaaagcacggaggagagagctggtggatggattaggttaacaagagaaattcttaaattgcctgaggccccttctgtagcatcaaagggtattctgtcaaaatctgaaaaatcttctaaagcaaggcgttctcagccccttattaaacttgtaatgagaagactggagagctctttttcgtagcttttctcgtcctgttcttcatgctgctgcaag

SEQ ID NO: 63515 - DNA, 2131 bp, Oryza sativa
  Clone ID: PAT_MRT4530_6474C.1
cgactatatacaaggcacgatatcattatgacatgattttgtacaaaatatatctaaccaaatgtttcttccgtcatcgcctggccaaaatatgtggcttaattcctatacaaacacgccaaagttctcgaattcgtgagaacatcaactgatgacgactcagcaccgcggcaaactgctcaatgcctcacacgggcaacacaagtaacaaacggagcgaaggagcttcctcagtcgatcaaaattgcgtacaatcaggcgcctctcaaaaactcacgagatggcagctgctcgtatcaccttagttttttctgcagccttctctctgccaaaaggcctgctttgttctgtggctccaaagctaaagcatgcctgatatcttgaagagcttcttggtgattcagaacagcttctcttgcgatccctcgtcgtagatatgctttaacattcagaacataaatgatctttttatccaagagtaaggcctgctcacaatctgcttcagcttgcttataacggccaagttccagataggcagctgctctattgctgtaatatgttgcatttgtgccattcaatttgatagcatcagaataaaattcaaccgccttgctccattttcgtcctttgaaagcactatttcccttctctttcaacaactctgctgcaccaaaatcagcatctctattgattactggtgcagttaccaacttggacgccaaaacgacttgttctttgatggaagaaaacatatacaagacattgcgaagaaggaatttgtctgatccatgtgctgctagcaatgaaagagatataggatgatcattgtgacttcctaagggaatcacagcctgacagcagcctgaaagtgtagcaatgcctacaaatgcactcattctatcttcaaacccaggtgaaagtctttgccttgcattcctctttaaaggatatccagctgtggttggcagaactaaaattccagtatcctttaaaagattcttgagtgcagctcgcaattcatttcgtacaatgtataaagatttgatgttatcacttttcgaattgacagcttgtagcacacgagtagaggtatcaagcccaagcttgggttttacagtattaacccaatcctcgtggtttgtcttgaattcatatctgtttgaatcattatgcataacaaaacaatctattgctccctcgtttctctgtaataacagcataactgttgagagtgctttcaaggctgacattccttcgagcatctccacagtgggttcacaaaaatccttcaggctaggtacatgtgaactgatatactcaccaatattgatgtgcttaggtggctgatatcctggtaatgtctggatagcattttctatgacatttactgttttctcgttggggaccttcagcaactgtagcagctggtaaaagaacatctccaacacgatgcagaacacttggatctcgtgcaaaccatcatgatagtcttcattgtagaatattagcacaagagcaaagtcgacaagttgtgcagaaactgccacagcagaaccactgcatgatccaccagggaagagtgatggagatgctgggttgattggtgttccattgtgtaaatttcctccagaaacaccaaatccgagctcatccatgactgtgctaccaacgtaggtgcccccctgcttctgcagcatcgtgacaggaaccgccgtgcgcgtggctgccttgtgagtcctcttccagtccggattcccaaacccagccacatagccctcgatctcgaagttgtcgctggccgcgaatgtgaggcccgagagtagctggcgcgcggcgggaggcggaggctgcggcgccggggcgatctcgaagcggtagcagaaggcgccgaaatcggggggaacctcggacctgtcccgcagccaccggcgcctgcgccgcgcggcctccacgaagacgatggcgccggcgatggcgacgcccgcgaccatccacacgcgagtgctggtgtacccgccggtgcctccgccgcccgatcgcgccgaggagtccatcggcgaggcgcgcgcgcttaggcagcagagctagggttttaggtggggtttagaggagtattcgagaaaacatcgca

SEQ ID NO: 63516 - DNA, 251 bp, Oryza sativa
  Clone ID: PAT_MRT4530_64750C.1
ggtttaggtcacgcgagcttgtctccacaacctggtgcccctataagaaaatactgcgaactccgaacatctcttcaagtggacggccacttacagtccgcaacacgactaatgatatactctacacccaccattcctgtggctaccatcggcaattgaggttgagtcctcggataccatagccattatcccggccaagatccattacaggagctcctctccaccggacccagatcgttccagtacctctc

SEQ ID NO: 63517 - DNA, 594 bp, Oryza sativa
  Clone ID: PAT_MRT4530_64751C.1
caaaaccctcgcctcgccgtcgccgccgccgccgccgttgctgtctcccctcggcgaatccacggtagctctcccgctccccctcctcggtggtaggagtagcggaggagatgctcggggcctcgaggcgttccgtctgcaccgccgcggcggcggcggcggccgggtcacgccgccgcgccgccgccggcgtcgcctcctccgtgactggggattcctccgtctcgtcttcctcggcgcccccacgctcggtgattaatggccagcctggtgtccctcagcttcagaagaggttgctctctgtgcttgctgcgcccaagcttaccgggaccgacaatgctgcctccctcaagctgagggagggttcccttgttggcaggcgatatgaatcgagtgctgcagcagttgattcttctgatacgccacctgtggagaagcatgagtaccaggcagaggtcaataggctcatggacttgattgttcacagcttgtatagcaacaaggaggtggttcttcgagagcttgtcaggaatgcaagtgatgcacttgataagtggcgggatcttaatggactaatcctgatcttataaagga

SEQ ID NO: 63518 - DNA, 331 bp, Oryza sativa
  Clone ID: PAT_MRT4530_64752C.1
caggtaaagtctatgcagtgtgcataagcgcattaacagtcacactcacttagtcaaatgccaagagcgagcgaccgttgtacaagaggatgcattaattcatcacccgggtagtcctcatatcacacatctcctcaatgcaagtagccctcaacgaccaacccagcttttctaatttacgcactcatccccaactggttggcctggcttttatcgataccttaccaggtgggtcgacttcacaaaactaaacagtgcgcgcgaacgcacactaactcatcgatctctgttgaattgcacgcgaaagagcttaaattaataggatgaggag

SEQ ID NO: 63519 - DNA, 423 bp, Oryza sativa
  Clone ID: PAT_MRT4530_64753C.1
gggggaaaagggaaaataatttttttttttcggggggggttccaaaatattccctttccccaaaattttttaaaacatttttttgtgggaagtgggcccttttttaaattaaaaaaacccattttgaattgttgaaaaggcttcccaaattttttggcccaacttttttgacccggcccctttaaaggatttttccaaggtttgggcttttttttggggaggaaaaattaattgaacggggggtcctttttgaaataaaaaaagggccccccaaaaacaaaaaaggggcgcccttgggaagtttttcttctttgggggggggaaggacccaaccccctttgggggaaaaaatggttttaaaaacgtttccctcccccttttggttttcgggggggaagggttcttccaatggaaaaatttttc

SEQ ID NO: 63520 - DNA, 2374 bp, Oryza sativa
  Clone ID: PAT_MRT4530_64754C.1
tacacataagtgatggactgcaagagtgaatgataatagattcaccagtcactagatgcatgcattgcagatttaatttacagatgagaactccgaactttggagctcaaaaagaaaaaaagaactccaaactctaagcactatagggggttcacaaacacgaaaaagccaaaacagagaaataacaggaccgcagactcgagttagctttgtacaattttgtcgcctacctccaggttaaatataaatttttttttttttttttttttttttttttcatacaatcctctaactctttttctcgcgactttcttcacccctttacaagggggtgtaaaaacaaccagtctcagtatacattatcccacctttttgctgaaagagttgaaaggaacaaacgcaggaggcttggcctcaacaaacatgtgtaaatacttgctgaatcattactttcttcattgctttccaaaatgtggctaacttgatttgatttagtatggttcctctgcccttcttgccgatgtactgtgcttagcttcatgcgatctcatgacaccgttcttccatagcaaatggaagctaggtaaagattcttcgaccatttctccttcacatgctggctggggaaagcagatgtcctcagggtttcctgtgtttcatcagcaggctttcttctgggaatgctcaagataaatgccgcctggtcccatgtagctgctgttgcagttatgcgaaaaccattgtcccaacgccgatgtattccctcacttggatacaggaagtcaagctccacaacctgatctgtaaagccagcattccgggacatgaccactgcccaccggcttcctgcagtggccatagcagtgacatagaaaccctccttccacttcttgtttatccacttgaagggaaatgagtcgcttactttgtaggattgttgggcatattgcgtccctcttgacatgaccaccagagaactgccattgtttgcacctgctaatgaagtgatatagaagtttctctcccactgatccattatccattccttgtgaagaaaatgttgagaaagctcatatacttgagaagtaaatccagtgccagcatccattattaaagcccacagatttgaacaagaagccactgaactaataaacaacccatcttcatttccttttgtaatatgctgtgctaaccgaccatctgcaacattgtagtgatacctttgcttcataggccgtctggcattataaacactaatccattgagttgcaggcatgcccattctaatcttcttttttggctgctcatcatcatcttcgtccatcgttaggcgacctcttttttgaccaacctgatatataagcttctgagcaccatcagtgttgattggccttatgtctgggtttggaccaacaatgccatcaaaaagagaaatgcactttgcatagtttggttcttcatcaaactttaagttcactacatactcaataaattgccggaaaggttgtggacagaagcagcacaaagattctggagaggtcgccatttttttcttgcaaacaaggaaacctttattctctccctggtatccttgccaaggaaggcgaccccgtaaaagaaaaacaagtgtataggcaagggattcaagatcatctcttctgcttccagttcttcctaagtgagcatgcacactagcatagcgaacagttcccctaaagatatcaggcctctgatcatactcaacatgctcccccgaaccagtgtctttccacctagtagctaatccaaggtcaacaagaaaaagttttttctcttccagggttcctggggttccaagcaaaaaattctcaggttttacatcaccatgaacataccctttcgaatgcatcttctccaatatggagattgcttctatagcaatacaagcaaccatttcaacagacattgagtgggaattattattccaaacatcccacaggcttggacccaacatgtccataatcttcatgatatagtaatccccctgcctcccttttcaatgtgcgctcggtacaccatggcggccgctgggtgtgttgtaaacttgccactcatagggagctccataattgcagcctttgctggttcgatgttcaaattttattgccacctccaaagcatttgctccaggtgtcctgtcggtaacaccaggagaggaaatacgccgaccaacatatacttgcccaaatcctccctttcccagctttctatcaagtttgtaagtaggtgaattggcaacttggaccgtctcggggagcggcgtggagctcccgtcgtcgcccggcgcctcgccggccttgtccccgctcccgacgacgctgtcgacgtcgtccat

SEQ ID NO: 63521 - DNA, 271 bp, Oryza sativa
  Clone ID: PAT_MRT4530_64755C.1
ccggccgggacagcactcatcgagttcttccttactgctttctgttgtttctcatactcgcctcggaggtctcacggcttcgtcaaagccctctcactctttggaggtgatctccgcgaggcaagagatactcctacctggaggggcccggatggccgaggaagtccgcggatacaaaacataatcagagaccaggcgagaggagcctgcgactagtgggaacaatgcgactgactaccatggagcgagatggtatgctcgcggacttcta

SEQ ID NO: 63522 - DNA, 231 bp, Oryza sativa
  Clone ID: PAT_MRT4530_64756C.1
atgagatgggatgaggaggggtcgggtagaaggaggaggaggaagaaaggacaaagtcctgggcccaccatccctggccggtcagaccggctatacgtggccggtcagaccgccaggatgcagccggtcagaccggttcctagaggccggtcagaccgccaccaccaggccggtcagaccgcgcatatagcgccggtcagaccgcctggccccccagccgactgtgcatag

SEQ ID NO: 63523 - DNA, 591 bp, Oryza sativa
  Clone ID: PAT_MRT4530_64757C.1
atggcggatggtgttgcccagctgggccacgatgctggtgacctcgaaggagaagaagttgcgcgcgtatcctgtgaagagggattcgaggtccgacttgatgtcgggtggacatggccacgcaaagccgatgagcaggatgaatcctctggcgatgtcggcgaagcactcgtggccgagctcgttttgttcatgtggatgtgtatgttcatagatcagcagacatccgtgtcctgcatgcacaatcaaagacgccagcaacgaggcggtgatggtcagatggtggcggtaggtgacgagatcaggctcgacgccgtcgtccttcatccgtcggagttggcaaggacgggaaggagctgcgcgatttcccgggtctccgtggtggcagacggcgtcggagagcgtgagcagcgtggcgacgatgctcccccgcagccagctgtcacgttgaataaaaccaaaactaaaaccgcctataagatgaggatagcaaatatcaggtataagacgagggaccttcgatgtacttcttccttcgagaaacatgaaggaattatccagcccactgaggttaaacacgatgtagagttg

SEQ ID NO: 63524 - DNA, 261 bp, Oryza sativa
  Clone ID: PAT_MRT4530_64759C.1
atggagtggaccggccgccggccatctctctcttgcgcgctcgccgcgccgcgccccgcgcaaatccccagatccacggccgtccgcccgccgtgcgctaccccgttctcccgcgcccactgccagaccacctgcaacaccatcccctgcgaccagttcgaggaggccttccaggccgtggagctctggatcgccgaccgcgccgtcctgctcgtcgagaactcatcacacgcacatatgcactataatcaaacctactag

SEQ ID NO: 63525 - DNA, 274 bp, Oryza sativa
  Clone ID: PAT_MRT4530_6475C.1
atgacggttgtgacggttggaatggttggtaataccctccaactatcgtttgggcttcatctccaccgtccaaccaaaacctgaatccaacggaggcgagggaggttcaaggggcttgcccaaccagcccatctttcagctggcggcctcctctgttgctcctttatgtagacttgcgaattttggcctagtttgacgtgtcaactctgagttcttggcccattcatacataagtctgattctcgacatcgttcgattcacttatcgtttgagt

SEQ ID NO: 63526 - DNA, 212 bp, Oryza sativa
  Clone ID: PAT_MRT4530_64760C.1
atttaaccacagaaggtgggaaacattacaactctgaacattaaaccttttaaaccaggacacttgtgaaaaaacaaccctacaaggcttacataacttggctgtagaatgcaccgggcaatgcaacgagcccccaacacgaggcattcacataaggacctgtaacaaaaaatcaaccctgtatgacaccatccaccataccgaaaacatta

SEQ ID NO: 63527 - DNA, 397 bp, Oryza sativa
  Clone ID: PAT_MRT4530_64761C.1
ggatggtgaaaggctcatttattttaatgttttattacaaaaacatgttatatcattttttatattttattatttttacttcaaaaggggggatcgtaaaatcatgatttgggggggtgttaaaaaacaaaaaacgaccatgcaagcgtggattaaaaacgaaccctgttttgctaatttaaacatacaaaaaaaaagggggaccctttggttgttcaaaaaccaacaaggctggtggataaaaaaaaaaaaaaaagaggggtgtaaaaaaaaaaaatacatgtttcccatgtaaattggcccggaaaaagcttaaattaatagtgtacgggcaaggtttccaaaagggggtggggggaggggaaacttgggggggtggcccaatttggggggggcc

SEQ ID NO: 63528 - DNA, 1442 bp, Oryza sativa
  unsure (1)..(1442): unsure at all n locations
  Clone ID: PAT_MRT4530_64762C.1
ctcatagncatcacattagtatgcaggatattgcagtaagttaaggcttacacccttacatgtgcctacaatcagtgtattaactaaccaagcaggattcaatcatccataagcttatgctgccttgtctcacgttttaccagaagcattactagagtgtggataacaacaattcagtttcggctctttcagcagattcacatcgagaaacatatgccttgtcatctatttccatctcgattcaggaatctatgcctggatcctgaacacaaagccatttgaagaatatagacaaggttgatcagagtggtggattttgcttcttttaacaagaaaagcaatgtctagatcacagctagtcttcactctcaccggcgcgatattgtcaatgtcaaccaccagaacttcgatacttgcaaatacatggaaaggaaagaaatgggttaagaccaaatcctaccatttgaaccttgaaacttcaaaaattcagaagtcatctctctggagcatttttttgctggaatctgtacagcatcataatgagcaaaaccatcatatagaacttggattggatcttcttttccatattgttggccatattcagcaattgttattaaaccaccagcatcttcatcatgcatgtaaaccgttattggcatctcaagaacatgtgaagccatgaataattctggttcaccgccccacacatgtggatgcctaatatgggacacatatgtgtcgaaatctccctcaataaaccattccgattcttcccgcctcttaacaaattcatcagcaaccattgccctcaattcgtcagctagctttctctgaagatcttcatttggtatgggtcttcctgccctaatgcatgccccatgaatcacagagcggaataagcatcttccatctccaggaatccctgttactgaataatccgtatagacttctttgccatgagttgaactggtagatgctgctgaattgctgatgcttatctccacaggaacctcagcatttgctattccagaaactgcaaaacctaagcaaagtccactggttgtacctcctattttttgatgcaaacctctccatttccagctcatactagagaaattgtcacgggaaggcatgtcgagcttcatatttaaactaccttctttgccagcgaaccaaccaaaccaaatccagcgaagaaaaaagaaagaattcccctcaattcctgcaaacaagacaaggagaagcagagacgacgctgacgcccccctgggtcctatgtaagctaagattcccccacctttgcccttcccttgggcggcgaggagaagtgaaggggaggtgaaaggaggagtgtgtgcttcgatttcgcttcgacgcgggaggaggaggaggaggaggatctcgcgaagtgtatttgctgcagcgagggaaggggatgccat

SEQ ID NO: 63529 - DNA, 318 bp, Oryza sativa
  Clone ID: PAT_MRT4530_64763C.1
atggcgatggcggcagcacggaacctcccccactccctccaacctccagctctggccggggagcctcacaatgccctagctggggaaggggacttcgttttacccaccggatacaaagaagggcgccgggacatcattggtgacggacgtggccatggcgatgcgcgcacatgggagctgtggcagagtggcggcttggtgagggcggttctcctgtccaaaggcacgcggcatagcagcgaccggaggggcggcgcggcgcacgggagagaggcgcgaggttgggccgagatcgaacggttggcggacaatgaatag

SEQ ID NO: 63530 - DNA, 1883 bp, Oryza sativa
  Clone ID: PAT_MRT4530_64764C.1
gcacgaggcccccccccctttttttttttttttttttttttttttttttttttgcacaaacgtaaggaaagcttatagctagatgaattaacagttacatgcctaacaatgaggcgagtttatcttttggactgaatagcctggatatttcctgcattgagtaaatacaatggatcctaggcctaggtcatgtctttgttccctttttttcttgacaaattgtacaggtaaaatcccaagcacgcggtaagaaatacagtgcttgagattaatgatttgactacaaaaactggttaatgacaggcatgccaaagtgctgctgcatcatgctgctgccttgcgcaaattcagagtaccacgatttccaggcttccacataatgagcaaaaagatcgcccaatgcttggttctggtattgtggtcgaaatgaagcagcaaggctctcccagttttgaacattatctgtgtgtcctttattaccattgtcaagctcttgttttcttgcaccagcagggtggaaaggcccataaacaaaaccacccttgctaccctgcccgagctgtttctgcactgacaatttgcagttcttcaaaatttcaccaccactcagtgtcagctttgctttctttgggattgttgagtccagtctgcttctgtttatgtcaatgttagtgagttcagtcccaaatgctctcttgttcgatatggtcttccctggtggaggtactgcgattgtgacaccattttcagcttttggtttccccgctgagcccaaccaccggaatgcaggtttccttgagtctgcctgttgtatcttatcaatgaaattcagtgatgacagcacgttagcaatgtcatacagtctccggactttagtgttctctgcgtgaccttctccaagtagcagctttgcagcttcatcaagtgagattgtgtcaacctccatggtcaggaagagtttcacgaaattctgcgtgagcaacccaagcgacttctccttcctatggtcagatctaagccggcagcgaggtgcgcctggcttgttgtcagaagggttgtcaactggttgactcagcttctcgctctcggtatcaccatcagcgtcacccatcttatcttcatcttcgtcatccgacataatggctgcagacggctcctccacgggcagaggagccaatccagacttctctctcaatgccctctccttgagttctcgcaatgccattgggacgccgccgaagcctatccaagaataacgattcttggccttcctcacgaggatcttctcacagatgaatcgaaaacaaatgtcagaatcaaatcgagcaagaaagaacaagaaccctgtccaggaaaggcggaggaagaaggaactcacccctacgctctcgagcacgttgacgatgtcgtagatccggcgcctctccacgccgagcctcctagccgcgtcgtccagcccgatagactccacgtcgtcgcggttgtacagagcgacgaaactagaaaacgcacaaaaaaattcggtaagaacagggaaccaaaacgccaaaatccacgaatcccccagatgcacgagagatccccacttggagcagaggaggccgagcgacttctgcttgcggctgtaggcgtggtcacgcagcttcccgcctctgccctcgacgaacaccggctgctggcgttgcgggagagaaggcaccgcctccgtcataaccacagcctccgccgcgtcggccggcgaagacgagggtacagcagccatcaccgccgccgtcgccatcgattctgctcgcgaggattggatcttggtgcgtccgcgggtgggagaggagagggaattctcgcggaagtattatagatggatggatctggacgggaagcgg

SEQ ID NO: 63531 - DNA, 617 bp, Oryza sativa
  Clone ID: PAT_MRT4530_64765C.1
ggcttatctccacaggaaccgcagcgtttggtattccaggagcggcaaagcctaagcaaagtccactggtggtacctcgtattttttgaggcaaacctctccatttccagctcatactagagaaattgtcacgggaaggcatgtcaagcttcatatttaaactaccttctttgcctgacagtccacaacggaactgccgacccactaagctaacaaagtacctcagactaggcgggtcagaagattttatattcctatgtagagaacaatcgacaagacccagcttcacattataactggatgtctgcgagcgtgaacacttccgtaatcccaaactctgtgttaatcctccatgaaactgactagattgggaatacatggtacgtttagaaggtcgccgcaaattgactgcagatgagtagagccgcatccggtccaaccaatatcagcagcgaaccaaccaaaccaaatccagcgaagaaaaaagaaagaattcccctcaattcctgcaaacaagacaaggagaagcagagacgacgctgacgcccccctgggtcctatgtaagctaagattcccccacctttgcccttccaaagggcggcgaggggaagggcgc

SEQ ID NO: 63532 - DNA, 1609 bp, Oryza sativa
  Clone ID: PAT_MRT4530_64766C.1
ctacggcggcggcaggctgcggcttggcggctcagcttggcggcccgccatccccttctcaccgacgacgatgaggcgaccctccctcttcctcaacgccgtcgcggcaggggcggcttggccgcctttggtggcgccgccgcactgcacggatccggtgccgccgccgacggcgagtggcggggccgacggatccgccgccggcgacgacgccgggtggctgggcgacgcatccggcgacgccgccgacggatccgctgggggcgatgacggcaggcggcgggggagacggatctggcgaggacgacgatggcgggcggcgggggagacggaagcggtggcggcgacgacggcggcggctggggcgacggatccggtgctgccaccagggtttcatttaccgcacggggccgcggttaccgcgccccggcgatggaaaaatgacatacaaaagcaactacgaaggaaacattttagaaagaatcaaggccttctcctagaacaactgatatcttcagatgaaaatgcaagtgacaaaacaaagattttctctttagatgagctcgaaaaggcaactaataactttgaccccacacatatccttggtcatggagggcatggtatggtgtacaaaggcattttatcagatcaacgcgtggttgcaataaaaaggtctaaggacattaaggaaggtgagatcagccaatttattaatgaggtagctattctctcccaaataaatcatcgaaatatagtaaaactatttggatgttgtcttgaaaccgaggtccctctattggtctatgacttcattcccaacggctcattatttgatattctacattctggttcaagcaaccgattttccttgtcatgggatgattgtctcagaattgcggtggaagctgcaggagctctctgttacctccattccgcagcttcagtatcggtcttccatcgtgatgtcaaatcctccaatatacttctagatgcgaactacactgctaaagtagcagactttggtgcttcaagattggttccaattgaccaaactcacattgtcactaatgttcaaggcacatttggttacctagatccagaatattaccatacagggcaactaaatgagaagagtgatgtatatagttttggtgtggtacttgtggaactactgctcagaagagaacctatttttacaacagtgtcaggatcaaagcagaacttgtccaactatttcctctgggagctgaaggcaaggccaatcaaagagatagttgcagctcaagtttgtgaggaagctaccgaggaagagataaaaagtgtcagttctcttgcggaaatgtgcttgatgctccgaagtgaagataggcctacgatgaagcaagttgaaatgactttgcagttcttgcgaacaaaaaggttgacgtcatcccatgctgcagcagaaaatgatgaagagatgcagtcattactacatacaaggtctgaagttagttgtgagtcattggctaataacttgggtgtcagtgctaatcctgagtctggaaatagccacaaatgctatagcttggagcaagagttcatttcatctattggactgccacgctaa

SEQ ID NO: 63533 - DNA, 264 bp, Oryza sativa
  Clone ID: PAT_MRT4530_64767C.1
atggagcctgcgaatttgccgtggtttcctgctgatttctctctcttttccggcgcaaaaacgtcggacgcatcagctatagccatcgcgatggactcgtggggaatagaccggcatgtgctcgcgctcttgcaggcgagcgggcggctcgagctgctgatgctgctgcctgccgggcctggatgctgtgccgcgccgcgccgcgcctgtcccaacgcgggcgaagggctgcctggttacttcacgtcatgggctaatgggtaa

SEQ ID NO: 63534 - DNA, 768 bp, Oryza sativa
  Clone ID: PAT_MRT4530_64768C.1
atgtccttcagccagcccgacgccttctcgccgtcgcagttcacctcctcccagaatgccgccgccgactctaccaccccttccaagagccggggcgcatcgagcaccatgccgctcaccgtgaagcagatctctgaagcgcagcaatctggcatcaccggggagaagggcgctcccttcgtcgtcgacggcgtcgagacagccaacgttaggcttgtgggattggtcagtggcaagacggagcggaacaccgatgtgtccttcacgatcgacgatggcaccggccgcctcgatttcatcagatgggtcaatgatggtgctgattctgctgaaaccgctgctgttcagaatggaatgtatgtttctgtcattggtagcctcaaggggcttcaggagaggaagcgtgctactgctttcgctatcaggcctgtaactgattataatgaggtcacactgcatttcattcagtgcgtgcgaatgcatttagagaacaccaaatcacagattggtagccctgcaaaaacatattctgccatgggatcctcatcttccaatggcttcagtgaaatgaccactccgacctctgtgaaatccaacccggcaccagtgctcagtgtaacaaatggatcaaaaactgatttgaacacagaagtgctgaatgttttccgcgaaccagcaaacgtggtagctattgattacctcgctgacattgggcacatatactcaacaatcgacgagtctcactacaagtcagcgttcaatgaataa

SEQ ID NO: 63535 - DNA, 615 bp, Oryza sativa
  Clone ID: PAT_MRT4530_64769C.1
ccagaactaaatcaacatgaccatgcacacagggggagtgaaatggttctttacagcgagcaaatggaagaggatgtgatatgggaggatgggcaccctttgatatggaatccaatagattgggagtaccaaccgctcaatccagaaacacatcaacatgaccatggtcagccaatggggagtgaaatggttctttacagcgaccaaatcgaaggaaacgtgatatgggaggatggacaccctttgatatggaatccaacagattgggagtaccagacgctcaatccagaaccacatcaccttgaccatggtcagcacagggggagcgaaactgatctttacagcgatcaagtcgaaggagacgtgatatgggaggatgggtgcactttgatatggaatccaacagattgggaataccaaccgctcaatccggcaccacatcaccatgaccaacacagtgggagatatcacagaggcggtgacacgtactcggaatggggttatgatgctggggagccaacttatggcgcgaacgaagggagacgaaagggtggcatacattcagagtaccagtcgaagccagtaggatcgtctgatgttgccccagatatttat

SEQ ID NO: 63536 - DNA, 352 bp, Oryza sativa
  unsure (1)..(352): unsure at all n locations
  Clone ID: PAT_MRT4530_6476C.1
ccatcttgnactttccgtagttggccatgtttctttcccttgaaattctgttttcaccgggtttagatgtgcccaaagagaaccaaaaaaaattcaagaacaagtttatcttgaccagttttgattagcagcaatgaccagtattgcagccttccgctaataactgtgaccnggaggcattgctggttgctgctagcctgctactcactcacaacacgtcacatttgatgggatctatgacgatcatgcaattcgctacaaagatttcacctatgatatgtaaacttttgttgttctgctccaatcctagcaatttagtgctaaaaaaaaaaaaaaaaaaaaaaaaaaaaaa

SEQ ID NO: 63537 - DNA, 1349 bp, Oryza sativa
  Clone ID: PAT_MRT4530_64770C.1
gcttgctcttcctgggctttttagtcaactcgatctaactccaaatcccatcaaccccgccgccgccgccgccgccgccaccaccgcgagacgcgagaggagagtgaaagaaagattcagagagagagagagagtaagcatgatgtccttcagccagcccgacgccttctcgccgtcgcagttcacctcctcccagaatgccgccgccgactctaccaccccttccaagagccggggcgcatcgagcaccatgccgctcaccgtgaagcagatctctgaagcgcagcaatctggcatcaccggggagaagggcgctcccttcgtcgtcgacggcgtcgagacagccaacgttaggcttgtgggattggtcagtggcaagacggagcggaacaccgatgtgtccttcacgatcgacgatggcaccggccgcctcgatttcatcagatgggtcaatgatggtgctgattctgctgaaaccgctgctgttcagaatggaatgtatgtttctgtcattggtagcctcaaggggcttcaggagaggaagcgtgctactgctttcgctatcaggcctgtaactgattataatgaggtcacactgcatttcattcagtgcgtgcgaatgcatttagagaacaccaaatcacagattggtagccctgcaaaaacatattctgccatgggatcctcatcttccaatggcttcagtgaaatgaccactccgacctctgtgaaatccaacccggcaccagtgctcagtgtaacaaatggatcaaaaactgatttgaacacagaagtgctgaatgttttccgcgaaccagcaaacgtcgagagcgagcatggtgtgcacattgatgaaatcgtgaagcgcttcaggctaccggaggccaagatcaaggtagctattgattacctcgctgacattgggcacatatactcaacaatcgacgagtctcactacaagtcagcgttcaatgaataaaggggattgaagcctcagttacttactagtatgtatcctctagcctcgaagctggctgcagctgaaactgaagaacaatcgagatgcttcatgtttgcttgtcatactaaccagtgtgcgtttgttttgctccatccagtgaaattacatgtaaccgtatctgtattacgagtagcacatatcgagtgacaaaacatataatatatgtatgtttgttgttttgcagcatcaaaattaaaaaaaatgtaacatgcttgattgatctctttggatgcagttaatttcattgtgatattaactcacgcatcatcgatcgatcgtgtgttttttggtagctagatggtccaatcacaataatctgctcgtgccg

SEQ ID NO: 63538 - DNA, 1133 bp, Oryza sativa
  Clone ID: PAT_MRT4530_64771C.1
ggccatctccccaccccccaacaatcatcgaggaagaagagggagggacgacgatgtcgatgccggaggcggggcgctcggagagggacgggcgggagcaggacgacgactacgagcagcagcaggccagggtgctcatggcactgatgcagggcttctgcgccgcacgctaccggaaggccgacaacatcccgtgccccatcgtccaggggctatacttgggatctgttggggcagcaatgaacaaggatgctttaaagagcttgaacataacccatatcttgattgttgccagatcattaaatccagcctttgcagctgaatttaactacaagaagattgaagtacttgacagcccagacattgatttggcaaagcattttgatgaatgctttagtttcattgatgaatctatcagctctggtggcaatgttctggttcattgctttgctggacggtcaagaagtgtcacgattattgttgcatatctgatgaagaagcatcaaatgagccttgagaacgcgttgtcgctagttagaagcaaacgacctcaagtggctcctaatgagggattcatgtctcagctggagaactttgagaaatccatgcaagtggagcaggagaggaaacttatgcaacctgtgcagaactaactataggcgtaaatgcatgtgttgagaatacactgctaatagcttgcggagcagtctagagatcaaggccgtagtgcaaaatgttatgaattctagctgcggtattattagcagtcgtctaattgatgctgtaagcttcaagtgaaattggtggttaatgcaatgaaatactctgggatccagttctgtgagggtaaccaatggtttttgccttctttaaaagttctgtttttggtgcttcatgtcacttggacaatatgctgacatggaaggtatgttcgattcattgaatataacatgattcctggttatcccagtattcctggtaactagaaaaagtgtttgtgcgttgtaatgagaagaaaagacgagaaaattaaggagaagttgagaaagatttacattatgtaattaattcaaatacttcaccatcttcttcatataaagaaaatatatgtctaaaaaaaaaaaaaaaaaaaa

SEQ ID NO: 63539 - DNA, 384 bp, Oryza sativa
  Clone ID: PAT_MRT4530_64772C.1
atgattgagaggctgagagctggcgttggaaggcagacgcaccagaggcgtggtggtgcttcgcgcggcgaggaggtttggagagcgcaggggaaggagcagtgccgggggggggggggggggggcaaagctcagggcatcaaggccggccgctgtggactgccggggaggggcggaactgagggcttcgaggccggccgctgtcgaccccgcctctctcatgtcgcacccggttctccgttctctcgaaaccggttctccagactccggcggtcacgtgcgaggaggcggcggcacccgacgcccggcgcctacaacggcgctgcgagggagcgggcgcacttgacggcgagcgaagacatcccgaagcgaggggtagggtga

SEQ ID NO: 63540 - DNA, 405 bp, Oryza sativa
  Clone ID: PAT_MRT4530_64773C.1
atgacgacggtgcagcaggacggtggagcgggctcaacggccaggacctctagcggtgcggctatcagcgtaaacggtcagcatgatgcgatatttgtggtgattgcgagaatcgcatgggtatgggtatcaggtgtgatacctatcaggtatcagacgattcgacacaacaggatgattccgagtaggtatcaggtatcagacgatttcaatcacgtatcgcgtgatactcacgaggtatcatgcgatatctgtcatgtatcagacgatttctaccacgtatcgcgtgatactcgcgaggtatcatgtgatacttgtcaagtatcagacgatttctaccatgtatcgcgcgatacttgcgaggtatcggatgatacctaccaagtatcaggtgattcctactag

SEQ ID NO: 63541 - DNA, 498 bp, Oryza sativa
  Clone ID: PAT_MRT4530_64774C.1
atggcggcagagaagaaggaggttgccgacgccgccgccggcagcggcagcgacacaatcctcctaatcagctccgacggcgagcacttcaacgtgccgtcggcggcggcgagcctgtcacagctcgtctccaacatgatcgaggacgactgcacgacgaacggggtgcctctccccaacgtcgcctccaaggtcctcgccaaggtcatcgaatactgcatcaagcacgccgccgccggggaggaggaggagaaggatctgaagagcttcgacgccgagttcatgatcgacgtggacaagaacatgctgtacggcttgctcctggcgtccaatttcctgaacatcaagagcttgctggatttgtgctgccagcacacggcgaacctgatcaaaggcaagtcgccggagcagatcaggaaggagtttgggatcaagaacgacttcacgccggaggaggaggaggaaatccgcaaggagaacacatgggccttcgagtag

SEQ ID NO: 63542 - DNA, 708 bp, Oryza sativa
  Clone ID: PAT_MRT4530_64775C.1
atggcggcgaggcggttctccttctcctgggccgacgaggtggagcgcgaggaggcggcggagcagcagcagcagcagcaggaggaggacgacgacgaggagaatcagccgccgccgccgcctcggcgatgcggggagacaggggagcaggcgaaggcgaacccgttcggcgccgcgcggccgcgggaggtggtgctcgccgagaaaggcgtcgactggcgcgcccgcgaccgcgagctcgacgacgcctcccgccgcggcagcgccatccgcagcaggagtcgcgtgcacggcagcaagaggcacgctcgggatgcgcccgtggcggcgaggcggcacgaggactcgacgccggcgagccgccgccgcatgatcagcttgccgccggtcagctacggcagcgcatggggtggtaagaggaaatgcgccggccaggacgagccgtcccggcaagaccggccggtggccgaacattgccggagagttttcggccagctgaacatcggcgaaggcggcgaattctctcgccggagctccaccgagagccgcggctcggtctgcaccgatcgaaccgaagcaagcaacgctgcagctgcagaaacggagaccagtgttggtcagaggaggatgagtaggaggaggagcaggaagaacgtgaggaagatggaatcaaccaagtccaagaagcagcaaactctgcaactctag

SEQ ID NO: 63543 - DNA, 472 bp, Oryza sativa
  Clone ID: PAT_MRT4530_64776C.1
aaaccagaaacaaaatttaggtagaacttagtccaatgcacattgccatatcaaatgtctaagctattattacatgtagtagtaatacacatgaagggtctttgtgctggcagagcagtgaccctgagcatgacaatctggcacaggcatctgcatacaatcagcatctctagtctgcactaatgatacaaacaaatgaattagtagtcaggttactacacaaattcagacagacagaaaatagtgtccagtttagcataagatgggggtatattattaggttattattacttattagtgacgaaccatctactacagttccaacaagatacagtctttcttgcaacatgcatccttgtcaaggtacctaatgaggagttctaagaagcctgtgaggctggttagtctttggctttcttctgatttgcttttgcaggtgagaagatttgccacatattccccagatggaact

SEQ ID NO: 63544 - DNA, 487 bp, Oryza sativa
  Clone ID: PAT_MRT4530_64777C.1
atcgcgagcgggccggcctttttttttttttttaaaataaaagtattggaagcgctgctttgataattcatcaaataaacgtgaatcggtgttttattacattataaccaaatgcaaaaaggggttttctaaatttttttttctacaaaatttgttgcctaaaatccaaaaatttctgaacctagacatccatgatccccaaatttatgaatctgaaccatggggtccatgttgttgatagctataggttggcgcctcctttcgatttgacattcaatattccgatgaacacaaccatgccaactacttgggttcttctctcttggaactggtcagatgagaagcacttatgcttgtttccatagagttgctaaactcatcaaaaacaatccgcaagcttgcttaagaaatttctggagctcgaacttttccttaaacattagaagtaactatttgtgtcaccagtgggaaagaacaatccctgaat

SEQ ID NO: 63545 - DNA, 312 bp, Oryza sativa
  Clone ID: PAT_MRT4530_64778C.1
atggaccgtgtgatgaagctagcatccgagcgtgcggtggtgatcttcaccttgagctcatgctgcatgtgccacaccgtgacacgcctcttctgtgatctcggtgtcaacgcgctagtgcatgagctggaccaagaccctaggggcaaggagatggagagggcactcctcaagctgctcggaagggggccgcctgtgccggtggtgttcattggtgggaagctcgttgggggaaccaacaagatcatgtccctccaccttggaggtgagctgatccccatgctcaagaatgcgggagccctctggctgtag

SEQ ID NO: 63546 - DNA, 564 bp, Oryza sativa
  Clone ID: PAT_MRT4530_64779C.1
ggagaacaacacatccattgttgatgcacagcgatatatattgatacattgtagctcatatgcactgataaaaataaaagtactgtaagcgttgctttgataattcatcaaataaacataaattggtattttattacattataacaaaatgcaaaatgtgtttttctaaattggtaattctacaaaatttgttgtctaaaatccaaaaatttctgaacctagacatccatgatccccaaatttatgaatctgaaccatggtgtccatgtcgttgatagctataggttggcgcctcctttcgatttgacattcaatattctgatgaacacaaccatgccaactgcaatacagaactgggactttacagaaaatgctaaaaaggaaaatatatatatatatatcagtaaaataagtttgcagttttgggattgttctacctacttggctacttctctcttggaactggttagatgagaagcacttatgcttgtttccatagagttgctaaactcatcagaaacaatccgtaagcttgcttaagaaatttttgtcgctcaaactttt

SEQ ID NO: 63547 - DNA, 389 bp, Oryza sativa
  Clone ID: PAT_MRT4530_6477C.1
ccccaacctttaactttttaaaaaaaaaaagggggggccaaaaccccccccgggggggggggggggtttttttaaatttttttaaaatttccgagggggtttttaaacccggggggggttttccctttaaacccctttggggggggatttttggccttgaccccccccattttcgggcaaaggacatgggcctttacggctttttttaagccaacccccccccccggggggcccacgaaagttttaaaaacaaatttgggggggggttatgggggggggtcccccaatcccttttttgaaaggcccaaatttttttttttttccctttggggggggccggaaaattcccttgggggtccccccaaaattgggggggggaaaatttccct

SEQ ID NO: 63548 - DNA, 2373 bp, Oryza sativa
  Clone ID: PAT_MRT4530_64780C.1
atggaaagtgaggacaagtttgacatgcttttgaggatgctcgaggagttcgagcgaaggcgggaggaggcagatcagagaaggagagctgatttccagtctctcaaggcggcggtagaatcgtggatgcttgaaatccagaagactgctgaagatttgcaaatttcggttggggacatgcaatccaaggtgacgcccaccacatgtttgacgaaatgcactagcaccgacgtcgagcctgatccccctgtggttgtggtggttacacgcgccacacctgacacgacctctatggagctggtagctgttgaagatgccatcggcgcaacctacaccaacaatcacaaccatcccaaggtgatgcccgccaagtgttcgatgaattgttccacccctaacctcaccgtggctgcgatggtttcgtgcacgtccacttctctggcctccatttgtcaggacatcacatgcaccaccgacatcgacgcccttgtttgtcccaaggagacacacatcaagtgtttgacattgagcctcgacgtcaagggtggcatccatgaccaagctgaggtcatgttccaggccatgacggctgcgtccaaggtagttccagcatatgtccagtctatggacaacttctcatcaaggatgaatgccaaccgcaagctggccacattgacacccgcaagatgttcagtgaaatggcatggtccgcacaagcactttgatgtcaatccatggccacctccaaactttaacgcatcagattcgagcaggtggtttggaatcctgattgacaagcattttccactaggggaaccactgaaacacttacatatcatgttggtgccattagtgtgggatcctggtgatagcaaagttcacctacacaagattttgttgaatgattggcttcaatgccaatactttcacctgggagataattgctggaacattgagcttgttatcagtgtcggagttcctgaagagttgtgtgtgtgggtcagctatatagcagttgctaagaaggaagcatgtgtggatcagaacaagggggtatcatatagtgaagaaatgagattctggtgtgaattgtattcacattgctatatatctgctcgactaattgggaaggggaactacatcctggagccatctaaagatcaaccaacttgtttgggtccacagaattttgagaaaggttcattcctattcactactattgatgatgttgataggtataatcttgacattggtactgtagtaagattatttgctgggaatttgaaggagttagtgaaacatggaagggggtttgacattggaatttctgtcatgcaagagcaaattgatggacaaggaattcatatggtttggtttccaggagtaaaatgctcatttaaattgaggttgaacacttgttgggtcatttgtcatttggagcctgtctctatgatctttgtccttgctccactaaaatgtggttcttttcttgaggcatggagtccagaaaatgcacccttacttgatgagagctgggttgaactgaagcaattgcagtcatgtgttcagattgaacagcacaagtatgctggactagcatctgagcctacaacctttggtttccacattaaaatctcaagggaattagcatgtgtgcatgctgatttatttcagactgctctagttatccagccacaaaggaattcctgcactaatataaagattcatgatgttttagttgagctctccttcattaaacaagagcattccaagttattaaaattgttccaatatctgcacatactagctctgttgggttggacattgattgctaaaatggaggtgcatctggactttaatggggctccaccttgtttacttattgctgccgctagaatatctgcacaaggacatacaagcacactagggctcttgaaaggtgaatcaatttcaatgctacagatacagtgggatctagaattcagtgctattatgtgcttcagctacatattattggtctattatactgaagaatggtcttggccgatggaaaatgaaaggaataaagaaaagtgcaatcaagaatttcatttcagcatagaagaacacttttactcgagccatcaaatcattattgcaaggcttgtgggacaccatgagtactatggagaaggcaaagagactaagctgcagcgaaagattgtgcgtacaaggaaaagcaatggtgatagggatgacctgatcacattgatcatccgagtgctacaggtgccatgggacccaggtggtttacgttttcaaaagtttaattggcatcaacttgaggacaagttgaattttaaggagaagggattgttagggtctcaaccttga

SEQ ID NO: 63549 - DNA, 1053 bp, Oryza sativa
  Clone ID: PAT_MRT4530_64781C.1
cttttaagcctaattgctctatgatttgacaatgtggtgctacagtaaacatttactagtgacagattaattaggcttaataaattcgtctcgcgtatttcagtgtctactaagcaaatggttcttcaaactgattactgaacaggttgtttggcaagagaagaaaatatttgaaaaaacactcaattactcaagtagggtcaaaacaaggagattctcattttttttgtcgggtcttgtgaaagctaaagataaatccttacttctggaaattgggtagtaaataggggcgaataagtaagatcttgggggatgtttgggttgggaatttccaactctatatatcatttttcgtaagagaaatgtctcgatcgcaactgttatgaattttgttccgcttaatgtttcttttaggagaacgttggttggtcagaactgaattaactggtataatttaattgtcttgattttgtatactagtttgaatggatctaatgattctttcaaatggaatcttcatcagaatagaattttctgttagatcaatatatttatctttgattaataatggttttattgagaggaacaagtttatatggaaattaaaggttccaattaagattaataacttttgtggtttttgttcaaaaagttgtgatctaaccaaggataatttagcgagaagaaattggaatgggagtcaaagatatttttgtttgtataatgagactattcaacattttttttaatgtcatattgcaaaaatttctttggagaatagtttatatttcctttggactgaaaccccctgatagtatatctaatatggttggaaattggcttagtggtgttgagtcaaaaactaagaatctcatatttgttggagcttctgctttatgttgggctctatggttaagtagaaattaatgatgtttttgataaatctccaactaaatcttatatgcaagtgttctgcagggcaactttctggctccggttctaggcacaacttcaaaacttttatttattggttttttgctgcatgtatctatt

SEQ ID NO: 63550 - DNA, 158 bp, Oryza sativa
  Clone ID: PAT_MRT4530_64782C.1
atggccctagcaggtggggacatcgagatggatagtttcctcgctgtcgtcatcgaggttccgcatatgcgcttcgtcgtcatcggcaggaaaggagccgagccggagggcggagacacgctggcgatgtcgaggcggagggcggaggtggcggcgcg

SEQ ID NO: 63551 - DNA, 266 bp, Oryza sativa
  Clone ID: PAT_MRT4530_64783C.1
atactcaagagagaactacatacatccaccggatgataaagattcaaaccacatacccaaacaagcacaggtgacttaacaaccagacatttgaacagctttttactaacaaattaaacctagaaataacctttacgctttccataggaggtttacttggctggaccggacatacattttttaaacctagtttcaagtttccagtctattttgccaccaaatgcaaaaaacctattatgagaaatgcccttattgaaattccccgg

SEQ ID NO: 63552 - DNA, 213 bp, Oryza sativa
  Clone ID: PAT_MRT4530_64784C.1
atgagagctcagcttgatgaagaaaagaaagaacaagcagtgaagatgaaaggcgaggaagaagatggggttttctctacccccttaagtcctgaggtgggagcacgcccatgggtgtgttgtggggctaaagaggcacccaaggtcagtgacaagtgggcccaagtcgtggctgtctatgagggtgagagaggaggcctaaacagagagtaa

SEQ ID NO: 63553 - DNA, 525 bp, Oryza sativa
  Clone ID: PAT_MRT4530_64785C.1
atgccccgaagtatcaccatgatactgcaaaggggaaaatcgcagtgggcggtcccctcttgcgccacggtgaatccggcagctggacaaccgaacatctcggccgacccaactccatcacgcccaccctcgccaccggtgcctaggaaagggtcgagctatacttcagatcaagcagttacccactcccgcttgtgggctgacatcatccaaggggggggggcggcgccgacaggcggggcccacgtgtcagcggctcaaaggggagaggaagggggcgccggcatgtgggccccacgggcagtggctaaaggtggccggtctaccgtggaccgggaccacgcgggtggtccaccgccggtccggatcggccgggaggccgatcggacggcacggcggcggctaggcacggctcggctcggcttcaaaaccggccggccggccatggcaaccggcggcgacgcgcacggtttcggcggcggttgccgtcgtggggcgggcggctggaggaaggggacgacctaa

SEQ ID NO: 63554 - DNA, 694 bp, Oryza sativa
  Clone ID: PAT_MRT4530_64786C.1
tcttaagtgcttcgccttcgtcgcctaatcgatcaatcgattacgtcttccgtcgtgggtggtcatcaatcgcgatcgaccggtcttctttacttatatatataatacattcttatgcgtctgtgctttgaattactaactatctcgtcttaagtttcatgtatgcacacttgcatcgttagcgtacgctctctctattattggtcttttggggagtactatctttttctccttctctcttctctttctctttctttttctattcttcttccttttttcctcctcctattcctttcctttcttcttcttctctttttttcttttcctcttttctctttttacttctttccttttcccctcctccttttcccctttttttcctcctttttccactcctctcttttttactccactattcctttcttttccctttcctttcttacatttccttttctgtcatcctttttccttctttccttccttccttcccttttcttctttctttctttccctcttttctcaccattcctttttccttctctttcgccttactttctcttttcctttccttcttcctctctatccttttccttacttcacactttctctctctctttctcctttttcccttttcctttttttctccttcctttccttcctctcttctccctctttcgcttccttttcactcctt

SEQ ID NO: 63555 - DNA, 561 bp, Oryza sativa
  Clone ID: PAT_MRT4530_64787C.1
atgggtgagggcgattaccctcaccacctccggctccgcgattgctacctggcttgtggcagtcgtggtaaccgcaaagctcacgtggagtacagtgacactgatttggcgccgcaggaggaccaaatggccctggaagccatccttcgtgccatgccgcattgctgtcatcgcggcaacgcgctggcgagacgaggggagcccgagcatgtagatgagccccgccatcgccgactcatccacgtcaagatcaatgcgactgcaaggtctgccactcctggagcacctcctcatgttcctcccacctctacgtccacgtccaagttccgaccaccgcaactggtgactcaagagctcgacctcgacaaggccaaggtttccgcgaatcttcatagggaggaattagctgaggatgatggtatttggcaccttggcacagttcacgagaacttcacaattaattcttataatctcttcgcaaactctgtagctccaatagttcatgatgaacaggaggcttttactgttgtggttcgaataggaccagacatttgggagtaa

SEQ ID NO: 63556 - DNA, 686 bp, Oryza sativa
  Clone ID: PAT_MRT4530_64788C.1
gtttcacccccacccctcaaaaggcagtgggcggtcccctcttgcgccgcggtgaatccggcagctggacaaccggacaccccggccgacccaactccatcacgcccaccctcgccaccggtgcctaggaaagggtcgagctatacttcagatcaagcagttacccactcccgcttgtggaaagcacggtaagtctccggctgacgtcagcgaggggagggggcggcgccgacaggcggggcccacgggtcagcggctcaaagcggccggtctaccgtggaccaggaccacgcgggtggtccaccgccggtccacgggaccgatggtccggatcggccgaggggccgatcggacggcacggcggcggctaggcacggctcggctcggcttcaaaaccggccggccggccatggcaaccggcggcgacgcgcacggtcgccggcgacggcaatcggcggcgtgggaagcgacggaggacggggcgaaaagcggcggcagcggctgaaggcgacggcgcacgcgcgaaggacggcggcgcacacgggagagagggaaaaaaagggagcggaggggagcctcaccggcgagcacggcgaccaaagcggaggatgaaaggcggcggtgacccggcgatgctgaggtgcggacgggcggcggcggcacgctaggagaaaacagagaggggg

SEQ ID NO: 63557 - DNA, 253 bp, Oryza sativa
  unsure (1)..(253): unsure at all n locations
  Clone ID: PAT_MRT4530_64789C.1
ccatcctttcgagccaagctaccattctcctcctcgggggggtttgattataaactggcggttctataaacacncgcccnaccaccaccaccacttacttctctcacgctgccctcctacctcaccaccctcattctcacccccaccctcacccttactagcacccacatccgtactaccccattgcacatgccctgacattcatccctccttaccccacttccatccctcccattgttgcccttccaccccc

SEQ ID NO: 63558 - DNA, 564 bp, Oryza sativa
  Clone ID: PAT_MRT4530_6478C.1
gctcgccgaggaggcgacactgttcgtccgcgaccacgccgtcgtgttccgggtcgacgtcaccgtcgtcccggacgagccgctgcctccggacgccggcgtcggcgacggttgagaggaaaggtattgggataatgtgctgggggtagggatgaaaacggagcggatacaaacggataatgctcataccatattcgttttcatattttttgccggatacggaaacgaatacggatagctcgaatacggaaacaaatacgaataagaatcgaatatgattggacatgactactgaaacatttttttcggatatccgaattattatccgtattcaacggaaaccccgataccatatccatatccgtatctaggagaaaatattcatattcgtaaccgtatccgaacaatctgagaattatccgatccgaaaggtatccatattcgtttttctccagagcagacggaaactatccgctccgttttcatcactaataggaaccatcaccacttagcaccagtaaggtattattgcttagaaagtgacttgtattaatttgttgctct

SEQ ID NO: 63559 - DNA, 979 bp, Oryza sativa
  Clone ID: PAT_MRT4530_64790C.1
gtaagtgattctctctatcttcttcgtccaccctccccctctcttctctttccccaccagaatgctagtgcctagcaccaccacaagaacaccgatctctaccattgccaatgactccatcctcctgagggcagcagtggaggaagaagatgaggagagagaaagtcacatcactccacaggcaatccttgacggcagcgacgaaaccaactttgacaaaacagctccaactaggaagatcttcagctctggggtgggggaaaagagagcaagactgagtactacccactgtactcagcaagtcataccggaagaggaggcagtgggcggtcccctcttgcgccgcggtgaatccggcagctggacaaccggacaccccggccgacccaactccgtcacgcccaccctcgccaccggtgcctaggaaagggtcgagctatacttcagatcaagcagttacccactcccgcttgtggcgggccccgcttgtcagcggctcaagagaggggagagagaggcgccggcaagcgggccccatgggtcagcggcacaaggtggccggtccaccgtggaccgggaccacgcgggtggtccaccgccggtccacgggaccgacggtccggatcggccgggaggccgatcggacggcacggcggcggctaggcacggctcggctcggcttcaaaaccggccggccggccatggcaaccggcggcgacgcgcacggtcgccggcgacggcaatcgacggcgtgggaagcgaccggaggacggggcgaaaagcggcggcagcggctgaaggcgacggcgcacgcgcgaaggacggcggcgcacacgggagagagggaaaaaaggggagcggaggggagcctctccggcgagcacggcgaccaaagcggaggatgaaaggcggcggtgacacggcgacgaggaggggcggacgggcggaggcgacacctataggaaaggaggagagggat

SEQ ID NO: 63560 - DNA, 633 bp, Oryza sativa
  Clone ID: PAT_MRT4530_64791C.1
atggcgaggctggggttctccgctctcacgaatgtgctcgtcgtctcctaccttaagagcacccgcaatggtaaaaaaaatatgttgatatggatctcttatagagagcctatagataaccattgtgggtgccctaattggtgcttccttggtggcgcactgcaacctcgccaggtcacctgcatcgtgcttgcagccaagagaatgacggacgaccgctcgactacgccaccaatgtattgggacgacgtggcaagcacctcgtcaagctcccatcctgtcgcgccctactcaagctcctccgtcatcggcgagaacctgttgttccacgagctttgggtttgtagcttccgtgatagctgcctatggagagcaatgtcattggacaccttcttaatgatcacgccctttggtccgacgggggagtgtctcctgatgactactctcatgacgcgcaaaggagtcaggtgcagaagcggcaatgctgaactaggacaaattactgattgccaaataacagtacaactcattgttacgtcgctccggagtctgcttccgatcgagggtcacaagcaggaagagtattgcggcttttaccggcaggaaaaattctttgatcaacagaatgcgtaa

SEQ ID NO: 63561 - DNA, 633 bp, Oryza sativa
  Clone ID: PAT_MRT4530_64792C.1
atgccatcgctggtgctgtcgaggctgtcgttgccggaagccgccgtcgccagccgtcgtcgcaccgtcgtcagatccgctgttgccagacgccgccgtcgtcgtgccgttgccagatccgccaggtcgtcgttgagccgtcgccagccgtcgtcggcgccgtcgtctccgaggtcgtcgttgccggacgccgcgccgtcgtcagccgtcgtcgacgccgtcgccagccgttgtcggcgccgtcgccagatccgtcgccagccgaggtcgccgtcccgtcgtctccgaggtcgtcgtcgcctgccgtcgtcatcgccatgccccggcggattcgaccggtcttcaagggatattggtgtaaatgtcagtcgaggtatacaattagagcatgacggcattcctgatggttgcctcaacagcctccactggaaattttcttacttcaagggagggatgattggggtgaagattagcatgatttcttatggcaacctccgcgacctccacctcccgtgctgttgcacccgcacaataaatgtccaccaggaacaatttgagggagtccatttgaaccaattgtaccatgttcctatttatgagctcattaaagtacctttctcctacttcctctag

SEQ ID NO: 63562 - DNA, 1185 bp, Oryza sativa
  Clone ID: PAT_MRT4530_64793C.1
gggtagcttgttacagcgctatatgcagcagcatgtaacaaggtcttttactacaactaagcacatgttggctgtcaaacaatgtctagatcatgctgccgcacagagcctacctcaatttttttgtgtcgcattgggacttatcatgtcagatatcttggtattcctatgcattttagaaagttaaattataaggattggaaaataatagaggagagaattgaaaataacttgagcagttggaaaggaaaacatttgtcgataggaggtagattggttttagttaattccgtcttgtcttctcttgcaatgtttatgatgtcttttttttaaaagataccaagaggagttcttcaaaaaaattaatttttaatattacgctttttctggcaaggtgataatcataaaaagaaatacatattggcaagatgggatatcatttgtcaaccaaaacaactgggaggacttgggattcataatatagagattcagaatcagcatctactaagcaaatggttgttcaaactaattaatgaacagggtgtttggcaacaactattgcgaagaaaaatatttgaagaagtattcaattactcaagttgggtcaaaacaaggtgattcatattttcggtcaggtcttatgaaagttaaggacaaattcttacatctcggaactagggtagtaaatatgttaaacaagtaagattttggaaggatatttgggttggaaattcatctttacaagataaatttccattttcatataatattgttcgtaagagaaatatttcaattgcaactgttataaattttgttccgcttaatatttctttcagaagagcattggttggtcagaacttaattaactggcataatttagttgcattgattttgcatactaattgaatggatctactggttctttcaaatggatcttcatcagaatggcaattttctattagatcaatgtattcatccttgattaataatggtcatattgagaggaacaaatttatatggaaattgaagatgcaaattaagagtaagatttttatgtgatttttgttcaaaggtgtgattctaactaaggataatttagcgagaaggaattggaatgggagtaaaacatgttgtttttttttatgaaaaatgagactattcaacatattttatttgactgccata

SEQ ID NO: 63563 - DNA, 376 bp, Oryza sativa
  Clone ID: PAT_MRT4530_64794C.1
ttgaacctgcttatggggtgaaacccccacaattgtgcgcaagggaaataggagtgtgccaatgcgtgtgccgagtggcttgctgcccaaacttggatgttgcctagcacaaatggcaatatcgcatctcaagagaagaggctcagaggctcaagcataacagaggagatgagttcggtgcattcactccccgccaatacaagagctaccaagacgtttataatgtgccggaatcctcttaagtggcaatccaagataaagaataactaaataaataaataaataaattccaaccaattgctttctctattacttaaaatttctttataaatatcacttctgaaatctaaggacatccctcaaaaaaaaaaaaaaa

SEQ ID NO: 63564 - DNA, 381 bp, Oryza sativa
  Clone ID: PAT_MRT4530_64795C.1
atggcggcgaggggaggagcggccgccctgagcttggcaccaagtgcgtcagggtgcgtggcggaggagctcccaccccgagcttcgttgccattcccaaacactcctagatctagggttcccttggcttggctcgggtggcagacagggagagcagccaaatcggcgacgtgggagtcggcagccctatcgtcgttggccatggatggcgggaggggtcgtcctctctccggtcgatgtcctttaccgtgtgtggtgcaaatggagatggcgatggtctactacggggtggccaacgacgtgagtgcctttgccaacgatgacgggaccgccgtggagtcggagctgttggatgttgggcggcaagctcggcaacaatga

SEQ ID NO: 63565 - DNA, 252 bp, Oryza sativa
  Clone ID: PAT_MRT4530_64796C.1
atggctacatgttatgggctatgtcttgtggctcctggtttggagattgggtctgttcaaccgagcatggttgttcagatatggtggggcatatgcaacagaaaccaatcggtttcacgttccagcaagtttaagatgctggctgcactaaggaattttactggggtcatagctaatgtggggccaaaggactttagtccggattggcctatgggcgtgagagatgtagcactattagatatttggtactaa

SEQ ID NO: 63566 - DNA, 549 bp, Oryza sativa
  Clone ID: PAT_MRT4530_64797C.1
atggcgtgcactgagttagcgtcggatgtgtacgcgctcccgtgcggcgacgacggcacgacggcgctgtcgactccggtggtcgtgtcggtcctcgcgtcgctgctggagcggcacatcgcccggaacgagagggaccaggcggcggcggcggacggcgaggccgcgaggaggcgcgcccttcgacagcgcacggctggacatgagccttcacgcgttcctggagcggttctcccgcggctgctcaccacagccatcctcgtcgcctccaagttcgtcgaggaccggaactacaagaactcgtacttcgccgcggtgggcgggctgaccgccgcggaactgagctcgctggagctggacttcctcttcctgatgcagttcaggctcaacgtgagcgtcagcgtgttccagagctactgccggcccctggaaaaggaagttagctacggcggcgggtaccaggtggagaggtgcctcaagaaggccctcgtctgctccggcgaggcgcaggcgcagcaaaggcaagcggcgtcggcggcagcccagtag

SEQ ID NO: 63567 - DNA, 396 bp, Oryza sativa
  Clone ID: PAT_MRT4530_64798C.1
aaactgaaactgttactgatctgtcctggttttttgttttgttgtttctctggtttttccattgtccctcctaaaatctgttgctcgaagaggaaggctggaagaaaaggctgtgtctcaatccaaaggcggaggagaaaaacgcttaaaaaaaaacagggggaaacccaccatttatgaatgctgaagctcctgctgctgctccccttgttctttctagctgataagaggggggggaagggatccatgtacatgccttcctgcccagtggtgggggaaggcccttacgtgctgaaaaaaatatcgggcgcggcgcatatccactgcctgttggagcattatgtctatgacgcttagcgccttgctaggacgagggcggggacggaccaccaacat

SEQ ID NO: 63568 - DNA, 1027 bp, Oryza sativa
  Clone ID: PAT_MRT4530_64799C.1
gtgcagtaccagccatcaatcagatctgcccctggatgcatttgtcgtccgcttgatcataaataagctcgggtgatcgggtcaggggcctcaatggaaggtgcctgaaggcttcatctccgtgtctcgatttgttttagctccagtttgcgtgtacgtgctgagtttttttatgccgatatcttttgtttctttgctccttcctcgtgtccccttcagctggtcagttccgccattgtttatagcttctttttgcccccacgcttgcctccctctggtgtataaaggtctgcatttgcaagagttctctgtgtacttgtgtagcataggttttgtgaagaaccaagcttttgccattgaaattcttcaggagatggcgtccactgagttagcgtcggatgtgtacgcgctcccgtgcggcgacgacggcacgacggcgctgtcgacgccggtggtcgtgtcggtcctcgcgtcgctgctggagcggcacatcgcccggaacgagagggaccaggcggcggcggcggacggcgaggccgcgaggagggcgcgcgccttcgacagcggcacggtgctggacatgagccttcacgcgttcctggagcggttctcccggtacgcgaacgtctcgccgcaggtgtacgtcgtggcgtacgcgtacctggaccggcttcgccgcggcgacggcgtgcgcgtcgtgtcggccaacgcccagcggctgctcaccacagccatcctcgtcgcctccaagttcgtcgaggaccggaactacaagaactcgtacttcgccgcggtgggcgggctgaccgccgcggaactgagctcgctggagctggacttcctcttcctgatgcagttcaggctcaacgtgagcgtcagcgtgttccagagctactgccggcacctggagagggaggtgagctacggcggcgggtaccaggtggagaggtgcctcaagaaggccctcgtctgctccggcgaggcgcaggcgcagcagaggcaagcggcgtcggcggcagcccagtag

SEQ ID NO: 63569 - DNA, 1425 bp, Oryza sativa
  Clone ID: PAT_MRT4530_6479C.1
atgtcagcctcctctttctttcccctcttctctctcttcctcttctctctttctcactcttctctggctctaggcaagccgacaccggggcgaggcgggggaggaggtccggcggggcgaggcgggagagaaggttcggcggcggcgtcgacgcgggagcaagggaggggcgtcggcggcggcgagggtgaggaggccgcggccggggtcggcatcctggcgccggcgctcgccctggcgcgccagcggcggagaacggcggcctgggaaggtgtcgccgcggggccggcggtggactctttcaaagatgtggatgctcccatctcatctctgttttgtgagattgtgagaatggaatataattgcaacaaatcttcgttcagaagatgtgccaaaagaaatcttgatcattatcacaataaacggaacataatcttgctaagagattgtacaactgggaagcaaacaggttttggcgacaacttgtttttcattgcgttttcgagggggatattttgctcctctggctcttttcctgtttttggatcctctgttctgttttggttcttccgtcgcctaatctctcagcatgagaattctatcctggaatatcataggcttaggagacaaaaagaaaaaaaatctctacttctgtccactctgattgaacataggccagacatagtttgcttgcaagagaccaagcttgcatccatagacagattcacaatgccagctcttcttcctgttttcctacgagattttcattggcagcctgctctcggctcagctgggggcttgctaacagcttgggactccagagagctgccaaccactctggttcacgaaaacagcgactccatctcctgcactttccactcgagaacagaccaaaccaagttctgggtcactaatgtatacgccccccattcggaagatgaaaagctaatcttctttaatcaactttcaacgctcagaattgcaaacaaagagctatggtgctgcattgggaattttaatatctacagatacccttttgaggaaaacaacgacaacttaaacacaagaggaatggtgggtttcaactgttggataaatgaagaaggccttgtagacattgacattcccaacagaagtttcacttggtctaacaaaagaagaaatcccacactggtgaagcttgacaggattcttgtcgacacaagctggaaccaatcgttcgcaacctcatctgccagagccctagtggcgacaacttcggatcatatccctattctggccgagtgctcaaacaactcaaacacattccgatatttttcgtttggaaaatttctggctacaattaccagattttgtcagctgagtggaagaaagctgggttcaaggtacaagaccaatgagagcaatcacgaaattcaaccataa

SEQ ID NO: 63570 - DNA, 972 bp, Oryza sativa
  Clone ID: PAT_MRT4530_647C.1
aggaattcggcacgaggggagaaagatgtgttctggtaatgacatttcatcgcaccgttgttttcatgtcaccaacatgatatatattgatgtttctgtcttcatagccctcctgactggggagtatcttaaatgtcatgtttcaggtgtcttaattaaatatctaaaaataaaagtttgactagctacattttttttgcataattatagacgcatctttaatagaatatgcatataatatagtggcatattaagctaggattttatgcattcaatttagactctagaaaagggtggtaaaaactttaaaaatttgatgtagtatgggagcctgtgaatgttttaccttaactaacatgtcagcactcaataggattgccaatataacaacctgatgaaactaataaatatgaccctctagtagcagaattcgcagtggcatttgcaatgcaatgctctctgctgcctatcttggccttatctcagaacgatagtatactcctaaaagacgtgagaccaagcttatttattcgatcggaaactacatcatttatacgaactatcattgatactgggaccactgaaccatactgtgatggcactgttgttttctttactgctcgatgaggatggggttatgtcattcgggattctgatggggatgttgtacaagctgctagagggagaattaatcatctgcttagctccttccaggctgaacttttagcttgtgtgcatagagtcagagcagctgcatctttgggcattggaaagctaattttggagtctgatgcaacaatggtcaagcaagctattttaacagctgattatgatctcttcgactgcaacactgtgatatgggaactgaagcatctgttttcttcaaattttcaaattttgtctttccaggttaagccaagagaaggaaatagggtagcccatagactcgcctcatgtgggtgctgttgcgcc

SEQ ID NO: 63571 - DNA, 1197 bp, Oryza sativa
  Clone ID: PAT_MRT4530_64800C.1
atggcagaactactgatcatctcctcgctgatgatgctgcttgctcttgtcttgtacttgtgcataggctggccaattctcagcaccctcgagctcccgtccatcgccgccaacctacacaacctccacgaccacctcgccggcgtcctcgccgcgtcgggacacaccgtcatggcgcgcggcacggcggcgaccagcagcatccggttcttcatcacatgtgaccctgaaaatgtccggcacatcttcacctccaaccatggcaactaccccaagggccacgagttcgccgagatcttcgacatcatggccggcgtctccttcaccctcgacggcgagccctacctccggctgcgtgccaagatgctgagcatcctcggcgacccacggttggttgcctccatggccgcctcctgcctcgacaaggtgcgggatggtgttctccccttcttggcccgcgtggcgaccgccggggcgccgttcgatatgcaggatcttaccgggaggctcatgttcgacgtgacgtccatggcggtgttcggcgtccaccctggctacctgtcccctggccctgacatgccgcccgcgcacgccgccgccgccatggacaccgtcatggaggtgggcttgatccggcacgccgtgccggcgtcctggtggaagtcgatgagaaggctcaacatcggcccggagaggaggctcgccgcggcgcacagggtgctccatggcttcgtcggccgcgctgttcgagaccctgaggctgtacccgccggggcatatggagcggaagacggcggtcgccgacgacgtgatgccgagcggccacgaggtgcgcgccggcgacgcggcgacgccgtgctcatctcgctctactccatgggcaggatggagagcctatgggggaaggattgccgggagtacaggccggagaggtggctcaccggtggcgacggcggcggcagcggtggcgcccagctgcggcacgtgccgtcgcacaagttcctggcgttcaactccggggcgaggatgtgccccggcaagagcatcgccgtgatgctgatgaagaccatcgccgccgcggtggtgtggaacttcgacgtggagatggtggaagggcaggccgtggagccgaagatgtcgtgtcttttccagatgaagaatgggctcatgctcaaggtgaagaagcggcaaatctga

SEQ ID NO: 63572 - DNA, 664 bp, Oryza sativa
  Clone ID: PAT_MRT4530_64801C.1
tcagagatggccggggtcggagatgttcacgtcggtgttgttgcccgtgatgaagaggcccgcagccaacccgagcgccagtgtctcaccagcatatccacaacgaggcggcggcgatgcaatgcctgcatgggagatgccttcgtcttcggcgacggcgaggcgatgcctgcgttggatctccggcccggcgctccgcctcttgtaccgccccaacggctcgcaacatccctttgccctctccgtctgcaccagcctcggcccgctcggatcccccacacgcgcgccgttcgccatctccaccgagttcaacctcctctgctccaacctgcccgttttctccctcctcttcaagcctgcatcggcgacttctcgctcgccaaatgcgatgaccacaatggccacagggcgcggcaaatgtggccgccgcggggaagagcggttgtggggtcaacgcactgttgtccgggatgtgcctcacgacctggagcgtgctgccgttgtggagcaaggcgagcctacggttccagtgggggctgcaggtgcagaagcacaaactaggaggttctatgggaagtgggaactcacgcggaccatggcaatgacacagtcgctgcaatattcaaccgcaactccttggacgcgcgactatgactctttttag

SEQ ID NO: 63573 - DNA, 627 bp, Oryza sativa
  Clone ID: PAT_MRT4530_64802C.1
atgccgcatgccgttgaattggccgtatcacctaaccctaccagcgacgacggcgacgtcgtctacggcggccgcggcgacgacaacgtctacggcgatggcacgggctgcggcggctgcgtctacggcggcgacgtcttcggctcggcagcggcgacggcgtctatggagtcagctttagtgcaagagtcagctcttgctgcaaatacacaatatcagcttaccgctgatttccgccaatgttgtgccaccatcactgacccgccacccgtacacctcagcaccgccggatttgcagcccgcatgcccagtcacctctacatccactgccaacgcaactctgctgccctggccctgccgccgccaacccgccgctaccagatccaccgcctatacacctcggcgccgccggcgcaaaattacagcctgagctgctaccgccgtgccactgtcgttgtcccgttgccaccggatccgcaaccggcacaccttgacaatgtcggatccgtagcccagatgcctaagcactgccggatccaccaccgtagccagagcttcgctgcctgggcctcgccaccactgctcgtccttgtcatcgtcgggcctctgccgcccctcctcgtctga

SEQ ID NO: 63574 - DNA, 411 bp, Oryza sativa
  Clone ID: PAT_MRT4530_64803C.1
atgaggaagacgacccaccactgccagctccctttgcactgccatctggccgctagtggcgcagccgctccggatcggcgccacccgccggtgcccctgttcttcggccgccgcatctcacctggccatcgcggcggcatcccgactgtccggtcaccacgccgagccgccaccgaggcctggacgccgaggagacccaccgcgcccaaggggcggtcgctgcgtcttgggctgccgctgggcggccagggcaagcgagtgagccgccctgggcaggctgcgctgtccgccgcctccgcgtggcctgccgtggccgtccgccgcgcagctgccgagccaggccggccgagccgcagcagcccgccgccacgctgccccaagcctcctcccgctgccgccgcacagatctag

SEQ ID NO: 63575 - DNA, 1530 bp, Oryza sativa
  Clone ID: PAT_MRT4530_64804C.1
atgggaagaatagctcagcagcgtatgcagcaggctatgctggcaaacaatgctgccaataacttatctgaagggaacgcgaggacatctaatcttgggggtgggaacatgacttctgacaaccaagttcatcaagctacccagtcaggtggtgcggcagtttctcatgatgggggtaatctccaaggacaagagtcagacagatctaatgttgagggtggtacaagcgctggccatgatcaagcaagtgcatttgatgctgcaaaggatataatggaagctcttaggagcaagcataccaatctagccaatgagcttgaggttttactgtctgaaattggatcaagatttgttactcttcccgaggaaagacttcttgctgtggttaatgcattgcttcaccgctgctacaagtatccaactgcaactacaggcgaggttccacaatctctcaagaaggaactttctggtgtatgccgagcttgcttttcacaagatgctgttaacaagcatgttgattttgtcaaggagtacaagcaagattttgaacgtgatcttgacccagaaagtgctactacttttccagcaacacttgctgaactcactgagagattgaagcactggaagaatgttcttcagagtaatgttgaggatcggttccctgcaattttaaagctagaggaagaaagtaaaattctcagggacttccatgttgttgatatagaacttcccgggcagtacttcacagatcaggaggttgcacctgatcatactgtcaagttggacagagttggacctgatattcctattgtccggaggcacggtagtagcttccgacgtctgacacttattggctctgatggttcacagcgccattttattgttcagacatcattgactccaaatgcccggagtgatgagagaatgctgcagctattccgtgtactaaacaaaatgtttgacaaacataaagagtcgaggcagcgccatcttgctattcacaccccaatcattattcctgtttggtcacaggttcggatggtagaggatgatttgatgtacagcactttcctggaggtgtatgaaattaactgtgcccgacataatagagaagctgattcacctattacaattttcaaagaacagctaaatcaagccatctcagggcaggtgtcccctgaagcagtggtggaattacgcttgcaagcctataatgaaattactaaaaatatcgttaatgataatatcttctctcaatacatgcataagattctaccaactgggaatcacctctggaccttcaagaaacagtttgcaatccaagtggctctgtcctgtttcatgtcgtacatgttgcagattggtggtagggctcctaacaaaatattatttgctaaaaatactggcaagatcttccagaatgatttccatccagcttatgatccaaatggaatgattgagttcaatgagctagttcccttttggctgacacgcaatatgcaagctttcttctcaatttcggtgttgaag

SEQ ID NO: 63576 - DNA, 11127 bp, Oryza sativa
  Clone ID: PAT_MRT4530_64805C.1
ccaccagcgatctttccgcttcaggcgtaccatacgcccctacacggaacgctccgtccctcgcctgtgcaagtcggactggagcttgccatggaagtgcgggacagcctggagatgactcatactccagactatcttaactttcttagatgctacttcagagcattctcggccatcctcagcaatttcaccggccaacagggcactgagaatgcagagcacaagctgcggaatatggtgattgagatcctcaatcggctaccccacagtgaggtgctccgaccctttgtgcaagacctgctcaagctctctcttcgtgtattgacacaggacaatgaggactatgtacttctggccatcagaattgtatttgatctcctccgtaactttcgccgaactgtcgaggtagaggtacagacgttttttgaatttgttgttaccataaaccgcaactttcccaatactgtcccccatttcttggccaagccctgcaagcgggccatcgatcgtgggggcggcccggattaacatcgaggacccactgctcggggccccaagacgttgggagtcatggcggggaaggtgctcagttccccggctccgagaacgtcaaccgcctccgatcgccgcccggcttcaattctgacatcatgggcggtcgataccgttcttcaggtctgcgtagcacacgactgccgacgcctccacgcagctgatccagaccaagtgtcgaccgcagtggcgaccaaccaggttcatccctctggcgcgatcaaccctcggctcaggaaccggatccctgcccgccggtcgtctcctacccacatttcggccaggcaagaacggcagggagctctcaggccatctatgacgggtggctctccacggcgcagctcaagaccttctccgactgcgtcagggacgccatgcgcgggccttcgaccgccggccacccacggccgacaagcagcgcaagctccaggagtggagggcccgccaccagccacgacaagtgcagtgccacctcgagcaggcgcagcgacatcgccggcgggcactcggcagtcacactccgggttctgggactgggacactgcccgagaacacgggaggggtttctaccgcttccgcgggctccgtcgcggcaatcgtcgtccgcagcccgctgtagcggtacagactcttatgtacgcgcgcatgcgccggcatagcacttaggagattaatcattacaaaagtctgataaggacactcgtactaggaatgaagacaataatctggagcataacccatgctcattggccacgcccacagcaacaaagtcaacaatcatcaaatttatcagtacaaccattcaggggactgcgggaggatgaggtgcggaagacttcgggtgttctaaaatctggggttcactgtttggctctttttaaggaaaaggatgacgagagagacattgaacaaggtttttccccagtgcgtgctattacttttccagcaacacttgctgaactcactgagagattgaagcactggaagaatgttcttcagagtaatgttgaggatcggttccctgcaattttaaagctagaggaagaaagtaaaattctcagggacttccatgttgttgatatagaacttcccgggcagtacttcacagatcaggaggttgcacctgatcatactgtcaagttggacagagttggacctgatattcctattgtccggaggcacggtagtagcttccgacgtctgacacttattggctctgatggttcacagcgccattttattgttcagacatcattgactccaaatgcccggagtgatgagagaatgctgcagctattccgtgtactaaacaaaatgtttgacaaacataaagagtcgaggcagcgccatcttgctattcacaccccaatcattattcctgtttggtcacaggttcggatggtagacggattgagttatgatgtacagcactttcctggaggtgtatgaaattaactgtgcccgacataatagagaagctgattcacctattacaattttcaaagaacagctaaatcaagccatctcagggcaggtgtcccctgaagcagtggtggaattacgcttgcaagcctataatgaaattactaaaaatatcgttaatgataatatcttctctcaatacatgcataagattctaccaactgggaatcacctctggaccttcaagaaacagtttgcaatccaagtggctctgtcctgtttcatgtcgtacatgttgcagattggtggtagggctcctaacaaaatattatttgctaaaaatactggcaagatcttccagaatgatttccatccagcttatgatcccgtttctagtaccactggacagaagcatacactttgcagtcagtgcagttatacaacgaacttgcttctcaaatttcgacaggaaacaggctcttcagtttattcgagtgtgcttggattctttgttaaacttacgggaaaatgtacccggtgagggtgtgagatttggcgtatgtttttcccgtgatgaactgttatcttggtcatggaggaggccacttggcattccttctgttccagttgctgctggaatgattaacccgttggatttccagcaaaaggtgataaacaatgtggagcatgtcattacccgtatcaaattaatatcaccacattatcttgctgatgaggaggagaattcatctgagccacctcagtcggtccaaagaggcgtcacggatctcgtggaagcggcattatcttcgaggaacctgtgcatgatggatccgacatggcacccgtggttctgaaaagtgaaaacaaactcagcctattgtcgcctggccaaatatttaccatagccttttgtagcctgaccgagattgctcgtaggtgatgtaaatattaaccttatttggcaacaaccgtgaactagtcgtagtctcatcatgtagataagaaatatcggcttttagctttactcgtattagtgctctatttgatatttataaagagatttagtttcagagcatgaataaaaatatttaaccaaggaaccccacgcctgttgcattgttgttatggtagcacatggcaagctcagatgggtggtgtaatgggccttggagcgctggttggtaaagtgtctgtggataccctatgcattttccaggttagagttgtacgcgggcttatccatgttcttaagaggctcccgatgcatgcaaacaaagagcaggaggagacaaaccatgtcctaacacaagttctacgggtagtaaacaatgcagatgaagcaaacagtgaacatcgccgacaaagttttcagggagttgtggagtttcttgcagtggaactgtttaacccaaatacctcaattgttgtgaggaagaatgtgcaggcatgcttatcactgcttgcaagtagaactggcagtgaggtctctgaattgctggagcctctgtacctcccgttgctccagcctctgatttcacgatctttgcgttccaagaacattgagcagcaggtgggtactgttacagcattgaatttctgtttagcactaagaccacctcttctgaagttgtctcctgagctcgtgaactttttgcaagaagcactgcaaattgctgaggctgatgagactgtttgggtcaccaagatgatgaatgcaaaaataattatgacatggaacaaattgaggacggcatgcattgaactactctgtactgcaatggcatggggagatctgaaagctccaaatcatagcgacttacgtgcaaagattatctcaatgttcttcaaatctctgacatgcaggactacagagattgtcaatgttgccaaggagggacttcgtcaggtcgttcagcagcaaaggatgccaaaagatcttctgcaaagcagtttaaggcccatcttagttaacttagcacatacaaggagtcttaccatgccgttgctccagggattggctcgtctgcttgaattactatcaaactggtttaatgtcactttaggtgctaagttattggatcacttgaaaaaatggctggagccagaaaagcttgcccagagtcaaaaatcttggaaagctggagatgagccaaaaatagctgcagctatgattgagctttttcaccttcttcccccggcggcgagcaaatttttggatgaccttgttacgttggtaattgatttagagagggcacttcctgaagatcaattttatagtgaaatcaacagtccttatcgtgctccacttgcaaaatttttgaaccgctatgccgtggaggccgttgactattttcttgctcgattaagccatccaaagtatttcagaaggttcatgtacataatctgctctgatactggggagttaagggaccagcttgcaaaatcgcctcaaaaaatacttgctagcgccttttcacagttctattcacaaactgaagctgctggtaatcaatcttcctcagtgaaggatgagggacttactggtgccataactgaaggttttacaggccaatcatcatcaaacatggctactggttctgacagttactttaatggactggaacttatttcaacccttgtaaaattgatgcctgaatggctctgtaacaaccgggttgtctttgacactttgttgcttgcttggaaatcaccctcaagaattgatcgcctgcaaaatgagcaggaattgagtttaccgcaggtgatggaaagcaagcggctcataaaatgcttcctaaattatctaaggcatgatcgtacggaagttggtgcgctatttgatatgctatcaatattcttgtaccgtagccgcattgattatagttttcttaaggaattttatgttatagaggttgctgaaggctatgcaccaaatttgaagaaaattattcttaatcactttctgaacatattccagtcaaagcattatggacaagatcatttagtcgttgctatgcagatacttatccttccaatgctagctcattctttccaaaatgggcaaagttgggaagttgttgatccatctattattaaaactattgttgacaagcttcttgatcctccggaagaggtcagtgctgaatatgatgaacccttgaggatagaactccttcagcttgcaacattacttctgaagtatctacagagcgatcttgttcaccatcgaaaggaactcataaagttcggttggaaccatctcaaacgtgaagataattccagcaagcaatgggcttttgtgaacgtgtgtcatttcttagaggcctatcaagctcctgaaaagattattctgcaggtttttattgctctactgcggacatgccaaccagaaaataagctgctggtgaagcaagctcttgacatcctcatgcctgcccttcctagaagactccctccaggggacagccgcatgccaatatggattagatacaccaagaaaatccttgtggaggaaggccattcaattcccaacatgattcacatattccagcttattgttcgtcatgcagacctcttctacagttgcagagcccattttgttccccagatggtcaactcccttagccgtcttggactaccatacaacacaacagcagaaaatagacgactggcaattgaacttgctggactggtggtggcgtgggaaagacagagacaaagtgagatgaaagttgtgcaggaaagtgagaacacgagtcaaattggtgatatgcttagtcctgttattggcggtgatccaaaacgctcatcggatgttcccacatttggtgatgatttgagtaagagggtgaaagttgaaccagggttgcaacccctttgcgtgatgtcgcctgggggggcatcaatacctaatatcgagacacctgggtcttccgggcaaccagatgaggagtacaaacctaacgctgctatggaggagatgatcattacattccttataagggtgtcgctggtgattgaaccaaaggataaggaatctagctcaatgtacaagcaagctcttgatctactgactcaagctttggaagtctggccaaatgccaatgttaaatttaattatcttgagaaattgcttgggaatttgacaccttctcagtccaaggatcctgcaacagcacttgctcagggcctagatgttatgaacaaagtcttagaaaagcaaccccgcctcttcatccggaataacatcaaccatatttctcaaatactggaaccttgcttcaacaacaaaatgttggatgctggcaagtctctttgttcattgctaaagatggtattcagcgcgtttccccttgaagcagctacaacaccacaagatataaagttgttgtaccaaagagttcaagatctcattcaaaagcatcttgctgctgtaaccactccccagatatcacttgaacctagcaatgctaactctatcataagctttgcactgtttgtcctcaacgcactcgcagaagtacagaagaattttattgatccgttcataggtttgcttcttcgagtcctgcaacgtcttgcacgtgacatgggatcttctgctggcaaccatgttcgacaaggacagaggcctgaacaggattcatcagttaattcacgccccacagtagaccctatggtcatatctaacatgaagaccgtcttaaaactcataagtgagagggtgatggcctcttctgagttcaggcgatctatgggccaaacacttcaagcactcctttcagaaaaaggcacagatcctagcgttcttctatgcatactggacatgataaaagcttggattgaggatgactacagacttgcttcatctactggctctgtcagttcacttaatccaaaggagataatagcttatcttcagaagttatcagtagttgacagaaaaagctttcccccatctgtacaagaagaatgggatgcaaaatatttgcaacttctttactcactctgtggagatacagctaagtatcaaatggctttgaggcaagagtattttcataaggtggagaggcaatacatgcttggacttagagctaaagacccagaaatgaggaagcgattcttcaaactttaccatgactatgtcggaaaaacattatttgctagattgcagtttataatacagacccaggactgggaagcagtgagtgatgttttctggttgaagcaaggcctggatcttattttggcaatattagttgaaaatgagccaattacactcgctgcaaattctgctcgagttcctgcacttatgacatctgggccagtttcagatcgcatgattatgccacaacaggctcctgatgctcaggaaagcttggatggtacatctttatcgtttgattctctgactacaagacatgctcagtttttaaatgaggcaagcaagcttgtggtggcagatgtcatggctccattgagggaacttgcatttgctgatcccaacgtcgcatatcatttgtgggttcttgtattcccaattgtttgggtaaccttacacaaagaggagcaagttgctcttgctaagccaataattgcgcttctgtcaaaagattatcataagaggcagcaaggatgcagacctaatgtagcccaggcactccttgaaggtcttcacttgagccatcctcaaccgcgcatgcctagtgagcttatcaaatatatcggaaagacctgcaatgcatggcatacttcgattgcgttactcgagagccatatgatgcatatgaatgaggccaaatgctcagagtcactggctgaattatacaggcttctcaatgaggatgacatgagatatggattatggaagagaagatcaatcacagcagaaactagagctgggctatcacttgtccaacacggttactggcagcaggcacaaaatctcttttaccaggcaatgataaaagcaactcaaggtacatataataacacagtccctaaggctgaaatgtgtctttgggaagaacagtggttgtcttgtgccactcaattaggtcagtgggaagtattggctgattttggaaaaggtgtggagaattacgagattctcttagactgcctttggaaggcgcctgactggacatatatgaaggagaatgttattccaaaagctcaggtagaagagacaccaaagttacgccttattcaatcatttttcactcttcatgacaaaggtactaatggtgttggtgaagctgagaaccttgtcagcaaaggtgttgaacttgcactagaacaatggtggcagttacctgaaatgtctgtgcagtcccgaatgcctctgctgcagcagtttcagcagttggttgaagtgaaagaatcctctaaaattctgcttgacattgcaaatgggaacaaaccagcttcaggaaattctggtgccaattccaatcatcacaactcctttgctgacctcaaggatattcttgagacatggagacttcgaactcctaatgaatgggataatatgactgtttggtatgacctcctccagtggaggaatgagatgtacaattcagtaatagacgcattcaaagattttggccaaacaaatcctcaacttcatcatcttggttaccgagacaaagcttggaatgtgaacaagcttgctcacatagctcgcaaacaaggtcttcctgacgtttgtgtaactatactcgataagatgtatggtcatgctaccatggaagttcaggaagcatttgtgaagatatgtgaacaagccaaggcatacttagagatgaaaggcgaactagtcagtggtcttaacttaatcaataacaccaatttggaatttttccctgtgaagaacaaagcagaaatatttcgtctgagaggtgacttcctgctaaaaatgaatgactgcgagaatgcaaatgttgcttattcaaatgctataacactttttaagcatttgccaaaagcatggattagctgggggaattactgcgatatggttttcaaggagacaaaagatgagatttggcttgagtatgccgttttcttgcaggcattgtattattggcttcggacatacttgatggaacgtcgtgatgttgctacaaaaactgaaatgggaagaatagctcagcagcgtatgcagcaggctatgctggcaaacaatgctgccaataacttatctgaagggaacgcgaggacatctaatcttgggggtgggaacatgacttctgacaaccaagttcatcaagctacccagtcaggtggtgcggcagtttctcatgatgggggtaatctccaaggacaagagtcagacagatctaatgttgagggtggtacaagcgctggccatgatcaaggtcaaccgagttcaactggtgcagatggttcgcaaatgccagcaagacgcaataatggacttggctgggtaacttctgcagcaagtgcatttgatgctgcaaaggatataatggaagctcttaggagcaagcataccaatctagccaatgagcttgaggttttactgtctgaaattggatcaagatttgttactcttcccgaggaaagacttcttgctgtggttaatgcattgcttcaccgctgctacaagtatccaactgcaactacaggcgaggttccacaatctctcaagaaggaactttctggtgtatgccgagcttgcttttcacaagatgctgttaacaagcatgttgattttgtcaaggagtacaagcaagattttgaacgtgatcttgacccagaaagtgctactacttttccagcaacacttgctgaactcactgagagattgaagcactggaagaatgttcttcagagtaatgttgaggatcggttccctgcaattttaaagctagaggaagaaagtaaaattctcagggacttccatgttgttgatatagaacttcccgggcagtacttcacagatcaggaggttgcacctgatcatactgtcaagttggacagagttggacctgatattcctattgtccggaggcacggtagtagcttccgacgtctgacacttattggctctgatggttcacagcgccattttattgttcagacatcattgactccaaatgcccggagtgatgagagaatgctgcagctattccgtgtactaaacaaaatgtttgacaaacataaagagtcgaggcagcgccatcttgctattcacaccccaatcattattcctgtttggtcacaggttcggatggtagaggatgatttgatgtacagcactttcctggaggtgtatgaaattaactgtgcccgacataatagagaagctgattcacctattacaattttcaaagaacagctaaatcaagccatctcagggcaggtgtcccctgaagcagtggtggaattacgcttgcaagcctataatgaaattactaaaaatatcgttaatgataatatcttctctcaatacatgcataagattctaccaactgggaatcacctctggaccttcaagaaacagtttgcaatccaagtggctctgtcctgtttcatgtcgtacatgttgcagattggtggtagggctcctaacaaaatattatttgctaaaaatactggcaagatcttccagaatgatttccatccagcttatgatccaaatggaatgattgagttcaatgagctagttccctttaggctgacacgcaatatgcaagctttcttctcaaatttcggtgttgaaggtctcattgtgtctgccatgtgttctgctgcccagtctgtggtttcaccaaaacaaagccagcatatatggcaccatttggctatgtttttccgtgatgaactgttatcttggtcatggaggaggccacttggcattccttctgttccagttgctgctggaatgattaacccgttggatttccagcaaaaggtgataaacaatgtggagcatgtcattacccgtatcaaattaatatcaccacattatcttgctgatgaggaggagaattcatctgagccacctcagtcggtccaaagaggcgtcacggatctcgtggaagcggcattatcttcgaggaacctgtgcatgatggatccgacatggcacccgtggttctgagctccgatacacaaattgaacct

SEQ ID NO: 63577 - DNA, 446 bp, Oryza sativa
  Clone ID: PAT_MRT4530_64806C.1
gggtacccgccgggcttggcagggacccggtcgcccttgggatggccgctcggcgtcgtgttggtctccccacgcggcgtatggggtatgcgcgcgggaacgcggacggtgcctgcacccgcgggcattgtattccctgcgcgcaatggcaatcctccgcgccaaccaagcgggcggtgccaagcaacggcgcgtcgcagcagcatcccgcccgagcgatttgcgcccgccaggcgactgcgcgtcggaacggcggaccgtcatcggagccgcgggctgaccagagccccttgggctaggccaataccacccctgggccacggcgatctaccccgtgtctcggcgctttgcccccctttctagtcggcctttgtcgcagttcgagttggtgctctacgtggtgggagtttgaggcaattggagaattttaagtatcctaatattat

SEQ ID NO: 63578 - DNA, 2895 bp, Oryza sativa
  Clone ID: PAT_MRT4530_64807C.1
atggctgaggttcttatggccgtggagcgcaaccgtgaggctgaaaacgccgtccttcagcaaatcgcagcaagtgcagccgctaccgctacccacattgcccaaggggcgggcggtggtggacaccatgccgccgggggacttgctgaatttcagcgtactcaacctccggtgttcactcgctccgatgatccacttgatgctgatgattggcttcgcaccatcgagcggaagctcactcttattcgctgccccgacgccgagaagaccaacctggcagccgagcaactccaagccgcagccggtgattggtgggagaactttctcgccatgcaacccgacggccgtgtcgtcacttgggctcaatttcgggatgcttttcgtgctgcccatgtgccgaagggtattatggacctcaaacaatgtgagttcctatctctcactcaaggcaacaagtccgtcatggagtatctctgcgagttcaaccacttagctcgctatgctccggatgatgtcaaaaccgacactcgcaagcaaaatcggtttatgaacgggttgtcggcggagatgcaactcgagctcgctgcacactcttttctggactttcaggacctcgtcaacaggcaagcgggccactacatcaaccaatgcccgtaccctcatcgtgcacaactccaaggaccaagaccagcagcaccacgtcctaatccacctctcagatcagcacctcagggtcagcaaactcagaagaggggtagagtgaaccatgtcacagccgaggaggcgaacgatgcaccggatgttcttgttggtacgctacttgtccattcatacccagctagtgtgttgtttgattctggagctacacattcttttgtcaccaaaggttttgcatcagaccataaactcccaattagtaggttgcacccacctttaattgttacatcacccgattcagaaatcatagctgaatttattagtcgggacacaaagatagctatacaaggggtagaatttactgccgaacttaccatcctccacacaaagggtttagatgtcatcctaggcatggattggatgcacaaaaatcatggggttatcgattgtggtcatcgtctcgttacactagaaaataataccggcgaactaatctttcttgcacttgatgatcattccccacaactccatgctctttcgggcgccaaagccattgatataactgctgtaccagtggtgtgtgagtaccccgatgtcttcccagaggaactaccaggaatgccgccggatcgggaagttgaatttgtgattgatttgctgcccggaacggctccaatctctaaaagaccataccgtatgcctccaaatgagctagaagaattgaaaaggcaactcacgaagctacaagcaaaaggtttcattaggccaagctcctcaccttggggatgtccggctctctttgtaaagaaggaccttagcttgcggataccagaagatataccaaaaatagtcttctctacccgttatggtctatatgagtacaccgtcatgtcctttggtttgaccaatgcaccggtatacttcatgagcttgatgaatttgattttcatggagtatcttgatcagtttgtggttatttttattgatgacaacctcatctactccaaatccgaagaagaacatgaaaagcaccttcgtcttgtgttggaaaaattacgcgaacaccatttgtatgccaagtttagcaaatatctgaacctaaggcaaagaaggtggttagaactcatcaaggattatgacatgggtctacattatcacctgggtaatgccaatgttgttgctgatgcgttgagtcgaaaaccgcaatgcaattgcttgtcggtgatcgttgatcgtcttacaaaatcaactgactttcttcctattcactctaccgacatggtgagtaaattggcggagttatacctctctcgcatcgtgtgtcttcatggtgttccaacaaaaatcatttcgtgtctccacaaagcaatgggaactaaactctttttcagcactgcatatcacccacagaccggtggccaaactgaaagagttaatcaaattcttgaggatatgctgagggcatgtgtgctggaatatggaaaaaattgggaaaagtgccttccatttgctgagttctcttataacaatagttatcaatctagtcttcaaatgtcaccatttgaagccttgtatggaaggagatgtagaacacccctaaactggtccgaatctggggagagaccattttttggtccggacattgtcatggaagccgaagagcaagtgcggttaattcgcgatcgcttgcgaaccgctcaatctaggcaaaagagttatgccgatcgtcgtaggcgtgagttgtctttcaaagttggtgatcatgtttatctcaaagttactcctttcaagtccacgcatcattttggagtaaaagtaaaattggcacctcgctatattggtccctatcgcattgttgcaaaaagaggagccgttgcatatcaacttgaccttccatccacactctcatcctaccatgatatctttcatgtctctcagctgaagcaatgccttcgagttcctactgaagaaactcaattgaagatcttgacctacaacccgatctttcttatcaagagcacccgattcgcattcttgatgaaattgagcgcaccactagaaggcacactatcaaattctttaaggttcagtggagtaatcataccccagatgaagccacttgggagcgcgaagatcatcttcgtgatgcctacccttttcttctcaccgatccatcgcaatctcagggacgagattctttttaaggggggaagagctgtaacagccctaggttcataa

SEQ ID NO: 63579 - DNA, 723 bp, Oryza sativa
  Clone ID: PAT_MRT4530_64808C.1
atggattttaacgttcacgaggtcttttgggaccgctgagttaacttcttgggaagagctagaaggattgctgcaaaatgtagctttgcaagcaaatcctgataagctaacctgtggctttcagagaaaaacaggaattgtactaccaaaagtcagtctatagagccctgacctttagacgagttctagacctgagaatgaaagatatttggggtgcacccatacctttgaaacataaacactttccctgattggcttgcaaaaacataattcagtctacaagtcaactgaagagaagaaattgggtgagatctaaattttgtcaactctgtgaccagttagaggatgcaaatcacatttcatttacttgccctatagacacattcatttggtgtgtttgtcgggttgccttggggtgggatatgatccctatattagctttcaggattcttttaaccttgacattgggagaactggatctcaactttctagagttaagattatgcttcgtcttgcagcgtattggcaactctggattgtgtgaaatggcattattttcagacacaagctggttctaacccccctaacaattccttttcttatcatcttttgttgcagtgtaaggtgtcgctgagacagtgtgagattgttcccttcagttccttggagtccctgatagcagcgttgcaagagactgttcactgcttaaggagtactgttctg

SEQ ID NO: 63580 - DNA, 3261 bp, Oryza sativa
  Clone ID: PAT_MRT4530_64809C.1
atgcggcagaggcggccggaggcggaacagtggcagcaacgccactgttgccggtggggatgcacttccggaggtctccgcgggaaatggacggcatgccggggaaggggaggtgactgcgacgccgggggaggcgacggcacggccggccggcgcaaggcgcgcacgtgcgccgcgcatgcagaggggcgcgagggagaggagggaggcggcctagggcggcaggtcggctgggccgggatagggcaggggcggcccaagcggaagaggagggaagagcggaagctcactctcattcactgccccgacgccgagaagaccaacctggcagccgagcaactccaaggcgcagcaggtgattggtgggagaactttctcgccatgcaacccgccggccgtgtcgtcacttgggctcaatttcgggatgcttttcatgctgcccatgtgccgaagggtattatggacctcaaacaacgtgagttcctatctctcactcaaggcaacaagtccgtcatggagtatctccgcgagttcaaccacttaactcgctatgctccggatgatgtcaataccgacacctgcaagcaaaattggtttatgaatgggttgtcggcggagatgcaactcgagctcgttgcacactcttttctggactttcaggaccttgtcaacaggtccgtggtcattgaaagcaagatgaagaaccttgaagctgagtgcaagcgcaagagggctgcgcagatttcagccgcgggtggttcgcaaaaaccccatggttggcagccgccccctccgcgttttcaagcaccaccacctcctcgtccacaaggattcgtgccatgccctcctcagcagcgtgtcgcgcctcctgtgggcggaaatcagcaagctattcgcccacctgttcgctccaacaactgcttcaattgcgggcaagcgggccactacatcaaccaatgctcgtaccctcatcatgcacaactccaaggaccaagaccagcagcaccatgtcctaatccacctctcaggtcagcacctcagggtcagcaaactcagaagaggggtagagtgaaccatgtcacagccgaggaggcgaacgatgcattggatgttcttgtcgggtttaggtgttatcctaggcatggattggctgcacaaaaatcatgggttatcgactgtggccatcgtctcattacactcaaaaataataccggcgaaccgatctttcttgcacttgatgatcattccccacaactccatgctctttcgggcgccaaaaccattgatatagctgctgtaccagtggtgtgtgattaccccgatgtcttcccagaggaattaccaggaatgccgccggatcgggatgttgaatttgtgatagatttgctgcccggaacagctccaatctctaaaagaccgtaccgtatgcctccaaatgagctagaagaattgaaaaagcaactcacggagctgcaagcaaaaggtttcattaagccaagctcctcaccttggggatgtccggctctctttgtaaaaaaggaccttagcttgcggatgtgtgttgattaccgtccgttgaatgaagtcgctgtcaagaacaagtacccattgccccgaattgatgatctctttgaccaactgacaggtgctcatgtgttctccaaaattgatttaaggttgggttaccatcaaatcaaaatcagaccagaagatataccaaaaatagccttctctacccgttttggtctatatgagtacaccgtcatgtcctttggtttgaccaatgcaccggcaaacttcatgagcttgattaattcggttttcatggagtatcttgatcagtttgtggtcatttttattgatgacatcctcatctactccaaatctgaagaagaacatgaaaagaacctctatcttgtattggaaaaattacgtgagcaccgcctatatgccaaatttagcaaatgtgagttttggttgaaagaagttggatttcttggtcatgttttatctgaaggtggagttgctgtagatccaagtaatgttcaaaaggtattagattggggacaacccaaaaatccatccgacatccggagttttcttggtctagctggctactaccgtcggtttattgagaatttctccaaaattgctaagcctatgacccaattattgaagaagaatgagaagtatgtatggtcagctgagtgtgagcaaagttttcaaaccttgaaagaaaagttaaccactgctcccgttcttatcctacccgatatacacaaaagcttcgatatctattgcgatgcctctcgtcaaggactcggttgtgttcttatgcaagaaggccgagttgtggcatatgcatctcgtcaattgagacctcatgaagtgaactatccaacccatgaccttgaattagcctctgttgttcatgcactaaaaatatggcggcactatcttatcggtaaccgttgtgaaatctacaccgaccacaagagtttgaaatatatcttatcccaatcagatctgaacctaaggcaaagaaggtggttagaactcatcaaagactatgacatgggtttacattatcacccgaggaaggctaatgttgttgctgatgcgttgagccgaaaaccgcaatgcaattgcttgtcggtaaaaccccgatcggagaccttatgttcagaaattcataaacttggtttagaaatggtaccacatggttcccttgctgccctagaagtgaaacctactttatatgatcagatcaaagaggcccaaaaagatgacaaagccttgtatggaagaagatgtaggacacctctcaactggtccgagtccggggagaggccattctttggtccagacttagtcaaggaagccgacgaacaagtacggttaattcgggagcgcttgcaaaccgctcaatctagggaaaagagctatgccgaccgtcgtcgacgtgagcttaccttcgatgttggtgactatgtgtacctcaaagtcactccattcaagtccacacaccggtttggagtgaaaggaaaattggcacctcaatccttggcgcgaagcgtcacagtacaccaggaagtccttgcgagtatccgtgattggaagcaacccaagacagtcactcaaattcgcagctttttgggtttggccgggtactaccgaagattcatcgagaatttctccaaaattgccagacccatgacgcagttgctttataaaacctttttaactttgtttatttcttaa

SEQ ID NO: 63581 - DNA, 588 bp, Oryza sativa
  Clone ID: PAT_MRT4530_6480C.1
atggcgcggctgggcgcagccgggatggtgcgaggccggcacggaagcggccggaaagatgtggcgaggctccggcgacctcccgccggtggcgacggctcgccttcctcaccgctcgcgtgctgcgcgccttcgtcgacgcccgcaaccgcgagtagttcctgccgagcaaccggtctttccgccacctcggcagacagcattgacggtgcccgaaagtgctcgtcgacgttccttgcattaacgtccaacctccccaatggcgacgacggcagcgcggctccgcctccacttcctccaacctccaactccggccggggagaccccgcaatggtggtttctagtagcgacataaagaggggcgccgagacatcattggctgtggataaggtggcggacgtggccatggcgacgcgcgcacatggaagctgtggcggaacggcggcttggttgggcggcgggcccacgcgggcgctgtgcgccgtggtgcggtgcacgggaggcaggtgtgaggcggcatgggcgttgctggcgcggccgggagcgatgtgggattttcaggatgttacaattggagcgggccaatag

SEQ ID NO: 63582 - DNA, 558 bp, Oryza sativa
  Clone ID: PAT_MRT4530_64810C.1
ttagttgcaaccatcactaattatgtttaatctcatatccataggatgactcgtcccagcactcgctctcaatcccatgatgctccggagggttcccgaagccgtggtgatgaaccgccacctcctcctaccatggctgaggttcttatggccgtggagcgcaaccgtgaggctcaaaacgccgtccttcagcaaatcgcagcaagtgtagccgctaccgctgcccacattgcccaaggtgcgggcggtggtggacaccatgccaccgggggactcgctgaatttcagcgtactcaacctccggtgttcactcgctccgatgatccacttgatgctgatgattggcttcgcaccatcgagcggaagctcacatcctccccctaccgcccgcccgcagctcctccccctaccgccgccgcgtcatccatcgccgactgccgacgccctcctcctctcccgccttgcactgtcggcctcgcagagaagggaaagagcgagagagatgaggaagggagagaagaggggaaaagagagaggaggctgatgtggccatgctga

SEQ ID NO: 63583 - DNA, 106 bp, Oryza sativa
  Clone ID: PAT_MRT4530_64811C.1
ggttggtgcatgtagcgacgttttattagaaagagagtcttcaccacaggttgcggattcgcgacaggaggacctggctcgacgaacgcttaataagcatcacgcg

SEQ ID NO: 63584 - DNA, 281 bp, Oryza sativa
  Clone ID: PAT_MRT4530_64812C.1
cagaaaatatgccttgtaaaaattgactgaagggtgtaaaaattgactgaaggggtagtatattgtgctgtatgatgcaaatcaaaccaactggattttttaactcaaaatattcactcaaatgctctgataagtaccacacttgacaactcactgtaatgtgtctacgaggtgtcaacaaatcaaaatgaattactctatgtgggtactatcattatgagaatctagagagaaaattgcagcaaatgtacccaccctattataaagtataggctcctact

SEQ ID NO: 63585 - DNA, 890 bp, Oryza sativa
  Clone ID: PAT_MRT4530_64813C.1
gcacgggacgaggctcgcggcagccgcgctccggagggccaccgccgcatcagggggccattcgcgtcgtgttgctccgtcggtcgtgtgtcccccaaaggctccaagctccgtcgttcctctcctcctccgccgccgccgccgccgaagccgacgagcagtagccggtaggcatgacgaggctcgcggcagccgcgctccggagggccaccgccgcatctgggatcccctcgtcctcctcgcgctcgtccgtgcttgctccgttcgcgcctcgcctcttctccaccgaggcgtccggagaaacccccgcggcgggcgccgccgcccaggggtcgcaggacgagcctttcttcaagccttctgacgaaggtgtggcatatggaaggttctacagtgttattcctggaggcagccgtctccctaagagcatgctcaaaactgatattatccaccaccttgataaatctgaactgtcactggacgatgtgaagattgattataacaggggatattatccagtgggcgcgttgttgaggttttcttcagtgccattatttaacacagcagtcaggcaaacacgagaaggtcgtcagtacaggcttgagatgatcagtcgtgaggagtttgatctgaagcagtcttatgatggaaaagctatactattgcaaggagtccctcgaaatgctgtaccagaggacatagaacgattcctgtgtggcaccaatgttgaacctccgccatttgaaagctttctcagacctggtgtcccagatcctatcagagtggtgctggttaaattccgctcaaggactgatgccgccaatgctttcattactaagaaccggggtttctgcctgaacaaccctgtgagcatgcgtgttcttcaatag

SEQ ID NO: 63586 - DNA, 711 bp, Oryza sativa
  unsure (1)..(711): unsure at all n locations
  Clone ID: PAT_MRT4530_64814C.1
ggctttgatgttcacacaaatccatatatgactggagcatcattatcagatcaccattgtctttatcatactatcttcccatttctgcacattatgttcttagtgctagccaccttgatgaggaagatacaagttgttcgcagggtaccttaaatcctggtgaggtggttagggtccaaaatgttgatccaaggaatcctttgtacttgtcacttgttccacatgggggatggacatcacatgaacctgttcctatatcacatcccaccgtagctccatcaaaatttattaatctaagaagttctctatctgaaaggattgtacagattgtacttgaacaaagcagcgataaggactatttgatggcaagagctatcagaatatatgttccctattggatatcttttgcaagactgcctccgattaacctgcaattaattgatatctctggaagaaaagacaagaggcgttttcttgcacgccctcgttcagaaaggagcgagaaaatactttatgaaataaaccatgaagaattggttgaaggatacactatagcatctggtttgaacttcaaaggcttanggctctcagcaagtgcctgcagacatgggagtggacagtttggattgctcanagaactatcacctcttggcgacatggatggtgctgntgatatttctgcctatgatgacgatggaaaatgcacacata

SEQ ID NO: 63587 - DNA, 1628 bp, Oryza sativa
  Clone ID: PAT_MRT4530_64815C.1
gggctgcaggaatcggcacgagggcagccccgggcgggggagagagagagaggggaagcgtcaacctcccgaatccatcgccgccgccgccgccgccgccgccggcgatgtctccgccggccgacaccgccgcgctcgcctccacgtccggcgccccgctcgcgcccctcgtcgccgcccagctcaacttcgtcctctcccaagccaacctccccatcagggtggggcagatctggtccggatgccgcgacggccgctacgccgatcgcttcacgctcgccatccccttctgcctcgactacgtctactgggacttcctgtacaatgcgctgtcgccgaaggtggcgccggatgtggtgttcggcccggacgacgaggggtttcagccgctagtcgatttcgatgagaccgggagtggggagaagagctgcttggcaaattgggattgccgggacacctcggccctcctctctctcatcaaagagctccgtgaattttatattgaataccaaaagaagcgggcagccgaggttgatgacgcaagactgaaatttgaaataagcacagttctgtctaaggaggggattgaagtctgcacggtatcgtccaatggtagaccagatgaggtgaaatttgctgtcccacttctggatctggaccttgccaaactggttcctggatgtccttggaaacttcctcaaaagatccatttgcaggctgtttttccaattagcagaagttactcctctgttccttctgcaccacgactcaaattagtctcaaccccagatttgaagtcatttttctcagttgatgatgttaaactccctccatggttagatggaatgtgcatggctgagtatcttcctaacttggaagaaaatcttaaaatccaggttgtggaagcatcagcttcaattggttctagaagacgtttcattgaagcattggctcctacttttggaaggccattagaggctgatccggtccactttgtcattcccctccaattccctaagcatcaacctgtgctgacattagagagttctcagcacttcaatgcccaggggttacctatcatgtcagctccagtaaatgactatccctggagccctagatgggatccaacagaaatggttgaacgcatctatgactttttggttgacgagtgccaaactttcaagaagttttgcagcgattctatccctcaacagaagtagctgctgcggtggcctcgctgtcgccgcccgcttgctcggcccgctcgcgggttgcctcctgcgccccccggccccgctccggaattcccgggcccacccgcgcgcccggtcaggcagtagaatccataagatttggataggtgcgcttctgtttgacaagtaaattgtgtacacctagagcaaagctgggcatatgttttgttggttaaccccattgctgctggtcctagactcctaccttgtgattgctgggataaatggcaacccaattgttcctgccctgtacatacagataccgcacgtttaccaccggccgtttctttcactgtaaagtttgatgcaagtgacctctggctgctatggtttactgtacttaatgatttactagtaaaaaaaaaaaaaaaaaaa

SEQ ID NO: 63588 - DNA, 713 bp, Oryza sativa
  Clone ID: PAT_MRT4530_64816C.1
ggctagctgattgatccaccgatcgatcgaagaggaagaagaagaattgatcgatcgatcgattgattgatcgattgatcagagaggaagaagaatttgattgatcgatcgacgacgaagctatatatatagtcgtcggattgatcgatcgagcgatggcggaggagcggaggagagacgacggcggcgacgtggaggtggagctgagcctccggctgaggaccggggacgacagtacaagtgctgacccggcgccggcgacggtggcggcggaggcgaggaggaacttgaccatcttctacaacggccggatgtgcgccgtcaacgtcaccgagctacaggcgaggacgatcatatccatggcgagccaaggaaatttcggcaagcagcagcagcagcaaatacagggtagggacgatcaccactaccaccagggcgagagcagcagcggcggcggcgtttccacggcggcggcgcggcactgcgacgtcgccggcagcagcagcagccacagcggcagcggcagcggcagcgcgacgccgccccggccggcgctggtttctcctcgcgcgggccttcaggcggccgcggcggcggcgccgacgatgaaccagccgccggcggcgagcgggctgtccatgaagcggtcgctgcagcgattcctcgagaagaggaagacgagggccgccgcgccgctgtacgcccggcgatag

SEQ ID NO: 63589 - DNA, 366 bp, Oryza sativa
  Clone ID: PAT_MRT4530_64817C.1
ttttttttttttttttttttttttttttttttttttttttttttaaggattttttttttttttttttattttttattttttttttttttttaattttttaaaaaaaaaaggttttaaaaataaccggaaaaaaaaagggggtttggaaaaaagcttaaaaaaacagtggaaaaaaaccaccccgggtttttcccttaaaattttaaaaagtacaaggggttttacaccctttggctaaacctgtggtttaacccgaaaattccgaccgggtcctaggaggttaccaagttttatttatagggggtcaaataaaacctgggcttaataagggaaaaactttattttttggggaaaatttttttcggt

SEQ ID NO: 63590 - DNA, 3674 bp, Oryza sativa
  Clone ID: PAT_MRT4530_64818C.1
atcaaaatcacgtccttgtcatacagtagtaccaataaatccaatgctgacaactcagtgtcccctagctctagaattataataggcctgaaaatgggcaactgttatgtcctaagattgataatttaacatattcactcccacttcacctgggagctacaaatcatcagttacatggatgacaaaattttcgtagcagcatggtggagcaaaactggttagctacataaaaaagacgctactagttgaatccggcccagattataccaagttgttctgcatctccagcttgatatgccgaggcatcagacctcgtctgctgtcaatccgagcctcttttttctggaggcggcaacttgagctagtttgaagcaaccatatgctctggatgatgtgcctcaggagatttctgggactcattatgcctgcaggtctcttactattttcagttatctgcgggctcgcttcttttgcttatcttcctctcggtacctcacacgcctctcctctctctgccgcttcttcgttagaagttcagactttgctttctccgcctcatatgctttcttcttcttctcatcctgcaatttcttcttccttgccttctcatgttttagcagccttaactgttgaatggctgcatgtgtcttcttctcactgggctgcataaggacagggaccctgttctccactggtgtttttctatgcttgggcgtatccttcggtttagatttaaaaggaagtagatgctgcagttttgcagggatctctataggattaaacttccgcactttccgctcaatgggcttataaactgaatctgtgttgtgcggtataggaatattatgtgccctccgcagctcagcagtagttctcatgccttgccaagtctcatcttggggttgaagagcagttgtcacaaggttacagtaggtgggaacttcaacattgacccatgcacgcatgaagacaatgtcactcataagaattctgtcttcaaatgtgcaccttgcaatcccgtctatactttccccttttctccttggcatatctcctggttcaatctttgctgctgtccgaatagttgcaccctcaaacctagcaacctctaagtcagatgtgaacatgcctttgactagggcagttttcttaaatatcttgcacggtacacctgtgagcttgattttcttcatgattcgggcagtattgttgaattcttgaacaaagcctgttgcagtaattctaaatggtacctgactgttggagagatgctggactgccagtacaccactttttggtggagcaagcggtccccaaaacatagcaaagcaatgcatatgctcaggtgtatatttgagcatgcggtgccgaccatttcgatcctctattgcatatacaggagttgtttggaaacgcctccaaccaatagagacaataattgggtcttttgtcttcagtactttcctgtgccacctgtgtcgtttcaggctagcctgcatatatccagtattctcctcaccaaggccaatgcctccaacgagaatgggatggcaaggatcaaaatattcaactagctcaaacggcacaccatgtacctctaatctgatgtaagaaccagtcctaaacccttcaatttctaccctggtatcttcatctaaatcattgagttcggaaatattcatttgcttgcgaatttcaatttcctcctttaacttatcgaaatagccccctccattagtttcttctcgtttcgatttctttgtgtcattatcaacttcctcaccagtctccagatcttcaaaatctccatcgacttcttcgtcatccacatcgttttcatttatttcctgtcctcttagagctgcttttgaccaatttccagtcacgaaacggtcacgaatgctcttgatgagatcttcgtcagaccaatctcttagctcagttttaaaaaacttggagtaatcctcagcatccatatcatcaaagcttgttgattcattctttgcttgcttcttttgtccttttggtacaaaaaattcttcatctgaactctcttctgcactactgtcatttccttcatccagcttctttgaagcttggccatatacaagttgcattagattggcactccgtctggacagtgttctagcaagcaaggactctttccactttgaattgttctcagtttcatcatctgaatcaagtgattcttcactgtcatctgcggaaccttcagataactggtcatcaccagaattttcactgtcaacgtcatcttcttccgcaccctcatcatcgtcatcatctttaaaattagctgatacagcttttctcctcatccttccattgcaaaattccacctcttctctcaagccaacttcatggtcattttgctgagttgcttcatcattatcatgttcactatcgctggagcactcagaataagaatgatcattgctctccaatgtgtttgcgttgcatatgttattaccatctgcttcttccaaaatattagcatctccctgatcattctggttgccagagatgtcttcggactgagcagcaggctttctaccaaataaatttataaaactctgatccaacttttcattaagggaatatctggggttctgaagtgtttttactagggttacaccaacatcctgtcctttcccttgctttttagatgcatcattctcaccagtctttgagaactgaacaagatgaggattgatgtttatataaactgcatctgtgtcatacagtagatcaccaaggccagacattggcgcgtagaacagcttttccttgtcacgtagtcctctcttctttgcagctgatggcaatgggcaaggatctgccaaacttgttaccccagacaagctaaaatcacctgcccctgtgatatgtacctttgtccctcttttcatgttacagccacgaaggtagccatacaatgttattttcctgtcacactttctgttcaagcgcacactttctggaggagttacatcttcaaatctatcgactagcagataaggatgtgccatcctccaactcagtgggataggcttgataacagagatgaaccttgcaagattatggacttctcttttcgtgtactttccatgaatgagaccagacaagtagaaaagttttgctccctcctttatctcagcccaaaatcgatgcttcaggcgctgcttggttttcctaagcttttttacatctttaaacttatcaagatgtgtaaggactcccatcaccttggggaatccgtgcacttgcataatatttaggaactcaaatgtatccatttcaaatccatagcttccatcaataagcagcagagcaagatcagctattttagcagcatcaatcattccgttgatatcatttggacactccaagaactgtacgcgcctgcttttacctgacacaacagtgattggaccacggacttcagacaaattttgtttcgtgtagtgctttactagacattttatcagcagcgacttcccaacctgaggaggcccttgaactacaacaacaaaaggtggtggttcaccaattgagcgatccataattggcacatgaagacgacgttgttcaatctcagccgatcgtgcttgtagacgcttggcctttgcagctgactgaaaggcaaaagccat

SEQ ID NO: 63591 - DNA, 802 bp, Oryza sativa
  unsure (1)..(802): unsure at all n locations
  Clone ID: PAT_MRT4530_64819C.1
ccggaattcccgggtcgacccacgcgtccgggcattggccttggtgaggagaatactggantatatgcaggctagcctgaaacgacacaggtggcacaggaaagtactgaagacaaaagacccaattattgtctctattggttggaggcgtttccaaacaactcctgtatatgcaatagaggatcgaaatggtcggcaccgcatgctcaaatatacacctgagcatatgcattgctttgctatgttttggggaccgcttgctccaccaaaaagtggtgtactggcagtccagcatctctccaacagtcaggtaccatttagaattactgcaacaggctttgttcaagaattcaacaatactgcccgaatcatgaagaaaatcaagctcacaggtgtaccgtgcaagatatttaagaaaactgccctagtcaaaggcatgttcacatctgacttagaggttgctaggtttgagggtgcaactattcggacagtaagtggaatccgagggcaagttaaaaaggcagcaaagattgaaccaggagatatgccaaggagaaaaggggaaagtatagacgggattgcaaggtgcacatttgaagacagaattcttatgagtgacattgtcttcatgcgtgcatgggtcaatgttgaagttcccacctactgtaaccttgtgacaactgctcttcaaccccaagatgagacttggcaaggcatgagaactactgctgagctgcggagggcacataatattcctataccgcacaacacagattcagtttataagcccattgagccggaa

SEQ ID NO: 63592 - DNA, 360 bp, Oryza sativa
  Clone ID: PAT_MRT4530_6481C.1
atggagaggagggtgagcctccttctccccctcatactctcgccttgtagcccgccgcctcccctcccgcccaccgccgacgccggatccgccgcgggaaccccaccgatgccggatcgtcgtgggaacacccgtcgatgccgcctacctgccgccaacgcccaatctgttgtgggagacctcaccgctgccggacctgccgtgggagaacccgctaacgccgccccacccgctgctgacactgccaccgttgtatccgccacgggaaaagccaccgccgccgatgccagatacggggaggaggacgaggaggaggtggcgagagcaagagagaggaggcggacaacgagtggtggataa

SEQ ID NO: 63593 - DNA, 780 bp, Oryza sativa
  Clone ID: PAT_MRT4530_64820C.1
atgccacatttggctgaccaaccaaccatatcaaagtatatggagagcttgtggggcatgggtgtcagagtgtggcaggaaaagagtggcggcatacaaagggaagaggttgagaggtgcattcgggaggtgatggatggggataggaaggaggactataggaggagtgctgcaaggttgatgaagaaagctaaagaggcaatgcatgaaggaggaaggcaatgtggtgctcatgtctccacatgccgcatctcaattaccttcccaaagccgagcggcgcggcgcggctaccggcaacgaaggaaggcggaagggcttaccggtccggcgacgacggcggcggggtcgacgccggagcacggcgcggcgacgaggcgcagcgcggcggcggggcgcgtcggctccgcggcggcggcggcggcttccaaataggcggcgacgccggagatgggaaagagaggggaaagggagagaaggtgatgaggacaaacatgctaatcgaatgtaggaaatccagggtcttcgtggcttcccgacttcatgagttgatgagcgaagcgaagcgtcactctttgtacttctgccgtcttggtaagcaacgggctcagctgacagtctttgggcacatgatccatcctttcgcagaggaagcaggtgatcttcgtagttgggcattcttcaactggatggtcttggtcgcaataggggcattgagtaacgcaattactaccatagtgtcctatctctccgcaaagagtacatgccttaaccttcgatag

SEQ ID NO: 63594 - DNA, 1866 bp, Oryza sativa
  Clone ID: PAT_MRT4530_64821C.1
ggtcgggcgggcttgcctgctctcccgcctgcccgtcttttttgggcggccgcaagctgaagccagattgctagaaggtagttcttgaggactgaagcaaggtagaagaacttgagcttctggttcgtgtggagctactgggataagttggctgctgattgctgaagatgggagaagctagcagtagttcaggacatccaaggcagaatcctcatgttcttggctatggcttccatggagctatgcccaactccttgccttctgcaaacttgttcgagcagcaaggaggtgctaactattttggagaactagaagaggctctgatgcaacaggtggccacactcaggaggactcaacaaactgcaaccaccacctccacccttcatcatggagacaccacccccttctccaccactgctactgctgcggctacagctaggcctcctcctacactggacatcttcccatcctggcctatgaggtctctccacacacccaaggagggttcaaatgtgacagcagacacaacagactcggagagcagcagcaagaacaacagcaaccaaaatgcctcatcagaccagcatgtgctagtaggagacatggcaggccagttcgaccaaattccacagcaggaacaacacaagaagatggcaactaacagtcccactcatagcagcaagactggcaaggcgcttgatccaaagacgatgagaaggctcgcccagaaccgagaagcagcacggaaaagccgactgcgaaagaaggcttacatccagcagcttgaaagcagcaagctgaagcttgctcagatggaacaggatatccacagagctcgttcccagggcttactgcttggagctccaggtggaaacaccagctcaggtgccgcaatgttcgacgtcgactacgcccggtggctggaggaagacagccagcgcatggctgaactgcacggagggctgcacgcacatctgccggacagcgacctcagagccatcgtcgacgacacgctaacccactacgaccacctcttcaacctcaagggcatggcggccaaggccgacgtgttccacctcatcaccgggatgtgggcgaccccagctgagcggtgcttcctctggatgggcggattccggccctccgagctgctcaagacattgacaccccagctggatcccctgactgagcagcaagtggttggtatctgcaatcttcaacagtcatcgcaacaggcagaggaagctctctcccagggcttggatcagctgcatcagtcattagcagaaaccgtggctggagggtccccgttggatgaccccaacgtcgggagtttcatgggtcacatggctattgccctcggccagctatcaaatcttgaaggttttgtcatacagatcaagataggagttgcactctctctttgtgtgactcaacttcataaatgagtcaggcaggcagctcgatgtttcttggccattggagagtaccataatcgcctccgtgccctgagctcactttgggcttctcgccctcgagagtaaaccccatgcctgatactggtggcagatgaaggcaattgtggggaactaagcattgcagcacatccatctgagagccaatattcagccttctgaaatcctgtttcaaatgtattttgcaactaaccttcaaagtagggagcaaaagcttgttttttaaatgaaatctagcactctagcagatatgtgagaaactcagaagagagttgggaaacaatggaaggctccagctgcactagcaaaattttcagatggaatgaatgggattgcatgattttcagttactgatcataaagcaagtagttcacgtcctttcctggatgat

SEQ ID NO: 63595 - DNA, 498 bp, Oryza sativa
  Clone ID: PAT_MRT4530_64822C.1
tgtatacttgacgcaacagcccatcgtctgatccatccacgccgcctgcctccgcgggaaggaaagggagagagagggaggggaggcagccctgctcctctgcctgccgccgactgttcgtccgtcccggcggcatgggcgcgaacggcaacgacgtggtggcggcggcggcggcggaggagagcccgatgggggccgcgagggtcgtcgcggagggcggggcgacggtgttccgcggcgcggactactcgctgccccgcacgacggtggcgctcgcgctgcggctgggcggcatccacttcaacgtcttcctcgtcctcgcctcgctcttcctcttccccctccgcgtcgccgccatggttgtggcgttccagcttctcttcatgctcatacccctcaacgacaaggacaaattgtgccgcaagatcgccaggttcatatgcaggtacgcgatgggctacttcccgattagtctgcatgtggaggactacaagtgct

SEQ ID NO: 63596 - DNA, 234 bp, Oryza sativa
  Clone ID: PAT_MRT4530_64823C.1
ttgcgtggatgctagaagaacaaggataaaagatttcaaatgtgttgccttgcaagttccaagaaatgccatgcgagaagaatgaaaaatgctggatggatgctcacaaggaggttttgctgtcccactcccaatggtgccagattgctgggaaccacaaggtaaaagatcgtgcaagaacaagcaagaggaggaactgagtgagctggcatcctggttggtaacaatgtaaca

SEQ ID NO: 63597 - DNA, 1669 bp, Oryza sativa
  Clone ID: PAT_MRT4530_64824C.1
gccgcaccgtgtcgcgctcgcgtatcccgacgccatcgaacggcatcagatcggacgccgcccccgccgaagccgaacgccatcaaacttgacgcaacagcccatcgtctgatccatccacgccgcctgcctccgcgggaaggaaagggagagagagggaggggaggcagccctgctcctctgcctgccgccgactgttcgtccgtcccggcggcatgggcgcgaacggcaacgacgtggtggcggcggcggcggcgggggagagcccgatgggggccgcgagggtcgtcgcggagggcggggcgacggtgttccgcggcgcggactactcgctgccccgcacgacggtggcgctcgcgctgtggctgggcggcatccacttcaacgtcttcctcgtcctcgcctcgctctttctcttccccctccgcgtcgccgccatggttgtggcgttccagctcctcttcatgctcatccccctcaacgacaaggacaaattgggccgcaagatcgccaggaacgtcgcccccttccctccaattgctgaaaatttctctcatctttttcttggatgctggactgaccgggagcatgtgccgtgctgcaggttcatatgcaggtacgcgatgggctacttcccgattagtctgcatgtggaggactacaagtgcttcgatcccaacagggcatatgtgttcggctttgagccacattctgtgctgcccatcggagtcgcggcgctcgctgatcttgtcgggttcatgcctctacccaaaattaaggtcctcgcgagcagcgcggtgttctacacaccgttcctgaggcaaatatggacgtggttaggactaattcctgcaacgaggaagaattttcagtcatatctcggagctggttatagctgtatcatagtgcctggaggtgtacaagagattcttcatatggatcatgattcagagattgcctttttgaaatcaaggaaagggtttgtcaagatagctatgcagtctggctgccctttagttcccgttttctgtttcggacagagctacgcgtacaagtggtggagaccgaagggcaaattgtttgtgaaaattgctagagcaattaaatttactcccattgtcttttggggaagatacgggacaccaatccctttcccaacgcccatgcatgtagttgttggcagacccattgaggttgagaaaaattctcagcctaccattgatgagataaatgaagtccatgaacaatttactgtggccttgcaagatcttttcgacaaatacaagacagaaactggatatcctggcctccatctaagagtcctatgatataattccagcactaaactcaggttaggcttcaggaataacatggctctactgtaggagtaaccagtaatctagtagcacttcgcactcaggtcgcagtatggtcatcttcagaatctgcagtctgtagctaaggcacgtggttcgtacagcaccgctgatgtaaaaattgtcactgcaggccgctcataaagccttataaaagatgacctttctcataaattttatttcaaaaaaaagaactttcgatgagtgaatgcatgtgtaaatataccatgtgaatatcaaaatgcaactttggattggaggatcgaaaaaaccaaaaaaaaaaaaaaaacaaa

SEQ ID NO: 63598 - DNA, 640 bp, Oryza sativa
  Clone ID: PAT_MRT4530_64825C.1
gagggggcgttaattgctcatatgtagatttatagattatagctagatatacaagcaagcaagagctcgatctttaagctaagctagccgaaattggaattggaattggagaattggaggtggttaattgagaaaatgagaatggttcttgttcagtcgaggtgggtggacctgacacgcttgtggccggcgtggcggacggcggtgccgacggaggcgccctcggaggcggcggggccgggggaggaggcggcgaagagggaggagaggtcggcgtagaggtcgacgacgcggcggatgttgttgttgagctcgcggatgaggccgacgttgcgggagaggtcgccggggaccttggactcgtggttctggttgatctcgttgatcagcacccggttctggtccagcaagctctgcacctgcacgaagctcgtctggaacgcgtgcagcaccttcccgtcctccgccgccgccgccgacagcgtgtcgccgtccatcgcctctttgcttctgcttctgcttgttcttgctctctgcttgttcttcttttgcctctctgcaattctcaaggacgccgtagcatctgcgctcctgatgagatcatgcgaccacgagagagaagagaagtggaaaagaagaa

SEQ ID NO: 63599 - DNA, 3355 bp, Oryza sativa
  Clone ID: PAT_MRT4530_64826C.1
atggcgcgggcaatgatgttgttgctcttctgttcctatgctctggccttggtctctgctgggagcagcagcagcagcaatgccacagccgatgagctcgccctcctgtccttcaagtccatgctatcaagcccatccttgggtttgatggcatcatggaactcatccagccacttctgcagctggacaggagttagttgcagccgtcagcaacctgagaaggtcattgcgctgcaaatgaactcttgcggcctgtctgggcgcatatcgccgttcttgggcaacctatcctttctcaagacactggaccttggcaacaaccagcttgtcgggcagataccttcggagcttggtcacctcagcaagcttcggatgctgaatctgagcacaaatttgctccgaggaagcattcctgtggagatgagaggatgcaccaagctcatgacccttcacctaggcaataaccagcttcaaggtgagatcccagctgagataggttccagcttgaaaaatctcatcaatttatatcttaccagaaatcttttgtcgggagagatccctcaatctctggccgagttaccatcgctggaactgttatctttgtcgcacaataaattatctggagaggtaccatctgctttgagcaatctcacaaacctcttgaatattcgtttctccaataacatgctttcaggagtcatcccttcatctttaggcatgttgcccaatttatatgagctcagcttaggttttaacaatttatctggaccaatcccaacttctatttggaacatttcatctttgagggcgctttctgtccaaggaaatatgctaagtggaaccatacctgctaatgcatttgaaactcttccacatctcgaggaattatacatggaccacaaccacctccatggtaagattcctgtctcgctgggtaattcttccaatctgtcaatgattatccttggcgctaaccttttcaacggcattgttccccaagagattggaagactaagaaagttagaacaacttgtactgacacaaactttagttggagcgaaagaacaaaaagattgggagttcataacagcattagctaattgctcccagttacaggttttggtattgggtatgtgtgagtttggtggggttcttcctaattcactttccagtcttagcacgtcgctaaaatatctctctctttcatataacaatattttgggaagcatacctaaggatattggtaatctcttcaacctacaagtccttgacctcgcttggaactctttcatcggaactcttccttcatcccttggtaggcttaaaaacttgcactattttaacgtatacaacaatgatcttggtggaccaatcccatcgacaataggaaatctcacagagttaattacgttgtatttgatgtcaaacacctttagtggtaggttaacaaactcacttgcaaacctgacaaagttgacagaactggatctttctagtaataacttcataggcccaattcctagtggcttgttcaacatcaccacactttctatagctttggagctatcctataacaaatttgaggggtcaataccacaagaaatagggaatctcgtaaatcttgtaaaatttaatgcagagtcaaataaattatcaggtgagatccctagcacccttggacaatgccagaatctccaggatctcactctccaaaacaacatgttaaatggtaatatcccagaacaattgagtcaactaaaaagtctacaaactcttgatttctccagaaataatttgtcaggtgaaatccccatatttatagagaactttaccatgctctcttatctcaacctttcattcaatatatttaccggagaagtgccaactactggtatatttacaaattctactgcaatctcaatccaacacaatggaagactttgcgggggaataactactctacatttacctccatgttcttcccaattaccaaagaataaacataaacctgtagtaattcctattgttatttctcttgttgcaacactagccgtcctctcattgctatacatactttttgcttggcacaagaagatccaaacagaaatcccttcaactacatccatgcgaggccatcctctggtttcttattcccagttggtaaaagcaacagatgaattttccatagccaatttgttaggttctggttcatttggttctgtgtacaaaggagagctagttgctcaaattggtgaaagcccatattatgttgctgtgaaggtactaaaacttcagacttctggtgcgcttaagagttttgccgctgaatgcaatgcactgcgaaacctacggcaccgaaatctcgtgaagataattacagcctgctcaagcattgataacagcggcaatgacttcaaagcaattgttttcgactttatgcccaatggcagtttagaaggctggttacatcctgacaaagatgaccagattgatcacaaatacttgaatcttcttgagagagttggcatactacttgatgtggctaatgcgctggattatctacattgccatggaccaacacctgttgtacattgtgatctgaaaccaagcaacgtgcttttagatgctgagatggtagcacatcttggagactttggacttgcgaagattcttgttgagggcaactcattgctccaacagtctacaagctcaatgggatttagagggacaatcggctatgctcctccagagtatggtgctggaaatacggtatcaactttaggagatatttacagctatggaattcttgtgttagaaatggtaactgggaagaggcccatcgataacaaatccatacaaggattgagcctccgtgagtatgttgagctgggtctacatggtaaaatgatggatgttgttgacacccagctgttcttgggccttgagaatgaatttcaaaccgctgacgattcttcatgcaaaggaaggatcaattgcctggtcgcattactcaggcttggattgtattgctctcaggaaatgccgtcgaatagaatgttaactggagatattattaaggaattgagttcaatcaaacaatcccttgtagggaacacataatatatcttcgagctgaatgacacagtttggagctcattccttgggtgttcatttcttaccctttcataccttgttggtttatgcatagtacactgaagtatactgttatcacttgggatttggacatctgagtgcaaaaactgattgccatgcagttgtaatcatgcctgtaaacatatccgtaatttatgttcttttgctaggaaaagcatttttccaaaaaaaaaaaaaaaaa

SEQ ID NO: 63600 - DNA, 424 bp, Oryza sativa
  Clone ID: PAT_MRT4530_64827C.1
ctatgctatagattggtgtagaatctcttctcctggtttcatccctttcttccatcgacgtgattggctttcgatgtgtttggcttggacgacagacttggaggtgccccgcctctgtttggatgtcgagaagaaaagtccctggtgacgacttgactcgtgaaggttgtcagggttggccgcggatcgcgccgatgctggaatagtcgctgcagatcgagttgaagcgacatcaccgagcgcacggtgcgacaacagcgacgacgcgacgcgatccgaagacatcactgcccgcggcttcacgacagctagtggctacagggcggaggaggacctcgagggagctgggtggcagcgagttactccccaccttgcaacgagctcgagctccacatccatctccatcgaggaggataaggagtga

SEQ ID NO: 63601 - DNA, 270 bp, Oryza sativa
  Clone ID: PAT_MRT4530_64828C.1
atggacggaaggtttgcaggtgtttgttttctcctggttcttctcttgctggcaaatcctacttctgctgatgagcttgatcccggcacctgcggaacggaggtcgatccgttggacccctgcatccagacgctgtgcaagtggaactgcgagctggtggccatgaaacggggtggccatctcacctcttacgaatgcggagaccgagaatgcaagtgcgatttctgcgccagtagcatcggtgctgatgaacacggactccatgtctag

SEQ ID NO: 63602 - DNA, 252 bp, Oryza sativa
  Clone ID: PAT_MRT4530_64829C.1
atggtgaatgatatccggcgatccctgtcagttgtcgtggttggaaagctgccatctaatcctgaggaggtgattgtccaagaggtgtgcagggttcatgagctcaaggctggttctttgggtattgtgaaagaaaattgtggaatggctcaaaagatccaatgtttcatcatgctcaaaggtctagctatactatatgattacatccttgcaagcaagatcaaagatgctaccttagcatttggaccataa

SEQ ID NO: 63603 - DNA, 459 bp, Oryza sativa
  Clone ID: PAT_MRT4530_6482C.1
gagcacaagccgctccgccgccgcagaacggaacgacaattgctgcaagccggcgccgccggcgggctgcgacacgagcccggcgatgaaggagaagatcgggaagaggctgaggatcttccaggacatcacacagacactgaacactttctgatttgagttcttgatttttttttcttttctttgcaactcacagcagcagccgtggcgacgccgcgaaggagatgggcttgttctcctgcgagctttctatgtcgccgctaagttaatttaggattcgattgggttttagttcgctgatgattcttgatttgattttttttaacacaccctaataacagctgattgctcactttcttcagcttgacaccaaagctcttcttgtaacagaacacgattgattttcatcttgttctaattcagtttgttaacagttgaataacaaagtgtcattaattt

SEQ ID NO: 63604 - DNA, 2900 bp, Oryza sativa
  Clone ID: PAT_MRT4530_64830C.1
atggcgttgaccaatggaagagagaagaggggtgagatgagagagagaaatgagaagaggaagaacgcgaggataatttggtccgaaaaaattagaaagcatggtgaagggtttgctcttgcccaccgctgccgcctccggctccggctccggcgatccccatccatcccgcgagcgagcagggcgccgtcattcatcctgctgcatcctgattatttggggccaatggaagaggaggagtacaatacggaatcgtctaatgaggaagacatgcaagaagatgatggtgagaaacaaggaaatgttgccgagggtgatatcttcaagccggttgatatagatcccgcgtttgtaccaaaagtagggatggtgtttgagtcggaggaagacgcctttcagttctatgtgtcttacggctgccgctctggttttggtatcacaagaagatcgaacaataccttcgatggtttccgctatcgctctacattcatatgctctaaaggagggcagtctagactgaggtctggcgcgacgagatccgcaagaaaacgaggcacaaagactggatgcaaggctaagatgattgttaaggatgctcattttcaaaaccgctgggaagttattgttctagagttggaacataaccatccgttggatcctagcttacttaaatttaagaagcagctaaagaactctcctttccttcagaatccacctcttatgcttgaagcaccagacagtagctcagctgctgcgctttctagcagaggcggtgatagcggcatacctttgtctacccagattgaattcaggaccaagatagatagaaataggaaactgaagcttgctgaaggtgatctagatgccttattgagttttctcaacaaaatgcaagaccaaaatccgtacttcttttacagtttggatatgaatgagcaaggacaactaaggaatgtattttgggctgatgccaaatcacgttcttcttacaattactttggtgatgttgttgctattaatgtcagaaactttagcgaccaatatgaaatacagtttgtgtcatttgtgggcactaaccaccatgctcagcaagtattactagggtgtggtcttcttgctggtagatctcttggagcttacgtctggctttttgatacatgggtaagatgtatgaacagcacgccaccaccttcagtaattacaaactactgtcatgatgttgcaatagctgttaaaaaggttttccctaatgcacgttaccgcttttgccttctcgacatcttaaatgagcttcctgaaaagttggaggaaacagaaaagaaggatgaaatagtttctgcatttagctcactagcctttgattccattaccatgcctgattttgacaaagattggcaagaaatggtcgaacaatttcatctagagggaaacgaatggttgtccaaactatttgaggtcaggacacagtgggctcctgtttatgtgaaggattccttttgggcaggaatgtctattacagaaagaagtgatagtgcatctgactattttgatggctggttgatgccagatacctctgtaaaaatgtttgttgagcagtatgagtctgctgtgaaagttaagttagaaaaggaaaactatgaggatttacggtcatctcagatgaggccaccggtgatgactggtgtatctgtggaggagcaagcagcaaagatgtacacattggagatatttcagaagttcttagatgaaatcgggcattcttttcattgcaattatagtatacttgaccggaatgaatcagtggttacatacatagtttcagatcacattgatgaaacaaagaaggtggactacaaagttgcttatgataatgtcgaagatgacatattgtgtctctgccgattgttccaattcaaagaagtagtggaatttggttctgtgaactcagaatcaaagggctatgctttatcaatcatgagggagataagggataaagtgatttcttatgagaagtcactaagagatcagagggttgatagtcatgtttcaaccgcaaattttgcatacaatccagtgaatgaggattttaatgatgacactttgcccatttctcttagtacaaaaggatgggatgttgtacaaggtcagtcaaaacgttcccgcaagaagaaactggcaaccccgaatgttcttgacaccttgaagaagaaaactaaaagagcatataacaagagaaggaatgccatggcaaataccttaaacacggcagtcaccacaaccgaaagcataactgacgccacaaatgtgcagcataatcaagttaatgagggatggccattgacatctactggtgcacacgaaaccttcccttatggagtggagactatttcattcgatttgtctcaatacaacagtgcacctagcttccactggcctgaaagcagtagcaggtctcagcttcagtgagatgaggtgaaaaatgcaatggtccatgcgttgagaatattctaagtttgacagacttgcaagatgggcaaagttattaattaccttgtttcatgctggagggttcctgaatcctgaccatctgaggaatgtgagaaaaggctcaacctggcgaaaaccagtaataacaaccggcttttaacggattcggtctatattggttgtcccctgatattttagatatatgtaatggctgagatgtacataatcatttcccctttttctcatcctcagataaattgtagcttccactaggtaatgtgtaatgttaatcctgatcattcacgtggtcacgtcttaaataattagactgaatgttactcctgtaaaccccatagtcatggaatgtacattgctcagaactatgcccttctgcaaaaaaaaaaaaaaaaaaa

SEQ ID NO: 63605 - DNA, 1039 bp, Oryza sativa
  Clone ID: PAT_MRT4530_64831C.1
cttcactatgtaccgatctggcagggatggtaggaagaagttgaaactggtggatagcgatgattttattgaagaggaacctgagatggatgagccaaagaagagactaagtgaagctgattcacattcagatgtaaagaatgaaactactggccttatgaccaggcagcgtgctcttcaaggcagaggtggcaatggtgaaactctgattgaatttcctgatggattaccaactgcttcatcgagaaggcaaaaggataaggcttctgaagtggaggcacaagccaaaaaggcagaagcggctcagaggcgtaaattgcaagttgagaaggcagagagggaacaacaggccgaagcagtgaggaaaatcctgggtattgatattgagaagaaaaaagaggagaggaaacagaaagagcgggatgagaaggaaaagcaagaaaaaacagaagaatatagaaggaactgcatccaatgtgtcatggggccagaaggaactgttgtcacatttcctgataagatgggcctccctagcatatttgactccaagcctatcagctatccacctccaagggagaaatgtgcaggcccttcatgcacaaatccatacaagtaccgggactcgaagacgaagcttccgctctgcagcctgcagtgctacaaggctgtccagggaagctctgaggctgcccagggaagctctgagacgctaacatgctgatctcagaaattaaaggatggtggtgaggcaatcgtgactgttttgtggaactggagaattgtgctagttccatttgccacctttgctgcttgttcttgtgttgccaatgttaccttttgccagtcctaacaatcaaccaaccaacagagggggtgtcgcctgctgctggccatccttttgactcgttgtggatgcagctgcagtgttctcgattaaggattaatttaggtggtagtcagatgaatgagagtgatgtatacattagttgtacagtgatcatcctactcgtcatcgttggtcatgaaaaaaaaaaaaaaa

SEQ ID NO: 63606 - DNA, 269 bp, Oryza sativa
  Clone ID: PAT_MRT4530_64832C.1
tgttggagccattgactcccatcaaatgtgtgggggtattatcatgcttgatgcaggtctaccaacgcatgttactagcaattgcattacctatagctatctagcgcgctacgcgttctatctctgcgcagaccaactgcttgaggcaaataactgcggagcagatcctgttgaatcactctggtggggaatgattcatggtcgacactatcccgttatggtgcatcataacactatattcgatgtccaattaaatgtgcttacaacat

SEQ ID NO: 63607 - DNA, 406 bp, Oryza sativa
  Clone ID: PAT_MRT4530_64833C.1
gggaaaaggcaagggtcaaaaaaaattggtttacttggccaaaggccaaataaaaattctttgtttcatgacacggggggggccctgccccccatttttttggacacacaaaggggaagggttcaaaaaaaattaagccacacaaggtggacttacgggcccacctgttagccttttattggtggggggcggagacttttgtgaaaaacaggaacaccacgcttttggaagaagacaaattttttcccacacaaattgtccacccggggggcggggaattacggggaggtgttttccccccccggcgactttttgatgagggctatcaacccaagagggggggtttttttttgccgggggagatccttgggggcttttgggggcctttttttttttttggggggct

SEQ ID NO: 63608 - DNA, 640 bp, Oryza sativa
  Clone ID: PAT_MRT4530_64834C.1
aagaacctaacatcaccacccccgacgccggccacccctccccgccatcccgcctcctctcgaagcaccgccctcgccgcggcgctgctgctccccgcgcgtccctgcatcctcctgctcccccgcacccacgcgtccgcctcaacctctgccactgctgcggtgtgcgcttcccgccggcgccgccgggggccaagcgccgaccggtccgccccctccggtccctctggcgcgtcgtcctcctctgcacggaatgcctctccctcgtccgctccgctgcagtttgctcctactgcctctccctcgacaacctcccgcccgaggactcctctgtcacttgccgatgctgcaaccgctgcgtccacccctactgtatcgcaggtgagcatcgcgccgccctaatccagcccatcgatgtggagaatttcatctgcgtcgattgctgcccgaccgtcaagccgggtggaaaaaatgggggcgcctcttccgtgcatatgctgcagcagtcgccagggagccgaggaagggggatatcgtggctgaatcaaaagagaatgctgtgaggaaagctatggaaatgaagctggctttcaagcgtgcgaaaggaagcgttggtctcttgctgctgtggttagggatc

SEQ ID NO: 63609 - DNA, 584 bp, Oryza sativa
  Clone ID: PAT_MRT4530_64835C.1
ggggctaaaaaaggggccaaaaaaattatttccccacaaacaaaaaccacagtaaaaaaagtccaaaacaacggggacaacaaaagaaaaaacaaaacggacaaaaggggccaaaaaaaaaaaagccaaattcaaaaatgggctatcctttttggcagcaaagttaatccccctaaaaaggggaggccttggggcaaaatcgggccctttatccacagggaaaagggccccaaaacaaagtaggcagcaaaaattgtccccaagaggaagcggaaaaggaaggggaaaggatccacaggttgggtgacatcctaaacctttggaccaagctgaaaaggggagtctccatgtttttttttgacccccggcaaaaagaatcccaaaataaggccatgccttgggaaccagggaaccttttgggcccaatcctttggagcttgacatccttgaaccctgcctttttgaaccacaaaaaataccccttttccttggggaagagcatccccatgtcagcgaaaaagcgaaacacccaaaaggtttgggtgcacggggccaatcatgcaagccactccaccaagcctaaa

SEQ ID NO: 63610 - DNA, 213 bp, Oryza sativa
  Clone ID: PAT_MRT4530_64836C.1
gggaagggacgagcaacagccaggcaaatgtttttttggaatttggggccccaaaaatagtcaaaatcttttggcaatacaatggtttgttttcaaaatgtcaaaatttccaaattttccgggtgttttggccttggttcgcaaattcctagtttactttaatatacaatgggcttttttgtccgccggggcactttaaccactgtttttttc

SEQ ID NO: 63611 - DNA, 267 bp, Oryza sativa
  Clone ID: PAT_MRT4530_64837C.1
aaatacttatagccggggctctcattatttttatttacaaatgccttacccaacaccatattttactcgcacttaccacttttacatcaaggcagtgagtgaccaggtgaaacaaactcaaaagaatggtcacgggcgggaaaatcaaaagacgatgaacaaaccgggaagcacaccaaacaaggtggggggacagtaattggattaagcgttgaacaacttaaacgggggctatatatagacccatgacggtttagtttgccacca

SEQ ID NO: 63612 - DNA, 597 bp, Oryza sativa
  Clone ID: PAT_MRT4530_64838C.1
atgacaaacaccggcggggtacgggtggaggggaggcgaggccgagggcgacgttgccgctgcgatgccggaggagacgacgacgtcggccggcacacgggcacggaggaaggagtggccgaaggaaacgtcggtgaggtggaaggagaggctagggtggaggtcgatgccgcggtaccgaaggaggagatggcgacgtcggcaactggaggtggtgcagtggcggcaacaccactggacgtcgacgaggacgcgcctccggcggtcaccgcgcgaaatggagggcaggccgggggagaggaggcggctgcgacgccgagaatggtgacagcacggcctaccggtgcatgggcgaggcggcaaaggcggctggaggtggccggcgacacgggagagagagaggagggctgcggggagaggcggtgcggccacggggtggcacgggaggaggctaaaatgagagaacagaggaagaggatcccattttatagcggaggggagctagccgggcacgggagagggcggaacggcgccgagaatggctgccggcggccatggaaggtggccggggatggcgcggccgttccgggcgattga

SEQ ID NO: 63613 - DNA, 401 bp, Oryza sativa
  Clone ID: PAT_MRT4530_64839C.1
atctggccgatcgcccataaccgcgggcacagctatttgaatagttttactctagccagaggtgcacaactgtacccacaagacacaatccaccggcaagtcaccgtgcctgcacagacacgtcaccatgtcgagtgattatgacaagacccttcatataattccctatgaccaatcgatgccgcaccacaggtttcgttcccgcccccagcaggcagcgggcagcctcccctcgtgccacggtgaatccgcaagccgatcaaccaaacaccctagtcgacccaactccatcacgcccaccctagcctgggtacatcagccagaggaaaagctatactacaagtcaagcagttacccattcccgcttgtggcaagcgctgtatgtcttacagggtttcccg

SEQ ID NO: 63614 - DNA, 267 bp, Oryza sativa
  Clone ID: PAT_MRT4530_6483C.1
atggtggtggtcgtagttgtggtcatggtgatcgtggccgaaggcatcgagctcgagatgcaccttctccgcaagctccttcaggagaagccaccgcaggatctcaccgccgtcaccgagatggagagccccatccacatgatcccgctcatcgagatcatggtggacgcgggcataaggagcagcggcgacgacgacaacctggaaagatgcgtgggggcgacggctgccggcgaggcgttcgcactacaggatgacatagcttag

SEQ ID NO: 63615 - DNA, 602 bp, Oryza sativa
  unsure (1)..(602): unsure at all n locations
  Clone ID: PAT_MRT4530_64840C.1
tttttttttttttttattgttttgatgacaatctaaaactgtaaatttaaattaagcatcaccgacaacataatacagggagagcacaggtgtccttttaacaagagcactaacaatgtaagaggctttcaagcaacaaaggtgaaagcaactacttaccatagaacgcacctatgcttgctgatttttacatcaagcaaagttcatcagctttaactttgcttcggtgctgctttctactcagtatttaacaagctagaaattcaagatagcctaccacatgtgactcttccaagaagactcaagactacataatatgcaacaactatcattctttttccttgctactgtgaagagattagcctacagcctttttctcataagtaaatcagtttgatggatacaaagcatagaataaacactttcagcattttctgttggtttcatcagcgcctactaccaggggtgttagaccacccagagccctgaagaaaaaacccccnttnaaactgntttggttggttgaaaagtgttgtgaaaccaacnccaaaccccccggggttananttccatcccaaaattgtttattttgatccccattg

SEQ ID NO: 63616 - DNA, 624 bp, Oryza sativa
  Clone ID: PAT_MRT4530_64841C.1
atgtggattccgctgtccggccaggtggatacgctgtttggcagctacgtgtctacctgtcaggacgcgggaggctatcgcgcgcttggccgattccatcgtggggtccgggtgctcgtcgcgtcgcgtcgcgcgcgcggctcccgcggatgcgggggcagccactcgttcggcgtgcggtggcgcaacgcaacgtgcggtggatatggacgccagcgggcgcgactccgatcagcggcaattggcgacgggcgtggctgggcgagcggcagtgggagcggcagggaaggggaatcggtcggtggcgacaggagcggttgggcgagcagtggcaggagcaagcagggagaggaggaggaggagcccgtggtggcaacggtggcccaccgcgcgtccccgtgcgcccacgacaaggaggagcccgcggtggtggcggtggtccaccgcgcgcccacgacgaggaggaggagcccgccgcccaccgcgcatccccgcacgcccgatcgacctccgcctccatcgctggccaccaccgtcctcggcgctcctccgccacccctaactggctccgccccccgcgcgccgccatcctcagctcgccaccgccggtggggattgaggtga

SEQ ID NO: 63617 - DNA, 318 bp, Oryza sativa
  Clone ID: PAT_MRT4530_64842C.1
atgccggcctggcaactgcgtgtctgcattgtaggagtacgtgtggagcagagcagcatggggctagaaaatcttcgcatgggcagcgttagctgcgtttactgtcctaatcactctgagctagctgtagcaacagctctgccgagcgcaggattgcaggccggtgtcatgggcacgacactggccgcgtcttgtcgactgtggtgccggcctgcatcgcacgtactaaaacgatgggatccaacggaatcggtacacctggatgtatacggcagggaccctcggcgtgtacgacatgcacggcgcatgcagtctcgt

SEQ ID NO: 63618 - DNA, 859 bp, Oryza sativa
  Clone ID: PAT_MRT4530_64843C.1
ctgtcgcgtgggctccaattaaccaaagctaattaagctagctcaagctctaatccacatttagctagaatggcgccgtccaagtccacagccgccgccggcgtcctcctcgtcctgctcgtcgcggcggcgggcggcggcgcagaggcggcggcgacgacgtgcgtggcgtcgctgctggagctgagcccgtgcctgccgttcttcaaggacaaggcggcgacggcggcgccggaggggtgctgcgcggggctgtcgtccatcgtgaagggggaggcggtgtgcctgtgccacatcgtgaaccacaccctggagcgcgccatcggcgtcgacatccccgtcgaccgcgccttcgccctcctccgcgacgtctgccgcctctcgccgccggcggacatcatctccacctgcgccaacgagaaaggtggtgtgccgcctctctactcttgcccggctccatctgcctgagtatatatgagaaaagaataaatgttaccaaaggagggatttcaacatatctaaaagtcaagatggagtaactttggtatacaagaccaacatatatatcacgttgttaaaggacaagtagatattggattattggcatatactgatatatccatgctaatattagtatatgtatattctgcaacatgcatggacatacacattgtcaaatgaagtactaagtaacacggaacgtgtactagctcgtgctactgtcgtgctatgcgctgtcaatagaaataaaatattttacattgtggtattaagcattaaagccatattgtattctaatattatcgggcggagattgcggattattcctaccacacttttaaataattacaatttctct

SEQ ID NO: 63619 - DNA, 156 bp, Oryza sativa
  Clone ID: PAT_MRT4530_64844C.1
atggcggcggctgcgatccagaccggtggatccctcgacgaaggcgaggagaggaggagaagttcaccggtctcggtgccggtgggtctctcgtcggacctgggcttcagttgggcaccatgcgagcagcagacaccggcacaccgcgtgagcaac

SEQ ID NO: 63620 - DNA, 413 bp, Oryza sativa
  Clone ID: PAT_MRT4530_64845C.1
gggataacatcatttattacaaactcaaaaaaaaaaaccacacacacacaatttactccttataaacaaaataccataatatacacccacacctctctaaaataccaaagacttagactccaatcacataccctcactgaccaatacccagtacatacaacaaacatttgaaaaaacaacacacactctaatccactctgtataacattacactcgaatccagccctgataaaacaacaacacccaatgtcaccaccaggtggctgcgacaacatactcaaccaatagagacgcctcacaaccatatacacatcatgccacacacctgaacccacaaaaaatatacctcacttctcaaggtaacttctatccatatagacagaccattctaaaacatcctcgacaaaaaagat

SEQ ID NO: 63621 - DNA, 558 bp, Oryza sativa
  Clone ID: PAT_MRT4530_64846C.1
gcacgagggcggaggccggagcggaggagacggacgcggcggcggcgccaccggcgacggcctctccttcgtctcgttctccgctctgcttgacgggaggcggctcctccgcgcgtccccctctccgccgcggtgaccggccgaggggtgctccgccctccgcttctcccaaccccggacggggcgccgccgagccagtgctccccgacggcggcggcggcggcgaggaacccgtccccgacagccgaaactcgggtcccaactaggaggagctgcagaaagccggcgtctcctacctccaacggcttcgacttgactgcaaaatatggatctttctcctttcaagttggatattgatgagctactagcggattataccgaggcaaattgcactgcattcgctgatttcaagagattgtggatggcaaagaaattttcttatatctatgaaggaagacctaagacaaactctggcgctttcatgcagtcgctcttttgcattgattggtcctatgacatctcagagttgtatgcctcaaagattggctggactttact

SEQ ID NO: 63622 - DNA, 1025 bp, Oryza sativa
  unsure (1)..(1025): unsure at all n locations
  Clone ID: PAT_MRT4530_64847C.1
ggagaaggggagagaggaggtgtcgtggaagaaggaaggcgaaggggagatggttgtgggcttcgtcttcgtcggcgtcgcgctcgccatcttcatgttctggaggttccaaatgcgggagctcgccggcagcatgaacaagaagatcagatagtaacagcattgcaatgctctgaactccaaattgttctaggatatttttgatttctggttgaatttaggaggattttacttggttttgttgcgcgacagttggtacagacacttgtagaatagaaattttactcatcatcgaaccatgaatctatctacgacgacagaagaggatagtagaaatgatcctggttttcagttgtttattggaagtacacgatgtagtagaatttgatcaaaaggctgttacggttatcttggttcatgaatgcaaagtgcagttcgcatcagctgttgtaaatgattattacttctataaaattctaattcattgctgcctaaacccaaatcggcctatagggaagaataatacccgcggctaattggcccccgtttacaatcgccggaccgggaaaaccctcgatattacactactcttgtgggggggcccgggacccaaatttccctattggggggtttattcaccgcgcccctttgcgcctggttttaccaacggggggcgggagaaacctcggggtgatggccaatctaatttgtcttggggccatatcccccttttggccgttgggggtaaaacaaaaagggccccgcaacctttccccttcccaacaattcggcaccttaaagtgaaagtggtgcccccctctaaagaggccctataatcccgcgggggggtggtgtgtacgccctctttgtcttcggttaattttttaaggggccttttggccccctnttttccacaattatttttaattttctttctcggcgccacacagacgagccttcccccgcaagataaaaaaaatatgcgcgcctctctagtgggttcctccctggctttatacaggcct

SEQ ID NO: 63623 - DNA, 384 bp, Oryza sativa
  Clone ID: PAT_MRT4530_64848C.1
tgagtgtcacgtggcggcttaatagcattggtaggaactcccccaaaagcctcgctgatttgccccgcacgtcatcaagggcgccggctcgccgcagtctccatcgccgcgatgccgcccactccgtcatcatcgcatccgtcctcgcccaggaatcacgtcgccgccgatgccctccgcgccgatctgttcctcaccgccaccgatccccgctgaaggctcgccctccaccgatccccccgccggaagcccttttgtcgtcaggtcgctgccgatgccttccacgccaagctgctcctcgccgccactgatccctgctgccatgtcgctgccgacgccttccgcaccgagctgctcctcgccgcgtgttggtatttcttaatg

SEQ ID NO: 63624 - DNA, 329 bp, Oryza sativa
  Clone ID: PAT_MRT4530_64849C.1
gcgtcggagcttttttacactaggacaccaccagaaccaccggggtgattcagatgaaggacgcgctggtcaccaacaacaggcagctcgagcagatgcacgtgctgaaggcggactcggcgcgccaccgtgacatgtgcggcttgcacgccgaccagtacgactccttgctagggtccgtcacgccggacaccgagcaggaccagatccggtcgctcaagaagtaaaacgtccacaaggactgccccagcttcaactaccactacaggggctgccagacctacaacgagagactcgagctgcagagccaagagctcaccacacgacgc

SEQ ID NO: 63625 - DNA, 198 bp, Oryza sativa
  unsure (1)..(198): unsure at all n locations
  Clone ID: PAT_MRT4530_6484C.1
gaatcaaaagagcatgacttcaccaaagctagagtagcagctagtgatcgttacaaagggcccgtataaacggcagcaagttggaagctaacttcaattctcgcccccaaaaaacaaaaggatcatcaacaaattcaaagatggaaatcagcaaacaagaatcccgaaatcccctgtactnnattatatnnatccaca

SEQ ID NO: 63626 - DNA, 179 bp, Oryza sativa
  Clone ID: PAT_MRT4530_64850C.1
gtcacaacgaagaagagcggcagcagaggcacgagcgccgctgccgctggtaccgcctcatggtggtggttctggtccaccagatgtgggccggcgagacagtcggtccttaccgatccactatcatggcgagggcgcaacggccgtcaccacttcgtcggtcatcgtgagcctggcat

SEQ ID NO: 63627 - DNA, 246 bp, Oryza sativa
  Clone ID: PAT_MRT4530_64851C.1
actcagacgatgaatcaatcggacgatgttgagaaccatacttatgtatgaatgggcgaagaacgcagacttgacacgatgaatcaggccaaaattcactagtctacgaagtaaagcagtagaggaggccgccagccgaaattgggctgggttgggccagccccaggttttggctggacggtggagatgaagccccaatgacggttggagggtattaccgaccattccaactgtcacaactgtcat

SEQ ID NO: 63628 - DNA, 476 bp, Oryza sativa
  Clone ID: PAT_MRT4530_64852C.1
ctataaaagatcagcttctaattccgagtaaagatgttcatcgatgttacaaaatgtttttaagagtggcaaagagaaaaatgccaaaaagatttcaaccaatgcacaacaagtttgattctacatttgagttttcaagcacgctggggtacgccgagaggccgtgcttccttccttccaagcattttacagtatactacttcgtttaacaaggcacacaagctaccttggcttctttgaagaacagctatgctcacatatctgcgacagaccaaaggtaggcctcttgctccgttgcttgcttctcgttcttcagcttaaacatatccttctcaaatccattgctgcgatccactccgtcccaatgacgaccaggctttatgccgtagcggtttggaggaggatctacaccacgcttcagccagctgtgactaggtatattttggggaacgttgaagccagattctttcgtcttt

SEQ ID NO: 63629 - DNA, 2769 bp, Oryza sativa
  Clone ID: PAT_MRT4530_64853C.1
atggctgcttccacgtcccagcatgcgctcgtatccgtcaagtcgttgtgcaccggtgccaactttggtttcgaaaagagaaccagcaaagtgcgttttgttttggttgggaggtgctgctcgggcacccggaaattgggtttggtatgcgcttcaaactcacattcttcggtgatggagccggctcagctaccattgagccccgagagcggaaacaccccaaagaaatcaagtgaaagtgcgctcatattgatccggcatggtgaatcgctatggaatgagaaaaatctatttactggctgcgtcgatgtgcccctgaccccaaagggtgttgacgaggcaattgaggcgggtaaaaggatatgcaatatcccagttgatgtaatatacacctcgtcactaattcgtgctcagatgaccgctatgcttgccatgatgcagcatcgtcgtaagaaggttccaattgttgtgcacagtgagagcgaacaagctcacaggtggagcaagatatacagtgaagagacaaagaagcaatcaattcctgtcataacagcttggcagctgaatgaacgaatgtatggggaactacaaggccttaacaagcaagaaactgctgatcgttttggcaaagaacaagttcatgaatggcgtcgcagttacgacattcctcccccaaatggcgagagcctagagatgtgtgcagagagagcagttgcttattttaaagatcaaattgtacctcagcttgtggcaggaaagcatgtgatgattgctgcccatggcaattcacttcgttcaattataatgcacttagacaagttgacttctcaagaggttatcagccttgaactgtctactggcattcctatgctgtatatatttaaggaaggaaaatttattagacgggggagtccggcaggcccttctgaggcaggtgtctatgcctacaccagggctctgtttccaccagcatctgaggaattttcatccgtcgaacatacagtttatccccccatctgccacaaagaagtggctaagcatactattcactggatgtcaaatcacaattctccctgtgacatcccaaagcctgcctctgttgatgaattcgtcaagaatggcaagaagaagaagtcattcatgtcgagcatctttcggaagaaagggaggagcggcacggggagctcggacaagaagctgctatcgcggagggatatcgtcttcgatcggcattgcgccacaaaaattgagagcttgactctaagctgcttggattcaccccacaggcagttcgatacccgggaataccgggtgttcgtaggcacatggaatgtggctgggaagcctcctaacagcagccttaacctggaggattttctacagatagaaggattacctgatatatatgtcttggggtttcaggagatcgttcctctgaacgcaggcaacgtgctggtcatcgaggacaacgagccagcggccaagtggctgggcctcatataccaagctctgaacaagccccaggaccagtcctccggcgacgagctgtctccgccggagacctccgacagccggcagggcggcggcagcggcagccgcgactccatacccaagtcgtcgagcggcggcatgctcttcttccagaagccgtcgctgaagatgctgagcaagaactaccgcgtggacagcgcgctggtgaagacgtgcacctgcctgaccgacccgtccaccatgcagcgccgggcgcgggagatgcgggagttcctctaccgcatcgaggcgtcgccgccgccgtcgttggcgtcggcggcggcggcggccgacgaagacgggggcccggacgccggcggcgagctggcgaggagcagcgtgaactactgcctgatcgcgagcaagcagatggtgggcatcttcctgtccgtgtgggtgcggcgggagctcgtgcagtacatcggccacctcagggtggactccgtcggcagaggcatcatgggccgcctcggcaacaaggtgctcgacgcggtcttgctttgcctctgctcgctgtttggttcattggattcatggcgccgccatggctggctctcctgcttgcagggttgcatcgcgatgagcatgacgctgcaccagaccagcgtctgcttcgtctgcagccacctcgcctccggcgagaaggaaggcgacgaggtgaggaggaactccgacgtcgccgagatcatcaagagcacgcagttcccgcggatctgcaaggtgcctggccagcgtatccccgacaagatccttgaccatgaccgggtcatatggctaggagacctgaattaccgagtcgcgctaagctacgacgagacgaagacgttgatgggggagaatgactgggatacattacttgagaaagaccagttgatgatcgagagacaggcagggagagtgttcaaagggtggaaagagggcaagatctacttcgcaccgacgtacaaatacaagcagaactctgactcatacgcaggggagacggccaaatcgaagaagaaacgaagaacacctgcatggtgtgaccggatactgtggcacggccagggaatcgagcagctgcagtacatcagaggggagtccaggttctcggatcacaggcctgtttgcagcgtgtttgtgatcgaagccgatgtagataatggaagcatgatcagaaagggctactcaactctggattccaggatccatttcgagtctccgataccacaaagacacagcttctacgatgatttctga

SEQ ID NO: 63630 - DNA, 2061 bp, Oryza sativa
  Clone ID: PAT_MRT4530_64854C.1
cacgcgtccccacatttcgctctcgctttgccgggaaaaaaaaccgcctaccacgataggctcccggatgagggtccataccgtttgcttgcttcatttacatcgagctggatgtcaaatcacaattctccctgtgacatcccaaagcctgcctctgttgatgaattcgtcaagaatggcaagaagaagaagtcattcatgtcgagcatctttcggaagaaagggaggagcggcacggggagctcggacaagaagctgctatcgcggagggatatcgtcttcggtttggatgagaaatgcgacgataggtcggagctcttggattcttcccctgccgtccgcaagagcttttcagatcggcattgcgccacaaaaattgagagcttgactctaagctgcttggattcaccccacaggcagttcgatacccgggaataccgggtgttcgtaggcacatggaatgtggctgggaagcctcctaacagcagccttaacctggaggattttctacagatagaaggattacctgatatatatgtcttggggtttcaggagatcgttcctctgaacgcaggcaacgtgctggtcatcgaggacaacgagccagcggccaagtggctgggcctcatataccaagctctgaacaagccccaggaccagtcctccggcgacgagctgtctccgccggagacctccgacagccggcagggcggcggcagcggcagccgcgactccatacccaagtcgtcgagcggcggcatgctcttcttccagaagccgtcgctgaagatgctgagcaagaactaccgcgtggacagcgcgctggtgaagacgtgcacctgcctgaccgacccgtccaccatgcagcgccgggcgcgggagatgcgggagttcctctaccgcatcgaggcgtcgccgccgccgtcgttggcgtcggcggcggcggcggccgacgaagacgggggcccggacgccggcggcgagctggcgaggagcagcgtgaactactgcctgatcgcgagcaagcagatggtgggcatcttcctgtccgtgtgggtgcggcgggagctcgtgcagtacatcggccacctcagggtggactccgtcggcagaggcatcatgggccgcctcggcaacaagggttgcatcgcgatgagcatgacgctgcaccagaccagcgtctgcttcgtctgcagccacctcgcctccggcgagaaggaaggcgacgaggtgaggaggaactccgacgtcgccgagatcatcaagagcacgcagttcccgcggatctgcaaggtgcctggccagcgtatccccgacaagatccttgaccatgaccgggtcatatggctaggagacctgaattaccgagtcgcgctaagctacgacgagacgaagacgttgatgggggagaatgactgggatacattacttgagaaagaccagttgatgatcgagagacaggcagggagagtgttcaaagggtggaaagagggcaagatctacttcgcaccgacgtacaaatacaagcagaactctgactcatacgcaggggagacggccaaatcgaagaagaaacgaagaacacctgcatggtgtgaccggatactgtggcacggccagggaatcgagcagctgcagtacatcagaggggagtccaggttctcggatcacaggcctgtttgcagcgtgtttgtgatcgaagccgatgtagataatggaagcatgatcagaaagggctactcaactctggattccaggatccatttcgagtctccgataccacaaagacacagcttctacgatgatttctgacttgtgattagtggttttgtctatactactatacttgtagcttaattacaaaaagcaggaatgtgtctacctttgtagtgggtgggctgcatttttcaagcctagcacttgtcttacactaactggagtaaatggtggcttctgaccaaaatacgtctgaacaacggacaactggctgagcggaagtgctttgtgtcttactaaatttttgatgcgatgtcttagtaaatcacatcatactttcctttt

SEQ ID NO: 63631 - DNA, 228 bp, Oryza sativa
  Clone ID: PAT_MRT4530_64855C.1
atggaagcggaggataagagcagtggtgctgctagggccttggagcttaccgaccgcagcgacattcataggaacaagtttgtttggaaggagatgacgaaggagcagcgttggttcactgatgacagctgcgacgacgatgacgtggtgtcggaactcaacatcctggttgcacagatcggagcagcagggggacacgatgtcccaacctatgcgaacaccacatga

SEQ ID NO: 63632 - DNA, 373 bp, Oryza sativa
  Clone ID: PAT_MRT4530_64856C.1
aaagaaagaagtcgccagggaggcgtcgtcggccgacgcggcggcggcggtggccggctcgtcgtcgcggtcggagtcggagctccacgtcatcgcgtcgtcggcgggtggtggttgggctctcgccgcgatagttgctctgctgtctccgcgtcgcgctctctgggcatacatggccgtggaaggcggtgggcgggtagcaggacagagctgtgccgccgaagccacgcgggtcgacagtggggcgatgaagaagatggctgaacaggggcagctcactaccacggatcgaggaggactagagcaggaagggatggacggactcaacagcgccgttgatgccttccggctagtcgacgacatgaggcattga

SEQ ID NO: 63633 - DNA, 837 bp, Oryza sativa
  Clone ID: PAT_MRT4530_64857C.1
atggtgggagaaggaagacttggacgcggggggcagaggagggaggggaggggaggcaagcccgtcaaaagagaaggcgaggacgacgacgacgaggagggtggtggggccctgggggagagggacgtttggcagtgtagggcggggcccctctcgctttcgatggagggacgcggcattccacggactttcagtgaagacgacttcctggtctactctcccaggaaccgtgaggcccccctttgtgagttcggccgggggcagcgggtgagattcgagggcttgttgtatacacgtcgccttggtcgtggggcctaccacaccatgccgcctgacacggggagcgcccatgctgcatgccgcctaacacacgagcagcgcacaggcacactagtcagtcccatcagtcattcgaccggtcacagaccggttgagtacactgcaagccgcattggcgcgactgctcggtcacgggagggggccgccgctgcccgacctcgggcccgatccctcctcgagggagggccacgtggcgcctggggcagccttctccctctagtcttggccagggagtggccgccgccccacctcgggcctgactcccctcaggggagggccacgtggcatcggggggcagtctccttcatccagtctctaggaaggagtggccgccaccctacctcgggcctaactcccccctcgggggagggccacgtggcatcgggggacaacctcctccgactagtctttgggaaggagtggccgccaccccacctcgggcctgactcccctccggggagggtcacatggcatcggggggtagcctcctccgactag

SEQ ID NO: 63634 - DNA, 271 bp, Oryza sativa
  Clone ID: PAT_MRT4530_64858C.1
atggacgtttgggtcagataggattcatcgattttttccatctcctagacggcttttgtttcctcatctatttcactggtggagaaaccatctttgatcggtccaccagatttcacaatagtcccggttgtattaaaaactgggactaaaaatatctttagtcccggtttaaaagctctgaggaattttttaccaaccgggactaaagatttatttttagtcccggttggtaacaccaaccgggaaaaaagtcgacataagcggggtggtt

SEQ ID NO: 63635 - DNA, 1692 bp, Oryza sativa
  Clone ID: PAT_MRT4530_64859C.1
atggcggcggtggcagaggaaaacggcgacggcggcagcagcggaagaggaacacgacggcagcggcagaggaagaggaacacggcagcggcggcggcggcggtagaggaaaacgaacacagcggcggcgaaaagcaaccagcgctgaggtcagaggagtgcaggagagaacgagcggaagctctaaaggggcaagtgcgccgcaagctgttgaaggccacgagccgcatcagcagcgtggccgagacggtggtgctagtcgacacgctggaacgcctcggcatagacaaccacttccgccacgagatcgcggcgatgctacaccgtgtgcacagcgaggagcacggcggcggcggcggtgctgccggctccgatgtcgccgacgacgaccttcacgttacttccctccgattccggctgcttcgccagcacggcttggggatatctgcagatgtgttcgacaagttcagagacaacgggggcagtttcagagcaagcctaagcagtgacacgaggggtcttctaagtctgtacaacgcggctcacctggccatgcccggcgaggaggtgctcgacgacgccatcgcgttctcgaggcgccacctacggtccatgaaaaccgcaggcaagctgaggtcgccgatggccgagcaggtctcccgcgccctcgacatccctctcccgcggacgcccaggcggctggaggcgatgcgctacatccacgagtacggcgatgagccgggttttgacggcgtggtgctggagctcgcgaggctggactttgagctcgtgaagtctcttcacctaagggagctcaaggccctcaccctgtggtggaaagacttttacgacaatgtaaagctgagctacacccgagaccgtatagcagaggtcttcttctgggttagcggagtgtactacgaggagaaatactctcgcgcacgtattatgcttgctaaggttttcggattgataaccctaatggatgacacttatgatgtccaagacaccttggacgagtgttgtaggttcaatgaaacaatacagagatgggacaacggagcagtttctattctaccagaatatatgcatgcatattacataaagttgctaagcaactttgacgagatggagaatagcttagaaccaaatgagaaacaccgtgtgtcttacgccataactatgtacaagcagttgtctgaatactacctccaggaggcccgatggtcgagccacaggtacctgccgagcttcgcggagcacctgtacgtgtccagcatctcgtcgggcatcccggcgctggcaccggcggtgctgatgggcgtgcacgacggtgacggcgtggcgaccaaggaggcgttggagtgggcgtgcgccatcccggacctgctcctcgccagcggcgaggaaggacgtgcgagcctcgtggagacctacatgacggagcacggcgcgggcggggacgcggccgtggcggcggtggcggctgcgtcggagcgcgcgtggaggcggatcaaccgcgcgtgcgtggaggcggtagaacccgcgctgctgccggccgcgcagctgctggtgaacctgacgagcaccatggaggtggtgtacctcggcggcaaggacggctacacctccggctccgggctcaagggggtcatcaccgatctcttactcggcccagtccatgacgattag

SEQ ID NO: 63636 - DNA, 435 bp, Oryza sativa
  Clone ID: PAT_MRT4530_6485C.1
atgaggcagcgttatatttccagcgagagcgtggggcacctgggagagcaactggaggacggaggcgagatgggaacggagcgagacggcatcatcgcggaggcggagcgcgtcgcggcaggcgagcgggatgcggtggagcgcgtcggcgctgtcctgctcgagcgcggccgcggcgtcgtcggcggccgagcggaggcgctcctcggcgtcggcgaggaagcggtcgagcagctccgacgggtggcgcgcgtccaccacttcgggtcgaacccctcctccccgaactccgacgcgtccaccaccaccattttcagcccccactcgctatgcctcctccgccgccgccaccgccgcggctcgtcgtggacttggacgagggagacaaggtggagtggctctgagtttgctggattgctactactcctttgctag

SEQ ID NO: 63637 - DNA, 624 bp, Oryza sativa
  Clone ID: PAT_MRT4530_64860C.1
atggtttggggctgcaggcagttttaatcagtgtcctaatcacaggtttcgccttccttgttcacatccatacaccgatggtacattgatatacaatactgctcaaattctaatatactgcacacagaatgacacaacaaaaaattctcaggttatcaggtttttccaagatgctgcaccctgcaaacatgtcttctgtcaacagtgggctggagccgaaaaatcgtgggagctgtacaggaaaaaaaaattgctcaagattccaatagcccagcaacacacctgtggctccgataacaggaggccggacatgtcaccctaaaacttatgcttctcctagcttaaaactatagctcttggtctctgccgataaaaatacatgtacacaatgaaggctccgatcctttctgtgcaatgtcgccttgagtgcaggctctcattcagatcgcatcctctgttgaagagcaacaaaatggagaagaattttagccgcctcagttcacagtcagggctcattctttactctcttggggtacagcagaatgcatcggttggtgtcagctggaaacgcatgggcccaagaacttctgtactgcctggaagagctgcttctcctcaaagggc

SEQ ID NO: 63638 - DNA, 140 bp, Oryza sativa
  Clone ID: PAT_MRT4530_64861C.1
gcctgattgcaatattataagacttataggattacaccgatgctcacgattgcttcatcctgacgaaaaaaccatcgaacatgcacacagtgtgtgcgcagcatagagtctacctccgttactgagagaaaatggagcgc

SEQ ID NO: 63639 - DNA, 319 bp, Oryza sativa
  unsure (1)..(319): unsure at all n locations
  Clone ID: PAT_MRT4530_64862C.1
aaaaaaaaaaaaaaaaaaaaaaaaaaaaaaaaaaaaaaaaaaagggcgggncgnnctagaaggaccaagcnaacgaacgcgggcaggcgacgncaaagcncnnnaagaggggaaccaaaaaaaaagnaacgggccggggnnnaacaacggggggacggggaaaacccgggggaaacccaacggaaggggcgggcagcacagcccccnnnggccagggggcgnaaaagcgaagaggcccgaaccgaacgcccnncccaacagnggcgcagccggaagggggaaggggacgcgcccggnagcggagaataaagcgcggcgg

SEQ ID NO: 63640 - DNA, 1720 bp, Oryza sativa
  unsure (1)..(1720): unsure at all n locations
  Clone ID: PAT_MRT4530_64863C.1
cggnaattcccggngtcgacccacgcgtccgggggaggggcgtccagccaaagaggatcgaatcgccatcagccaccgccgccgccgccggagacctccgatccgccgcctccaatcgccgacgatggaaccgctcaatcatccaaggtgacgcatcggcatcgcctcttccaatccccctattcatccatccactaaattcgtcatcatcgccatggccaccaccaaatcctttctccctcccccattcatcgccctctcttcgaaccctcgtcccaccaccctcgctcccactcccaatcccaggccccgccgccgcaattccctcgctatctgctccgcctccgcctcgggcgacccttctcccacacccgaggccgagggcggcggcaacccgctcctcgcgctatggcgccgcacgctccaccccctgggtgactacggcttcggcaagcgcagcgtctgggagggcggcgtcggcctcttcatggtctccggggccgcgctgctcgccctcgccctcgcctggctccggggattccagctccgcgcccgcttccgcaagtaccaagccgtcttcgagttcacccaggcctgcgggatttgcgtcggcacccccgtccgcatccgcggtgtcaccgtcggcaacgtcgtccgcgtcgactcttccctcaagagcatcgatgcttatgttgaggttgaagatgataaaattattgtgccccgcaattcagtggttgaggtgaatcagtctggtcttctaatggagacactgattgatataacaccaaaagatccactccctacaccttcagttggtcctcttgacccagactgttccaaagaaggtttaattctctgtgacaaagagaggatgaaaggacaacaaggagtaagcttagacgcactggttggaatatttactcgtctaggaagagatatggaggaaattggtgttcacaaaagctacaagttggctgaaaaagtagcatcaataatggaagaagcgcagcctcttctttcacggattgaagcattagctgaagaaattcaacctctgctttctgaggttcgtgatagtgatctggtgaaggatgtcgagattatagctaaaggtctggctgatgcatccggtgatttaagaaggctgaagtcttccatgcttacccctgagaacaccgatcttattaagcagtctattttcacccttatctttactctgaagaatattgagagtatcagctcagacatctctggtttcaccggtgacgacgcgacaaggcggaacatcaagctgcttatcaatgtaggccggtttttgtttgatattgtgatgtttcattcttgtgcccttgcgcaaaggttggggcttgcaaggtcgctgccgaagagaccttcgagtgccttcacagaggggacgtctcaaagcacaaagttgagagtgcagtactattgcgggtgtatatgtgggcatggagtatggaatcgaaagaatccgtggtcacagggactagtgtgcacgatcgatctggatgttaacttgcatttccttgggatgtgtgtgtatgcaattgagcagaagaacgcgatggttggaggcgccgtaacaggagcactggtgtctgcggcgagcaacagccacaggcagaacgtggtgaagaacgccatcactgggggagccatcgcaaccgctgcagagttcctcaattaccttacctga

SEQ ID NO: 63641 - DNA, 335 bp, Oryza sativa
  Clone ID: PAT_MRT4530_64864C.1
tttttgtttgtgtttttttttttttttttttttcgacagtttgaaatctaaaacatttaattgcgggggagcactaaggtgaaacacatttttagtgactggaatacttcacaaaccaaacaggtttatgaggggaatgagccacccagaaggagacacttaaatgatgccctgactttcggaatgctgcctgaaaaaaacaattttagggaccttgagaaaattactaccaccaaataaattacctggaattcccctaccagtcgatttcatggaacgggaaagaagggggtggccggggaaaagagctatgcctttggcgccgccggagccgg

SEQ ID NO: 63642 - DNA, 1037 bp, Oryza sativa
  Clone ID: PAT_MRT4530_64865C.1
atcagtctggtcttctaatggagacactgattgatataacaccaaaagatccactccctacaccttcagttggtcctcttgacccagactgttccaaagaaggtttaattctctgtgacaaagagaggatgaaaggacaacaaggagtaagcttagacgcactggttggaatatttactcgtctaggaagagatatggaggaaattggtgttcacaaaagctacaagttggctgaaaaagtagcatcaataatggaagaagcgcagcctcttctttcacggattgaagcattagctgaagaaattcaacctctgctttctgaggttcgtgatagtgatctggtgaaggatgtcgagattatagctaaaggtctggctgatgcatccggtgatttaagaaggctgaagtcttccatgcttacccctgagaacaccgatcttattaagcagtctattttcacccttatctttactctgaagaatattgagagtatcagctcagacatctctggtttcaccggtgacgacgcgacaaggcggaacatcaagctgcttatcaagtcacttagcagactgttgtgattgctcaggaataacacgggggagctttctccattgggaagcgctgatacaggaatttgctattagtgtagcatttcttgaaaaaaggaagaaaatgagaggaaagcgcaggttgagaatgagattagaaagaggtcatttggagagaggggaaccaagtttttgaatagtggaattatagtctctggttttgttttccaagtttcctgcattcccggatattattaaaacaagaaaagcacggggaaatgtgtaaatctccgttagttgtgtagggcatcttcttaatttgtttttgttttttttttttgggaggcagtgtaggccggtttttgtttgatattgtgatgtttcattcttgtgcccttgcgcaaaggtaaccagcaaggaatgcataaatacatgaaaactttgttgtctgtcttccctctttcctcttttcctctatcttcatct

SEQ ID NO: 63643 - DNA, 400 bp, Oryza sativa
  Clone ID: PAT_MRT4530_64866C.1
gccaaatcacttggatatactctgcaacccatgaagtttgatgaatgggtatcagtgagaaacaacgatatctggaaggcatctactttcgaatgtacatctttgccatatcataatgtgcttgcatccttgcgattgagctgcagcaatatgcctccaaacctgaggttatgctttgcatattgtgcaagctttccaaaaggtcacatcatagtaaaagaccaaataattcaccaatggaatgctcttggtttcatagagcaatctgacatattctctactaggcagcttggtgaggcatatgttagacagcttttggggttgtgcttccttcaacaaacaaaggctccttcaactactagggtccataacgaagattctacgttcttaaccatgcacg

SEQ ID NO: 63644 - DNA, 297 bp, Oryza sativa
  Clone ID: PAT_MRT4530_64867C.1
atggatgagctccggaattggatgtggcaaaggtggcagaggctgcgagagggcgggcaagatcaatttgagtggcgggaggccacaatcaaaatcggactcggcggcagctttggatggaagcgcacggcgtcgcgcggcgattccttgcggcggaggtcgtcccggctttgtcgtcatcaaggttggtgcggtggcggcggtttgagggcgtcgaatggccgatggcgcgccaaggcgatcgggcatgcgcaagcggccccgaagctgacgtgcggcgacacggcgagcggctaa

SEQ ID NO: 63645 - DNA, 1076 bp, Oryza sativa
  Clone ID: PAT_MRT4530_64868C.1
aacggatactcggatatatagcttagatatttttgcaagcatacaccaatccagcacagcaacgtatgtgtccagcggctactgcaatctgcatcaccaccagagagataatcatgtcatgtggggaactcgcatctcgtgatcgtcccctcgctcactgcaccacaccagaatacgtgcgtcacggtgcacgcgacacgtactgcaagaactcgtggtcaccgagcaggcgggccatggtgtcgggcgcgaggcaaaactcgacgtcgacgctgccgtccccagcctggctcgggaacgccgacatcttgccgtcgaacttgttggcgcgcccgctccgcacggcgatcgccctgccccacccgaatgacaagacccttcatataaccctcccctaaccatccacaccacgctaaggtttcacccccaccccctaccccggaggtgggcagtcccctcgtgcaccgtggtgaatccggcagctggacaaccggacaccccggtcgacccaacttcatcacgcccaccctcaccaccggtgcctaggaaatggtcgagctatacttcagatcaagtagttacccactcccgcttgtggtaagcactgtaagtcttttagggtttcccgtgaaccggtccttaattggcatgggtgcgactagcaaaaccatgcacccacagcccaccattcagtcgcattttagttggataattacgaccatgaaccatggccagatgtctcgagcacacaactcgtcaagatactagatgtctaaaattgtaattatcccatcaagtgagctagtgccatctgagccgctcagccctttactgcgttacgcgttcctcacccgcgcccgcattgccaagcctgtgcccccgcgtcgtcgtcccctcacctttcatgcagaaggattcccgaaaatcaccctccctgtgccaccgatttctccctcccgcgctcgcctttgctcgctcccgccttcgctcgctcccgccttctgcgctagcctttgctcactcccagaaaaaatcagattgatgcaacaacatcaactgaaacagaaaaaaacaga

SEQ ID NO: 63646 - DNA, 2955 bp, Oryza sativa
  Clone ID: PAT_MRT4530_64869C.1
atggattttgccaataatctgaccaattctgcatataatctgaccgaaaaacttactgacagggaagaccgaagacgaatcaacaggccgagcctttttgtccgcgagggtcttgtaaccagtactagtggggtgacaactagtcaaaagtctcctgaatttcagtccgacagggagctgccgcgggccggtgtcattcacatcgatatcgtgcaacggcgacggggtctaatcatcaacaaaaattactacagattgttccacaccgaagacaacttcgtatacagttggcaaatcattgatcatgttaaacaaacgcaccctgttgaaagtgaaagtgaaaacaataagtatcagcaccatatgctacatcgcataaagagcaattcaactacaccgacacaaattcttgggcttgcaattgtcgaaagagcccgcaaaaaacaagcctcaagggtcacctaccttaaagaaggtgatgcaaacactaaatttttccatattaaaatgaatgcaagaaggaggaaaattttcatccagagacttaggactggaaacacctggaaattcaagcatgaggaaaaagcagttatcatcaaagaacacttcgaagccttcctagcgcgcccggccccgagactagtagactacgattgggatgcactgcagctgccatcctttgactgcacgacaatcagcgggcccatcaccgaagaggaggtttttgcggccttaaagcagctaccgggagacaaagcgccaggcccagatggtttcacaggagccttttacaaagcctgttgggggacgatcaaagaagatatcatgcaggtgattcgctcctttgaccagttacggagcaacaatctgcaaatcctgaacactgctaacgtggtgctaattccaaaaaaggaaggggctgaagggataggcgacttcaggccaatcagcctcattcatggtatcgaaaagttgatctccaaagttcttgctctccgcttgcaaccccacatgggagccctgatcagtcaggcccagagtgctttcattaagaggagaagcattcatgataacttcatgtatgttcacaatctggcaaggaaatttcaccaaacaagaacgccgactcttttgctcaagctagacatttccaaggctttcgattccgttaggtgggactacctcattgacctcctacaaaggaaagggttcacctctaaatggaccaactggatcacaaatctcctagtctcttcaacaacaagggttctactaaacggttgcccaggagtgcccataaagcatggtagaggtctcaggcaaggagatcctctatcccccttactttttattctggctattgaccctcttcatcaccttctggagaaagcaacagatctcgggcttcttaccgccctacgaggcagagcaccaaggttcagaacctctctttacgctgatgacgcggccatctttgtaaacccgagtgtccaagacatgatgaacctaacggaaattctacgagcctttggtggagtttcgggccttcaaacaaacatgagcaaaagtcagattgcccccattcgttgtgataacatggatcttgccagtattacgcgcatcttcccggcaggactaacaaatttcccgatgaaatacctcggactacccctcgtggtaggaagattgaaaaaggtgcacatacagcctctgatagacaagtgtcgctcgagactagcaccttggcaagggaggttaatgtcaacagctgccagagtttgcctaacaaaattggtcctcacggcgcaaccaatttaccacttaacgtctctaaaacttcctgatggtaccttggaggacatcgacaagatcaggagaaaattcctctgggcagggggcgagactatctctggtggcaagtgtaaagtaaactggaaaagggtctgtaggccaaaagacctaggtggactaggtgtaatggacctacagcgttttgcggccgctctgcggttaaggtggctttggaacgaatgggcggcaccagacaagccatgggtagggatgtcagtgccatgcaatcaacaagataaggaactcttctcggcggcaacaaccataacaatcgggaatggcaaaacggcgcgcttctgggattcaaaatggctagaaaatcaaactccccggaaaattgcccccaacattttcttagcctcaaagcgtaaaagcagatctgtgcatgacgccatacaagataacaactggattcgcgatatcgatgttcatcacatcacagatgcggaccatctacgccagtacgtccatctatggtccatgattagaagaatggaccccctgagcgaagaacaagataccatccgatggaatctaacgacaaatgggcaatactcgacaagatcggcgtataggctacagttcatgggagcaacaagatccattttctaccaatcgatctggaaagcgtgggcaccgccgaaatgcaaattcttctcttggcttgctacccagaataggctatggacggctgacagattggggaaacgaggctggttcaatcaaaaggtatgccccctgtgctgcacaaacgacgaatctaacacttcacctcctggccaaatgtaggttcactaagaggatttgggcggaaatccagatatggacgcacatggacctccaaatgggcaaatgaaatgattgcccctcgatcgaacatcggtggaatctcgttgtcgagtccactaacaccctaagagtccctctgcaaacactactgatgctagtcacttgagagatctgggggatcggaatgcaaggatctttcgaagcacagcctcaaccccggcctcaattcttgcaaagatcaaagaagaaggtagagcttgggtcaaagcgggagcgactaggctataggagtttggaattttaggagatatcacc

SEQ ID NO: 63647 - DNA, 579 bp, Oryza sativa
  Clone ID: PAT_MRT4530_6486C.1
atgtccatggtggatgactacagtgtgtccatcaacattctcagtgtgcgcacagatcggggaccatgcggtaggccggttgtcctcagatctaggcagagagcgacctcgctgacggcgaggaattggtgccgccgaccatggctgagggagaaaggaggatatttttggcgtggtgaagggaaacgattgaaaggcgagcgcatgaaagggaagaggtggtctacagggcatggatggttggtggtggtacagatgacagggcgacaacggaggttatggacttgtggttgtgccgtcggctttaggggagatatgttcgatggctaccacaccatccgcgacgggctcgttgagctctactttgcaagcgatgtgtccattggtgttctcggcatgcacgcagatcagcaaccccatgatctaggacctcgcggtgggttggttgtcctcggatctaggcggaaagcaacctcactggcaacgaggaactggcgctgcctgtggcagttgagatgggagaaagcaggagatttcgggcgcaacgagaggggtgtctggggtgaagggaaatggtag

SEQ ID NO: 63648 - DNA, 533 bp, Oryza sativa
  Clone ID: PAT_MRT4530_64870C.1
ttctttttttttgttcaaattatatagggtttttttaagcggcaaaaataatgcacatgctacagcaattactaccaaacgaacgctaaaggccaatagcacgcctaatgcaaccccaatggaagagcatttgtacagaaaggatagtagaataacattacaaccgatccgttttttttgggcgaaaaaaaaatgatggagccttggctaatgaaccggacgccaactaaccgctgcaaaagaataataatccactgcccttaactatgataagacatctatgacagttcaacactcacagagagaattggctaaattcttggcttattttgcaaaacggcgaccctggaggacatgaagagctatatcactcactaggactttggctttgagaatgaagtccatcaactggatcacggttatgttgaatgaaacccctggaatgacttggaccagctctgagcaggttcaagttcccatgcacaaacatgcgaaggggagctgctactgactgcagaggcactaggatgatg

SEQ ID NO: 63649 - DNA, 733 bp, Oryza sativa
  Clone ID: PAT_MRT4530_64871C.1
atggcggtcaaggccgctggctcggtgaggtctggccctcacctaaggcttcttgcttggacatctctgagagcgccctattatgctagtaagattgccacaaacttggattataatttcaggttgcaaggatctctttcggcacgactatcaagttgccaggctaggagtacaaacttggttgcacagctgaagaatagcatgctgaggattcgggatggagggagggcacgccaggatggtgttgatgatgaggctggagaggaggaagaggagcctaagctggagcacgacaagcatgagggacattgcatggctggctctgccgcaacttccaatctcgggtcagagatttgaggcgcgctgagggccggccctctccgccggctgctcgccccgaccgccccgctcccgcgcctcccgtgcggcccgtcgctcagcttgccgggcttggcgttcaatctgccggccacgggaggagacgaggagatggacatcgacgcatgatgcagtctccactgctccgccatggatctgtcctctgcatagcgccatctacattgtcgccgcaagtgctagatggggaaacaattcggctctaaagggcaaactcgtcttttttggttgtttctctctccatttgacctaaaattaataaaataatggtttcaatgtcctctagcaaaaaaaaaaaaaaaaaaaaaaaaaaaaaagggggggagcctgcagcccg

SEQ ID NO: 63650 - DNA, 373 bp, Oryza sativa
  unsure (1)..(373): unsure at all n locations
  Clone ID: PAT_MRT4530_64872C.1
ccggcagcagcgagtggcagaccctgatggagtggtgcggcttcgaagcccgtgccgctcagcaactatgccaggagccaggctgatcttttgctctggaactatgattccaagtacaagtattcacttgttgagttgccaccggcgttcttgtccttggcatgggagaaacggccattgcttactgtgtctgcttggaggtgagggtagtttttttgggagtatttgggggaatgtgtggcgttgtgatagaacctgggaggaaatagttaggagaaatcattttgcagcttttgttgtagtttcctccaaaactgtgtttaggatgattggtataattgggaaattttagctgntttaaaaaaaaaaaaaa

SEQ ID NO: 63651 - DNA, 1044 bp, Oryza sativa
  Clone ID: PAT_MRT4530_64873C.1
atggaggaggagcagcagatcagccggccagatcgtcatactacgtgtgaggatcatgtgggaggtacctctggtcttgcagatgtttcatccttaggggactttcctggtgctacaacattgaaagaatcaaccgcttccagtcccacttcctccctacaggcagtaccagatgacaccattgatgctccgcagtcagggcactgcctttcctcatcccttggctcaatcatttgggttcagaaacctcctcatggccgacctggcgtataccacattagaaaggatcgtttggggtctttccatacgtatcctgatctgggtggtccatttcagagcttgaatgaagctgaagatgttatcagtagccatattaacaagctgtatccaccagttaacgtttacaattatattgctgctcagctagctttaatgtgtcagaggttcgaggaacgagctggggaatcttacgtggacatgattataaggaaagcactttattggcctgatggcactaggaagaaatgttccaaagcagaagcatttcagaatgtcaataataatatgaatcaactggctaaggtgatattagacatgtataacgatgaccacaatcttttggaggatcttgcttttgagctcaaaggtgtcattaactatgaaccaattattgaaagtcgtaggtggtttgatcatattaatttcactgcgactactaaaggactaaatgggttggacagtgaccatctatttttcgctgaagcgatgtctttgaaaggagaaaaagattatgtggtcacttgctgctctttgataagttctgatgacaatggtaactgctatacctgcaagattgggaataaaagtatgaagcacccaagtgatgtcaattcatatgttggtggtcactgttatatcaaaggaatatatgacactatagtgtcgagtgactctgaagaggatgaggatgcagaggagcagaggctaagaaaaatgtatcagggtcttgatgatccaggtgtatgtgaagagctctttgattga

SEQ ID NO: 63652 - DNA, 322 bp, Oryza sativa
  unsure (1)..(322): unsure at all n locations
  Clone ID: PAT_MRT4530_64874C.1
caangtgctgntnnccactccatgttnncacttacgggnctnctanctgnagtcntcgggactcatggtanggtnnatggcntccaaagagtncgtggagnccnctccgngatgctcggctnctccatcccagaagctgagttngcactccacatcgncctgcgtcncntacttgnttcattccantccntgcntggantccctcccattcatgcctnccccctctccacnttggnntctttngggngactgtttctntttttttcggcgaatgttncncntgttgatcattaatcntcccctgtcgaannattacnccntt

SEQ ID NO: 63653 - DNA, 1692 bp, Oryza sativa
  Clone ID: PAT_MRT4530_64875C.1
atgcgggccccacaaggcagtgacgcgagggggggcggtccacggtggaccgggtcgacaggccggggaaggagtggcacaccacgtggcgctgacgtggcgccgacacggtggccacgcggcagccacgtgggcggccaaatggactgccccgatctaccgcctggtagatcagacggcggaggaggctcgcggccgggcgcgcacgggcacggctcaaaccgacccagcggccgtggagcgtggcggcgcggcgcgacgctacggcgacgcaaggcggcgagcggcggcgaccggccggtggcggaggggggcgacgtcgcggcgacgcggacggcgacagcggcggctaagcggctcggcggcggcgtggcggctaagcggcgtgggagagagggaggaggggaggaggggcctcaccgacaacgattgacgacggcgagcgacggagggcgatggcgacggcgggacaagctccggaaccacctagcgaacacgaagaaaggggttagagagagagaggaagatggaagagggcgaggaagccgaccgaaggtggcggccatggtggagctcaccggcgtgcgcggcggcggagaggcggacggcgtggccctcgggcttgcgaacccgacggcggcgacggcgcggcccggcgtggcggctagcggctaccggagcggcggcggagaggcggacggcgtggccctcgggcttgcgaacccgacggcggcgacggcgcggcccggcgtggcggctagcggctaccggagcggcggcggcggagaggagggcgacggcgctagggcgatagagggcacgggagagctcggtgaaatggggaaaaagggacaggggatagcggggatgcgcaggcgcgagcgggaacgagagggagtgggcgcgggagacgcgggcgcacgcgcgggcggggccgacgtggcgcggggaaagcgggcgcgggcggttgcgaggtggcggctgcggacggcgggcggccagaagtgggagacgggcccgacaagtgggccccacctgtcggcgacccgaagggaggaggcggccggctcacctccgcgctcggacccgacgggtccggctggatctgacgggtgggcagccggcgtcggcgtcagtggcggtgatggtgcctgctgtgcgcctggcgggggcgggagcagaccggcactacagctagagctggcagagcggtggatgcaaggcgaggatggcgacggggtcgatggaggcacgggcagcggcggcgcgccccagcgagggcggccacggattcggcccccacacggcgggatccggcctccccgggccagatctggctggggcgatgccgggccttggacggcggcgatgggcgtggagtgggggctgacagcagcagagtcggcactgccgacggcggctggtgacgacggcatcggcagacgacggtgggaggagtcgagggcgtggcagacgactgcatctggctggcgcggcatcgtttggaggagaggtcggagaccggtttggcgcagagaggcgcaaccaatggcagcggaggccggctcggcgcgagaggcgcgggcggtggagatggaggccggcttggcgcgagaggcgcggccggcggtggatgaggcgacctcggggcgaggaggagctgctggtgggtgtggcgcggtcttcggcgca

SEQ ID NO: 63654 - DNA, 160 bp, Oryza sativa
  Clone ID: PAT_MRT4530_64876C.1
atgagaagaactgggggcaaagcaattgaaaaggacaaagaaccacgacagcccagattttggatggggattgccattctgatcctggaggagtttagagattatcgcctgacatctcaggcactggaacgaattactgtcaggaggaacagcatcaagg

SEQ ID NO: 63655 - DNA, 657 bp, Oryza sativa
  Clone ID: PAT_MRT4530_64877C.1
atggtggaggcggtcgtcgtcggagcaggagaggacgacgaagccgacgtgggcgtcgcagagcacggcgagctcctccgccttcttctccagcccggcgagcctcttccggaagcagatcccgcccgcacccggtcctcgatccgccgcagcaccacccgcccccgcctccccatcccgacctcccaatccgacgcgccggagcccggagaggcgcccccttatgtaggcggagagacgaggcaaccacgggcggcggccatcgccgtcgctttgccggattcccgcggccccgccgcctccccaccggcggggcggctcttctccaatctctggatagctgagctccaaaccttcacaatcaactaccaggcctccacaaactcctttgaagaggtcaccgggtcacgaccgccaccaagccatctagtgagcatatcaaaacagaagggcagcagcgatgacctcaagaccaccgccgtctccaccatggcccaaggacaaactccttcccatggtgcctttgggcatagcggtcattctcaccttctccaccaccatctacccgcatgccacaaccacacccacatagggaccatcgtcaggacgctactagcgctcggtcttcctggagggggcaccgacggaggaagatag

SEQ ID NO: 63656 - DNA, 144 bp, Oryza sativa
  unsure (1)..(144): unsure at all n locations
  Clone ID: PAT_MRT4530_64878C.1
ctcaactagctactannntngacgctagatagcttgccggacgtcgattcatcagatgaggctgaccctgagcgagcctcacctgaaatccatgggggtcgccatgaatatcgtgaagcttgccgccatgcagacggtgatctg

SEQ ID NO: 63657 - DNA, 255 bp, Oryza sativa
  Clone ID: PAT_MRT4530_64879C.1
atggaggtgggggagccgctcaacaccgtcatgatggagcctactcccatggaagtcgcatgggtctcctatctgccgaacgaggccacgccgctgctccgcctcgagcctcaaggccctaccactgctacatgtcaggatcatcccgttgctgctctgcctctatcttgggccacgctgggtgcgagcttctgtgtcatctgcgcacctctgtctgggctgactggcctctcgacatcgtcgctgttgtggtag

SEQ ID NO: 63658 - DNA, 2202 bp, Oryza sativa
  Clone ID: PAT_MRT4530_6487C.1
atggcttcgctggtacccggggtccttctcaagctccttcagcacatgaacagcgatgttaaagttgccggcgagcaccgttcgtcccttcttcaggtggtcagcattgttccggcccttgcagggagtgatctgtttaccaaccagggtttctatctcaaggtgtccgattcctcgcacgcaacatacgtttccttaccagaagagcagcatgatctcatattgagcgacacaattcagttgggacagttcatccatgtagaccgtcttgaggcagccactccggtgccaatcttgaggggagtcaggccagttccaggtcggcatgcttgtgttggcagtccagaagatcttgtggtaacaaactccacttttctcggaagtaagaaggcacaacaatccatcaacgggtcaaaggatgccagtactttatcactagaaaaggagcagagcaaattggagaaattaaaaccttcagtgaaaaacaatggggcagaaatcaagaaaccacagttaaccaaatcaaactcttctctctcgaaacaagcattgaatagcattatagacaagaaggaagtagtcagctcaaagacaaaacctaccagtgctaggtcgacaccttcatctccgaccagcgtttattctctaccggcatcatttgagagattctcgaatgacataaagcagagaacaaaatcaaaaggagcagataagtcatcaccttctaggctttccttgttagagaaagctgcttctgttttgaaggctactacagcagggaggaagtcctctgcaggtaactggcttagtaacaccatgtcaagtattgaatcgggaccaaaggccctgagaagaagctgggaagggaatgcagaagcaaagagcaaaggaaattcagattcaaaggcagccaaaactgagaagaagtctgagaatagaagcacatcgactccaagacgcaaaccactagtagaagagaagccattgcataaggatgacagtaagattcagactcctccaaggaagagctcagcaagtgccccttcagatgattctgagaaaatagtgaataagccttcttctcctttgaggaggacgtctggagtttcaagcaacacaaatattacaaatctagtgaagattgcttcaaacagcaaaaagttgacagatgctagcgcttcatggacatcacttcctccttcacttgctaaattagggaaggagcttctgaagtacagggatgcagcacaaatggctgctgttgaagctatgcaggaagcttctgctgcagagaacttgcttcgatgtttaagctcgtacgcggaggtgagctcgacggcggaggagcagaacccgcagccggcggtggagcaattcctggctctccatgcagccatgtcccgcgccaccgtcgtcaccgactcgctgaccaaggccacggcgacctcgacggcgacttcaccggaccgatcaacacccagtgaagccgcagccgtcgacgaggagtcccttgccgtcgcggtggagcgccggcgccgggcagcgtcctgggtgggcgccgggctcgccaccgacctctccgcgttctccctttacaacctcaagccgccacccgccattgctgcctccccgctggccgtcgtgctcgtcgacgagtcggcgagaccggcggcggcgacgaaggcgtcgccgcccgcgaagtcgcggctgttcccgcccaaggtcaaggggagggtgggacccgtcgctgcggcagtggcggcggcgcctgtccctccgccggagtgggagaggggaggcggcgcggaggacaggggcgagctggcgaggcggctgggggaggaggcgagggggtggttcctggcgttcgtcgagcggttcctcgacgccgacgtggccgccgccgccgcgccgtgggatcgcgaccgcgccgccaggatgctcccgcagctgaagcgcgtcaacgactggctcagcgagatagcgaagcccacggaaccgccgccgccgcaatccgacgccgacggcgaggaggccggcggcggcgcccccgccgttgcgaatggaggcggcaacaccgtgccggaggagacgatagagcggctgcggaagaagatctacgagtacctcctcaccaacgtcgactcggccgcctccgtgctgggcggcgccggcgcggcagcgaacgggaagagggtctga

SEQ ID NO: 63659 - DNA, 504 bp, Oryza sativa
  Clone ID: PAT_MRT4530_64880C.1
attgtagaccaccgcagggcaggaggactgagcaggagtggactgggcttccatgggacttctgctctccatgcatccccaacagcagcagcagcaaaagccaggcctgctgagctccaccttgctcaaactagaacagacagcgaggtctgcagctccaggcctagctcaccatgtagataaattgctggggtcagtgggtgtctcctcctcccacccacccacagccccctaccagcagccccaagtgctacccccatacccagcaggccagtaccagcagtgctggccctacgcgcagcccgggtcagcttacccacagcagcactggcagggaccccctccggcctaccagccccagtacccacaacaaacaccagcgccagtcacgcagctatacccccctgcaccagtcactcaggtgtaccctgcccctggaggctaccagacaggtggtccgcagtacccacagcaccagcagcccctgcagcagcagcagcagta

SEQ ID NO: 63660 - DNA, 432 bp, Oryza sativa
  Clone ID: PAT_MRT4530_64881C.1
atgcgggcggcgcaaggacccgacacccgaccgaccgggacacgtgtcgcgttgacgggccgggtctcctcgcccgctaagggcccacgtatttggcccatccagcttgggaattttttttgggccgaggcgagaggcgagaggcgagagccaccggcctcgtcgtcggcggcgggcggcggcggcggcgctgcgtgcgggagcgtcgagctgggtggccgctttgcacgccgtcggtggggatcgctacttcgccgccgtctcggctcgtcgccggctgcttctcctaccgctgcctcttccggccaccggtcgcctgcgacggtgagtgttttccttcaagcggttgcaatttgcaaatcatctctgaacattcagtggcacgaatggcttagtttggggattttctacgatttctggggcactagctaa

SEQ ID NO: 63661 - DNA, 236 bp, Oryza sativa
  Clone ID: PAT_MRT4530_64882C.1
ttagaagttagaacatagaactttttatgaatgagcacagcaacctttgatagtaccagtattgtttgttagttttttctcaagataagaaaaaagggcattttctggaacggcgctatcgtactagctacatgaagaaaaatgtttaaagacttgattcatacatggactgcacaacaggatgtttacattagcaggatgtttcggcagttttaacatggcatagatttttcgtt

SEQ ID NO: 63662 - DNA, 1182 bp, Oryza sativa
  Clone ID: PAT_MRT4530_64883C.1
gatctattcaataagctgtaatgacttgttgtctttccaattgctgaaatcttggaggttttttttcggttaattgggctgaataacaatgttatgcgatgctgtttgtgctttgattcttcaggtactaattagagatattggagccattgtttaattactttacgagcagttcaggtactttactagcaattcaagtgacaaatttggttcactaatctagttctagcagtacaaacaatttcagcttttcctagttttagagttttgattctggcatgaattgtatggggaatatgattaattcctgcacactttaggatgaaggtctggtctcatttcacttgagcagttcttgcacttcttttttttaattgcgggaatgttcagatcattttttgcttaaagtacctgattcgttcttagtttgtgtgtttgttggcctaaatctttcttccaattgcacagctctggaactcttgctgaacagaatagcatgaatgattctagtgtagggaagttcttatttttaatttttggtggatcatgggattttgcatggtggttctgctccagatctggaagcttcaatggcatgggtatcatgtgagaagctccttgctggtggatgccccttgttcttctgttccagatgtacaagctacagggcgacacgagctcctgctccctgcactccataggttagcctgcatcgacgaggaatacttgaggacgccaggggtgaagaagggtgtagcctttgggagccttgccgccagatccgccgtggatgcacatcttgatggtatggtggttggtatttgctctgctgaagatgaaactagaaaagaacatgagaagattatgccagtggtgatggtgccactggaatggcatcctcgacatgtccttcgtcaacgttcgtcgccggcagccaacacaaaggcccaggttgttgatggtggcatcactccgccactccatgccatgacaaaaatcgtcagggctccagcggcagctcagggctcaggtagcggcgcgaggagcgcaaacaacggtgtgaatcctgctggagcgctgccgcaacgagctctgccgcctcatgcttccgcggccatgccgctctcctccgaacagaagtgggagagagagaggaggaaggttagagaagaggggaaatag

SEQ ID NO: 63663 - DNA, 585 bp, Oryza sativa
  Clone ID: PAT_MRT4530_64884C.1
atgacccgtcgcgctggtccgacgagaagagcggcagcggcagggagtgatcaagcctgggatggcacggcgatcctcggcacgagcaagcggtactgcgcatatgcgaggaaggctcgtttggcgacggacggccgtggcagtccgagggttggcggggagaggaggggcggcaagccggcggcgggttcggcctggtcaacggcgctgcctccccatgcgctgcctctgctcgtcctccgtcttcagcacgtcgcgcggcgggttcggcctggtcaacggcgaatcggcgatggcggggcggctgggtccaacgatgagctccgtgagggaggaggcgagctccttgtgctccgacggaggaggggctcccactccgtcccttcgtactcgggttccggcgacgagaacggtggtggtggtgacgagaacgccgcgagcttccatggcagattgccacgtaagcgccacgtcaatgccacatcagatgaagaccgagtcaaattagccgcgtatgcgccacgtcagccaaaacagcaatctaaaccgccgagggacctcgtttgcaccggttttgatagttga

SEQ ID NO: 63664 - DNA, 528 bp, Oryza sativa
  Clone ID: PAT_MRT4530_64885C.1
atgtcactctcccagcgcaatgccagaactcaccacgtagtgatcaacatggaggagatgagggaggaagatcccgaccatcacaaccatgagccaacagatgggatagcaggaaatcggcaatctatgcacatcagggtcatcattcccaggaagccggttcaaggagtgctgcttctttgtcttggaggcgctctgggagtaatatggagaatgcagggtactcacctgcttcaaggatggctagatcgcctggccatcgtgggcgagcagtggctaggtggcgtccagcaagaaaccaggctgcaggtatctcattcaggctctgttggtgctcctctccaatgtctgctgtggggggaaatgttcatggggctgggtcctactgctttgggttctgtgtctggcggaagaaactcttcccaaatggttgctggcattgccattcctggagatggtcgacagaggtctagaactgatgctgatagggctttggcgctgtgcccaaaggcgccacccaagccatga

SEQ ID NO: 63665 - DNA, 462 bp, Oryza sativa
  Clone ID: PAT_MRT4530_64886C.1
atgacgtcggcctcggcggcagccactggacgctacgccgtggactccccgagcaacaggatgccttctcctcctccacctcctcatcttgcgctcccgtgccgggacctcgcaccctccgagaagaccgggagaaggaagaagaagataagggcaaaattgtcatgcatcgacgacttcgtcttccctcccgggcaggcgtaccggttcggtagcctcgacttcatcgccgacgacttcggcaagatctctctcctcgactcggattcaaaccagtcgggaagagatgcggtctccaccccgttcggtctcccgaactcggccgagatctactccaagattattttatccgaggaagtcggcgtcatacttcagcctctcgggacggttttaacagaagaattggatggctacctcagctctcccagtgtcgactcacggccaacggagatcctcgactaa

SEQ ID NO: 63666 - DNA, 2646 bp, Oryza sativa
  Clone ID: PAT_MRT4530_64887C.1
cagcgaaggaacgagaacctcgcttaaaaagtagagcgcggggcccactgatgagagatgcgaggacgagaacgcgcgactccgaggccagctccaatccacgccaccgtcgccggtgaagagggtggggcgaggacacgccaccgccgccgtccgtgaggagggcggggcgaggacgcgccaccgccgccacgtcttcagatccgcggcgccgccgccgtcgttgaggacggcgaggacgctccaaatctgcgccagccggccgccggtttttcgccaggtcccgaggatgtcgccgccgctcgacgttggggtaggcggcgcgccgggaagagggagagtccggctggcggggatggcgtgcgccacccgcgggcaacgacgacgcggcgtcggcggcgaccaccaccgcgcgtcggtggcgacgacgacgaccaccaccaccaccaccgtgtgcgccgctccagatctgcggaggacgacgaggcaaccgccgaggttgccgtcgtcgaccgagccgccgccgccgccacgtgtgccgccgcgtcgccgtccgtctctttctaactttattttttgcttgtggcctggttgctgatcttgggaggcagccgccacgaggacctccgcccgaggccaccgccctcgcgcctccggcaacgccgtcaccgattccggctcctcgctttcaatgctgccgtcgctgggtggagggagggggatgaaagagttggagccgaattgtccccccctccacagggctcgccagttagagtacctggtgaccgacctggccctccccaggagaagctgctgccatttcccacaaatttaacagccgcgccggctaattgccccgacatagtagtacatcatgtaaagccacctcactcatctaagcatggtaatgacgcgcagaagaaacaacctccacttggttgccttctgtggaacattgcgttttctagtaaaggggcaacaatgagctcgtcaagggtttctccatctgtggcttagaggtggcagcaatcatcaagtcatcctccgccgaagagaaggtacttttctccaaggccccttgcctgctgagagaaatcccactgcggagggatctactgtacatgagacacagctggctctgaggagctgatagacctcaaacattgtcggtctctcctttggagtggaaattgtgcaagaacatgcgactttcagaaattgcattagctcgccgtcactgcccttccctatcaatgacttgtcaacggcatcttggaggagggcattgtttgataggtagttgatccactctactaggctccctctgaaattctccggtgcagttgaaacatgagtaggcctctcgccggtgataagctcaagaagaacaacaccgaagctgtacacatcaccctttggcgtggccaccagagtacgtgcatactctggtgccacataaccaagatctccaaattctccattaacaaaggtgctaaggtgggtgtctattggattcataagcctagcaagtccaaaatctgatatctttggttcgtagtcctcatctaggaggatgcacttggagcttatattgcggtgaaggactcgaggattgcaagtgtgatgaagatacgcaagaccttttgctttcggcatgtgcttgtacaccaacaaccttttcctcttagcaatgcaaaatcctaggagaggaactaagttgcgatgccttacttggccaagtgtcttcatctccgacgtgaattgagtttcagaatgttgagaatcttgtagccttttgacagcaagaaaagaaccatcaggtagcactgccctgtacatagttcctgttctcccagtacctatgatgttctctttgcaaaattcattggtagccttcataagatcgcttagtttcatctttgaaactggattctcgaacatagaaaccttgatggttttagttcctttgatactctttgcccacttattttcttcctcgacctttggcttcttggctggtaatttccgcagacaaaagaatacgattattacgccaattatgatcacaactacaacaccaacaacagctccaatgattgctgcattgttcttgctctttgcctgaagaccaaggttgccgagacgcaaagaaagaactcggttctcatctggatgccaacattccaccccagtaaatttgcagatgtaaccaggggtgccgttgttgacaaaactccatgaggatttgagtataccattgggatcggtcactgactggaatatggttttcaagcactctccatccttgcataacaattccgggtccgggagatcctcctgcgctccaagaacacggttgagtacactgcaagccgcattggcgcgactgctcgggtcaccataaatacgggtaggtgggcacccgatactagcctgagtataacgcgaggttctttggttgtctccctgggactcaagattccacgcctggcttgatgtcctcccgcacgtcgttagcctgagccaaataggtcgcctgagctccaggcgaatccacttaccaccgtaatcttcttcttctatctggagagaacgataggatttcaacagccacacgcgtgcccccgccgccgccgccgccgccat

SEQ ID NO: 63667 - DNA, 1913 bp, Oryza sativa
  Clone ID: PAT_MRT4530_64888C.1
gggcaacaatgagctcgtcaagggtttctccatctgtgcttagaggtggcagcatcatcaagtcatcctccgccgagaaatggtacttttctccaatggctctgaggagctgatagacctcaaacattgtcggtctctcctttggagtggaaattgtgcaagaacatgcgactttcagaaattgcattagctcgccgtcactgcccttccctatcaatgacttgtcaacggcatcttggaggagggcattgtttgataggtagttgatccactctactaggctccctctgaaattctccggtgcagttgaaacatgagtaggcctctcgccggtgataagctcaagaagaacaacaccgaagctgtacacatcaccctttggcgtggccaccagagtacgtgcatactctggtgccacataaccaagatctccaaattctccattaacaaaggtgctaaggtgggtgtctattggattcataagcctagcaagtccaaaatctgatatctttggttcgtagtcctcatctaggaggatgcacttggagcttatattgcggtgaaggactcgaggattgcaagtgtgatgaagatacgcaagaccttttgctgcaccaatgccgattcttaacctcagagtccaatccatcttacagtctttgccttcttcttgatttaactgatcatagagtgaacctttcggcatgtgcttgtacaccaacaacctctccctcttagcaatgcaaaatcctaggagaggaactaagttgcgatgccttacttggccaagtgtcttcatctccgacgtgaattgagtttcagaatgttgagaatcttgtagccttttgacagcaagaaaagaaccatcaggtagcactgccctgtacatagttcctgttctcccagtacctatgatgttctctttgcaaaattcattggtagccttcataagatcgcttagtttcatctttgaaactggattctcgaacatagaaaccttgatggttttagttcctttgatactctttgcccacttattttcttcctcgacctttggcttcttggctggtaatttccgcagacaaaagaatacgattattacgccaattatgatcacaactacaacaccaacaacagctccaatgattgctgcattgttcttgctctttgctgaagcttggcagccatccaatggtagcccacaaaggccttgattaccagcaaaatttgatgacggaaatttatttagattatttggaataggccctgatagtcggttctctgcaacattgaatgatgttaaccgaccaagaagattgaactgcagtggaatttgaccagtgaactggttatgttggagattgagtgtgtttaaatatgtcatatttgaaatatttactgggatttggcctgaaaacctattgtaggagaggtccagtgatgtcaagtatggtatttgctgggagatgtcctgaggaatgagtcctgtaaagttgttactcgacagatctagcccagtcatactagtacagttctgaaggcctgcaggaaatggaccctgaagaccaaggttgccgagacgcaaagaaagaactcggttctcatctggatgccaacattccaccccagtaaatttgcagatgtaaccaggggtgccgttgttgacaaaactccatgaggatttgagtataccattgggatcggtcactgactggaatatggttttcaagcactgaacatcaagttcagagccaaaacaggtggcactcaatatcaagagaagaataagcctcagaggagcataataatgatctgtcatcgagcacttgctgcggattaatgccacctctccttgacgatgagaaatggcactctccaattagcagtcgcataaaaaagcaggaggaagggag

SEQ ID NO: 63668 - DNA, 530 bp, Oryza sativa
  Clone ID: PAT_MRT4530_64889C.1
aatttgatgttcttactccaagtttcccgccaatatcacccaaccccagttcatctgcaccaacaggatctttaccccatccgtgattctttaagccaccagtccaccacaggccaaccccttctccaatcacccgtgtttcaactggagaaactcccaagtcatccagcaccagtgctccaacagctcaggtatgtatcgccaacaagtctcaactgccagcccattacagtgttcagcgattgtcacagctacagctacaacagtttgctggcgtctacttcgatcaggctcaagctcaagcccaagtatgttgccctaaactccgtcaatatcggtatctacccaagtacaacactgctccctgtagcattcctaccgtcggtgtatctgtattgaattgtaccagtatagtagtacaggaagagaaaaataaagtcatgcatcatcgtgtgtgacaagtgaaacatcgggtgaacaaatcggaataaaaatgtcagcaaattaccaaaaaaaaaaaaaaaaaaaaa

SEQ ID NO: 63669 - DNA, 563 bp, Oryza sativa
  Clone ID: PAT_MRT4530_6488C.1
ccggccgggcacttcgcaacatttgtgactcgcgcacgcaaaaacatgagggtcaggcacctgcggacgaagaatcttgcctaatgagaccaatcctgcccaccctaacttgcataaagaaggcggctgacggatcatcgatgtgccagccactgacaggatgtgcacgtgctcagcactccatgcatgacatgcaatgttttaaagctggcggagcacgagaggtaaccattgcttgcagtctacggccggcctgttgaaggtgaccgctcgagagagccgaccgacagggaacaagaacgaggatgctgctgtatgaagtgcatgggacgaggatgtgtaactctaaactaggaatgggagcgatcgttaggacggagacctattcaacgggtccttcgtgtccttctactacattgacctagagctgatcttctactgattgcgcataatctacaaggcgtacctaaactcgtggcagatagagaaccttacgtgcggcgatgggatccagactaacctgctcactgtagatttttcctataagggcgacgtcgatcatg

SEQ ID NO: 63670 - DNA, 267 bp, Oryza sativa
  Clone ID: PAT_MRT4530_64890C.1
atggcggcggcggcggcggcgggggcacgcgtgtggctgttgaaatcctatcgttctctccagatagaagaagaagattacggtggtaagtggattcgcctggagctcaggcgacctatttggctcaggctaacgacgtgcgggaggacatcaagccaggcgtggaatcttgagtcccagggagacaaccaaagaacctcgcgttatactcaggctagtatcgggtcaggcaatttcttcccagggcagcaaccaaacaggccctaa

SEQ ID NO: 63671 - DNA, 1450 bp, Oryza sativa
  Clone ID: PAT_MRT4530_64891C.1
ccctcctccccccacgcgtccgcggacgcgtgggcggacacgagggaagcacacactgtttcttccgccgtgcgcggcgcacgaaaacccgcacctcctccgcctccgcgcgcccctgctcggcggcctcctctcctctcccacccatggcgcccccaccggcttcctccctccccacggccgtcctcgcatggggttcgggggaggacgggcagctgggcatgggcggctacgaggaggaggactgggcgcggggagtcgccgcgctcgacgcgctcgccgtctccgccgtcgtcgccggcagccgcaactccctcgccatctgcgccgatggccgcctcttcacgtgggggtggaaccagcgcggcacgctcgggcacccgccggagaccaagacggagagctccccggcccccgtcgatgccctcgccggcgtcagcatcgtgcaggcggcgatcggcggatggcattgcctcgcggtggacgacaaggggagagcatacgcttgggggggcaacgagtatgggcagtgtggggaggaggctgagaggaaggaagatggaaccagggctctcaggagggacattccgatcccgcaggggtgtgcccccaagctgaaagtccggcaatcctttttcagcaagcaaatatctacaccagtgcgggtgcaaggccttgagaatgtaaaggtgattgctgtaggtgcattccataatttggctctaacagaagatggaattttgtgggcatggggtaacaatgagtatggtcaactgggcactggagatactcaaccaagatcgcaaccaatccgtgttgaaggattatctgacctttcattggttgacattgctgctggaggttggcattcaactgcattaactaaagagggagaggtgtatgcttgggggagaggagagcatgggaggcttggatttggagatgataaaagtagtcacatggttccccaaaaggttgagcttcttgctggagaggatattattcaggtatcatgtggaggaacccattcagttgcgctaactcgtgatggacgaatgttttcttacggtagaggtgaccatggccgtctgggctacggcaggaaggtcacgacgggccacccgatggaagtccccatcgacctgccgccgccgggaaccagcggcggcgactccggcgggcaatggcaggcgaggtacgtcgcctgcggcgggaggcacacgctggccatcgcgacatggacggaggcagacgagtaatcgatcgcctcttggttttttaaagccaaatcccggagctggtacagataatactaccgagtacttttcgtgcaataagacaaggctaatgttaaaatgatctctgagatgtatgagctgagtgatgaataaacaaggaggaataaaagaatcgggatttttctttctgctgagataaaaaaaaaaaaaaa

SEQ ID NO: 63672 - DNA, 1323 bp, Oryza sativa
  Clone ID: PAT_MRT4530_64892C.1
atgttccaaagggactcgcggtgtcaccacggcggcccggcattgccgccgttctactgcatcaggccgttggtcgagaaggccgacgagaggagagatagagcagagaggcatgagtgccttgcgtggcttgacaggcaaccggaacgcagcgtcgtgttcctctgctttggcagcacaggcgcgggcagccactccgtggagcagctcagggagatcgccgtcggcctggagaagtccggccaaaggttcctgtgggtggtgcgcgcgcctcgcgtcgccatcgacgacgacgacgactcgttcaatccccgtgccgagccggacgtcgacgcactcctcccggcggggttcttggagcgaaccaccggccgcggcgtcgtcgtcaagctgtgggcgccacaggtggacgtgctctaccaccgggcgaccggcgcgtttgtgacgcactgtgggtggaactcggtgctggaggggatcaccgcgggcgtgccgatgctgtgctggccgctgcactcggagcagaagatgaacatggttcttatggtggaggagatggacatcgctgtggagatggccgggtggaagcagggccttgtcacggccgaggaattggaggccaaggtgaggctggtgatggagtccgaggcaggcagccagctcagggcgcgggtcacggcgcacaaggaaggcgcggccacggcctgggccgacggcggctcgtcgcgctcggcgtttgcccgccgaggaaagcggaagtgggaggcgccccactgcggcgcgatagcaaggagggaggatggcgagccggagccgaagctttgccgccccgctgcccctaccctccctttccctgccctcttgcgccatctcccgtgctcgcctcgttcgccatctgcacaaccgccgttgtgccgtggtctggatcgccatccactcagttgcctatcgtcgctgaggtctgggccgccatccgccaccaccttcatcttcaccacctcccgtgctcacctctccgccaccatcgtcatcggggccgccatccccaccgccaacttcgctgtcggcgtccacggatatggatcggaggacctcgttggaggcagcgggtgcaccgacctcgagcgcattggggaatgctatggcggcgtgggcggggaccaggggtggcagtgtggcggtggggatgagagaggcggtggtatggagagagaggagaagaataggagagagggagaggaggggttgaaaaagggtagtgagcctaacatatgggactcactatttaggttggacagtgtaatagagagtctattggagtga

SEQ ID NO: 63673 - DNA, 363 bp, Oryza sativa
  Clone ID: PAT_MRT4530_64893C.1
atgggggatgcattggctcttcagtttactggctctgctgctcaaaacaaggagttttggaagcaaaaagggcagtggagtgcaatgaataagctgacccggaacatccaacattttgtgagcaatgcttacatggacagtgaaaagcagaattctccaaacatgagctcgagaggcgaggtgcggattgacgacaagcttggagctccggtgctgacgcggtaccagtgctccgatgagttcccgctctggtgtcgcggagcctgctgctatgaccaggcccccatcatggaaggtggcaaaacatttggttggtttgaaggttctgtttttgtcaatgttggagaaatcctgtacttctaa

SEQ ID NO: 63674 - DNA, 1569 bp, Oryza sativa
  Clone ID: PAT_MRT4530_64894C.1
atgggattcatttcgggcatcgatgacttcgccttccctcctgagcaggcgtaccggttcggcaacctcgacttcatcaccgacaacatcggcaagatttctcttctcgaatcggattcgaaccagtcgggaggagaccctgactcgaccccgttcggtctcccggaatcagccgagatctactccaaggttctctcatctacgtttgcctcaaaccactcggttgggatctctgtgtcatcatcttcaagattaaatcaagacggcgtagtttatcctccaattatgatgcggctgccagacgatctagctgctgttttcgactcaagagcgccttctccccgtaggtctagaactgactcggtttcaacctcagtcggatctagctccagggaactcggcgtaatcctccagtgactcggatcatgttctacagaagaaattgaggaatacctcaccactccaagcgttgattcccatcctccgactgagattatcgactatgacaacttcgatgaatacgatgaccttgatgaagacttcgacgacaactacaaagacaattacactcctctctttttcggcgtttttatggttgataatgagacaaaagaaaaacacctcgctcgtgaagccgatgaacaacgagcacgacaagaagtcaagcggctcagattggagcaggaacgacaagcacaagagcaagccagattgctgcgtgagcagcaagaccgcgagcgactagcaagggaggcggaggaacgaaggcagcgtgctttggcgtcggggcgtcaggcacaagaactgattagacagcaagacatcgacaccagcagcgtattctgcaccccgcaacagaacacagttgctgcgatcacacttttggataccctcttgacagctggggcactagaccacgtcgctaccatactcgatcaaacgaagatgatgattgccgcatcagtcctagtcaacttgggaagcactcagcagcactcgacagccgggctccacctctccgatcttaggactatcaccaaccaagccttagcactgctaattcaagatcatgtcacgatcgaagggcacatcgggagcactccgtgcactctcccgccgacaaacatcgagaacattgctccccccgtcatcggcagcccgtcgacttatgtgacaccctcaatcgtcgccttgcggacagagacgactgacgacgccaccacacaccggatcgcaacgatgggaacgatagagtcgccgctttcacaagtgatctgcgtcgagtggattggttggctggtttcaagccgaccggtatcgagaagtatgatggaaaaactgatcccgagtcatggctcactgtctacaccctcgcaatccgcgcagcaggaggagatagcaaggcaatgacgaactatttaccggttgccctagctgactgttgacggtcgttacaacatgggctggagcgaggaacgactccagacctgtcagcgaggcatgcacaccgttaaggagacggaaatgcttgctgctaatctggacctcctcaaaaacgccttcaccaaa

SEQ ID NO: 63675 - DNA, 1213 bp, Oryza sativa
  Clone ID: PAT_MRT4530_64895C.1
atggtctccggcgcggcgcattcggcctccaccagtggcggcggcggggggagcgagggctcccccaccggccgcgccgcgccgggcatgcagggcggcggcagcgccgccacgcccgccgcctcggcctccgcgtccacgccggccagcgagaccaccgtcgcccgccgcctcgacggcctcgacatccagggcgacgacgcgccctcgtcgcagcccgccacgagcaagaagaaaaaaagggggcctggaacacgtgcaacgggccctgacaagggtggccgtggattgcgccaatttagtatgaaagtttgtgagaaagttgaaagcaaagggagaacaacctacaacgaggtggcagatgagcttgtagctgagtttgcagaccccaacaataattttgcatcacctgatcctgacaaccctaacacaccacaatttgatgagaaaaatatacgacgaagggtttatgatgcattgaatgtcctgatggctatggatattatatctaaggataaaaaggaaattcagtggaagggcttgcctcggacaagtatgagcgatgttgaagaattgaagacagagatcatcggactgaaaggtaggatcgacaagaaaaatgcatatttgcaggagttagaagatcaatttgtaggtcttcaaaacttggcacagcgaaacgagcagctttatggttcaggaaatgctccttcaggaggagtggcattgccatttatattggtgcagcattggggttctctggcaaagaaccagatgatacgcaagcctgggttggaaatggaggtgagtgctcaaccacacctatctatcatcaatcaccccaagttgcgaggccaaacggagttagactaccaacatcgccccctattcccggtatacttaaagggcgtgtcaagcatgaacattaggggttactatgatttgttgatggtgtgaggtacttggtttatttgttactccccaattttccctttttgtaactttacatgtaaaaagagcctgtacattagatcaatgggggaaaaatggcgggtctagtttagtttccctggtaaaagatcgatgggcatgtttacaaaccatatgcctaacttaacttgtaggattcagctttctggtttttagtaaactcaatattgtactaatgtaattgtgaaggactgtctcatcaatagtcatcttatttaggatg

SEQ ID NO: 63676 - DNA, 592 bp, Oryza sativa
  Clone ID: PAT_MRT4530_64896C.1
gttagaagatcaatttgtaggtcttcaaaacttggcacagcgaaacgagcagctttatggttcatgaaatgctccttcaggaggagtggcattgccatttatattggtgcatacacgtcctcatgctacagtagaagtggagacggacgcgtgggtgcagctggtgcattttgatttcaatagcactccatttgaactgcatgacgattcctttgtactgaaagcattggggttctctggcaaagaaccagatgatacgcaagcctgggttggaaatggaggtgagtgctcaaccacacctatctatcatcaatcaccccaagttgcgaggccaaacggagttagactaccaacatcgccccctattcccggtatacttaaagggcgtgtcaagcatgaacattaggggttactatgatttgttgatggtgtgaggtacttggtttatttgttactccccaattttccctttttgtaactttacatgtagaaagagcctgtacattagatcaatgggggaaaaatggcgggtctagtttagtttcactggtagaagatcgatgggcatgttgaacaaccatatgcctaactt

SEQ ID NO: 63677 - DNA, 162 bp, Oryza sativa
  Clone ID: PAT_MRT4530_64897C.1
atgctcaaggtggagaagcgctccttcggccaggatgtccgcgcctccctccacctcgtgccgctgctggtgtcctcctacgcagagctccacaccgacgacagcgttgccatggggccctcggtccccgccaccgatggcatcttcctccaactaccctga

SEQ ID NO: 63678 - DNA, 182 bp, Oryza sativa
  Clone ID: PAT_MRT4530_64898C.1
cccacgcgtccgtgaaactacatctatttaagtttcattaacatcaatataaatgtgggaaatactagaatgacttacattgtgaaacggaggaagtagaagatttataacttgttgagaaaacgttaatcgtattgttcgtgtatccaaaacataaattttaaaaaaatattatctcgttc

SEQ ID NO: 63679 - DNA, 204 bp, Oryza sativa
  Clone ID: PAT_MRT4530_64899C.1
atgcccccaggccccagcgctgtgcgcgtgcgcccctccctagcaggcggcagcggcagcacgaccctcccctccggcatggcggccacgcacaggcgcgtcggcacggcggccacgcatcgccgcagaggtgtgacggcggcgcaccggcgcagcacgcaagctgagagcttctctgagacgcacgtcaagagaaggatttag

SEQ ID NO: 63680 - DNA, 1639 bp, Oryza sativa
  Clone ID: PAT_MRT4530_6489C.1
actagttctagatcgccctcaccctccaattccaatccctcccaagaactagctgatcacgacgagcagctagtccactgctactgcgatcgatcggttgcaaagttaattaattagtggcgatcgatcgatcatggggagggttattagcagctggagggttcttgcggtggtggctgctttgatggccatggcggcggtggagctgtgcgccgcgataccgttcgacgagagggatttggagtccgacgaggcgctgtgggatctgtacgagcggtggcaggagcaccaccacgtgccgcgccaccacggcgagaagcaccgccggttcggcgcgttcaaggacaacgtgaggtacatccacgagcacaacaagcgcggcggccggggctaccgcctccggctcaaccgcttcggcgacatgggcagagaggagttccgcgccacgttcgccgggtcccacgccaacgacctccgccgcgacggcctcgccgcgccgccgctcccggggttcatgtacgagggcgtccgcgacctcccccgcgccgtcgactggcgccgcaagggcgcggtcaccggcgtcaaggaccagggcaagtgcggcagctgctgggcgttctccacggtggtgtccgtggagggcatcaacgcgatccggacggggcggctggtgtcgctgtcggagcaggagctgatcgactgcgacacggcggacaacagcggctgccagggcgggctcatggagaacgcgttcgagtacatcaagcacagcggcggcatcaccaccgagtccgcctacccgtaccgcgccgccaacggaacgtgcgacgccgtccgcgcgcggcgcgcgccgctggtggtgatcgacgggcaccagaacgtgccggccaacagcgaggccgcgctcgccaaggccgtcgccaaccagcccgtctccgtcgccatcgacgccggcgaccagtccttccagttctactccgacggcgtcttcgccggcgactgcggcaccgacctcgaccacggcgtcgcggtggtcggctacggcgagaccaacgacggcacggagtactggatcgtcaagaactcgtggggcacagcctggggcgagggcggctacatccggatgcagcgcgactccggctacgacggcggcctctgcggcatcgccatggaagcctcctaccccgtcaagttctcgccaaatcgtgtcacgccaaggcgcgcccttggcgccaaggaaacccagtgatcgagccggcgccatctccgccgtacacgtgcccgcctacgagcctggatcaacggctctggtcgcgtctcctcctccagcttgcaaaatggtgctattattgttgctgctctttgttaattgccttgtgtttatgtaattcgtgtgaggcgatcagggaaaagaattacctgaaatcgtctaagttactagtgttatttcgtgtgtgctaaataagttttagatgtgaggtgaggtcgatctatcatgtaatgtactgaacttatatgtggtgttcttcgtggcaccgggaaatatatataagaaggttgttgttatgactaaaaaaaaaaaaaaaaaaaaaaaaaaaaaaataaggttatgccaaatttcatccaaaaaaaaaaaaaa

SEQ ID NO: 63681 - DNA, 1226 bp, Oryza sativa
  unsure (1)..(1226): unsure at all n locations
  Clone ID: PAT_MRT4530_648C.1
acgagggccatggaggtggaagcggcgcgtcggagcaatgcggccgccgtggagtcgcacgggggcgtgcaggtggctgctctgcgtcgcgatgtacgcggccttcagcctcggcgagccgcgcctccaccggaatcggggccgcggcggtggcggcggctgtggaggcttcgctgggtcgtggcggacgcggcggcgtctccttcctcagcgtcggccggcggcgcgcggccggccgccgagcaggcccgcctcctacggcagatggagagcatagcaaaggcctataaagtcaagtttgtggtggatgttgctcagctaggggaggaagacccacttttggcaaaatggttccctgtacttccaggctctgaagatcccctggtattccactacatcatcccatggacagatcattggtaattttctgaagagagtgatgatgccatatgatcaaagtctagaaattattggtatggacacagggtctttacaggaacctattcatgatgggaaaataagagcttctagtagggaacaaattaaatggctagagcaatcaatagcggcaaccagcagtaactggaaaatagttgttggatatgatccattctttgtttgtgctgaggcgcacacactggaaacaacaaagttgtatgagcctcttcagcgtttttttgcaaaatatggagtgaatgcatatattagcacgggaggtcattgtggttacttccgtcaagacaattcaatgctgtatattggaaatcccagccctgatgaccttacaagctcagatggtttcctcctgcatatagtcaaccttcttgagatggagtcccttttgataaatttagaaggcaaggtggttgaaagatttgtagtaaatcatcatcgactagaagccttgtaaattgtatgccttcaaatttctagctcatgatctcagcattcctggattaaatcttgccagtatatcacaaaccacacagattcgtattgaattgcatccgatttgtatttgctatctctttaggcgttcagattctgtagcaaattcagtcttttttccgtcaattgcaaataanccttttcagagtantggtttancacagttttgtctggctggnactactgtatancctggctaattatgtattgcttggtatatatacagcaattaactnattatcatcaatcaaaaaaaaaaaaaaaaaaaaaaaaaaaaa

SEQ ID NO: 63682 - DNA, 1368 bp, Oryza sativa
  Clone ID: PAT_MRT4530_64900C.1
agcccagcccttaagtaccctatgaacttagttacttaggcgacattttgtttggaaaacaggcatttgaagcctcttgcagcaccaatgaccaatgcatcacatttatttcatcagctacacaacacaggataacatgataccaacaccaacatcaaacacagtgacaaaccacacaactacccaacgctcagaagggaagcacgcggacacctgcatgacggaggtcgacaaggtcgctcgccggttcaggaattattaagccagcggcggagtgaagaagtagatgtcgccgaggcgatcgttcgtcggcgagttgccgccgtacaccagcagccctcgccggccgtccacctcccccgccgagaacgcgcaccatcccctcggccccgggtggtgctcgcccgcgtcgtccagcctcgcccacgcgcccgtctccgtgtccagcgcgaacgcctcggcggagaatttgccggcgccgaggtgccccaggtcgctcgggtccacctcgccgccgaacaccaccacgtgcttcccgatccccgcggcacagaacacgctgcgcggggacggcttgtcgccgccgccgccgccgccggtggtctcgaccgtggaccacgcgcccgtgcccgggtcgtagcagtgcacgtcgtccagctcctcgccggagaagccgtacaccacccacaccttcccgccggcgacggccagcccggggcctccccgcggcttgcacgcctcgcccggcgacggcagcgcctcccaccgcccggcggcgacgtcgtaggcccacaggtcgttgaggcggccggcgtcgccgcacccgccgaacacgtacaccttcccgccccccgcggcgtcggccaccatggagtggtagctccggtgcggcgggccgtcgccggcgccggaggacagcagcgtccatctgttggtcgccgtgtcaaacgagtagagctcgttcagctccttgtgctcctggtcgcgaccgccgaacatgtagacggtggcgccgacggacgccatggtgacgccgacgcgcggcggcggcacgtcgccggaggcgtccagcgccgaccagcactgcgacttgaggtcgaaggcgtacatggcgttgtccaccggcacgcgcggcgtgaactcgccgccgaacgcgtacgccgtgccgccgacgagggtgatggcgtgggagcttcttgctcccggcccatctcccttctgctctagcttcacccaggtgccagcagccattggcatgaacagattggagctctgcttcctctgcagcctgagaacttgcctttctccaccaatctggccagaggccaagtgatatacaattgtagctggtcgaggggcctgttccat

SEQ ID NO: 63683 - DNA, 109 bp, Oryza sativa
  Clone ID: PAT_MRT4530_64901C.1
ccgccaccactcctgcgccccagccgcctctgcgccaccgctgccggtgcagccgtcgccggttgccgcagccctcgtcgtccttcgctgccaatttgatctgttcttg

SEQ ID NO: 63684 - DNA, 333 bp, Oryza sativa
  Clone ID: PAT_MRT4530_64902C.1
atgaggccaacaggcagggaggcggcggtggcggtggcggcggcggctgaggaggaggaggcggtggcggtggcggtggcggcagcggcggaggaggagatggtggtggcggcggcggctactaaccaccatggaacggaggttactacccaccaggcccaggccaccaccacgacccgcactggcacaaccacggctgccgttgggggtgctgccaccgtggctactggggagattgccaccgctgctgctaaggtggcgccggggctagccatagctagcttagctccaccaatccacagagatcatgaggccgaattgatctatcagtga

SEQ ID NO: 63685 - DNA, 309 bp, Oryza sativa
  Clone ID: PAT_MRT4530_64903C.1
atgcctcgccattgtgccgccgtcgaatcccacctccagactgatgtcgtcagcgcccatcacagcgaccgcatcgatcgactcgcgatgccaccgacgtcccaccaagcgcagatcgcgcaccgtcacgcgccgtcgatcccccacccctcgtgtcgccgacgccccgctatcgcgccgccgtcgattcccgcctctagattgacagcgcccctcgcgccggcaaggatcctgcgccgccgccaggactcctcacctctcgcccccttctgcaccgcagccaccggagccctctccaccacgacgtga

SEQ ID NO: 63686 - DNA, 210 bp, Oryza sativa
  Clone ID: PAT_MRT4530_64904C.1
atggctgctgctgctgctcgttggcctcgcttcttcgtgctacgacctgctgtagcgctcctgctgttgctgcttcttctgccgctgcatgctaccgctgcttcccccaccactgaaagcagcgccggcaacgacactgttgtcctgacggcgaaagacgacgacctggagtacgtggacgccaatattggagcagacccaagaacctga

SEQ ID NO: 63687 - DNA, 723 bp, Oryza sativa
  Clone ID: PAT_MRT4530_64905C.1
atggcgaacccgaggagagccatcgcgctgcaaatccacacgcagacgacgcccctcgccgccgcccccgccgccgcgccgtccccctcgctgccgtcgtcgctggtccacttcctgaagcggccggcgtcgttcccattcctgctctccctcttcgtgctcctcacctggatctcgctccgcttccaccacccgtccccttcggcttccgtcctcagggcccccgtcgtgcacgacccccaggccaacctcgtccgttaccccgccgcgctgtaccccacccccatcgccgccgacgggcgcgggtggctacttgaccccgtcgccgctgctcgagacgccggcttaccaggaggagcactggtttgtttatcactacacgtgggacagatccagccaggtggtttacgtggcaatcatcgccaccatacatgcaatgagacatttgtcatctggggtgcaaagacaaaattccggttagaaaatgctgatgtaaatgatagaggatatggggaagccatgattgccgctgatgaggtggccattgttgcaagcgcaagatcaactgcacatgccttgataaatatggatgtgcgaccaaccttcttcttgggatgtcaggacacgccaataaatcccaacagctcgaatactgactacaaggtaaggtgtgacatgaactttttaatgatcacataccgcaagatatatctgattgcttaa

SEQ ID NO: 63688 - DNA, 221 bp, Oryza sativa
  Clone ID: PAT_MRT4530_64906C.1
aaaaagataaaataaatatatatatataacaaacagaacaataaaagaaagatcaatcatatacataaaaaagaagagagaaaaaaaagagagagtaatgggcgtgctttcgggcgtcccttttgtgggtcccaggtctgcgccacgcgaatgtgaacggttacgactatataatgcggactgtcttgacaatcttctgcccgctctttgccggcaaagtc

SEQ ID NO: 63689 - DNA, 156 bp, Oryza sativa
  Clone ID: PAT_MRT4530_64907C.1
atggcctcaagccggttgccgcctcatagacggcttgtggaggtgttgcccggtgacctctccgaggagattgtggaggagacccagcgctggatcaaatcagctggcacgcccttgacacactcaagtctagccttggacctgcactggagttaa

SEQ ID NO: 63690 - DNA, 108 bp, Oryza sativa
  Clone ID: PAT_MRT4530_64908C.1
gagtgcgacgcattgggaataggagccaaatctgttaacatggaggagcatgctcaacacggcggtgttggcggcgcgtaccaaattatgctctgcttttgtgattaa

SEQ ID NO: 63691 - DNA, 419 bp, Oryza sativa
  Clone ID: PAT_MRT4530_64909C.1
tgtttttactcatacagtctccactcacacgcatggcatttgataggctacagtggaggggaaggaggaggacgtgcggctgggggcaaacaggcactcagagaggcactcatttgggacggcgatgcacggcgccattgacaacatggactacgaggagccggcaacggcgcccatgatggagccaggggagctcaaggacctgtctgtgtacctaggcgagatcggcgagctagacgacaccttcctcttcctctacatgagcatgcttaccgtcttgtgagtctacaagtcctgctacaagtgcgccaccgtgggcatgcacagcatctgctgtgccttgggagggatgagcttggaactcgactactgcaccgacggcatttccggaggacacatcagcccagcagttacttttg

SEQ ID NO: 63692 - DNA, 397 bp, Oryza sativa
  Clone ID: PAT_MRT4530_6490C.1
ccccaaaaccaaggaccagggggggtaaatcatcatacgggaggcccggggtcccataaaaaaaacccctggcccttggacaaaacggggggcctcaccacatggaattaagggggggggttttttaaataccgggggaattggcaacccccccgtggggggtaaccaacaaaaccgggattggggggaaaataacccggggggggccctggtttttcaaacagggggggccccccccccgggggccccgggggggggccccccccaaaaaaaaaccccggggggtccaccagcgtaggggcccccggggggggaccatccccccggaaagaaaaaggggccgaaaccctggacttaaggcccccactggaaaaggaagggggccacaccctccccc

SEQ ID NO: 63693 - DNA, 1162 bp, Oryza sativa
  Clone ID: PAT_MRT4530_64910C.1
gatatcgatgtaaagctctactatttcaacttcaatacatcagtttgagtacacaagtcaaaactacattgtctgttgggcacaactactttgacaatctcttattctgaaactataggttaaagaaagcagaaactatgatcacacaaaagatgcctcgccattccgatcaaaataagcacctgttggaccatcatcaggcaagagagctacctttacggagttactagcaccctcttcaggtgtcaatactcccatgtgcattgagatgtcagtcttgacataaccaggtgtcaaacagttgatacgtagtgtagggtacttcttggcaagaatccttgtgtatgcattaagggcagctttggcaactttgtaggcggaagatccaccggttggccaaccatgtgcttctattaagttcaccttgaaatcgtctaggaacaaatccaacagctcctctagtctcttttcagtaagactgtcgatgtcatcgaattcttttctaagatcttcactgttgaagtttctcagtagtccaaatcctgatgacacgttaacaattcttcccgaggaggataacagaagaagaggaagtagtgcttctgtgacaagcttggcaccatagtagtttgttgtaatgcatgatttagcttcatcataggtctcctttgaattttctctcatccattcaactctctgatctacatccatgccttcaatctgatctttaactttggcaaccaaaactggatcccgatcaacacctgaaattcctgcgttattgatcaagatatcaagcctcccgaactgatcccggacgaaatcggccagccgggcgacgctggcagcgtcggtgacatccaactggtggaacacgacatcagaatcggcggcgccggagcgcctgatgccgtcgaccgcctccagccccctcgcctcgttcctcgccgtcaggacgaccctgagcccccgggacgcgagctgcctgcaggtctccagcccgacccctttgttgcccccggtaaccagcgcgatcctgatgatactcttgctcggcggattcgagatggccgccgcctccatcgtcgtcgttcctccacgattcgccgcggcggggcgagggatgtgaactccgcgaccgagcagatggttccccggccgg

SEQ ID NO: 63694 - DNA, 517 bp, Oryza sativa
  unsure (1)..(517): unsure at all n locations
  Clone ID: PAT_MRT4530_64911C.1
gttattcatagcgatcgatcgattgatcgaggagtttgaggggggaataacggggaggagcatcgatctcgatcgccggcgaccatggcggcggcgcttgttcgctctttggcgagcaggagtaggatcggcacccggcgctctcacccagctacagcctaagccggcggccaccgtcatctcgccaaggttgcttagccatggcgggctcctccgccgggaagccctgccgccgccgctctcgccgtatcgcttcttctcttccggcggtttcgagtcacctcgcacgggtccctcgccttctagtacagaacctggtacggacacagagtcttgtaccaataagcaagggccagtggctgctgaagagaataataaaaaatgttgtccaagaaagcaagcttcaatggcactcgngacgggaattgcagagaggaagaaggagcttttcagctaatgttgcagatgaagaatattccacattgtgatgagtgttttcccgataaggaggagcagt

SEQ ID NO: 63695 - DNA, 4552 bp, Oryza sativa
  Clone ID: PAT_MRT4530_64912C.1
ggaaggaaagctctactattggaacttcaatacatcagtttgagtacacaagtcaaaactacattgtctgttgggcacaactactttgacaatctcttattctgaaactataggttaaagaaagcagaaactatgatcacacaaaagatgcctcgccattccgatcaaaataagcacctgttggaccatcatcaggcaagagagctacctttacggagttactagcaccctcttcaggtgtcaatactcccatgtgcattgagatgtcagtcttgacataaccaggtgtcaaacagttgatacggagtgtagggaagtcgagatgtatcttgacaaggaagtagtgtagtttttttttttttttttcaattagaagtaaaaaaatcatattctcagtttgaaccagttctttttctattaacacctggattctcggcttcacgacccaaatccacagcgctaatggtgccccaatattaagcaatttttttttccattacttcggccttgctgtaatcatacgaactactccttcatgccatatttgtagtaaccgaccacattcagttcgtgggagagcctcaccatcgtcacgacgtcactctaggcctactccgtcgtcaggagcatctcgttgcttgacatctctctcggaacgcagccctcgtctgcccacttgacgctacgcgctggtcgctccgccgcgccgtcgcccgctcccccggtcgtagttctccttgccctcctcggacgcctcggatccccagtggccgtgcgtgcgcctcttgatctacccacggtccacgcatttgacgcacagggccggctgccccctcgaccagatcctcgtgtaggcgttcatttcccccctgcccttcttgtacgccacgaaccgcgccgtcggccacccgtgcgccgccagcgcggcggcctcgaactctttcaggaagctgtccagcacctcgtccagccgttcctcggtgaggttatcaacgtcgtccagctccttgctcagatcctcgttgttgtcgaggcagtgcttggcgttgctgtatgctccctgtccctgctccttccctccatccatttcattttctgctcttccttcccgcctaccagatcctttgttgatgtatacacccaacgcggaatccctggcaccatccgcgacctcctgatcatggatgatgagatagccaatgccaatctcaacgagtttcgcaaacggctccacgcgcgacgtgtccgtcctcgctgtcagaacgaccgcgatgccgacgacggccagctgtctgcacccctcgacccccgctcccctcctccggccgtcgcccactccccccacgcctcgtcgcccggccggccccggccccccggatgacgcaatgccacgctgtctgttccctgccgacttacttgcaccccggccccggcgcaatcctccttgtcccattgcgacggaactcctgacatgacctcgtcccccaccggcggcacgacttctaggctacttcctggcaagaatccttgtgtatgcattaagggcagctttggcaactttgtaggcggaagatccaccggttggccaaccatgtgcttctattaagttcaccttgaaatcgtctaggaacaaatccaacagctcctctagtctcttttcagtaagactgtcgatgtcatcgaattcttttctaagatcttcactgttgaagtttctcagtagtccaaatcctgatgacacgttaacaattcttcccgaggaggataacagaagaagaggaagtagtgcttctgtgacaagcttggcaccatagtagtttgttgtaatgcatgatttagcttcatcataggtctcctttgaattttctctcatccattcaactctctgatctacatccatgccttcaatctgatctttaactttggcaaccaaaactggatcccgatcaacacctgaaattcctgcgttattgatcaagatatcaagcctcccgaactgatcccggacgaaatcggccagccgggcgacgctggcagcgtcggtgacatccaactggtggaacacgacatcagaatcggcggcgccggagcggccggtgccgtcgaccgcctccagccccctcgcctcgttcctcgccgtcaggacgaccctgagcccccgggacgcgagctgcctgcaggtctccagcccgacccctttgttgcccccggtaaccagcgcgatccttccaccggagaggccggacacggccgagacgtcctcttgccgatgatgaacgccatgccttgcctgctcaggtcctcgaacgcgccgatgatgccgatgacgaaggcccgtgaagaaggactgcatcgccgtgctgttgggccccctctggaactggagcggcgacgggaagaagacgtggcccttgagctggttcgtgccgttggtcagcatgagcagcccgttcgaggtcaccgttgccatgccgtcgaagctgaggttggcgccggtgaacccgttgaagacgaaccgctcgtcggtcgccgccgccgggcggaggcagcgcgaggcccgaggaagaggagcaggacaaagaacggcatttctggtttgggaagcaccatgccgcggccgcccgcaggtgacctccagcacgaacacgccgaacgcgaacacgtcggtgaccggcgtcgccttgcccgtgcgcaccagctccggggcgaggtaacccatggtgccgacgacgtgcgtcgtctgcgggtcaacgccgtggtcgtacagcctcgcgaggccgaagtcgcccagcctgccgttcatctcgccgtcgaggagcacgttgctcgccttgatgtcccggtggatgacgacctgctcccagtcctcgtggaggtagagcaggccggaggcgacgcccttgatgatctgaaacctctgcccccaatcaagaacaggcttggtcttgtcgtacaagtacttgtcgaggctgccgttggacatgtagtcgtacaccagcaggagctcgcccttgcgccggcagtagccgagcagctgcacgaggttgcggtgccggaggtggccgatgctgacgacctccgcgatgaactccttcatcccttgcttcgagtcgtgcgacaccctcttcacggcgatctcgaggttggatttcgcgagcacgcccttgtacaccctgccgaatccgccggtgccgagcagctgcttgttcttgaacccctttgtcgcctggtagagctccttgtaggagaagcggtgcggtccgaactccacctcccagtcctcccgcacctcggcgtacctcacccgcctccggacgaacaggaaggcggcgatgaccagcgcgaggacgaacgccgcggtggcgatcgggagcacgatctccagcaccttggaacggggcttcggcccgaaccgcggcagcgccgggaggcttgaggtgtggagagaaggagcggcgccgttctgggagaagctccagccgagaacgtagtgccgcgtgtagatgacgcccgtggccgccgagaacccgacgtacgccgtgtcggtcacgacggacgagaggttgacgggcgcggagatgaggggcttactgggcttgggaacgtcgagcggcgccatcgtcacgttgagcaccgtggtggcgccgtcgtagtccacccacacctgcatcggctggcggctgatcaagctcagattgttgaaggcccccgtggcttcgtcgtagtagccggcgctgtggttctgcacggacttcatgctgttgatgtcgacgccgatgtggttgctgttcatgtcctggaactccgggttgagcatggtgtcgagctcgacggcgaagatgttgttatcggcgttgccgttgtcggtgacgttgaggatgccgaggtactggccggcgttgaaggtggagagccgcgtgctgggcgcgaccacgaacgccatgccgttgtcgctcagcacggtgaagttggacacgatggcgaagacgaacgcggccgagaaggactggacggcgccgcccgccgcgccgccccgcaggcggatcggcgtcgggtggaacgcgtgcccggccatctggttcgtgccgttgctgagcacgaggaggccgttgggcgccacggcggccatgccgtcgagcgtgaggttggcaccgccgaagccgttgtaggtgaactcgtcggcggcgagcacgcccccatgatcagagccaacgaccgcgagcaggaggaggaggagcagcagcaagcggtgattacccatcgggagatttgcttccgtttgggagttgcaattagcacagggcatatgatgtgtagtcaccgctattcgagtcatagcatcaaatgtctgaacagaagactcgctattcgagtcaatgcatgaacaccggacaccaaccattatcccaggtttactggttgtgtgtggcatactggcagtggcatcacatcgttcacactcctcgctacactacacagacagacagactgcaccggccttagaaatatcgtgctcgagagggagttgcaactaacacagggcatatggtag

SEQ ID NO: 63696 - DNA, 646 bp, Oryza sativa
  Clone ID: PAT_MRT4530_64913C.1
ttttttttgtcttgtttccttctctgattgcatttccaacatgaaacattcatctcttctggatcaacatacatagggttcatatgttacatcaactttagcaggggcgtgattataccatacttttttgctgtaatactactattgctcagtacacatcatcataggtaaggcaaaggttgggctagttgttcaccatgcccaggtcatcaccgcctccaaacaagcctgaagctatggtgccaacatcctctaacactactccgatgaagaggggattcttcttctgtgcagcgccttcgctccggagccgcacattcgggcctagaccgcatttccccaggcatttgcagccaacgaccgcaccatcagtgcccaccttcttctcgaactcctgcagcaccgcgagggagcccgatttcttgcatttgcctcccatgcagacctcaattctgttcgtcatcggcttctcaactactgcaatggtagcagtggtggacaacattgtatttgcaggttctgatgagatctgagcatcttggcatggctccagtgtcactgattctggaatctggggcagtattatagggaaaacggtgctcgagggttgtgtttgtggtgtggttatcgtagcacagcagctcat

SEQ ID NO: 63697 - DNA, 506 bp, Oryza sativa
  Clone ID: PAT_MRT4530_64914C.1
gtggcagtgatggtggaggtggatcgaatactgaggccaggaggcaggctaattgttagagatagtatggagacaatgcatgaagtggagtctatggcaaaatcgctacactgggaggtccgcaagtcttactcccaggacaatgaaggtttgctgtttgttgagaagacgatgtggcgaccaaatgaagttgaagctaagctatgacgtaccataccagcaccaccgttatgatagctctgacactgaaacccttggaagaggaaaacaaaagtagccaagtgggggatgcacagtaagctatatatatagtgggtttttgtaggggtatacttggattttgggagaagctgtaatgtgttttttttttttttgcgtgggatgatacattagcaactaatgcatggtgatgatccatgttgaggctggcaagtttaacatacatgcatcgctctttgtagagttgtagcataagatagtagaatttgtgtggaaattgctgaagc

SEQ ID NO: 63698 - DNA, 755 bp, Oryza sativa
  Clone ID: PAT_MRT4530_64915C.1
cgccgttgccgccgccgccgtcagctccgacacgttgaacacttcctggatacctgcgttaattcattaattaattgcttgattagttgactgcagcttacgccagagaagaacacgtgctagattcttgcgaaactgcactgtgcctgatctgacaatttacctatccatgaaaacaaatttactccaagtccaaggtgatcagttctaaaaaaaaagaaaaaagtccaaggtgatctgaactcaaaaactagtgcgtacgacgaagaatttttcctaatcttttagcagatcaataaatctatttcttaactatatagtatatgtactcgatccgtagtgcgtggcacatgcatcattcatgcacttcttgaactattccaactaagctaaaaaaaaagaactattccaactgaatagtatgaatatactgtataatcttagcttaaaacaaactagaagtgtcagacaagtcaaaaccaccaaagaatcaaatcgaattgcacaaggtaagatcaagcaataaacttaatttgcgacgatattgcgtacggttggtatagatatctggtcatccgccatggagacgaatgtagtagcatgcaatgcaagtattaattggttcatgcacaagctatctctatctatccatctagagtagtatccatttagctacacgcagctgtccggccggctggccaccaaccgaatctagtttaatcagccctgtcgaccgatcgatgtagtatgcattt

SEQ ID NO: 63699 - DNA, 1812 bp, Oryza sativa
  Clone ID: PAT_MRT4530_64916C.1
atgggtttcaggttgttcttcgtcttcttccacctcttgttcttctgcctgtttccagttcttggctctgctggagcagaggatctgcagagctacattgtgcagctgcatccgcatgaagctaccgcttccagcggcgacgccggcgaggcggtgttcgcgtcgaagatgcactggcatctctcgtttcttgagaagtccgtggcatgggagcgggagaagcggccgtcgtcgcgcctcctgtattcttaccacacagtgttcgatggcttcgcggtgcagctcacggaggaggaggcggcggcgctgcgggagctgccgggcgtcgcgtcggtgcgggccgaccgccgggttgagctgcacacgacgtactcgtacaggttcttggggctcgacttctgtccgaccggcgcgtgggcgcggtccgggtacggcggcggcacgatcatcggcgtgctcgacaccggcgtgtggccggagaatcccagcttcgatgaccgcgggatgccgccggtgccggcgcggtggcagggcgtgtgccagggaggtgagcatttcaacgccaccaactgcaatcggaagctcatcggcgcgcggttctactccaagggccaccgcgccaactacccgaccaacccgtcggacgccgtgtcgctgatggagtacgtgtcgccgcgggacgcgcacgggcacgggacgcacacggcgtcgacggccgccggcgcggccgtggccggcgccagcgtcctgggcgtcggggccggcgacgcgcgcggcgtggccccggccgcgcacgtcgcggcctacaaggtgtgctggttcaacgggtgcaaaggcgaggcagtaaaacaagcaggcggcgccgccatgattctcgcgaattccgagataaaccaggaagaggactccgtcgatgtccatgtcctgccgtcgacgctcatcggctacagggaggccgtcgagctcaagaactacgtcagctccacgcggcggccggtggcgaggatagtgttcggcgggacgcggattgggcgggcacgcgcgccggcggtggcgctgttctccgcgcgcgggccgagcctgacgaacccgtcggtgctcaagcccgacgtggtcgcccccggcgtgaacatcatcgccgcgtggcccggcaacctgggaccgtcggggctggagggcgacgcccggcggtccgacttcacggtgctctcggggacatcaatggcgtgcccgcacgtgagcggcatcgcggcgctcatcagggcaagccgatcatggacgggaacggcggcaaaggccgacgcgtacgccatgggcgccgggcacgtgaacccggtgagggccgtcgacccgggcctcgtctacgacatcgacccggtcgactacgtcacccacctctgcaacctcgggtacacccacatggagatcttcaagatcacccacgctggcgtcaactgcaccgccgtgctggagcggaacgccggcttcagcctcaactacccatccatatcggtggcgttcaagacgaacaccacgtcggcggtgctccagaggacggtcaccaacgtcggcacgccgaactcgacgtacaccgcgcaggtcgccgcgccgcacggcgtcagggtcagggtgtcgccggcgacgctgacgttctcggagttcggcgagaagaagagcttccgggtggccgtcgccgcgccgtcgccggcgccgcacgacaacgcggaggggtacctggtgtggaagcagagcggcgagcaggggaagcgcagggtgaggagccccattgccgtgacatgggtggtcgagtag

SEQ ID NO: 63700 - DNA, 2313 bp, Oryza sativa
  Clone ID: PAT_MRT4530_64917C.1
atggcgtccacgacctccaaacccttgcagtgcttggcattgttcctcctcctcgcgcagctcgcccactcagccttcatccccaagcccaagaaccgcaccgagcacaagcctgatcagctgtcgaacacctacatcgtccatgccaaccacctcctcaagccgtcccgcttcgcccccctcgtccgctggtacatctccatggtggccacgcactcccctcgcgccgccaccaacgccaccgccgccgccgccgcggtggccggccgcatcctgtacacctacgacaccgtcatgcacggcttcgccgtgcgcctcgccgccgacgaggcccggagcttgtcccgcggcgcccccggcgtgaccgcggtgcaccaggccaggatgtactacccgcagaccacgaggtcgccggggttcatcggcctcgacccggagtacggcctgtggcgcgacacggagttcggcgacggcgtcatcatcggcgtcatcgactccggcatctggccggagaacccgagcttcaacgacagcgggctcgccgccgtccgccgcagctggaagggcgggtgcgtgggtctcggcgccaggctgtgcaacaacaagctggtcggcgccaaggacttctccgccgccgagtacggcggcgcctcctccccgagggacgacgtagggcacggcacgcacgtggcgtcgacggccgccggctccgaggtccacggcgccggcctcttcatgttcgcgcgggggacggcgaggggggtggcgcccaaggcgaggatcgccatgtacaagtgcggcggcaactggggctgcagcgacgccgccatcatcgccgggatcgacgccgcggtgaaggacggcgtggacatcatctccatctccctcggcggtttcccgatcccgttctacgaggacagcctcgcgatcgccacgttcggcgcccagcgggagggcgtgttcgtcgccctcgccggcggcaacagcggccctcggccgtacaccgtgaccaacgtggcgccgtggatgaccaccgtcggcgccggcgccgtggaccggctgttcccggctaacctcacgctcggcaacggtgaggtgctcgtcggccagtccctgtacaccaagatggccacgggcaccaccatggcgccgctggtgttgctggactcctgtgacgagtggagtctctcgcccgacgtcgtcatgggcaagatcgtcgtgtgcctcgccggcgtctacgagggcatgctgctgcagaacgccggtggcgccgggctagtctccatgcaaggtgaggaatggcacggcgacggagtggtagccgacgccttcaccctcccggctctcactctcagctactccaaggccgagaagctcatggactacttcgagtcggcggcgagcccggtggcgtcgttcagcttcgcctgcgagacggtcaccggcgagaaccgtgcgccgacggcggtgggcttctcgtcgaggggccccaaccgcgtcgtccccgagctcctcaagcccgacgttctcgcgccggggctgaacatcctcgcggcctggccgcgcgacatcccggtgtcgatgttgaacatggacacgaggagatccgaattcaacatcctctcggggacatccatggcgtgcccgcacgccgccggcgtcgcggcgctgatcaagaagaggcacggcgactggacgccggccatgatacgctccgcgatgatgacgaccgcggcgacgctcgacaacaccggccgcgacatcaccgacgagggcgtccaggaggccgccaacgccaccttcacgagcgcgacgccgctggcggccggcgcggggcacgtccgcccgcagctcgccgtggacccggggctcgtctacgacgccggcgtggaggactacgtcgacttcctctgcagcctcaactacaccgtcgagcagctgcgggtgttcgtcccggacacggccgggtgcgcgccggcgctccccggcggcggcccggccaacctcaactacccgtcgttcgtcgtcgcgttcaacggcagcacacgcgtccgcacgctaacgcggacggtgaccaaggtgtacgagaagccggagacgtacagcgtggccgtgtcggcgccggccggcgtgaaggtgaccgtgaggccggcgacgctggagttcaaggagaagaacgaggagaagagctacacggtggagttcacgagcgtggcgggaggacacgtcaaccagagctgggatttcgggcacatctcgtgggagaatcggaagcatcaggtcaggagccctgtggtgttcatgtggaactaa

SEQ ID NO: 63701 - DNA, 225 bp, Oryza sativa
  unsure (1)..(225): unsure at all n locations
  Clone ID: PAT_MRT4530_64918C.1
agcttctacattcttgaagggactccgcaagngattnaaaatnccntgangctatcaacatctttcctgtcttaactctttagtacaagctacttagctttctaatcaatgtatcctcctaaatacgatgatcaagacctgagagcttcaaatgcatgttntcttcgncaatatttgtatgaaaccctcgatttgcatggtttctgcgctaaaaaaaaaaaaaaa

SEQ ID NO: 63702 - DNA, 301 bp, Oryza sativa
  Clone ID: PAT_MRT4530_64919C.1
atgggccagaacgggattgatacttggggtgacaaatttcacattggggccagggatcccgtgggggccgcccctacggggcagtgccgccatcggttggcccacgtcgcgccaccttcgcccgtcaccgtgcctccaaccgccatcgcgcggcctccatctcactccacctccacgcaggcatgcctctacccgccgccggtcagcctcgccatctcctctcgtcaacgtgacgtgcggtcgcaccgcctcctccaagcatccttgcatgcgagtgcagcaagcccccgtcgtgtggcgg

SEQ ID NO: 63703 - DNA, 289 bp, Oryza sativa
  Clone ID: PAT_MRT4530_6491C.1
cccacgcgtccgaaaaaaaaaaaaaaataaaaaaatttaatgtaaataaagttgtagaaaacgacggaaaaataaaaaagaaaaaaaaattctttaaaccggggaggggacgtcatgggggatccaatgtaacgaccgagtttttgttcctgggggggctgttttatagggtcacgtatgttaaatccctgggggggcgtatataaatttttttactgggaatccccttgttattccaaggtgaatttgttaaaaggacatctctggttagacttctggcattataaac

SEQ ID NO: 63704 - DNA, 2039 bp, Oryza sativa
  Clone ID: PAT_MRT4530_64920C.1
atgaggacgatgcttcctctcctcgttatcctcgtcgtcgggctccggctcgccggcgcgagccctccgccgcagccggtggcctgcaccaagggcaccaccgactgcacggtgaccaacgtgtacggctccttccccgaccgcaccatctgccgcgccgctgacgcgtcgttcccgcgcacggaggcggagctcgtggcgcccgtgacggcggcggcggcggcggggcggaagccgaaggcggcgacgaggcactcccacagcttccccaagctggcgtgccccggcggccgcgacggcaccatcatcagcacccggttcctcaaccgcacggtggccgtcgacgcggcggcgcggcggatcaccgtcgagagcggcgtcgtgctgcgggacctcatcagggccgccgccgccgccggcctcgcgctgccgcactcgccctactggtacggcctcaccgtcggcggcctcctcgccaccggcgcccatggcagctcgctctggggcaagggtagcgccgtgcacgagtacgtcgtcgggctacgcatcgtcaccccggccccggcgagccaggggttcgccgtcgtcagggagctcgtcgccggcgaccccgacctcgacgccgccaaggtctccctcggcgtcctcggcgtcatctctcaggtgacattcgagttgcagccgcagttcaagaggtcggtgaggttcgtgacgcgggacgactcggacttcgcggagaaggtggcggtgtggggcggcgcgcacgagttcggcgacatggcgtggctgccgcggcaggggaaggtgatctaccgggaggacgaccgcgtcgacgtggccacgccggggaacggcctcaacgactacctcggcttccgcgcgcagccgacgctgggcctcatcaccgccagggccgccgaggagcggctggagaggaacggcaccgacatcgcccgctgcctcgcggcgcggctgccgccgtcgctgttcgagctccaggcctacggcttcaccaacgacggcgtcttcttcaccggctggccggtggtcgggttccagcaccggatccaggcgtcggggacgtgcatcagctcgccggaggacggcctcctctcctcctgcacctgggacccacggatccgggggcccttcttgtacaactccggcttcagcatcgcgctgcccagggcggcggcgttcgtcgccgacatgatgcggctgcgcgacctcaacccgcgggccttctgcgacatcgacgccaagctcggcatcctcatgcgctacgtcaaggcgagctccgcctacctcggcaagccggaggactgcgtcgacttcgacgtcacctactaccggagctacgacgacggcgagccgcgcccgcactccgacgtgttcgacgagctggagcagatggcgctgcgcaagtacggcgccgtcccgcactgggggaagaaccgtaacttcgccttcgacggcgccgccgccaagtaccccaactccggcgagttcatcaaggtgaaggagagatacgaccccgacggcatcttctccagcgagtggagcgaccaggtgctgggcatcagcgggagccccaacatcgtcgacaagcgctgcgccattgaaggcctctgcgtctgctccgacgactcccactgcgcgccggagctcggctacttctgccgcccggggaagcttttcaaggaggccagggtctgctccaaagacaaatccgccgccgccggtgatgatgatctcctcgatgaattgtgatttattattatttgatcgaatttcgttcaagtcaaataatacatgcatggctagctagctctgcatgaaatgaaatgcaaatttatatttaattaatcaagaaaaagataagcacgtgcgaccgaaacgacctgcaagccagggagggcgagcgcgggggggaggcgggaagtgggtaggcgagaggaggactggagatgggatggcgcgataaggtggagagaggcagtggtgcggaaaagtggactgcgtcagtggctaggaaaaag

SEQ ID NO: 63705 - DNA, 1845 bp, Oryza sativa
  Clone ID: PAT_MRT4530_64921C.1
atgccccttgcccctttgggaaaagggggaggggagcgggggcgacgcggcagcgggaggagggggctctgcctccgtcccttggaggctagcgcgggagtggcggggccgagcgatgacgacggcgatgacggcggggcgacccaatcctccttattggatgaaaaggatgttgggccaaatttccctccacgtggagcctttgctctcagcccattgcagcccaaaaagtccaacaaatatgagctattgattcatgtcttgatcaatgatgttctagtgaagactccatttgtgcccattgttgattatagtggaagcttggagtggaccgttggtcccgtgacaaaagttttgaaggagagggctctttctcacagtcagagatgtttgtcactgagtcaaggaggagaagcaaaaaccgaggtccgaagaaaggtgcagccactagtagaagcaagtcaaggggcagctgaggatatgcttgtcttgacagaacattgcaaaagttccactattgaggagagagtcatagtcatttatgaagaggaagccatcaaccatgttggtgatgatgaaatgatttggattctggacagcggtgctaccattcatgctacatctcatagagagtacttcacaaactatacatcagatgattttggtattgtgaagatgagcaacaataaaaagacaactattgttagaaagggagatgtgcaattggagactgcaaacggtactagacttgtgctcaagtcagtgggacatgttaaagcacttcggctcaacataatttcggttcctttgctttgcaaagtgaattatgatcgcacatttgaagatgagaagtataagctcatcaagggtaacatggtagttgcaagagtgtgtgtcaaggcactagagaaagaggactcttgtgttgtatggcacaagagacttgggcacatgagtgagaagggaatgattgagctagtgaagaaagatctcctgaaagagatgaaaaatgtccatttaaacaagtggtcagattgcctagtagggaagcagcacagagttgcttttaagagtcttcctcttcacaagaagctagaggtgctagatttggtgcactctgatgtatgcaagatgacaacaaagtcaattggtggagagtacatagggccatttgatgattattgcgaggagcaagggattaggcatcaatgcactcccaagtcaccacagctgaatgaagttgctaagaggatgtacaggacaattgaggagagagttagatgcttgctgtcacatgcaaagctgccaaagtattattggggtgaggctttgatgactgccgtttatcttattaatctctcaccaagtgtttctttggagggagatgttcctaacagggtgtggtacaacaaagacatctcatttgaccacctgaaagtgtttgggtgcaaagcctttgttcatatccctcaagatgaaaggtctaagtttgatccaaagacaaggcaatgtatctttgttggctatggtttggatgagttcggctacaggctgtttgatccaatagcaaataaggtattgagacgcagagatgttgtctttgttgaagaccaaacaattgaggatattgtgaagacaaagaagagatgtcagcaacaacatcaagatgatttagatccacttcctacagttgcaggtccacaagaggttgaagaagatgatgtagatgatgcacatagtgaagtgatgggctgtatttgggattgggccccggcagtctcacgttgctccagtgtgctcgagccatcatgctttgccgatcgacgcacttcgccccagccttga

SEQ ID NO: 63706 - DNA, 147 bp, Oryza sativa
  Clone ID: PAT_MRT4530_64922C.1
cagaaacggaagagcgcaatcactaccaaagggccaaaatgacgttatagcacattaactccagcagggcatttgctaaaaaaaaaaggaaaaaaggaagtcaacaggggttagcacccgttctccccatggcgcagaaaaatccct

SEQ ID NO: 63707 - DNA, 654 bp, Oryza sativa
  Clone ID: PAT_MRT4530_64923C.1
aaaggacaattgagagctacactggaggacatagaagatctgaaaagacaagaaagatcccgtcagcaaaggatcttgaaggctaaggaagcccttgctgctgctgagagggaacttgatgatctacaaccatatgaagcacctaaagctgaaatgattcaactcacggaggaaattgcacgactgacttgcgatataaatgagctaaaaaggaaaaagacagatatggagtcccagttagttcgagagagagaaaatctgaggaactgctctgataggttgaagcaaatggaaaataaaaacaataagctgctccaagcattgcgatattctggtgctgagaaaatcaatgaagcatacaactgggtgcaagataaccgacacatgttcagggctgaagtttatggacctgttctccttgaggtttgtttacttgcatgttcaccaactattgtctgctttgctgatcatacaagtaatagtacatcttctttgtactgctgtcagcatttccatgaaacaatggaaagccaagaggaacacacttaccagtggctgctggttctgttgtgcactgcacattgtgttttgtttttccttcacatagtcaatgtgctgttgcaaatttatcctccagttgctggacatggttag

SEQ ID NO: 63708 - DNA, 389 bp, Oryza sativa
  unsure (1)..(389): unsure at all n locations
  Clone ID: PAT_MRT4530_64924C.1
tatgaggggtgctgtggaggcgcccgttgtggcgtgggatggcatacataccctatgcaggttggcgctggtcgctngattctgatgctggtgaatcccagtccngaagacttgattcatgttcttcagttcgtctcttcgtcgcctttatattttataatagtatgttgtagaaatataggagagtataggaagggagtgaactacagtttagggagaggagaatgtatctatttttctttttgatatttaggagatcgtatgtatttattttcctagttttcaaggtgtggggaagtgatgttggagaattgaactaanaaaaaaaaaaaaaaaaaaaaaaaaaaaaaaaaaaggggggggggaaaaaaaaaaaaaaattttttttt

SEQ ID NO: 63709 - DNA, 881 bp, Oryza sativa
  Clone ID: PAT_MRT4530_64925C.1
catgctcgactgactcctgttccatcagggatgatcccatcattgtggagcagggttcgctcatcaacatggcaggccctaagcgagggatagacatgatggactatgctctaattgaatatgacatgaggatcaagataggcgaacaagaaaaatgtgacgtacagctgatcgatggtgcatcattgataggccctgcaggcctatggaatgactcatatacatttcgcatccctggcgattacggtgcagttgacataactttatcacgtcttcgttgggcagctgaggcaactgtggaggttgtcatatcagaagtgcaaaccagtttcgatttgttgctcggttgtataacaagtggcttggataaggaaatccggctatttgatggtaccatcactgagccacgtgggttaaagaggtcggtggttgctgtaaggatgagatctttgatagagttaaatttcaaagtaggcgcactgtcatccagtttggaccattgctgttccttcaagccaaaataccatgggcatgatactcgagaattaaagactgcttttgcgttaatctcagtgaaggtttgcttattcgaccatgctttttaaccgagtaaaacctctgtttctgtaacagagtgggccatgcaacatcacatttacacacccatgaatatggccctaacacacgctcaaagagataaaaatcaacggcacatctttgatctcactagatctataatgttaactttattatacttattatttagaatgtatatttcgcatatgaaattatgtatccaagtttattacagcaaatgcttgaataacggcattgcacttacctaacctattttcagacttatgagggagaatctagcgttc

SEQ ID NO: 63710 - DNA, 1148 bp, Oryza sativa
  Clone ID: PAT_MRT4530_64926C.1
atgggcaaagaggttgacgtgtccactctcgaggccggcggcgtccgggaccgggactacgaggacccgccgccggcgcctctcgtcgacatcgacgagctcgggaggtggtcgctgtaccgcgccgtcatcgccgagttcgtggccacgctgctgttcctgtacgtcacggtggccacggtgatcgggtacaagcaccagacggacgcgtcggcgtccggcgacgacgcggcgtgcggcggcgtgggcgtcctcggcatcgcgtgggcgttcggcggcatgatcttcatcctggtgtactgcaccgccggcatctccggcgggcacatcaacccggcggtgacgttcggcctcttcctggcgcgcaaggtgtccctggtgcgcgccctcctgtacatggcggcgcagtgcctcggcgccatctgcggcgtcgcgctcgtcaaggggttccagagctcgctctacgacaggtacggcggcggcgccaacgagctcgccgccggctactccaccggcaccggcctcgccgacgagatcatcggcaccttcgtgctcgtgtacaccgtcttctccgccaccgatcccaagcgcaacgcccgcgactcacatgttcccgtgttggctccgctgccaatcgggttcgcggtgttcatggtgcacctggcgacgatcccgatcaccggcaccggcatcaacccggccaggagcctcggcgtcgccgtggtctacaacaacaacaaggcctggagtgatcagtggatcttctgggttgggccgttcatcggcgcggcgatcgcggcgctgtaccaccaggtcatcctccgtgccagtgcaaggggctacggctccttccggagcaacgcgtagttgagctcgtctggtgatatccgtggtcaagtcggcattgtttgggctctttctccttcagagtttaaggtgaatggagagaacagagcacctgttcgtcagtagtagaagcagcttcagtttaagtgagaagccctgcagtgtggtgtatgtttcagtgtttgcaatgcaagtgtaaactctgtccctctgttgtcttcatgtttctaagaatctaagtgaaccaaaagtcaataaattgaggtggtagagttgaagtgaaaaaaaaaaaaaaaaaaaaa

SEQ ID NO: 63711 - DNA, 471 bp, Oryza sativa
  Clone ID: PAT_MRT4530_64927C.1
cgctcccaacaattccccaaaggaagcgatggccgctaatgaccacaaccggccctccaaaagaatggactctaggaccactgagaccgaagaaagcacagaatcaaagaccctggagttacgttccttccacagttgctttgagactaggaggaccagagagtcgaagctggcacgaagatgatcaggtaaacaggccctagaagatggccatcagtcctgtagccagctgccacggaggggagagagggcagtccagccaggaggcgacagcacccgtaaccagacctgacgagcgaacacgcagtcgaggaggatgtggttcgccgtctcaagctcttgagcacaaaaggggtagcctgagtggctatcaatgccacgcttctgaaggcgatcagttgtccaacagtgctactgaaatgcaaaccagagaaagaatttgcacttagcagggcccttcgcgtgggctag

SEQ ID NO: 63712 - DNA, 584 bp, Oryza sativa
  unsure (1)..(584): unsure at all n locations
  Clone ID: PAT_MRT4530_64928C.1
tatatatganggggttcccaggcgcaacnattggcccgccggaaataagtgcccaacccctgacgtgctgaaagaaacacccatgtgatgtatgctatggcaccctgtgaccctgatgataaatgagggcgtgattgtactcgaggccccttgtgcacgcattgagatgagccccgcggaccgggatacaccnatgtgtgcaccaccagggaaaccacgtctgatggacactgtgaggccctatgtgtgagggtgagaccanctaatgaggaaccaaggtgtgtggtgaccaaaaaaatacccacggctggggtgaccggtgccggaattgcccgggatnatgcgtcagacccacgcgtgccggattggaaccccaaaggtgtttgctggtgacttctgggaatggcctggggtgctaatggtactggtgcgacntcccatgtctgctggtggctggtaatgattgtggcacaagtggtggctgactggaatgtntggtgttggaagtgcatgagcccaggaaccttgatcagcgtagtgtattctatggatcaaanttcctctaaaaaaaaaaaaaaaaaaaa

SEQ ID NO: 63713 - DNA, 2243 bp, Oryza sativa
  Clone ID: PAT_MRT4530_64929C.1
attccataaccccctgccttctctcgccgattccgccaccgtcgacgtgccgcgcctcgccgtcggccgcccttcgatctcctcgtcctcctcggaatggatctcgacatggacgactacatcgacccctacgaggaggccgaggcggaggccgccgcggaagccgccgggctgacgtccgcggcagcggcggaggactcctccgacgagggcgactccgaggacgactccgaggccgagagcgactacgaggagaggtcctacggcctcctccgctccggcaaccaccgcgtgcgcaacccggacggcaccttccgctgccccttctgccccggcaagaagaagcaggactacaagctcaaggacctcctccagcatgccgacggcatcggcgcctccagcaagcgccgccgccacggccgcgagcgcgccttccatcgcgccttcgcccgattcgtccgcaccgacccttccttcgcccaagacctcgccgccatcaacgggatcgccaccactgctgatgctagctctaattctagtgccaccggtgccaaggagaaggcggatgccaatggcgacacagacggatccgcttcggtggcggctgtggccgcggggaatagacgggaggaggagaggtttgcttggccatggagtggggttcttgcagctggtgcagggttcaatgccgaggacttcgcggatagggtcgcaatgtttggtttggatgatgttgtgcctttagttgtcgatgatgcggaaggcgctgatagctttgcgattgtgaggttcgctaatggttggggtggattcggcgatgcgctcacgctcgagaaccatttcaacaagaataagcttgggaagaatgaatgggatgcaaggggtagtgctggagatgctgtgaagggagatgatggggacacagatgttaaggtttatggttgggttgcccgagaaggggactataatgccgggaatgtggtgggcaggtatttgaggaagcatacgaacctgacaaccatagatgaggtctccaagagtgaatcggaaaagtcggggaagatggtagcgatactggcaactcagatcgaggcgaaaaatcgattcttgcaggacttggagacaaaaaagaatgcaaccgaactctccattgcacggctcgaggaggacaacaggaagctacacgatgcatataatgaagaaatgcgcaatctacaccggagagctcgtgattatgctttaagagttttccaggataatgaaaacttgaagcttgaattagatagcaggaggagagaattgaattcacgtgctaagcagcttgaaaagataacagctgagaatgcaagcgacaggaaaaaacttgatgatcagaagcaaaaggcaaaggatgataatagtgaacttgagctagcaagcatagaacagcagagggctgatgaagatgtaatgaagctagttgaggatcagaagagggaaaaggaagatgtccttgcaagaatgcttcagctggaaaaagagctgcatgaaaaacaacagcttgagcttgaagtaacacggctgaatggtacacttcaagtgatgaagcatttggaaggagacgatgatggggatattcatgataagatggagaaattgagtgaaagattagaacatgaaaagaaacgtttggaagaattgagcggagagctggtgaagaaagaacgtgaaagcaacgatgagttacaagaggccagaaaagaactgataatgggtttggaggacatgctaactgggcgaactgctattgggataaaaaggatgggggaacttgatgagaaacctttccaaaatgcatgcaagagaaagtacggaaacgatgactatgagaccaaagctgcggagctggtctcaagttggcaggaggaaataaagaagccatcctggcatccttataagattataacggttgatggcgaagataaggaagttgtagatgatgacgacacgaagctgcggcacttgtggatcgagtacggtgacgatgtgtgcaatgcagtgaagaccgccctgagcgaggtcaatgagtacaatgccagtggacggtatgttgtgcccgagctgtggaacttcaggaaaggccgaaaggcgacaatgaaggaggtgctcaagtacatctttggacagatagagacaaccagcaagcgcaggaggccgtgaagttcgtccttcgatggatgaagaggctgacaggcaagcgaagg

SEQ ID NO: 63714 - DNA, 666 bp, Oryza sativa
  Clone ID: PAT_MRT4530_6492C.1
atggcggcagtcggcgcgcacgcagcggtctaccaccacccggtctcgggcctctcggcgccggcgggcgacgccgcctactcgatgtcatcgtacttctcccacgggggaagctcgacctccagctccgcgtccagcttctccgccgccctcgccgccgcaacgacgccgccgcttcccgacccgtcggggtcgcagttcgacatctccgagttcttcttcgacgacgcgcctccggccgccgtgttcaatggcgcgcccaccgccgcgctgccggatggcgccgccgcaaacgcaacaaggagcgcggcggaggcggtgccggcgccggcgccggcggccgtggagaggccgcggacggagcggatcgcgttccggacgaagtcagagatcgagattcttgacgacggctacaagtggcgcaagtacggcaagaagtccgtcaagaacagccccaacccaaggaactactaccggtgctcgacggaagggtgcaacgtgaagaagagggtggagcgggacaaggacgacccgagctacgtggtgacgacgtacgaggggacgcacaaccacgtgagccccagcacggtgtactacgccagccaggacgccgcctccggccgcttcttcgtcgccggcacgcagccgccaggttctctcaattaa

SEQ ID NO: 63715 - DNA, 602 bp, Oryza sativa
  Clone ID: PAT_MRT4530_64930C.1
gcacgaggcctcgtgccgaattcggcacgaggtcgaaggaagacgtgtcgtcggcgctgccgctatcgagcaccgccgatgccagtccgttcgtcgccgcatcgacggcgacgcgaaccgcagccttgagaagcaacttcccaacaagggaactccggctccgcttcacgccggtgctctggccgccgccgccgccgctctggctgctgcctgcgccaccgacgccggtgccctggcttcccaccccggcactctgcttggcgcgggcgccattgaggcactcggcgtggaggcacactccgcaagcgtcgcaccggtagaaccagccgccacagacctcgccgcagccggagcaggtgcggcactgccgccccagcgtcgccgccgcggccgcggccgccggcaccatggcgagctcgtgctccgggtgcagcgggctccgcaccttcgccgggaacatggtgcagagcgggtgcacgtcgaagccgcacggcacgcagcggtagacgaagcccccccgggggcacgccgcggcgcacaggtcgcagacgcggtcgtcgtcggcgacgcggccgagggcgaggccgtgccacgggtgcgcg

SEQ ID NO: 63716 - DNA, 773 bp, Oryza sativa
  unsure (1)..(773): unsure at all n locations
  Clone ID: PAT_MRT4530_64931C.1
atggctgagatccgccaagtcacttttggatgcgaggagcgacatgccatggagtatgtcggccatggactcacggagcttggcgatgtcggcattggagaccggagctgcggccgtagctgcggctgtggcggtggctacgttggtcgatcccctttcctctcctctttcctgtcctcgtttcctctcctttctcatcgtagctttttccttatcggcnatnggngcttccccctcaacctcaccctccacccctcctttctcatcgtagctttctccctctcggccatcggcgcctccccctcaacttcaccggcgcttccccctcaacctcaccctccactcgtgccacctccctgcctcaaccacgacgtccgacgtgctgcccccaactccaccttggcctccgccttgggccacctccctgagtcgactgcatcctccatcagcgtcgccgccaactcaacctcagccttcttacggcggccatgaaggcaatggccaaggcggcagtggccgcgatggcgttggcgaaggtggccatggcggtgacagccccgcgacagctgcgacggccaaggcgtgcaggcggccacgatactggtgagcagtggtaggcgtgtgggcggcggatccggcggtggggaggctcgagggcgacggtggggctggtgggcagtggattcggtgttgggaggcgcgcaagctgtggcgaggatggtgggcggccggggaagtgggcgggcggtggcnaagcttgtgggcggcggatc

SEQ ID NO: 63717 - DNA, 404 bp, Oryza sativa
  Clone ID: PAT_MRT4530_64932C.1
atcatacatctccgactgcttcacatgtccaaggcgagaagccctccaggcccgccgggccgcacgcagggatgccggcgagcaacgcgccggaggacgcatgagccgatccgatcccgacctcggccgtgctcgtggcggcgtcgaaccacatcccgcgtgcggtggacgccgtagaactcctccttacttaactgcttgaacaaggaccccaacccgcttaagagcctcgagaagggccgccagatcaagcgctgcgtattcgatctgttgtgagaacttcaccagactggccccggggtgattgccccctatgccgggtgccttgtttactacacccacgagattgacttcggtcgtcccgtgcaggttgatttttgcactgcgtgccccgtctctgactc

SEQ ID NO: 63718 - DNA, 318 bp, Oryza sativa
  Clone ID: PAT_MRT4530_64933C.1
atggcggtgctcaccggtgcacggcgcggagtgggttccgacggcggaatccgatgggagaggggtggatggggtgacccgcacgacggcgaacgcgacggcatctacagcacggctcggaacgcgggggtcgatcgtggccgggatggccgcgattttggcggtggagtggggagaggtgtgacacctgcctactcgctgctcgctgcctccagcgccgcttgctcgcttgcctgcgtgctcgccatctctagcaccgccgcttgctcgctcgcccgcgtgctcgccatctctagcacagctgctgccgaggaatag

SEQ ID NO: 63719 - DNA, 1593 bp, Oryza sativa
  Clone ID: PAT_MRT4530_64934C.1
tgcttgcttgcgctatctccccgcatcaaagaaaaattcttctggacccccggccggcgggcttctgatccagtggtcagtactgatcatctctccgactcaccaccacttctccggtcaactctccagtgacctcgccatctactcagccatggctcgccgtcgcccaccaccgcagcgccaccaccacctcgtcctgctcgccctcgccgccttctcctgcctcgcctccgggacagcgacgccgacgccgacgacttcctcccaatcccagcagcctcagccagccggcacgctcctccagcccgctctcgccgcggacctcgcggcgcggacgtgctggtacacggtgcagatcaagacgagctgcgcgtcgccgcggcgcacgtcggacgcggtcagcctcgcgttcggggacgcctaccgcaacgaggtctacgcggcgcggctggccggctcctcctcctcgccgcagccgtcgtcgtcggccgcgttcgagcggtgcgccaccgacacgttccgcgtggggggcccctgcggctacggcgtctgctacctctacctccgccgctccggccgcgacggctggacgccgcagtgggtcagggtctacgagcccacctccgacaccccctccaccttctactacggcgaccccctccccaacgccgtctggtacggcttcaaccgctgcccccgcctcgccgcctccgccgcggcgcagtgatggtttgcgacgtccccggcgagatgagcatgattcgacgacgagcacgttatttacggttgggttaatggttgcgtgatgtgttacgatgtaatgtatgattccgggttgtgtgtgttggtaatttggcaatatcccagagatttatcttttgagtatttaataagaacagatccagattctgattctgatctggatggctgttaaaggatcctcatttttggttccgaggagacccgaatacttcactcctacatgcgtgtaagatcaaacgagtctccctcaggggcggggccacggtccccaatttcgcccctaagagggggcgcctattagcgccgcgctcacgtgtcccgtcgtttttacaacggtcggagactggggaaaaaccctggactttgccccaactaacatggccttcgcagaacaatccctctttttcgcacatttggcggaaattataaaaagggcccgcccccaaacgccctttccaaacaatagtttaacccgtatggcgaaattggaactccgccctttcctgctcattaaacccgggcgttcctcggtgatcccacaactgacaccgctaccttgtgcgtgaccctaacccccgcacattgtgttgattgtattatcttgcgccagcaaagaagcgtacctcccataacataaaatgagcagctcctccaagtcccgactacacactcctggctggcatatccgcaaacaccctctctgatcgagcacaaccgccgggcaccctcggagcgcgcctttcacaatgctcaataagaccacgctttgctagttgttttgttgcgatctcaaatcctaccttcatatttcctagaaaaaaaaaaatacgt

SEQ ID NO: 63720 - DNA, 306 bp, Oryza sativa
  Clone ID: PAT_MRT4530_64935C.1
cttagattgtttaacattgatatgattagagagcatgggacaagagatcggttctatgtcatagacatgaactattttcctggtatgtgatctaatatgcttcaagtatgtctcatttatccccgcaaaaaaaagtatgtctaatttatcttctcattattctcagctaacttgacccggcaaaaaaatttcagctaacttaatgtttatgggtttgaattagcaaacgatttccctcctatatcgccgaaaatttcttttttggtttgctgctaggtaaaaggctaaattaatacactacctgag

SEQ ID NO: 63721 - DNA, 1578 bp, Oryza sativa
  Clone ID: PAT_MRT4530_64936C.1
ttttttttttttttttttttgaaaataactcttgggtcaatgttccaatttttttcctttacaaatatacaactgcactttgtcggcaacttctcaaaagaaataaaaatacaacatgcaataattaatttgcatgtacgtgcatggtagcagttgaaaagcttgggactacttgtatggtttgtgagagctaccgacacatgttttgcccatgcgtgtctatatttatttgataaacagagtgaaccaaaactcaagtatccaaaagttgagttgtcgtgtacaaaaaacagcaaatttcaagagaaaagagggagactctagaacgtacttttctatcccttcttctgctactcgtaaggccagagctgtcttttccatgacactgtaggatctttaagtgaggagaaagtgttgaggtcgattctgtgtcaaaacatcaaacacttcagtgttttgcctgccaatcaatatgcgagagttacaagtttctgcttcttctgatctctgctctgttccatgcatggcgtagcattgcacctagatatgttcaaaagacaagggcaatctttgcaagtctttatcatacatgtctgatgctgcttgcagctgttgttgtggttgctgattctggaaccaagaggcacatatcccttccatgttgaattggctctctgccttgatcacatcatcgtataatgattggctctggttctgcatggctgtcgtcgcctcagcaaaggttccatggagcaaatcaggccacttgagttcctccactaagtgaactctggtatctttctcttgtccgatatctgtccatgggaatacactgttctccaaaattgaggttgtgctctgtggctcgaatcccatactgttgcttccgctgctcccagtactgccgctgctgctaggattggaaccatcccagtagaacggggtgttgccaatgccagtgcctccgtgacgaggattttctgggggaagattcagccccattgatgttgagagggctgatggtgaaactggtggcatcacggtggagattgtgctgcagttgaaatcattctggttgaaccagagtgaattcatactcgcaccatccccagtgccacattcattactgtagcctaatggttgctggaaaggaaaatacagggttggacctgatgagcggcaacttgatgggctctcgtgaccggcagtaagctggtcaagaaacaactcctttggtggcaccttagggcgtggcaagcttgcagtttcagggtgattcttatcatacaccggcagcagcattgatgattgtgctgtctcgctgaggaggtggctcaagttccctagagcacccgcacttgacgggttgacgtcgctggaccctgaggtcctctcggtgctgactgtgggtgctgctcccctgcgatcagcctcggtgaggggcttgtgggtgttgggatcaatgcctttctgccggagcttcttcttgatgcaagaattccagcgattcttgatctcgttgtcagtcctcccaggcagctgagctgcaatctgagaccaccttctcatggaaaaatc

SEQ ID NO: 63722 - DNA, 834 bp, Oryza sativa
  Clone ID: PAT_MRT4530_64937C.1
atggacgtggtgaaggcggcgcagctctcggggcggacgctggagaaggtggtggtgcacccgctggtgctgctcagcatcgtcgaccactacaaccgcgtcgcccgcgacacccgcaagcgcgtcgtcggcgtgctcctcggcacctcctcccgcggttccgtcgatgtcaccaactcctacgccgtgccgtttgaagaggatgacaaggatccgaggatctggttcctcgatcataattaccacgaatcgatgttttccatgttcaagaggatcaacgctatgttcctgaaccctgtcctggtgattattgcatgttcaacccaaggagttaggaatacccaccaaagcatactcatgctgtggcaggaggttaaagagaatgctactcaaaaacagtcaacaggagttgagcatcttctgagggatgtcaaggacacaacaataagcacgcttgcgacagaggtaaccagcaagcttgcagccttgaaaggactggacgcaaggctcagggagatccgtgggtacttagatcttgtaattgaagggaagctcccactgaatcatgagattttgtaccacttgcaggttcgccttctactcattgctttctgtatggatgtgtttaatctgctccccaatctccatgtaaacgagcttattaaagcctttgcagttaaaacaaacgatatgatgttggtcatatacttgtcttctcttatccggagtgtcatcgcactccataacttgatcaataacaagatgctaaacaaggagcatgagaaagccgaggattcgaagccaaccgccatacctagtgctgctgggagctga

SEQ ID NO: 63723 - DNA, 962 bp, Oryza sativa
  Clone ID: PAT_MRT4530_64938C.1
atgtcagccagccggctgctggtgctgcgtggcgacagggtggcattttcctcctcgtcatcatcgttctcgcccgacgccgagctcctcaggatgccgaactcgagatggtggcggcgcgctggcggccacgttccgcatcccgccgcagctggagcgcacgcaacaggttgggagggggctagcgcctagcggcggcgttctgcatctagtcctctttgttgctgtcctttgccgcctcctcaatcaacgccgcctggcccgcacggtggcgagcaacgacgacggcagaaaccccatggcgatcgccgtgaaggcagtgtgcggaggcgatgatgaacgcgccggagatggagaactgtgccgccttgatgccgagcggcctggcaacgtcggtggtccacggcgtgggaagtcaaagagtgcgacatccaggtggatcctctgcgacctcctctctatctcttcgactcctctagccggcgtgcagcgtgtctcctttcccttctcccttctctctccccagatgcgggcagcatgcatcgagcgttggcggccggcgggagaaggcggcacctgcggtggcaccaccaccaccacctcgtggcgagcaggacggcgacagcgttcggagagtacaagatttaccgcgtccagctggccgcgaccacccggtaagctcctcccccgcgtccggctagccacgacctcctggcaagctcctgcccggcgcccggccggccgcggccacccggcgagctcctccccggcgcccggccggccgcggcctcccggcgagctcctcccccgtgtccgagcggccgtgacctcccggcgagctcctcccatgcgcccctccggtcgtggtatcccggcgagctcctcccctgcgccaggccggccacggcctcccgacaagctcctcccccaccaccgccgctcgagccgatggaaggcgtgag

SEQ ID NO: 63724 - DNA, 1389 bp, Oryza sativa
  Clone ID: PAT_MRT4530_64939C.1
gcaacacaagtcaggggaggagagagaggccgcgccgccgcagatctgtggccgcgttagggtttcttcgccggaatcgagcgaggaagtaggagggagaggaggaggaggaggagggcgacgagtaggaggcggcggcggcggagatggacgtggtgaaggcggcgcagctctcggggcggacgctggagaaggtggtggtgcacccgctggtgctgctcagcatcgtcgaccactacaaccgcgtcgcccgcgacacccgcaagcgcgtcgtcggcgtgctcctcggcacctcctcccgcggttccgtcgatgtcaccaactcctacgccgtgccgtttgaagaggatgacaaggatccgaggatctggttcctcgatcataattaccacgaatcgatgttttccatgttcaagaggatcaacgccaaggagcatgttgttggctggtacagcaccggtccaaaactcagggagaacgacttggatatacacgcactattcaataactatgttcctaaccctgtcctggtgattattgatgttcaacccaaggagttaggaatacccaccaaagcatactatgctgtggaggaggttaaagagaatgctactcaaaaaagtcaaaaggtgtttgttcatgttccttcagaaatagctgcccacgaggttgaggaaatcggagttgagcatcttctgagggatgtcaaggacacaacaataagcacgcttgcgacagaggtaaccagcaagcttgcagccttgaaaggactggacgcaaggctcagggagatccgtgggtacttagatcttgtaattgaagggaagctcccactgaatcatgagattttgtaccacttgcaggatgtgtttaatctgctccccaatctcaatgtaaacgagcttattaaagcctttgcagttaaaacaaacgatatgatgttggtcatatacttgtcttctcttatccggagtgtcatcgcactccataacttgatcaataacaagatgctaaacaaggagcatgagaaagccgaggattcgaagccaaccgccatacctagtgctgctgggagctgaatgtgctttatttgccttagattttggacccagtggaagccaaaagaattgtgacatgttagcatgatggcgtttgaaccaattgtctttgaccttggttttacactttcgatgtttatttcatgtacgataaggtcaacggcaaactttacattctgtgagcttaggtcatactacctcttgagctttcatcttgatcttatatacaatgtttcatggggtgcatcatgttttgtgatgcggattgtcgtacgattaacttctagtaaatgtttacttgacgcaaaaaaaaaaaaaataaaaaaaaaaa

SEQ ID NO: 63725 - DNA, 1917 bp, Oryza sativa
  Clone ID: PAT_MRT4530_6493C.1
atggccgacaacgctccccttaccccctctgccgcaattgacaccatcacatctgtggtcaccgaggcagttcgggatgtcttccaaccctcatctagggttgatgttgacccagccatagccgcctccgtcatcgacacggcgtccaccactgctgcctgcgccaccaggaaagcccttgcctctttcatcgagaagctggacgtctccgccttcttcatcacgcctggcgctgcatcggcaacactccctctagtgggtcttcctcctcaagcagctggtgcaccaccaccacctcctcccggctacggtggcttcatccctctgatgaccggtgctgctcctgcccctactgcccagaacttctacaacgtcgacctcaacaatgacgccaccgccaatctccacgctcaggcggtctcgatgctgaacatcaagtctctcatgcccgtcaccctcgatctcaacttcggcaactacacacaatggtgtggtctcatcctcgtcaccctcgacaagtacgcgctcgccgatcacgtcctcaccaacctctacaggccggatcgtcaggattggatgtgcatggactgcatcgtagttttgtggctctacggcaccatctccgtcgacttactggagtccgtgatgacgcacaacaccacggctcgcatcgtgcagcgtggcctcaaacctcagttcttgggcaaccgcgagtcccacgctctcaacctctccaccgagttttacaacttctaccaagatgatttgagcatcaacgactactgttgcctgttgaagaccatggcagacgacttggacgatgtgggcaaccgcactctttccctaactacaatccgaggccgaccttccacttccgggggggtgccattaggaagcaagcccgcatactccaccggctacggcaacgctggaaatcgtggcaacaacaccgatcggcagggagatgtgaccggcattggtcggtttcgctccttcccgcgtcaactgccccggccttctccgtccaccactgcccaagaatacgcgcacggtcaggggcttcctcacttggcgggctactaccgtcgtttcatccgcgacttcggcaccatcgccgcgcccctcacggcgctgttgcggaaggagggctttcactggtctaacaccgcggcaacggcgttccggcaactacaacacgcactcatggcggccccagtcctccagctcccggatttcgacaaggagttcatcgtcgagtgccacgcgtcgggctccggcctaggtgctgttctccatcaaggcatcgacccggtggcattcttcagcaagctgactgcgtcgcgccacgccaagctcgctgcctacgaacgcgagttgattggcctcgtccaggcggtccgccattggcggccatacttgtgggggcgtcgcttcctcatccgcaccgaccactgcagcttgcgcttcctcttggatcagcgtctctccactgttccacagcatcagaatcgttcgtgtcaatggcttcgatggctaccatgcgcgatgtattgctacaacacgtcgtatcagtcgtcacttcgaacatcgtcgttccgcgtcgtctatggtcacgagccgccgacgctgcgtgcctacgagccgggttcatgtcgtctgcccgcagttcaacaggcgttacaggagcgggacgacttcctgagggcgtttcgtgatcgtttagaacaagctcaacagacttacaagatggcgtatgacggcaagcatcgtgcattggagttcagtgtgggtggctgggtttggcttcgtttgcttcaccatccgattgcgtctctcgctgtcaagggacgcggcaagttgggatgcattgtcattggcgccgtggcgtatcgccttcatctacccccgggcgcttga

SEQ ID NO: 63726 - DNA, 663 bp, Oryza sativa
  Clone ID: PAT_MRT4530_64940C.1
atgccgctgccacgacgggaggacgaggtgaagatagaaaaagattgggagcactggaatgggtctccgctgttggagacggtcttaggtcccaagtcccaaccgtcggtctctggagctgacaaagatacattccaactgtatgagagcggacatgagcctaggagtcgaatgaccgcctacaaaaatataaatcgaggtgaacggcagcagcggcgcgcgcggacacgacggcggctccccggcctcccctcccagatctggccagagggaggccgggggagggcggcggcgacgtggttccccggcctcccctcccagatccggatggagggaggccgggggagggcggcggcggcgcgcgtggacgcggtggcggcggcggcgcacgaacgcggcggcgacccggtgcgacaacagcggctcctcggcctcccctcccagatccggccggagagaggccgggggaaggcagcggcggcgcgcgcggacccggtggcggcggcggcgccccgtacgcggcggcggcggctcccccgggcctccccttcccagatccggccggagggaggccgggggaggggctgcggcggtggctcccggcggtcctcccctccgcttgcgaaaattggttttggccgcttgcaaaaatgcttttcctag

SEQ ID NO: 63727 - DNA, 1839 bp, Oryza sativa
  Clone ID: PAT_MRT4530_64941C.1
aataatagaaacaaggtgttgcatcacttataatgggcctatgggtttgtaactccatctgggaccccagcccaagtggggtgcaccccaacctaatggagcatgacagaaccctaggtcgtcctcccatatccataaatagctatgtaccccttcagggcctagggacccctagatcatcctcccaccttcataaaatagctaggtaccccttcaaggtttattgggttttgtttagtaaaaagtttagcaatcactacttttccttgtacttacgtgtgtcggcttgaccgcttaattattcgcctttggaaacccaccttatcttgagctttaattcataattgtaattcataatgcttttatcttgtttttgcttgtttcctcgatttgcttgcatggatcacgtggccaccgacggcaactgccggcagtgcggggagcggcggcaagcggcgacactcacccacggcggtggcgcggcaccaaggcgtggcaacggcgcaccacggcaagccacggtgcggcaaggagagagaggaggaaaaagaggaaaggggaggcctcaccgatggcgacgacgagggcaacgacggcggcaaggggcggacgagttccggagtaaacctaggaagaaaatgagagggattagagagaatgaagacggctggaatggagggcttactacatgtgagggagaacgaattccggtggcgaaaggtgacgtgcgaatggcggatagtgtagcccctgagctcgtgaacctgacggcagcggcggcgcggctgctagtggtgactagtggtggccggagtggtggcggcggctgcggttgcaagagcgacgacgcgacgagcgtgagactgtatggcggcgatgacagagatggcggttcgtgccaaaccatggcgtggcgtctgcggtccagcgaggtggacgcgcaagcggcgccgagcgtcacgtggcccggaccttgtcggcgggggagcgaaggccaaaggcggcgccaagctgatgcttcccatcccggttagtcggcgacggtgggggatctccaaggttgcgtgcgcacagcaaccgcgaggaggagaaggcaagggcacaccgaggagacgcatgggcaagcccgtatggcgccgacggcggcgataccgcttctcgacgagaccaacaccgcagaataaggttggtctgcatcggcacgatcaacagcccacaaagaggtgtgtcgattcctaaggcacaacacaacaacgccttgtacggttttagtctggtcgtcaatgttttctctcccagatcgtggttatctcaactcaccgaaagatcgagagggacttcaccgccgcacgcctccattgtcgcattggccttccgctcgctggcacgccaacgaagccaccgcctctgtcgttgtcatcaatgccgcatcccgatgttccaccctactccatcgccgtggccttccgctcgtcatcgccccaacgatgccgccgctgccatcgttgtcgtctaccgctgccgtcatcagggccacatcatgcgcctctcccttgactttgccgtcgcggcctccatgcgccttctcgttgacgtggcatccatatcctccgtccttgcgccggcctcgaacacctctgccctgcatggatttggccagcggtgcaaactcagcggggcaatcgccgtcttctcccggctctgatttctgtcgttgcggcctccgccggtatggaggaagcccatggtggcgatggggttgggggtgaatgggggagggtggcgagctcgagcaccaccacgcatgtcgacggccttcttttcaccagcgtcgaccat

SEQ ID NO: 63728 - DNA, 474 bp, Oryza sativa
  Clone ID: PAT_MRT4530_64942C.1
gcccataaattatttttcttcttccatggcttataatcagtgccataaatataccacccaatcaaaaaaggactaggatagtgtaggatcaaagacatccgggggggagggtgtgaatagaattcctgctctgataccacttgataaactctgagttcgacttgacacgctcaaagctctgattggcccgacctttcggtgagttgagataaccacgatctgggagagaaacattgacgaccagactaaaaccgtacaaggcgttgttgtgttgtgccttaggaatcgacacacctctttgtgggctgttgatcgtgccgatgcagaccaaccttattcctgcaagcaaatcgaggaaacaagcaaaaacaagataaaagcattatgaattacaattatgaattaaagctcaagataaggtgggtttccaaaggcgaataattaagcggtcaagccgacacacgtaagtacaag

SEQ ID NO: 63729 - DNA, 501 bp, Oryza sativa
  Clone ID: PAT_MRT4530_64943C.1
agtaataaactggtaatccaagaaaaagaaaaaaaaaagggtctatatgtctatcaacatcggacaataaaagcaggttatttggaaaacccgtccggtaccaaataacgtggaaaaactggttacctttccaagtgaagggctagggttttggaagggaaggccgcaggagttggttacttccttaacactatctttaaaaccgccaccaaaaatgcggaccagaaatttgggggagatcctcccttaacaatccttatggttggtttccctgggatcagccagaccagaaactacaccggccgaaacgggttaacgaccagaagggctctaactatggttctgggggggggcttggaaaggacccgtgcaattggatgtcgaccctcgaaaagggatggtttctgagaccaaaatccttctgttcttaaccttctgaacagggccagaaggaagattttaagtttattttggggacgggttagtcactgccccagagta

SEQ ID NO: 63730 - DNA, 563 bp, Oryza sativa
  unsure (1)..(563): unsure at all n locations
  Clone ID: PAT_MRT4530_64944C.1
ccggccgggtctctccccttctattccccgatccccttctcccagcgagcgtgagactgtatggcggcgatgacagagatggcggttcggtgaggtgtagcacgcgtgtgacgatgagcgccgagtagagtggcacatctgtgctagctggagggtgcgcccgtgggcagtgccaaaccatggcgtggcgtctgcggtccagcgaggtggacgcgcaagcggcgccgagcgtcacgtggcccggaccttgtcggcgggggagcgaaggccaaaggcggcgccaagctgatgcttcccatcccggttagtcggcgacggtgggggatctccaaggttgcgtgcgcacagcaaccgcgaggaggagaaggcaagggcacaccgaggagacgcatgggcaagcccgtatggcgccgacggcggcgataccgcttctcgacgagaccaacaccgcagtgaggtttcccggtagaattagggctccaagtccggaataaggttggtctgcatcggcacgatcaacagcccacaaagaggtgtgtcgattcctaaggcancacacaaca

SEQ ID NO: 63731 - DNA, 504 bp, Oryza sativa
  Clone ID: PAT_MRT4530_64945C.1
tttgaatatggggatcggagaagccgcaactggcagccaaagccttgccggcgacggcgatgcaggagatgcaagcgccgccgccgccgccgattcttcttttggcgcctcaggtacccaaaaatataatcctgtttttttttctactgcttatccaaattgctcctctgttgcttaattacctacttgtattcgtgcaatcgtgcttgccttctctgggatctaaattattactagccctattctagttcttatgatgttttcgaggttggatttgaactgatttagaagaattattatagaatagaatgatgcctccatagaatgggtagatttccaaccatggtggaagatggaggaactaatgtacctcactcagatggcaaaacatcgtggatttgtggctacttgctaaagcagaagggcgttttggtgtcactgtcagtgtcaccagagccaattggaatggacccctagctggcaaggacgcatcgtgttcttcat

SEQ ID NO: 63732 - DNA, 299 bp, Oryza sativa
  Clone ID: PAT_MRT4530_64946C.1
ggcacgagagctagcgtcgtcttcccggagtttttgctgccaccgccatgtctctacgttgtcaggacctccctagccctgtgcacggtttgccactgccgctcgcgctgcctccggcatcaatcccggccatcttcggcgacaaggcgaacatcgtcgggtgcgcaagagcctggcgcacttttctcattttgggtgcgacgtcggcctcgccgccgttcgccgccgacatcgacgtcaagccgccggccggtgaagctctgatgctgctgctgtttcctcctctgccgagcctatga

SEQ ID NO: 63733 - DNA, 466 bp, Oryza sativa
  Clone ID: PAT_MRT4530_64947C.1
atggctatgcacattccaactggagcatgtgtatctgaggaaaaggaacacccacgtgaattttcacgttttggttaccacgtgcttatgggcggtcgatgcaccataaatcttgcaaaaccaagcctgcgaggaatgcagggaggagataaaacaacggctacagttaacactgtgacccgcaagaagacaccggcatccgcacctagcacgatgggaagcaacgatggtgatcactggccctgcacggagacagcgacggctggccctgaaagcctgggaagaaggcaggcgactccggatccagccccgcgaggtcgaggggagtggaggtgctgaagagatgccggaggagcgacgcgagatggtcaccgggggcgtagaagaagctcacccggccagccgcggcggtcaagaatggcggtggacggcagtggcgttggccgcgacgaagcaggaaccctag

SEQ ID NO: 63734 - DNA, 294 bp, Oryza sativa
  Clone ID: PAT_MRT4530_64948C.1
atggagatccaatatgagcttaattcggatagggatctgaataggagtcctacgggccttagaggcccgaatgacggatcctatatattcgtgaggggtatgaccggcggaggcattgcatcactgtgggagtacggtgaggagaacgcacgaggaggagaaggtcgagccggtgcgatcgactacttcctctacatcgacgcgtgctacttcgcgagagttccttcgacttctcagcgtcttcttccactgcgcagcgcatcgagtagtaactgcaggcatgcaagcttgagt

SEQ ID NO: 63735 - DNA, 411 bp, Oryza sativa
  unsure (1)..(411): unsure at all n locations
  Clone ID: PAT_MRT4530_64949C.1
gctactaccttcgcccgccgccaccgtccacccctcctccgccgcacgccgccggagacgacgacgacggcgcagccgccgcaccccgaccccggcggcgcgagctcgccgcacagccgcacagccgcacncacctccggctccagtaacccaacacatcaagaaatccattgacaacaaaattaaggctcatttctagcttagctgcattgcattgcattgctctactactgttccatcaaattgatgctcaatcctctctctctcttctgtttaattaattaatccatgtttttattttctcttatttctctactgttnngtgagctgattggtgatcatgtgagtgatgtcaaatttgtggaggnnctgtccaggcacatcatgactgtagcttttcaaaaaaaaaaa

SEQ ID NO: 63736 - DNA, 213 bp, Oryza sativa
  Clone ID: PAT_MRT4530_6494C.1
atggccggcaatgattcggatgatggcggcatgaagacgcagcccttgaacatgatgaggtcgtctgtgaacgcctatgctggcggtttggcacccttggtgatgtcttcacaaatggcggacagggcggagagcgcgtccgccaccaagttcgccattcccaacttgtactacacgccaaagtcaaagccgaggagcttgcttgcccactga

SEQ ID NO: 63737 - DNA, 336 bp, Oryza sativa
  Clone ID: PAT_MRT4530_64950C.1
ctccccctcccggattcaaaccgtcgacgccgtcgccgcgtgactctcctccgcggcggcctgagcctgaccacccccaccctcactcgcctcgtcgccggaaaattgcattcgcgccgctcgccgctccccccccctcttggaggccccggagctagctgcttggggggatcctcctccgctcggcgggcggcgatctcgcggcggtcccgaggaggtggcgaggtcctggctgcaacgagatgccgtgatcccagcagtgatgcgcggatcggagcatgggtgtgagccctccagggtgtacctttaggcggcgggcgaggagcgggaagttgc

SEQ ID NO: 63738 - DNA, 624 bp, Oryza sativa
  Clone ID: PAT_MRT4530_64951C.1
atgcaggttgatgatatgcagcgcatgcggtggtcgctggctggcaaccactgtgtgcctccaccttgctctccaacgcgtctcaacccagactatagccattacgtaagcaactcgcgggccctctgcgccatcgtttgcttcatgattgaatgcaacggtggcgctgaggacaacaacatgatctcctttgtacagttcccgcacgattccacaacatcgacccccatgatcactataacaataacaactagcaacacaaccgtaacaacgatctcggtgcagacggccatggcgaacactagcgttgtgacctgcttctggccactagcacagacacatcaccgatttggggttggagtagaaagggacaagagggatggcaaggggtggcgacgcgccgggccgagcgagggtggtagtcggtgctcacaagtaaggggtaagatagaagagatagtaaagaaggcagtggtgctgcggagtcaaggaaggagaaaagcaagcaacgaagaaggttgtgctgccatgaaagacgaggaacgagggaggcaagcagcggagagaaggacaattgatgctggcggcggaaggcggccagtggagtgggaggaagagaactag

SEQ ID NO: 63739 - DNA, 573 bp, Oryza sativa
  Clone ID: PAT_MRT4530_64952C.1
cggcacgaggaggttccgcatgctactattagaggaggagacgatctcttccccgtccctgcaggatcgtgggagagaaacatatcatcctgccaagattggttccaagtaagctatcgcaccgccagcagctgtgtggtcatcgatcagtttctgagatttcaggtgtagtggatgaaaccttgggaaagaggcctctggatgggcagaatgatatactgagatacagggtgttcactagtacgtggaatgttggtggtatgacaccatccagtgatctagacttggaggattggatggattcaacagctaactcctatgacatctacgttcttgggttccaagagatagtgccactcaacgcaagaaacgtgcttggtcctaggaatagctgtatatctacaaagtggaactcactgattggggaggcactaaacaaaaggaggagaagaggagcagtgttgcatcaagaaatcacaaatagcagtgcaacggagagatctgcgcaggaagaacactttagatgcatcatgaacaagcagatggtgggcatctttgtgtcagtctgggtga

SEQ ID NO: 63740 - DNA, 1228 bp, Oryza sativa
  Clone ID: PAT_MRT4530_64953C.1
atggcgacggcgacggcgcggcagcggcggcgcgcagctcagagcggcgacgcgacgggcgggcggcgcggcgcggggctcggcgcgatggtgacaggcgacgcgacggcgacgtggcgcggcagcggcgcgggcgcgaggtggcgatgggaccgcgcgtggcgatgggatgcgacggcgacggcgcgcggcgatgggacgcgtatggcgacggtggcgcggcacgacagcggcgacggcgacggcgacgcggggcgcgaggactccttgtgctgcacattgtttggatcttatgttgaaggacatagggaaactgaaggaatttaaaaaccccattgcccgtgctaagcgtgtcaccactttcatttatagacatgggaggcttcttagtgcaatgagggagaagacaagtggaaagaatcttttaagaccagctgtcactcgatttgccacaacttatcttactttgaagagcaattatagccaaagagatgaattgagaagcctatttatccatacaaagaaaatgaaccagttagtacacaagagattgaatgatgttgtttttgttgcctataactggaagatggaaactaggtttcagcttaggcgtgagaaagcaggaaaaggccagatccttaagtcattgaggagtttgattggaacaatgagtgggataattccttacatgaaccagttgaaggttttcgtggatgtgacattacataggatgatgttgatgaagttgttggtgcatcacgatctctttgagctcgctgttggcacccaaggaatacaacaatgtttgaagaagatgaggaagatatgcaatctgaccaagaagaagataaggaggaagatccacctaatgatgcaaatagccatcaccgaactacaccaccccatcaagaaggtgatgaacctggtgaccgctagtaaatggtctgaccctctccatcacgaagatgaccagcaagccggtcctttacccaacaatgtggagatcaatgtggccgaggcgaataaatggatgagacgtacttcatgccatgcgttggcaagtggaggcaagaggccgagcgccgctgaccacggtcatcaacaaggtattggatgctacatgggcttaagagttgccaagaacaaggtatatatgtgtgtcgtactgctcttaaaatgcagctttgatgtgcctaagacgtcatctcgccttaagccttacctgtaa

SEQ ID NO: 63741 - DNA, 111 bp, Oryza sativa
  Clone ID: PAT_MRT4530_64954C.1
atggagagcgagggagccgcagaggtttgggtcggcgacgggcttcagcccaaagcatcacaagggagcaaggaattagggatgactggaacgtcggttcagattgtctga

SEQ ID NO: 63742 - DNA, 512 bp, Oryza sativa
  Clone ID: PAT_MRT4530_64955C.1
caaaatactacaacataaccgaattctgatctgctgtatactgcatacaaggttggttatacacaagctgagaagctttcagtgtgacagcaatccgcggataaaatgaggagaatgataacgatcaccaagaagatagccaagcaaaaattacatcaatcaaggaaaaaacaatttggggataaatggactccaggaaaaggtaactgcagttcgagagggccgaactgatcaataaacatcatgcagcatacattaattcccaccagaatttattcagcaggtagcttttctttgagatacttcagaattgctttcgttcctcgctccagcagagtccgccgtatgctcctgaggggatttccatcaagtttcaagacttgcaggttaggctcaagcaaacccagctcaggtgggagtgttgttatattgttgtccgacagatcaagctcaatcaaagaagttaaatctttgataccctctggcacagatgtaagataattctgactcag

SEQ ID NO: 63743 - DNA, 276 bp, Oryza sativa
  Clone ID: PAT_MRT4530_64956C.1
atggcgtcggcactggacgtgcggacgtgccctaagagggggggtgttgctagacatttgcctatatacctgtgtggctatatgggtaaattgtcctttgaggtaggcgatcctggaggctctgatgttactaagaccgatgatgcagcaagggtggaggctgaggagctgatcgtgccggatgctgaccaggaggatcaggaggtggcgccaaggcaaacaacaagacttgtcaaaccaaatgctaagtacgttgggccgtactgggccttgtaa

SEQ ID NO: 63744 - DNA, 675 bp, Oryza sativa
  Clone ID: PAT_MRT4530_64957C.1
atgccgtgctccatgccggtgtggcagcagcgacatcaccaccgctgcctcaccccctgccttccctccccatccttccttcctttgcgcagccagcctctccccgctagctctgacgggcggcagtggcacggcgcccgtgcccagccggatttaccgccacagcaagccccattgccggcgggcggggtggggggagaacaaagggggagggcggtgtcgggggggggaggaaggcggatgatgaaggccatgatggtgccgcatttgtcgggcctccgccgctccttcacccgcacctatcgcggttatcgtcatctgtcacgccgtctcctcgaccgccagatccggccgcgcggcgccggagatgaggccaccacgtggcctgccctagcgccgacacgtacgatcgccgagacggggcgtgtcctggggggagggggcttgctcccaccgccgccgtcccggcatgccccgtggtttccgtcggcggaggtagccctgcgccacggctgcctcgcttcctcgccggtgctggcacggggagagtgtggcagcgtcgctgaggatgggtgtgcggaggcgcagggaggcggcgttgtgttgggggtggggaggaggggtgttgtggcggcgacgcacggaggaggagcaccagcggcgagccgcgggtag

SEQ ID NO: 63745 - DNA, 986 bp, Oryza sativa
  Clone ID: PAT_MRT4530_64958C.1
tgacgaagactaccaagaggccctacggttatccatagaaagatggaggaagcttaagtccctcaccattcattgtgggctcggttgttccatggagtttctgggttctctaacaaaaccacctgaaggacttaagaaatttaagatcacggtttgcaaacaagtggcagacgatgtcaagatcctcgcaggcttggtcaaattgcagcacctggtactatgcttggagttcattcccgaagaagcaatagtgattgagacaaaagggttcaaagagattgagagattctcccttgattgccctgtcccatggctgaccttcgaaaaagaggcaatgcccgagctcacatatcttcgactgaatctgtacgcgttcccagcgagcgagatgagtgttccttcaggtatcagcaaccttgaaaagctttcggaggcaaagatttgctacaatgcacggtacatcaatagtcccaacgttaagaggacagtagaggtagtgagcaaggaggtcgccaagcatcacaactctattgaccttttcatcaacggtacccaaatagaagttaatcaggctggtgaggagaaggcagagagtgcaacaagattcaaccaagtctatctgccagaggatgttgttcaggcagaagatgaggcggctctgaggagagaaacagagtttcagagctagaaagaagatgaagatgaagcagagtgccatgcctagctcttattgaaaaggaaatgatgtccgctctctcttgacaatactatctcacagaacagtgagataataactcttgcatcacgtggtcgcttctgtattgctgttggtcgccgtgtacatatgtggcccgcaatatgcgggctaccatcgttatattttctttcatatattagtatgtatgaattatatggttgttttaggatatatatatagacacacacatgtaaataggtgtctattaattgctactaattagacttct

SEQ ID NO: 63746 - DNA, 699 bp, Oryza sativa
  Clone ID: PAT_MRT4530_64959C.1
atggccaatctaaaccctaatccgctgcgcttcctaaggcaggggctcgctgttcatgcatcccgcgggttgacctcactgtcccgcagtgccctgctcggtgccatgaagacttttgtgtggccattgttgagccaatccccttggagcaagactgggatcatcattgggccctcattgccaacttcattcaagatgaacttcactacgagggatgctttggtcctctctttgcctgagttctatgatggggttcaccctggtacttttgttaatcatgaccaaggtcctaattggagggcggcaaactttcatagagaaggctggtttatgttcctagatttcccgctagattttattgatctccatcatgtgcacctggcagttgcttcttttgggagattttataaattcccccctgaagaggacctcccccctgctggtcctcagccaggccctgatgatgcaactgatgatgaccccgatgctggcaatgtttggcagtttggcaaccctggtaaccagggagctggaggttgggatgaggcagtgcagcagcaacaggctgcaaatgaacaacaagaagatgcatggggccaagatcatccaatggggcagattgaggagaacccaggacaattgattataccacagcagatggccacaccttgcccttcttctatgatgacaccaatctag

SEQ ID NO: 63747 - DNA, 1377 bp, Oryza sativa
  Clone ID: PAT_MRT4530_6495C.1
atggccgcgcaatcttggaggtccttcatgtgctgcggcggcggcgctgccgtccacgacgacgacgactcggcgccgaggcggcggaggatcgcgcgcaggggggacagcccgaggtcgtcgtcgaggatgtcgttcacgagcctcagctcgtcggggacgctgtcgccggaggacctgtcgctgacgctgtccggctcgaacctgtacgccttcacctacgccgagctccgcgccgcgacgggcagcttctcccgcgccaactacctcggctgcggcgggttcggccccgtctacaagggcgccgtcgacgacggcctccgcccgggcctcgccgcgcaggacgtcgccgtcaagtacctcgacctggactgcggcacgcagggccacaaggagtggctggccgaggtgttcttccttgggcagctgaggcacaagaacctggtgaaattgattggttactgctatgaagccgagcatcggatgctggtgtacgagtacatgagcggcgagagcttggagaagcatctcttcaaaactgtcaatggttctcttccatggatgacaaggatgaagattgccctcggcgcggcgaaaggcctcgcattcctccatgatgccgatccgccggtgatctaccgcgatttcaaggcatccaacatcttacttgacctggattacaataccaagctgtccgactttggcctagctaaggatgggccccagggtgacgctacgcacgtaacgacacgtgtcatgggaacacatggatatgcagctcctgagtacatcatgacggggcatttaacagctaagagcgatgtgtatagttttggagtggtattgttggaacttctctcggggcgaaagtcagtggaccgctctcgacgcccgagagaacaaagcctggtggattgggctagaccatacctcaagtgggccgataaattgtacaaggttatggaccctgctctcgagtgccagtactcgtgccagggtgctgaggtggcggcattggtggcgtacaagtgtctgagtgagaaccctaagtccaggcccacaatgagggaggttgtcaaagccctggagcctgtgcttggcatggatgacttcttcccagttggcccatttgtcttcactgtcattgtggaggacgagaaggtggttaacatgaaggtggacatgaaggttgaggttgaggagaagaaaaacactcaccaaaaccatcaggacaggcatcgacagaagtacccagactcggcgattcacgctggcattgtgctgcatgaccgtgatggtgtcatcggaggagggtacaccggtgcgctgcgacgacaccggaggacggcgagctacaacaaggagaggggagcatag

SEQ ID NO: 63748 - DNA, 283 bp, Oryza sativa
  unsure (1)..(283): unsure at all n locations
  Clone ID: PAT_MRT4530_64960C.1
ctcttgcacaaataggagagtttgcttttgttcttctaagccgtgcttcaagcatccatctgattgaggttatttctccatattttgttcctatcatgtgttgctccaaagcttcctgcctgtcaatgttgttttatactctcatggttacactcagttctagctagcttctgactaattttgctctagcttgcttttggagtagtcaatagtttaactgttctgttatgataatatatgttgtcttgtgagcnctgaggtgcgtgtactttcatctgatagc

SEQ ID NO: 63749 - DNA, 2370 bp, Oryza sativa
  Clone ID: PAT_MRT4530_64961C.1
atggcgtcgttggtacctggtgtccttgtcaagctcctccagcatatgaacaccgatgttaaagtcgcaggcgagcatcggtcatcccttctgcaggttgtcagcattgttccggcacttgcggggagtgatctcttcactaaccaagggttctacctcaaggtgtccgattcgtcccatgccacttatgtttcccttccggaggatcagcatgatctcatcttgagcgacaagattcagttagggcagttcatccatgtagaccgcctagaggcagccactccagtacccatcctacggggagttcggccagttcctggccgccatgcttgtgttggcaatcctgaggaccttgtggtaactagctcctcaaattttctaggcaacaagaaggcacaaccaaccaatggattgaggaagacagcacaaatggctgctgttgaagccattcaggaagcttctgctgcagagagcttgctcagatgtttgagctcgtacgcggaggtgagctcgacggcggaggagcagaacccgcagccggcggtcgagcggttcctcgccctccacaccgcgctgtcccgcgccgcggtgatcaccgacaataagaaggaagcaattaagtcaaaggcgaaacctgctggcactagatcaacaccttcatctccaacaagcgtctattctctgcctgcatcatttgatagattctctaatgatctaaaacagagaaacaaagtaaaaggagctgagaaagcgtcgtcttctaggctttccttgttagaaaaggcagcttccgttttgaaggttacaacggcagggaggaagtcctctgcaggtccgaaggcattgagaagaagctgggaaggaaaggtggatacaaaagggaaaaccaattcagattcaaagatgaccaaacttgaaaaaaagcctgagaacaggggcacaatggcaacgattcctagacgaaagcctcctgtggatgagaaggtgcaacataaagatgatagtaagcttcagaaccctgctaagaagaccactgcaaatgctccttcagatgacgccgacaaagcaatgaagaagcatcctcctactgtaaagcgaacatctgggataagcaacccaaatgttacaaatttagtagaggttccccccaacagcaaaaaactgacagatgctagtaattcatggacaacacttcctccatcactcgccaaattaggaaaggagctcctgaaatatagggagtcagcacaaatggctgctgttgaagccattcaggaagcttctgctgcagagagcttgctcagatgtttgaggctgacaaacatgctaaatactacagggcatggtgattcagcaccaggacaggtggcatcagtatgtgatagtgatttgatcaatgtagtaaccttcttacttgcttgtgttggtcggagcagctcgtacgcggaggtgagctcgacggcggaggagcagaacccgcagccggcggtcgagcggttcctcgccctccacaccgcgctgtcccgcgccgcggtgatcaccgacaccctcgcgaggtcgtccgccgcatcggtatcctcgccggatcgctcggcggccagcgacgccgggacggtggtgtcggtcaccgacgaggagacggccgccgtcgcggccgagcgccgccgccgggctacgtcctgggtgagcgccgcgcttgccacggacctctccgccttcggcctctacaaccttaagccggtcccggcgacgatctcgtcaccgctggccgtgctcgtcgttgacgagtcggcgaagccggccgcatcggcggcggccaacgctgtgaagtcgtcgccggcgaagtcgcggatgtcccccgcgaaggggaaggcgaggacggggccagcggctacggcggcggcaaccgcggcgcctcccccgctgccggagtgggagaagggagtaggcgcggaggagagggtcgagctggcgaggcggctcggcgacgagtcgaggggctggttcctcgggttcgtggagcgcttcctcgacgccgacgtggcggcggcggcggcgccgtgggaccgcgagcgcgcggccaggatgctcccgcagctgaagcgagtcaacgactggctcggcgagatcgggaagcgcggcgaggcgactcccccgccgccgcctgaagcggacggagaagctgccgcggccaccattgccgctgctccggcgaacggtggcagtgccgtacccgaggagacgatcgagcggctaaggaagaagatctacgagtacctcctcaccaacgtcgactcggccgccgcagttctcggcggcggggcttccgcgccggcgccggcggcgccggcgaacgcgaagaaggggtga

SEQ ID NO: 63750 - DNA, 2217 bp, Oryza sativa
  unsure (1)..(2217): unsure at all n locations
  Clone ID: PAT_MRT4530_64962C.1
atgggaggctcgcacagccgggaggacctcgacctctccgactccgaggacgacgactccgcctcccacgcctccgacgcctcctccgacttcgccaccccacccccctcctcctccgccaagcccagcgccgccaagtcctcggccgcggcggccaccccggcctccatcgacgcgatcgaccgccacctccgcagcctccacctcaagtacgccgagcccatctcccccaaccctagcccctcccccacctccgccgccgcccccgccgccctcaacgccgtcaagctctacctccacatcggcggctcctccccctccgcgcgctggatcatctccgaccgcctcgccgccgcctccttcgtccgcgccggggacgacgacgacgacgacgccccctcctccggcccatggtgcctcgtcgtggggtccaagatccgggccagggtcgggcccgagctgcagctcaagacgttccccgcgcagcgccgggtcgacttcgtcgccgacggcgtctgggcgctcaagtttctccacgccgatggctacccgaatttctacgccaagtaccagagctgcctgttcgagaacagctacggcgtcgccgccaccgatgagggccgcgccaaggtgttcgggaaggattttgcggcgtgggcgcgcccggaggacggggacgagtccatctgggaggacgcgacagacgggtttgtgccgagcccgagtcgcagcccgatgccgtcgcgtagccccattctgaagccgctcatggaggacttgagggagtatgaggagccagtggaggaaggtggagggatacagagccttgcgcttggtgcattggacaacagtttcttggttggtgattcgggaatccaggtggtgaggaatttcgagcatgggatacacggaaagggcgtgtcggtcaagttctccggagggagcacaaacttctcgacacccaagaaggcgcttcttatgcgtgcggagacaaacatgctcctgatgagcccggcaactgatgggaagcctcatgccaagggtgtccatcagctggacattgagaccggaaaggtcgtctcagaatggaaatttgggaaggacggagcagatattaacatgagggatatcacaaatgattccaagggtgcgcaaatggacccatcagagtctaccttcttggggcttgatgacaacaggttatgccgttgggacatgagggaccgtcgggggattgtgcagaacatagccagtgctacagagtcgccggtcctgcaatggacacaggggcatcagttctctaggggcaccaacttccagtgtttcgcgtcaacaggagatgggtcaattgttgttggttcacttgatgggaaagtccgtctgtactcgaagagttctatgagaatggcaaagacagccttcccagggctgggttcaccaattactcatgtcgacgtcacctacgatggaaagtggatcctcggaactactgacacgtacttgattcttatatgcaccatcttcattgacaaggatgggaaggaaaagacagggtttggagggaggatgggcaacagaattgctgccccaaggttgctcaagctgaccccgcttgattcacatcttgctggacagaataatatattccgtgaagggaggttctcatgggtgaccgagaacgggaagcaggagaggcatctggtggcgacggtggggaagtacagcgtggtgtggaacttcctccaggtgaagaacagccaccacgagtgctaccagtgccaggaggggctcaagagctgctactgctacaaggtgatccccaaggacgagtccatcgtcgccagccgcttcatgcacgagaagtacgccgtcagcgacaccccggaggcgccgctggtggtggccacccccatgaaggtcacctccttcagcatctccagcaagcactagcacctcgcctttctgctacgacatttgggcgggttaggggccgngcaaagtngtgncttnggaacactcactacagatgaaccgggggcgctttggtttgcgcgtaacgcctgttgtgagtnttagttttgaccttggggtttgcatatataagtgcatgatagcgatatcatgcagcatcgcgggtatgggtgggcttgggtgggagggcgggagggagttaagtgatgagctggctcagcatgtggcctgttctggaaaggtagg

SEQ ID NO: 63751 - DNA, 278 bp, Oryza sativa
  Clone ID: PAT_MRT4530_64963C.1
ggatccccgggctgcaggaattcggcacgaggagcatatgaggagattttacaatgttgcaagtctaggcgtttgcaatcacacagaagaagaagagcataggtctgagaaggaaatgaatatttcgagatttcttgttagtgcagatgatcaggagtttatatgaggctagttgatggatgtccacacacagatcagtggaaaaacttcctgaactgcatgttttgcctaaagaaaactagtgctgtgagcctgtgagcgctttaatatcacaagaa

SEQ ID NO: 63752 - DNA, 499 bp, Oryza sativa
  Clone ID: PAT_MRT4530_64964C.1
cataaatcattcgttaggcctacaaaaggttaagagtccaggggaaagcaagaggagttggatgacatttctgaatcatatggcccctactgctgctcttacataacccattgtaccatttcatactaaaaactggctcgtacaacggacacacactgccccaaacttttggacggacggacaccattgactgtacatactccgatcgatcgaacgaacgaacacggtcttatttcggtagcatatcgatcaaattattaactaatagcagaatgcagagcaaacgcgactactatggcaatgcaatgcaggtccccctccccggaatctaccaggtgaggatcttgcagcgctggttgtcaccctctcaccatttacacagcacgatctggtggccatcaaggatgccacctctatccttgtcctaatgcaaggcgtttaacctgaggtatatggctttcaccatgcgtatgcagaggaagcccttgcccacatcctt

SEQ ID NO: 63753 - DNA, 975 bp, Oryza sativa
  Clone ID: PAT_MRT4530_64965C.1
tgatgcggacatcactccatcggatacacacaacaatcctccaccggtcattcaaggaccgataacaagagctcgaataatggagaggataagaagacacttggagaaggacctagagttatggaggatcaaggtggacgtccaaaccaagtcaacttcgagtgcaattcggagtccaagaccagtctgcactaaaacaggcgcatagcattactatctgtcattggattgcgtaccactcacatatatttggccttcctagctcaacatattacttctagacagcacaggttcttgatccttgcaatcgctgattacatcttccaggtatcctttgctttgctggctcaaaaggagatgacggaggccgttacaaaggctgtccaagatgccatccttaaaatcggcttcgtaaaccaaatggagaggttggacaagcgggatgtccaagctaactgatcgggttgctgtgttggagacacaagaaccttccaaagaggaagtaagcagcagcaacgacagtggtcatcctaaagacacggtgtatgattctagtggcaatattgatgcacaagctacaaggcaagcacggctacgacatcatctacgcacaaaccgcacaggtatgggtggcacttcaaatcaccaccaccaacaaggtaacaataatcgtgtgcccgatgatccttatgctaaggttaagtttaaaataccctctttttggggatattatgatgctgagaaataccttaattgagagatgacagtagaacaaaagtttagtgcccaccttgttcctaagcaacatagagttcgacaagccagtagtgagttcaaagattttgctatcatgtggtgaactgggttagctgacgagggagttttacctactacttgggaagaacttaaggtagctatgcacgatagatttcatttgccagacttccattccaaaccaggaattaaattaattac

SEQ ID NO: 63754 - DNA, 649 bp, Oryza sativa
  Clone ID: PAT_MRT4530_64966C.1
acaattatgatgatcaaaagtaagaatgatgctgcagatgggtgtttgctggtgcagctgcttcctcattcgatgggcctttcgtgaatccttcagagtcaaaattaaaccctgaagtagctgctctaaatacattgaatatcagcaggaatgctacattttctcagctcaaagctgctcatttggaagattatcagggtctttttcaccgtgtaactctgcaactatcgcaagcatcaatgcttgagaaagatatcttggaagaagttgatcatgacgtaaagactacagcagaaagaattaattcctttagaagcgatgaggatccttctttggtcgaattgttatttcagtatggtcgctacctgctcatttcctcctctcggcctgggacacaggtatctaatctgcaaggaatatggaaccaagattttgcacctgcttgggaggcttctcctcacctgaacataaatcttgagatgaattactggccaacacttccttgtaaccttagtgaatgccaagaaccactatttgacttgataggatctcttgcggttaatggaacaaaaacagcaaaagtcaattaccaagcgagtggctgggtaactcatcacgtcacggacatatgggcaaaatcatctgcata

SEQ ID NO: 63755 - DNA, 119 bp, Oryza sativa
  unsure (1)..(119): unsure at all n locations
  Clone ID: PAT_MRT4530_64967C.1
aattnacaacaccacatttcattggggaggttcagaacctgcacagaaaaacacactgccccgacagttcttaccctatctccaatactcgtacatacagccacgcggtacacacaaat

SEQ ID NO: 63756 - DNA, 113 bp, Oryza sativa
  Clone ID: PAT_MRT4530_64968C.1
aattgtttaactggcagagaatatatgcaaaagggattaaactggaccatgctgagatcaaaaggcaaagatgcagagaacgaaagcatgaggagaacgcaaccatggcatga

SEQ ID NO: 63757 - DNA, 525 bp, Oryza sativa
  Clone ID: PAT_MRT4530_64969C.1
atgaaggaatatggctacatcagtcaccaagtgtggcagcttttgtggttattgctcgctcccccaggaggagttcagctgtttggtggagggatgaaggcccttacgagggaccgtggcttgtggaggttgacgatggcaggaccctaccaacattttggacggcgacggttaagtggtggttccttgtcttggttccgcggtgctcgatcctacttagcggcagttggtgcggtctacaattcaagggcacagatcactctccttgaccatcagacgatcgatcggcaagttggtgaaaaattaactccttctgagcatcacttgaccttctgtatgttcagaattcagattttgaggcacataattaaggccggtctcctttggacctactccttgtttttctatgaattctactatgcattcgacatcgcaatgttgctgtccagtttttatggcacaggggagtcactgtccgacgtctcttctgggagtgaagttggaaaatcaactgacacgagcgtt

SEQ ID NO: 63758 - DNA, 1194 bp, Oryza sativa
  Clone ID: PAT_MRT4530_6496C.1
tcgctgcctacgaacgcgagttgattggcctcgtccaggcggtccgccattggcggccatacttgtgggggcgtcgcttcctcatccgcaccgaccactgcagcttgcgcttcctcttggatcagcgtctctccactgttccacagcatcagtgggcaagcaagctcctcggctttgactttggcgtgtagtacaagttgggaatggcgaacttggtggcggacgcgctctctagatgggacgaacacctggcggaggcgttcgccttatcatcccccccaccaattctccctgttcgatgagttgtcccgcgaggtagcctccacacccgccctgtccgccatttgtgaagacatcaccaagggtgccaaaccgccagcataggcgttcacagacgacctcatcatgttcaagggctgcgtcttcatgccgccatcatccgaatcattgccggccatcctcgagtcggtgcatggcttgggacttgagggaacgcaaaagaccctatctcgccttcgcgcggatttccatatctcgcgggacagagcgacggtgcaagatttcgtgcgcgcgtgcctcacgtgccaacggaacaagacggagcacctccaaccggccaacctgctacaatccttgccggtgcctttggcggtgtgggctgacatcgctatggacttcgtcgaggggctcccgcgagtacatggcaagacggtcatcgtaccggtgcccacttcatcccgttctcatccgtacacggcgacgtcggtagtagctgccttcttcgctgagatcgtccgcttgcatggtttccggtctccatcgtcagcgaccgagatccagtcttcaccagcactttttggcgtgaaattttatggttggcgggtgtgcagctgaatctttcatcagcctttcacctaaatccaatggccagtccgaggtgactaacaagatcatcatgatgtatcttcgatgtttcactaggaatcgttcgtgtcaatggcttcgatggctaccatgcgcgatgtattgctacaacacgtcgtatcagtcgtcacttcgaacatcgtcgttccgcgtcgtctatggtcacgagccgccgacgctgcgtgcctactagccgggttcatgtcgtctgcccgcagttcaacaggcgttacaggagcgggacgacttgctgagggcgtttcgtgatcg

SEQ ID NO: 63759 - DNA, 438 bp, Oryza sativa
  Clone ID: PAT_MRT4530_64970C.1
atggtggccggcggctccgcgacgtaccactacgccgcgggcgacccggtgctgcacgacaccgaccgggcgaggtaccacgccttcttccactgcaacgcgacgtcgttcgtggcgtccgtggtggtgatcgttctgctgctgctgcggcggcggcggcggcgcggcgcgccggcggcgccgctgtgggcgatgcagtcggcggtggtgctggacctgctcggcctcctcggcgcctacgccgcggggagctgcagggagtgggagacgtcggcgtacgtggtggcgctcgtcggcgccgtcgtggtgtacatcgcgctgcacgtgctgctgtccttcgacgccgtggcggccaaggccgagaggctcaaggtctggagatacttcggcgagagctccgataataataatcagaccggcggtggcgctgcggtgtag

SEQ ID NO: 63760 - DNA, 977 bp, Oryza sativa
  unsure (1)..(977): unsure at all n locations
  Clone ID: PAT_MRT4530_64971C.1
gcccaccgaatccctcctccccctagaaggcaaggctaggattgccgcccgccggaatatctcccccaccgcgcgcctcccgccggcccacgggattggattcgcctctttacaaggcctatcctgccctctctactaccacccttatcgatctctatggttcctttacctttcgatttgattcaaccacatgaacatttcttacccgcgacgcgatacacctctaccgttcatcggcatatcactactatattcacaactcggtgatggatgtgcttacgtgctttccagtgccatgggatcgtattgtggccttcatcttggtttctccaccaatgtccgtggggaggaaccatggccaacaatggaattatgttcttcttgttgctggagcaccgttatcttcttctcctatntattttctgttgccgccttcttctgtgccaaccagccacaccagcagaaagttgtgcttcgactgatggtggcgggaagcacaattaattgtgcccttcatttcagagcatgccgaanaatctccttcccctcttcagatttatacttactgtcaacaaggatgagtaccatacatgctaatcgtatagctcctttatagcgagttactaacaaaagantttatttttatgccctccatggggggcttatttttaaacgaaatgattttatagctaacgttcgcatcactcagcttggatgtatgctttaagaagtataacatgactgccatgtaaaacgcctgatgcactatgatcatatttcttgatgagttgggtcctgaagaaacatttttttcagttaaaatagccctccatgaaactttttttttgtttaagaaaataaactatggctgacaagatttccatgggcttaattgctttcagtggggagtgctttctgagctctaagactagtgttctcttaggctaggtggctacaggagggtaacatgctgtccg

SEQ ID NO: 63761 - DNA, 518 bp, Oryza sativa
  unsure (1)..(518): unsure at all n locations
  Clone ID: PAT_MRT4530_64972C.1
ctctccgcccctaggcatttttgggctaggattgccgcccgccggaatatctcccccaccgccgccgccctcccgccggcccacgggattggattcgcctctttacaaggcctatcctgccctctctactaccacccttatcgatctctatctggtttcctttacctttcgatttgattcaaccacatcgaaatcgattctatctctacccgcgacgcgatgaccacctcctaccgctactatattcacaactcgtgtgatggatgtgcttacgtgctttccagtgccatgggatcgtattgtggccttcatcttggtttctccaccaatgtccgtggggaggaaccatggccaacaatggaattatgttcttcttgttgctggagcaccgntatcttcttctcctattattttctggtgccgccttcttctgtgccaaccagccacaccagcagaagttgtgcttcgactgatggtggcgggaagcacaattaattgtgccctttatttcagagcat

SEQ ID NO: 63762 - DNA, 407 bp, Oryza sativa
  Clone ID: PAT_MRT4530_64973C.1
aaaccaaaaaaaaggggggttcatttttttttttaaaaggaggggaagatttttttttttttccccattaccaaagcttaagcaataacagttaacaacccctcctcctcctttggggaaaaaattaaaacacaaaacccttttagggtcttttttttaggaaaggtgcgtgcatgggcataaaaggcaggggggggcaggtaaaaaaaaacaatggtgggggggggggaaacaaaaccccttttggggacaggaaaaaagcctccgaaggggggttttttgggagaagggttttcccccttggggggtctaaccacctcccaaggaaagattgggttgcctcttccaaagggaccgaaagccccctttttggggggagggcccgttgcccctttttttgggggcaa

SEQ ID NO: 63763 - DNA, 450 bp, Oryza sativa
  Clone ID: PAT_MRT4530_64974C.1
gcacgaggggctgcaggttcactgaacgcgcgcgcgccgcgcggcgcgtgacgcccgcgcctacgcacgtacgccgcatgcgtcgcgtcgcgcgtgctgcgctcgcggagacgcgggcagagaccggcgtcgcgcgaggtggtggtagtggtcgtcgtcgacgcgcacgcgcgctctcgcgcgcccgccgggagagacgccccgcgcgcgcagcttcggatcaacttgccgccggtgtccgagctagaattctactagtacacgtcaaggcgtcaagatgggattagattcagaaaaccggctgctaaacaagctaggagaacttgttaaaaaaaaagaaacagggattgtggtttaagctataaacttttgaaagacgactattaccacgtctgtgtggagaactattaatctaatttttttaggaaaaagaagtgtttttgtttgtct

SEQ ID NO: 63764 - DNA, 400 bp, Oryza sativa
  unsure (1)..(400): unsure at all n locations
  Clone ID: PAT_MRT4530_64975C.1
ctagttctagatcgcgagcggccgctctctatctagcgcctncgctcccgctcctctcgcaactctcccgcttccatgacatcgcgcttcactaataaccggatgaagctcccccactttatctcctgtcactttcccatctttaatcacacttatcatccctctatccttttatctccttttctatcccatcatctatccttttttcaatcttttttctacttttcacattaattctctctttccatctactcatttatttcttcctttactcacccttttctcttctatacttccttcttcttttcactttctcatatcattttcatttttcccttattttttattttcttcttaatttacttttttttattttttatattttttacatttatttttt

SEQ ID NO: 63765 - DNA, 252 bp, Oryza sativa
  Clone ID: PAT_MRT4530_64976C.1
atggccagtgacaagcttcgaagggcggcaaggtactgtccacggcggctggagcggcggccggagccatgggagcccgggatcgagtccacatcgacgggaaaaactctggaaaaggagattgagaggattccgttctcgcaactaatttggaaaaaggagcaacggggaggccagattcggaaggggatcggcacggctgcagcttgggacggctcgggctctgtccagatgttgaagacaacaatgtag

SEQ ID NO: 63766 - DNA, 824 bp, Oryza sativa
  Clone ID: PAT_MRT4530_64977C.1
ccttacacagtgggccattcagaaggctgagaaggggattttcagaacacgactcataccttacaattagcaaacatcaactcgattcagactcaaccaattaacataggttatcaataatcctctacttcatactacctatgctcatttgtagtagaaaagactgctctattctatgttttttcaagataccaaccatcttttgcatctcttttatctcttccccttacagagtatttccgttgttccagtggataaataaaaccactttgctgaactaaatgggagaaagcgatcaagaggtcaaccaactcaccttgggatttacctgtgatgatttggtaactgaaagattcagacatgtagtagcctttgtacatcgcttttctcatcatttgaagttgaaggatcattgcttagcttgtgatgtgtctcctatcggcctcctcaacaacagtttggatcaacagacgcgcgcactgcagccaatgcagattctcgtccacaccctgttgcttccagtagtatcaagtatcaatgaggaaggatatggatctgctgataagatcaccaagaactagctatgctatttagccatcacggcggcgtaaaagtcaggcggcggggaggaggacggggccggcggcgcaaaccggctcggcatgcaggtccgcggcggggatcgcgcgggcggagagtatgggcggcagggactccacgcgcagaagcaaccactgccggcgccgggaccacagcgccgccgcggacgcccgcgccgcgcgcccgcaggcgcagatagcgcccgcagcatcgccgcctcgtgc

SEQ ID NO: 63767 - DNA, 2377 bp, Oryza sativa
  Clone ID: PAT_MRT4530_64978C.1
atggaggaggaatcccaatcccaatcccatttcccgctccggtgggagagcaccggcgaccaatggtggtacgcgacgcccatcgactgggcggcggcgagcggccactacgacgtcgtccgggagctcctccgcctcgacgccaacctcctcatcaagctcacctcgctccgccgcatccgccgcctcgagtccgtctgggacgacgacatgcgcttcgccgacgccgccaggaaccgcgccgccgtcgcccgccgcctgctccacgactgcgagccccccaggggcgccgccgctggcggcggaagccggcccaaccggctcatccgcgcgggctacggcggctggctcctctacacggcggccgccgccggggacgcggccttcgtgcgggagctgctcgggaggcagccgctgctggtgttcggcgagggggagtacggcgtcaccgacgtgctctacgccgcggccaggagcgacagctccgaggtgttccggctgctgctcagcgcggtgctgtccccgcccgagtgctccgccgggggagaaggcgacggcggcaccgccgccattgctgggggtttcatgttccggtgcgagatgatgaaccgcgcgatgcacgccgcggcaaggggaggcaactggaggtcctcagggagctcctgcaggggtgctccgacgcgtcggcgttccgggacgctcagggatcgacgatcttgcacgccgcggccgcgagggggcagcttgagctgtcacgaatgtttggttgtgaaggatcttattgcctctttcgatatagtcaactccacagacgagcaagggaatacggcattgcatctagccgcctttcgaggtcatttgcccgtggtcaaagccctcatcactgcatccccatcacttatatcagctacaaatgaagttggcgacacgttccttcatatggcgctgactggctttaggaccccaggattccgaaggcttgatcgtcagatggagcttatgaagcaattgattggtggagtgatcatggatttaagcagcattatcaatatgcaaaacgacgatggaaggacagttcttcacttggctgtgattggcaatctgcactctagccttgttgagctcttgatgactgcaccgttgattgaccttaatgtccgggacaatgatggcatgactcctctggatttacttaggaaacagccaccaacagcatcgtctgagatactcatcaagcagcttattttggctggtggaattgcaaattcaatggaccatgagaccagatcagccattgcttctcagctaaagatgcactgtatcgtaggcagcccgggaacatccttcaagatcccagatgccgagatcttcctccatgcaggtatcgatgcgtcagacatcagcgaaagaacgaactcattctctagcgttggacagagtgagccagaatttccggaatccagtcgtaagaagctgaactctatgcaaaatgcagcgaaacatctcaagatcctactcagatggcccctccgcaaggagaagaaatcatcatccggtgcccgaaatgaactggacgacgacgcatcctctgtggattcagtcaagagctggagccacggggagaccccgacaccgctgaggcagaagtactccaggatgagctccctgttcaacaacaagcggaccatggcagccaggatcggctcaccgagtccatcgatgaagaagagcttcgcagatggcctcgcacatggcgtgatgcagcccgaatcgccttcaggctcgggctcctggtcgtcgtcgtccttggtcgacaggattgaagccgtccatctggacaagaatggccaagcatctcctgataccagtgtggtgatcaggcgtacacccaagaagcacgggtctttgaacagcaggctcatgaaccaatacttctgcatcggagcgcaggggatagctgtcgaggactcaaccacggggcagcgatcaagtcggatgttcagaagttcacttctgtcagctgcctgaattcgtaatttagacatggtttgctttccttgacttcactgcttacaagttacagctgatctgttagtatgtgcgagtgcatgtgagaagactgtcatatgttgtgtttgtattactgatgcaaaatggtgagatctactaatgtaatgtagtgctgttggtagtgtgtaatgattttgttgggagagtgagtacaatggaaggcatggttttcaaaaaaaaaaaaaaaaaaaaaaaacaagacaatacgagctcactgagcctcgtgcctgccgcccgaaattacattggtggtacacgaacttgttaagtgggtgcaatttagcctcgtgccgaattcctgcagccc

SEQ ID NO: 63768 - DNA, 615 bp, Oryza sativa
  unsure (1)..(615): unsure at all n locations
  Clone ID: PAT_MRT4530_64979C.1
agaggccgtctagancccctggatcccccgggctgttggaattcggcacnagctcgtgccgaatcggcacganatttacactccgaaacgacnatgatataagaatnttgttctccntccacgatcntgaccttggggaggatggctaaanaattncagtccatctgattggtggtcaaaacntagtgctgaaatttatntctttgtgggcntggaaantanagggaanattctaatggaaaggtntgagtngggganattgttggggaaaggancctttggctnaggtncactatgcnttnnttttttttttccaaccanagtgtggccntnaanatgatggatnccacccgaccttgagggtcgggctttcggaccnnatctcatctnanatccccccccctgcgnggtggtgggctcacanaancgtngtccaccttcnnngngggttctcgcccccccngnannannatctnctnntcancnncttcatagggnggggnttcatctntcntanggngggcncccctccgtggccnccccannngntggtggcngnncnttntttctccccnccctcccttgnccctgnggatcccntgcccnctccntang

SEQ ID NO: 63769 - DNA, 479 bp, Oryza sativa
  Clone ID: PAT_MRT4530_6497C.1
atgacggctgcgacgatgtctgccgggctcttcaccactgcccccttaggcacgacactaccgccgatctctctcccactaccgccagagctcacggccatccttgccaccggtggcctctatggcacctccgacgcctctgcatccgctctgcctgctcaggacgtctccgccttcttcatcacgcctggcgctgcatcggcaacactccctctagtgggtcttcctcctcaagcagctggtgcaccaccaccacctcctcccggctacggtggcttcatccctctgatgaccggtgctgctcctgcccctactgcccagaacttctacaacgtcgacctcaacaatgacgccaccgccaatctccacgctcaggcggtctcgatgctgaacatcaagtctctcatgcccgtcaccctcgatctcaacttcggcaactacacacaatggtgtggtctcatcctcgtcaccctcgacaa

SEQ ID NO: 63770 - DNA, 207 bp, Oryza sativa
  Clone ID: PAT_MRT4530_64980C.1
atgggcttagcgtatgaaagagcatcgcgtttggtggtcgcccatcacgttgtacgctcaacagctcaagaagagtggcggatctgtggggggtggttgattcacaacaagcttgtccatttcattctagactccaatactgattcgtctctccgaacggaacaacgctatctgtcactgtataggaggatcaccagcttgtcgtta

SEQ ID NO: 63771 - DNA, 197 bp, Oryza sativa
  Clone ID: PAT_MRT4530_64981C.1
tctagtacaagcgaacttggtgaagaagagcaagacgccggtgggtgcgcgtgtgttttagtggctgagcactcgcggccgcgaactggcatgttaacgtctgtgcaaactaggatacttctcatttgcaaaactattatatgtgatgctgctactgatgataaactgttacaaaatactactactataagtgacat

SEQ ID NO: 63772 - DNA, 2065 bp, Oryza sativa
  Clone ID: PAT_MRT4530_64982C.1
atgaacgcgtcgcagttcatggacaaacagatcctcggcctcgcggcctcgggcgccggtgcggccgccgccgccgccgccgcgtcgtcgtcccctcccgcggcgggaggaggtgggggcggcgggctgttcgatctgatgagccccgacccgcacggcgacggccccggccacgcgcgccgcgggcagcagcaacacggcggcgccgacgaggtggtgcccagctacgacttccagcccatccgcgccgctcccgccgccgcggcgccggcctccgcggcgagcccttgggggtcgctcgactccaaggcggcgtcctccaacctcaagagtgctggcatgttggagtctcatgtgctcaagaaggtcagtcacgaagaagaaaggggcaacttcagtgcagtctccatagcagatattgatcgcacaatgaagaaatatgctgataacctgctacatgcactggaaagtgtaagctcaaggctatcacagctagagggcagaacacaccatcttgagaactctgttggtgagttgaagctaataattggtaactacaatggcagcactgatggaaaactgagacaatttgagaacacactgcgtgaggttcaagctggtgtgcagattttgcgtgacaagcaagaaattgttgagacacaggtccaactttcaaagctccaattgtcaaaagcagaggatgctcaatcagaaaaggctggtgttggtcaggcagattcaaggcagcagccaactctaccccaacctcagcatcaagcccctccgccttcccatccaccggcattgcctgcccttcctgctccaaatgcaccacctccacctgcaccccaaagccaacctccatcacaattcccaggccatttaccacattcccaggtgcaatcagtcccacctgctccaccgactccattagcaccaaccataccacaggagtcctactatcccccgtcagcagtacagccaactgacaccacacaccagcagtatcaagctccacccgccccacagtcgcaggcacctccagcaccaccacagcattatcaaacaccacctcagtatgctcagtattctcagcctcctcctgcaagtgctaacccctcaactgcagtcccaccgtcagtgcatcagcagcctgaagaagtagcagcgccgtatggccctcctcctcagagctatcccccaaatgtgcgcctgccatctccttatgtgccaccacctagcgggcctgcacctcctttctatggtccaaaccctggcatgtatgagcctccagcagtccggccaaactccgggccacctccatcctacaatactggatacaaaccacagggtggaggcggtttccccgagccatatggttacagtggatctccatctcaccgtggcaatgctggaatgaagtcgccctcgccgtttcatccaacaggctctgcgggaagcggcaactacagcaggctccctacagctcaaatgctgccccaagccgcgtcagcgagctccaccccaagcgcctcctcgggcaacagggtgccgattgatgacgtggtagacaaggttgccacgatggggttctcgagggagcaggtgagagcggccgttcgccagctgaccgagagcggtcagaacgtcgacctgaacatggtgcttgataaggtgatgaacggcgccgacgcccagccccagagaggctggcacgggcgttaaaagctcagctgctatccagggccatgaagcgctctcccatcaacctgtgcatatcactgaacatccaatccacggagtcattttgtgcattcgcgtgaacgtcagattcggaattcatattgtcgatttggtggggaacagaccaggtctgctcgatttgctgttggtgatcttacagcaagtgttctttatctctttgattcgcctggtgttggttggtactagcagtagtactaaaacttggtatctgatctccaaaaacgagtttttctagagatggtgttatggttgttatccactgatgatatgttaatgattcacgggctgcactgttctgttt

SEQ ID NO: 63773 - DNA, 338 bp, Oryza sativa
  Clone ID: PAT_MRT4530_64983C.1
gtacttggtatcgactactacctctcgactcgatcgccatggctgtcaacaacaaggcggccaggcctgcgcccgacgctgttcacggctcctctccgccggcttgtgcctccgatacatgagctccccacggggcggcgcccccccggtgtgcgagggggtctggaaaccggcggaatttgtgcgctcgccgccggagtccggcacgggtggaggaggaccgcgaaccccttttttcttaacgaaattgtttcctcttctctcaagctgagcctaactttactggcattttagcttcccaagcgccgcgaattggacagactttttgcgggaggcgc

SEQ ID NO: 63774 - DNA, 1405 bp, Oryza sativa
  Clone ID: PAT_MRT4530_64984C.1
tgtggtctctgaatacctttttcaactccacctttggaggagttggttcctggtagaagctgggcattggtgttgccttgaagttcaaactcttcctaagcattttgagttcagcttcttcagtctccttcgtggggacgtacggggtgaactacggcaggatcgcggacaacctgccgccgccgacggaggtggtgaagctcctccgcatggcgcggatcaagaacgtgaagatctacgacgccgaccacaccgtcctcgacgcgttccgcgggtcggggctcaacctggtgatcgccgtgaccaacggcgaggtgaaggacatcgcggcgagccccgccaaggccatggactggctgaacgagaacgtccagccctactacccctccacccgcatcgtcggcatcaccgtcggcaacgaggtcctcggcggcgccgacgccggcctcgccgaggccctcatcggcgccgtcgtcaacatccacgacgcgctcaagatgctcggcctcgccaccaagatcgagctcaccacgccccactccgaggccgtgttcgccaactcctacccgccgtcggcgtgcgtgttccgcgacgacctcatggtgtacctcaagccgctgctggacttcttctccaagaccggcgcgccgttctacgtcaacgcctacccgttcctcgcctacatgagcgacccggcgcacatcgacgtcaactacgcgctgttcaagcccaacgccggcatctacgacgccaagacgaggctgcgctacgacaacatgttcgaggcgcaggtggacgcggcctacttcgcgctggaggcggcggggtacccggagatggaggtgagggtggcggagaccgggtgggcgtccgccggcgacgcgacggaggccggcgccgacccggcgaacgcgagggcgtacaacttcaacctcaggaagaggctgttcctgcgcaaggggacgccgtacaggccggggaggtggccaaggcgtacatcttcgcgctgttcaacgagaacctcaagccggggccgaccaccgagcgccattacggcctcttcaagcccgacggcagcgtctcgatcgatctcgggttcaagggcctcgtcccttcgtcgtcgtcgccatcgtcgtcaattatctcattcaagagagctcgagaaaggggatggatggcgcttgtactgtactcggctacacttctgtcatgtacattcatttttctagttttaagttagtgatctgattacacaccagattaattagttactaactgtcacatcgatccgtcatgcccatgtgaaaaaaaaaaatattcgttctttggatgccaattccacgaaaattgtggcatagaaattccaaagagttgtcccttcctgtaaaaaaaaaaaaaaaaaaaa

SEQ ID NO: 63775 - DNA, 184 bp, Oryza sativa
  Clone ID: PAT_MRT4530_64985C.1
tcaaccgagagatcgtcatcagcgtctggaagcgggaacttgcacaacggcgctctggatctaaaggaaattattacgatgaatcgatctgcgatagacacacacaacaccacacagacaaccactggactgactcgtgaacaagccctacttgtaaagtcgcctacccacaatatactgcgtc

SEQ ID NO: 63776 - DNA, 543 bp, Oryza sativa
  Clone ID: PAT_MRT4530_64986C.1
aggatcccccgccggtacctccatgtcgaggttcacttcgtcagaagaatcaactggagctcggtgttcagcttctgcaagaactggctcaagcaccctctgaacattgctctcctggcatggctgctctgcgtcgctgcagctggtggcatgttgatcctgctcctgctaggattgctgaacagggccttcccttccaagccattgaggcatcactggatagagatcgacaaccagatccttaacgcgctcttcacgctcatgagcatataccagcatcccagcctgatccaccacctcgttcttctctgcgatggcggccggaggacgccgcggagctacagaagatcgcgatccgaattcgccgacaatttcttctttgtcctcggagtcgtcgcgcccgtcgtcgccggagcgtacacggtgtacagccctctaggcagggacacagacgacgatgcctccggcgaggaagccaagcagcagcagcagcacatgatcgaagccgagctgcccggaacgagaacggtggtcgtcgacccc

SEQ ID NO: 63777 - DNA, 1901 bp, Oryza sativa
  Clone ID: PAT_MRT4530_64987C.1
atggttcagaattttcctgaagacgacatggcaggcacaccttactctgatcaaacctcaccaattttgactgaatatcatatcacagttcctgctcttcatgatggatcaatgcaaggatctgttcatcacgagaggagactcctggattgcctcagagccactccctcggtggagtggctaaagaatatcaacctctgttctccactgacgaatttccggctgccatctaccggcgtccgccggtacctccatgtcgaggttcacttcgtcagaagaatcaactggagctcggtgttcagcttctgcaagaactggctcaagcaccctctgaacattgctctcctggcatggctgctctgcgtcgctgcagctggtggcatgttgatcctgctcctgctaggattgctgaacagggccttcccttccaagccattgaggcatcactggatagagatcgacaaccagatccttaacgcgctcttcacgctcatgagcatataccagcatcccagcctgatccaccacctcgttcttctctgccgatggcggccggaggacgccgcggagctccggaaggtgtactgcaagaatggcgaccgccgtcccggcgaacgggcgcacatgtccgtcgtggtggctctcctccatgtcacttgcatttctcagtacgtggtttgcaacctctactgggcttaccgcagcagatcgcgatccgaattcgccgacaatttcttcttcgtcctcggcgtcgtcgcgcccgtcgtcgccggagcgtacacggtgtacagccctctaggcagggacacagacgacgatgcctccggcgaggaagccaagcagcagcagcagcacatgatcgaagccgagctgcccggaacgagaacggtggtcgtcgaccccgtgtgggcgggcggcctcctcgactgcggcgaggaccccgcggcgtgctgcctctcgtcgctgtgcaccttctgcgtgttcggctggaacatggagcggctcgggttcggcaacatgtacgtccacaccgccatgttcctgctgctctgcgtcgcgcccttctgggtattcaacatcacggcgctccacatccacgactacgacctgagcgacgccgtgggcgccgcggggatcgcgctgtgcttcctcggcctgctgtacggcgggttctggagggtccagatgcggaagaggttcgcgctgccggggagccggtggtgctgcggctcggcgtcgctgacggactacgcgcggtggctcttctgctggccgtgcgcgctcgcgcaggaggtgcgcacggggaacctgtacgacgtcgaggacggcggcggcgtcttctacgagaaggcgatggacggcggcgatgtggagggcggcgacggcagcgacggtaaacccgtgagagtcaatctctctctactttccaaacatggctgtggtggagttgaaggttgggatgcactgcgacaggtgcatcaaggcgatcaagaaggcaataaaaacgatcgatgatatggagagttatcagctagagacagagataaacaaggtcaccgtgacaggaaatgttaccccagatgaagtcgtcaaggctctgcagaagattgggaagacggcaactaactggggtgaagactgaagtgttcatctttagctagtagtatatatcagctgatgacttgatgtccttagtccttagtcctttctatggttactttgagctgtttatactgcagatatacagtagtactaaggaacataaagtgggtaaactcggcattgcttactctccctcagtagttgattaatgcaatggattatgcgttgccctgttggattaaaaaaaaaaaaaaaatgtgtacctgatttgtttgcaaaatcttccggatgatgagaca

SEQ ID NO: 63778 - DNA, 1896 bp, Oryza sativa
  Clone ID: PAT_MRT4530_64988C.1
atgtcgagtttcttgaacgaagaattcagctccggtcccttttcagacattttctgtgataatggcagtaacaaacatcaggatggacttgggaagagcaaagctttcatcgattcaagccgggaagaaactgctcagctagcaaaaaagtttgaatcaaacctttttggtgccaaccagaaatcaagctcaaatggctgtctgtcagagaggatggctgcaaggacaggttttggtgtcctgaaaattgatacatctcgtgtcggttattctacaccgattcggtctccggtgacgatcccgcccggtgtgagtccaagggaacttcttgagtcgccggtttttcttccgaacgccattgcacaaccttctcctaccactggcaaactgccatttttgatgcatagtaatgttaaaccatcgatccctaaaaaaactgaagatgaaacacgccatgatcgtgtattcttctttcaacccattttgggatctaagccaccaacttgtccagttgcagagaagggtttcagtgttaatcatcaaaaccagccttcagtgacggataatcaccaggagctcagtcttcagcctatctcaactgcatccaatgatttcacttcaccaactattgttaaacctaagacatctgattccatgttagacaatgatgatcacccttcccctgcgaatgatcaagaagagaatgcttcacacaaaaatgaagagtattcttcagacctgatcattacccctgctgaggatggatataactggaggaaatatggacagatgcgagttagaacagtggagcgttctcaagatggccaaataacagagatagtctacaaaggttctcacaatcaccctttgccgccttccaaccgccgaccaaatgttcctttctcacacttcaatgatctgagagatgatcactctgagaaatttggttccaagtctggtcaggccacagcaacttcatgggagaatgccgcaaatggacacctccaagatgtcggtagtgaagttctgacaaaactgtctgcttctcttacgacaacagaacatgctgaaaaatctgttatggacaaacaagaagctgtggatatctcatcgacgctctccaatgaagaggatgatagggtaacgcatcgtgccccgctttctctgggctttgatgcgaacgatgactatgttgaacacaagagaagaaagatggatgtttatgccgctactagcactagcaccaacgccatcgacataggagctgtggcgtcaagagctatccgggagcctcgcgttgttgttcagaccacaagtgaggttgacatccttgatgatggttaccgttggcgcaagtatgggcagaaagttgtcaaaggaaacccaaatccaaggagctactacaagtgcactcatccgggttgctcggtgcgcaagcatgtggagcgatcatcgcatgatctgaaatccgtcatcacgacgtatgaaggaaagcacaaccatgaagttccagctgccaggaacagtggccacccaagctcaggctcagccgctgcaccacaggctaccaatggtcttcttcaccggagacctgaaccggcacaaggtggtggtggtggtagccttgctcagtttggctatggctcagctggtcacagaccagcagagcagtttggtgcagcagcagctggtttctcctttggaatgctgcctcgtagcattgcaactccggcgccgtctccggcgatcgccgtgccggcgatgcaggggtacccagggcttgtgctgccgagaggtgagatgaaggtgaacttgctgccacagtctgggaatgctggtgcagcagctagccagcagctgatgggcaggttgccaaagcagcatcctcagatgtaa

SEQ ID NO: 63779 - DNA, 457 bp, Oryza sativa
  Clone ID: PAT_MRT4530_64989C.1
atggccgccgccggcgaccataggggcgcgggtgcgccgcctcccgccggctgtgccggcgtggccgccttcgggcgcaccgtgcggctgccgcgtggggcccggccgtcagccgcccgcgccctcggcgccgccaccacgtgctccaccccgccgtcgtcgccggcgccgctccagccgccgtgcgccgtcgccccggccgtcgccggtcagtgccgtcgcctccctcagcttcgcaagggtgagagctaccccggccacccgttcttttgcgccgaaccccgccggaagtcgccgtcaccgtgaaggccgaaccgttgccatgttttgatctccggcgaagctttgccgtcgactccgtggtcgccggacctcgccgtatccactgtcggcatcgcagcagtgaggagaagcccggcagccatctccccgaagccaaaatccaccggagctccat

SEQ ID NO: 63780 - DNA, 259 bp, Oryza sativa
  Clone ID: PAT_MRT4530_6498C.1
acgtgacaaatctaccccccttacaaagaatctcgtcccgagattcggaacggctagaaagaaaaaggaaataggaagaaaggaaaatttttcacaaatcatgttttcggaaaatttgtccttaaggtttgaccatttggcttatcctacagttgagatggctctgataccaacttgtcatgcccagaaattcactagtgatttccgaacttatttgtgcacaaaatcctcgtccaggaatcagccgaggtacacaaac

SEQ ID NO: 63781 - DNA, 1953 bp, Oryza sativa
  Clone ID: PAT_MRT4530_64990C.1
atgtcgagtttcttgaacgaagaattcagctccggtcccttttcagacattttctgtgataatggcagtaacaaacatcaggatggacttgggaagagcaaagctttcatcgattcaagccgggaagaaactgctcagctagcaaaaaagtttgaatcaaacctttttggtgccaaccagaaatcaagctcaaatggctgtctgtcagagaggatggctgcaaggacaggttttggtgtcctgaaaattgatacatctcgtgtcggttattctacaccgattcggtctccggtgacgatcccgcccggtgtgagtccaagggaacttcttgagtcgccggtttttcttccgaacgccattgcacaaccttctcctaccactggcaaactgccatttttgatgcatagtaatgttaaaccatcgatccctaaaaaaactgaagatgaaacacgccatgatcgtgtattcttctttcaacccattttgggatctaagccaccaacttgtccagttgcagagaagggtttcagtgttaatcatcaaaaccagccttcagtgacggataatcaccaggagctcagtcttcagtctagctcaactgcagccaaggatttcacttcagcaactattgttaaacctaagacatctgattccatgttagacaatgatgatcacccttcccctgcaaatgatcaagaagagaatgcaacaaacaaaaatgaagagtattcttcagacctgatcattacccctgctgaggatggatataactggaggaaatatggacagaagcaagttaagaacagtgagcatcccagaagctactacaaatgcactttcacgaattgcgctgtcaagaaggtggagcgttctcaagatggccaaataacagagatagtctacaaaggttctcacaatcaccctttgccgccttccaaccgccgaccaaatgttcctttctcacacttcaatgatctgagagatgatcactctgagaaatttggttccaagtctggtcaggccacagcaacttcatgggagaatgccgcaaatggacacctccaagatgtcggtagtgaagttctgacaaaactgtctgcttctcttacgacaacagaacatgctgaaaaatctgttatggacaaacaagaagctgtggatatctcatcgacgctctccaatgaagaggatgatagggtaacgcatcgtgccccgctttctctgggctttgatgcgaacgatgactatgttgaacacaagagaagaaagatggatgtttatgccgctactagcactagcaccaacgccatcgacataggagctgtggcgtcaagagctatccgggagcctcgcgttgttgttcagaccacaagtgaggttgacatccttgatgatggttaccgttggcgcaagtatgggcagaaagttgtcaaaggaaacccaaatccaaggagctactacaagtgcactcatccgggttgctcggtgcgcaagcatgtggagcgatcatcgcatgatctgaaatccgtcatcacgacgtatgaaggaaagcacaaccatgaagttccagctgccaggaacagtggccacccaagctcaggctcagccgctgcaccacaggctaccaatggtcttcttcaccggagacctgaaccggcacaaggtggtggtggtggtagccttgctcagtttggctatggctcagctggtcacagaccagcagagcagtttggtgcagcagcagctggtttctcctttggaatgctgcctcgtagcattgcaactccggcgccgtctccggcgatcgccgtgccggcgatgcaggggtacccagggcttgtgctgccgagaggtgagatgaaggtgaacttgctgccacagtctgggaatgctggtgcagcagctagccagcagctgatgggcaggttgccaaagcagcatcctcagatgtaa

SEQ ID NO: 63782 - DNA, 696 bp, Oryza sativa
  Clone ID: PAT_MRT4530_64991C.1
atggcgctcgtcggcggcggcaaggtggtggcggcggagcctggcgtggcgcggcggctgtggcgcgtggtgcgcgccgtgctgtacatgctgcggcgcgggctgcaggcgccgtccgggcgcaagctcgccatggacctccacctcctcctccgccgcggcaagatcgccggcaaggcgctcggccacctcgtcacgttccaccaccaccaccacaaccatgggcacggcttctccgcctcggcggcggcggcggggtcgtcgtcgctgtcgtgccgcggcatcgacccggcgctcgcggtggtgttcgagacgctcaacgacagcgagcacctcttcaacgacgacgacgccgccgtggccgtggcgccggccaccgccgagacgacgccgctgtggacgccggcccgctcccaccactcccacagccccgccccggcggcgccgagccggcatcgcggccgcaccaccgactcgccgttcgccgcgagcaacggcgacgaggccggcggcggcgcgcagcagcaggtggacaggaaggccgacgagttcatcaggcgcttctacgagcagctgcgcgcgcagcgcagcgtcgccgccacgccggactactacggcgccagcccttattctaatgctccttacataataatcactagaaaatcagttgatttagattgttgggtggattattaa

SEQ ID NO: 63783 - DNA, 384 bp, Oryza sativa
  Clone ID: PAT_MRT4530_64992C.1
aaaagaagtccattttacaatacagtaattcgtaatcacaagctttagatcaaacttaattaaaagaattaaccgccggagacaatttacaaatgaacaaattcgccacgaccacacggatatacatccacacacaacacactagcataaatcaacacaacgttcctcctcacgcgcgtacacgtacgtacgcacgtacgtacaccacaaaccaaaccgtcgcccaagattgatacggttttgcacagaatcctcctcctcgacccggtcgacgacgccctcacactctgctaaccatcggattctgtatgatggctacatgtgctccggcgtgcagtgacccggtgcacagtagttgctttccggtcaagatgatggtgaacg

SEQ ID NO: 63784 - DNA, 413 bp, Oryza sativa
  Clone ID: PAT_MRT4530_64993C.1
aggacacttaaacgtacacacaaaaccacgcgagcgtatacacccaaacatgcccatcatgcatatcatttatcaggcggtgggtgacgtcttggtcatatactacacaaatccaaaatccactactcatggtgacctatattatgacggcaaagagtctgaggccaagcttaaggaaatgacaacagagcttgctgcggctgaacttaaagaggctatcgatctgcctgattgtgaggcacctgtatggattataaacatacagagatctagtccttcatcctgtaatactcaggtgaagattacagcgctcaatgctccgattccttctggtgcttgcttaggataccgacctggtgaatggggaaaacctcctgttgattagcatggacgccccttatattgagatgttt

SEQ ID NO: 63785 - DNA, 435 bp, Oryza sativa
  Clone ID: PAT_MRT4530_64994C.1
gcgcccacgcgtccgcccacgcgtccggcgagctcgcgaacgcgccactgcttagcttactcccgcctcactatctgtcttggcgcgtcgtgtacacgatcgagcaccagacaatggcggtggcgcagcagcagcagcagcagcagaggcaggccaccggtgagtcgctgatgcagaagtgcaagccgtacgtggcgatggtctcgctgcagttcgggtacgccggcatgaacgtgatcaccaaggtgtccctcaaccacggcatgagccactacgtgctcgtcgtgtaccgacacgccttcgccaccctctacatcgcgcccttcgcgctcgtcctcgagcgcaaggtccgccctcgcatgtcctttgggtcttcctccagatcttcgtcctcgcccttctcgggccgggatcgatcagaatttctactacgcc

SEQ ID NO: 63786 - DNA, 168 bp, Oryza sativa
  Clone ID: PAT_MRT4530_64995C.1
atgtaccaggacctgaaggaaggatactggtggcccaacatgaaaagggatgtagcagaatacgtagcactctgcgacgtatgccagagggtgaaggccgagcaccagcgaccggcagaccgcaactggttacgattccatttgggtaatcgtggaccgactcactaa

SEQ ID NO: 63787 - DNA, 290 bp, Oryza sativa
  unsure (1)..(290): unsure at all n locations
  Clone ID: PAT_MRT4530_64996C.1
ggcagtcagagtggtactccacggtccaaagtcctcatatcagacagcggcgaactgaagtgatcttccattaacagaagcttaataacgagctgtacttacttaccgtgaattcctatcattggagtatgtgtgcacgtcattagtgccatgcattgtttggagcctgtttctgctgattataatgtgacctgctttgtgtaattntngtaaaatgagagtgttctctcaatatttncccatggcaattcagattggatatgcaatgcaagcttaaaaaaaaaaaaaaa

SEQ ID NO: 63788 - DNA, 1789 bp, Oryza sativa
  Clone ID: PAT_MRT4530_64997C.1
ctggagcccggccctccggcccccggcccctttcccctccttcctcctcccctttcgtcttagcctcagctcgccgcgagacgaatcctcccctcgccgccgccgggtccgatcgacggcggtatcgagggacggagggggcgcgcccgttctctcgccgtacaccgtcgtcgccgaccggctccctcgacggcacgagtttgaagttggaaatcaaccttgttgttctctgtagcgctttcctttggattgcggagaatttcaaacaaaaccaacaaacctttgcatctgactgacttgaggtaactatgccaaaggacaggagcacccgtgccgtgtcatacgagcgccgccggtctcgtgtttcgccgtacccctccaatgggaagggctgtgctcgcaggtcagaggagtctgctgctgctgccgctgccgctgccgcgaagcaggctgcggaatgggaggatgtccgctgcccggtctgcatggatcacccacacaacgctgttctgctcgtctgctcgtcgcatgagaagggctgccgccctttcatgtgcgacacaagctaccgacactccaattgctttgatcagtaccgcaaggcctctaaggagtcctcaaaggattctggtgccagtgctgctgctgcgccagaatgcagcgagtgccagcagcccataaaactgtcttgcccgttgtgtcgtgggccagtcagccattggacaaaggattatgatgcacggaagtacttgaacgtgaaggttcgagcatgtactaaagagtcctgcgagttcaggggggcatacggtcaactgaggagacacgccagggagaaccatcctactgttagaccaactcaggtggatcctgaacggcagcgagactggcacagaatggagcagcagcgtgatcttggggacttgttcagcatgcttcgttcaggcttaagtgccagggaggacgggatcggagtcagtgaaggggaagaggatatcagcgagagggctctacatagcccatctataacaatggtcttcattgtgcgcactggcaggtcgatactccactacagggaagcattcccaggccaccacagaagaagaacaattcttctgcttggggaggcttttggtcgtgaatcctccccattagggggagcaagtggcagtggtgatggtgacaccacagctcgcgaaaatgatgaaggtgatgacgacgtcacgctatcaacagaggcatcggctggttctcagcatgatggtgaagtcgatggtgatcctgcacattgatgcagctggtagggagtgccaaggcgtgcacctggactgaaaagctctacaagcaagcaatctttcgggttcaccaggcatccaagaccacatgttgggaagaaacatgggggtgttccatttggctttaggcgtagtcaggacatcctgcctacgtgcaagaagaactgagatgaaattgcaatgcagggataggctcaaaaccgctgtggagttgtcttagtttcatttttaatatatttgctggaaggtctgtagcaaacagaaacatcaatggtggtggtgtatttatcatgtccacggctaggacttgggtgaattcaattcactgcgttgtaatttgatctctgaaatatattctttctgcgttgatgaatctgatcatgttaaagcagaaatttgatgtatatttatgtatataggtgcactttggttccttctacattgaagaattcggtcatatgctcctgaaagttgtgctgtgttcgtcagaccaaaaa

SEQ ID NO: 63789 - DNA, 652 bp, Oryza sativa
  Clone ID: PAT_MRT4530_64998C.1
tcgtttgagttacctgtagatgcataacgaatccacaccttacatagtctcacatagtgcaggttactacacgggatcctcaagccaaccactccaacccagtcgcgctgctactttcccattctcagcgaccacctccactctatcccactttcccctttccggcgccgggccggcgaccacctccatacagcagactccagcttggggatggcgaggatgaggtccttggtgtccgccgtctgcataacgccgtgcgcgtagtagaatggcggggtgctcgacaacgccttgtgcgcggtggtggtagtgcgccgtcgtcgccaccgacgccgtgtcgtcgtcgcccgtggcgacgcgcgccgtccccgccagcccgagcttcgcacgtcgccgggacaacgcctcctccttctccgcgcgccgcctctcgtctcgccccgcacgccgcacctccccgagctcaacgagagtgggggactggagtggagagccgcgccggcgacgaggagacggagcgaggaggacggcggcggcggtgcggatctggagtggcaccgggctcctcctctctcggtggcgacgaggaggcggagcgaggaggacggcggcggcggcgcggatctggagcggcgccgggcccctcctctct

SEQ ID NO: 63790 - DNA, 360 bp, Oryza sativa
  Clone ID: PAT_MRT4530_64999C.1
tttttgggtcatctaaaaaagcggctaccactaatcacttgttccttcacgataacatctttatttaaacttataccaaataaaagtcttccatggcacagcgcaagtcatagataaatgaggaaactactcttggttcttgcggaactcatcttgatcccagtacacaacaaacctaaccctccacactatgtgcaagaacaaaaccaaaccaaactgaactttgcgaaacaagagctattttcctttttcaccacccaaagggtgtctaatgccacattccattaaatgaaacataaaaaattcaaacagcgccttagccccaccacttggggccttttcgatcaggcaaaggggcaa

SEQ ID NO: 63791 - DNA, 1894 bp, Oryza sativa
  Clone ID: PAT_MRT4530_6499C.1
ttctgtctccccctccctcacggcctcacctgttggccctccaaattctccatccccggatccccctctcctcctcctcctccgccgctcgtcggagccggaggcgcggcggccttctcccgcgcccttcgtctcctcacacccgcggcggccggcgagaaggcccagaggcaaaggcgtgaagcggcctcctcccccggcgcggcaccctcggacgcacggcggccggtgagcaggagcaggttcggagggggcgacgcggccgggctccttccaccggccagcatcctggctcgagtcgaattttgaaggaagcatgaaggttgatgatggtcctggcgtcaatggcagtaggtgggccaaaatgatgagcacagattcgtggaggtggtgtttaggattgatttacatggatgctgttgcgagtatatggattgctgcaagctacattgttcagtctgttgtggatgagggtgtttctccattcttgattacctacatatgcaattctctatttgttatttacatcccaatagttgaggctgcacgatactttgaggattctatcaacaacttttggacaaagttgaaaggcaaggatgttgcggacctggagcagtctgctgatctggagagcataaatcttctccatggaagtgaacaagagggcaatacagcctcaccaacaaggttgcctgaagacatattggcttcagaagcagtcttccctgtccaggccgagctgaatgtagcagatggcagcaaagggttggatgcaaaagggcgctggacacgtgctcgtgtggctagagtcagcatggtagtctgccctttctggtttctcgctcagcttacattcaacctgtctctaagatacaccactgttacatcaaatacgatattgagcagcacgtctagcctcttcactttcttggttgcactagtatttcttggagaaacattcacgtggttgaaactaatcagtgtacttctctgcatgggaggaacgataattgttagcctagctgattcaggtagtacagcgaataccattgccacaaatcctctacttggagatgtcctttctattgtttcagctggattgtatgctgtgtatatcaccttgatacggaaaaagctgcctgatgagaaagaaggtcaaggcgaagtgagcatggctcagtttcttggattccttggactgtttaacatgttatttttctttccttttgcattgttcttgaatttcaccaagctggagccattccacaggctgacatgggagcaagttggtcttattgttggaaaaggtttgttagataatgttttgagtgactacttgtgggcaaaagcaatccttctcacaacaacaacagtagccacggctggtctcacgatccaagttccaattgctgccattgtggatacactaacaggtcatgctcctcatctattggactacatcggagctgctgctgtgttggtcggttttgctggcatcaacatacctgtaggcactccacagggttctcagcaagagcaggaaactcctatcgtcagtatggttgatgatccagtccatttaccaagtgatagaaatgctactagcatggttgatgatccagtctatttaccaagtgatagaaatgctactggtgctgttcaataaggaccggcttggctttggagtttgtcacaatgtatatttttttcgaggaaaattttcataatgtatattatcaagtaatgtataaggatgcgagatcagtacagttactgtaattgttcccccttgccatgaaaatcatagagaaggggatagacagggattgaaattagattaacatgctttccttgctcataattttgagcaactaaaaaaaaaaaaaaaaaa

SEQ ID NO: 63792 - DNA, 1167 bp, Oryza sativa
  Clone ID: PAT_MRT4530_649C.1
atgcaatttgccgcctcccatgagttagtagtgtccgtagctgagatccccaagatgcgaacactcgacataggttcatccgatgttcccactagtcgtgtaagtgactcaaccgtggttggtgatggccgccacagtgaagccgctcggcatcaggtttggcgtgaacacgaccttcaacactaccacattctttccgaggaacgaatggaagggaatctcctcgacggtgagggcattcacgaggcgggcaacctcgtcgtcgtagaaggcaaaccagttgtgcccgatgacgatgcagtgctttgccgtcgcgggagagaggatgatctagaggaagatgaagcattccaaggacaccagcgggttgtccagcgactccttcccctcgccgtcgccgccggcgctggcggcgtccgcaatgctgggctcgccgtcggcggtcatggcgtcctcttctggctgcggaggtggtggaggcgggggctcgagcggagaaggaggcgcttcctgcacccgccgcggcgacggcctcaccgggacgggcggcttccgctggagggacggggctgggctcgcggcgcggcgctgctccggtgtacgcttcgctgccggcgacggcgacctccgcactgagcggtcccgttgctcgcgccgcggcggaggggacgccgaggcccgggcgctgcgggagcggacgccgtaggcggcggcggcggcgcggtcgcgccgggaaatggcatgggccagctcgccggagacggacaccgggcgcttcctcctggccggcttccccggcgaccgctctggcccggtcaccgagctggtcgcgacggacgactcggacgccgcctcggacctatcgtcggtggcgagcgacatgcagctaccaagatcgctcaccgtgacatccgcatcggcgctaggcttcggcgcctgcttctccgcctccggctcctccaagacagccacattggcgacgggcttcgcctcggccctgaccttagcgctcggggtctcggagagcacctccttgaccttctcctcctccggcaacggcggcgggggcggcgggtcgcgggcctcggccggcggcttgcagcggcgggagaacacagctgcactggccagctgcttcctgcgcttcttgctgaagcagcagcccat

SEQ ID NO: 63793 - DNA, 3819 bp, Oryza sativa
  Clone ID: PAT_MRT4530_64C.1
atggcggcggcggtggcgatgcggagcggcagcggcagcgacggcggcggcggcgggtacgacaaggccgggatggactccggcaagtacgtgcggtacacgccggagcaggtggaggcgctggagagggtgtacgccgagtgccccaagcccagctcctcccgccgccagcagctgctccgcgactgtcccatcctcgccaacatcgagcccaagcagatcaaggtctggttccagaacagaaggtgccgagataagcagcggaaggaggcatcaaggcttcaggccgtgaaccgaaaattgacggcgatgaataagcttctcatggaggagaatgagcgtcttcagaagcaggtctcccagctggtccatgagaacgcgtacatgaagcagcaacttcagaatccgtcattgggcaatgatacaagctgtgaatcaaatgtgaccactcctcagaaccctctgagagatgcaagtaacccgtctggactccttacaattgcggaggagaccctgacagagttcctctccaaggctacagggactgctgttgattgggtgccaatgcctgggatgaaggttgattgccaacttctcagattcactctgcctgcatcaaatgaccctggtccggattcgtttggtattgtggccgtttcacatggttgccgtggtgttgctgcccgtgcctgtggtttggtgaatctagaaccaacaaagatcgtggagatcttaaaagaccgcccatcttggttccgtgattgtcgaagtcttgaagtcttcacaatgtttccagctggaaatggtggcacgatcgaacttgtttacatgcagatgtatgctcctactactttggttcctgcacgagatttttggacacttagatacacaactacaatggaggatgggaggcttgtggttcccgtcctcgctgatgatgacgcagcggttgctcgccacgcacctctggtaatgaggagtaacagaaaggctggcatcgactttgtagacccccgagctactttctgtcctgaggcggcaatgttagtgctgagtgtgcctactccagcaggggttcgagttctgagggagcatggctctgaatgggccgattacaagactgatgcagatctggcttcagctctgaaaacaagtgcatgttcacctccagggttgcgacccaggagattttctgggagcagatcattaagtggttctgggggcggtcttagtactgcctcggttcaggaagttgtgagagttgagatgcttcccagcttatacatggtgcgcccatgcgatcgtgggggatccatcgtgcacattgtggaccagcagcagccggggaggtggtgggatcctcctttccgcttggctctgcaccgattgatgatttcccagatgaaactccattgatttcttctggcttccgtgttataccacttgatatgaaaacagatggtgcatcctctggtaggacattagatttggcatctagtcttgaagtaggttcagcaacagctcaagcctccggagatgcatctgcagatgattgtaacttgcgatctgttctgacgatcgcttttcaattcccttacgagttgcatctccaagacagtgttgcagctatggctcgccaatatgtccgtagcattgtttctgctgtgcaaagagtgtcaatggctatctctccctctcaaactggtctaaatgccggacagaggataatctctggtttccctgaagcagcaacccttgctcgatgggtttgccagagctaccattaccatctaggggtagagttacttagtcaatcagatggagatgcagaacaattgttgaagatgctatggcattaccaagatgctattttgtgctgctcattcaaggaaaaaccggtgtttacatttgccaacaaagcaggactggacatgctagaaacttcccttgtcgccttacaggatctggatcttgaggctttgtttgttccagatgtgcttcggccactcttcgagtcatttagggtagttgctcagaaaatgactactgcagcactacggcacatcagacaaattgctcaagagacaagcggggaggttgtttacgctttggggaggcaacctgctgttttgcggacatttagtcagaggttgagtagaggcttcaatgatgctataagtgggttcaatgatgatggttggtctgtcatgggtatggatggcattgaagttgtgatcattgcttgcaatgcaaagaaggttaggaatactagcacttcggccaatgcttttgtaactccaggaggtgttatatgtgctaaggcatccatgctactgcagagtgtcccacctgcagttttggttcgatttttgagggaacatcgttctgaatgggcggattataacttcgatgcatattcagcttcatctctgaagacaagctcatgttcacttcctgggttgcggcctatgagattttctgggagccagatcattatgccacttgctcacacggtggagaatgaggagattttagaagttgtccgtcttgaaggacaagcacttacacatgatgatggtcttatgtctagagatattcacctgcttcagctttgcactggaatagatgagaaatcaatgggatcctgcttccagcttgtctctgcaccaatcgatgagcttttccctgatgatgctccgttaatatcttcaggctttcgtgttataccgctggacatgaaaacagatggtacacctgctggtagaacattagatttggcatctagccttgaagttggttcaactgcacagcccacaggggatgcatctatggatgactgtaatctacgatcagtgctgacaattgcctttcagttcccttatgaaatgcatctccaagacagcgttgcaactatggcccggcaatatgtccgcagtattgtttcctctgttcagagagtatcaatggctatttctccttctcggtctggcttgaatgctgggcagaagataatttcaggcttccctgaagccccaacgctagctcgttggatttgccaaagctaccagttccatttgggggtggagttacttaggcaggcagatgatgctggggaagcactattgaaaatgctatgggattacgaagacgctattttgtgctgttctttcaaggaaaagcctgtgtttacttttgccaacgagatgggactaaacatgctagaaacatctctcgtcgctctccaagatctctcactggacaagatatttgatgaagccggtaggaaggccctatacaacgagatcccgaaattgatggaacagggttacgtgtacctgcctggtggagtgtgcttgtccgggatggggcgccatgtttctttcgagcaagctgtagcatggaaggtgctcggagaagacaacaatgtgcactgcctcgccttctgcttcgtcaactggtccttcgtgtgacccaaaatccaatccaccatgctcgcagtcatcgtcgttgtcgtcagatctccattttttgcaatctctgtagaagagaggacaccaaaccaaccacaaacctgtcagctgttagctaatgattctactagcttttctagatctttgaaggcaaaatgctgccggtgcctgtaaaaagtgtgtgcgtgcgtgtgtaaatttgggcgcgttttgcactaatttgatctggggtaaggaggcgctggctgctgctgtgctgtagtttggtaaaagttgagtacactaaccttggatggtctcgaactgtatgatgaaattcctagcagtaaaatttcaacttggatccgtg

SEQ ID NO: 63794 - DNA, 582 bp, Oryza sativa
  Clone ID: PAT_MRT4530_65000C.1
atggcgaagctcaccggcgtgcggtgcgaacggggttcccgcgacggaagacggcggcggaggggcggacggcgtcgccctcgggctcgcgaacccgacggcggcgacggcgcggctcggtgcggcggcaagcggcggctagcggcgaccggagcggcggcggcgcggcggagaggagggcgcacggtgcgagagcgaaggagggcacgggagcgggtgattgcaaagcgaaaaagagaaaggaggagacggggatgctttatatggactcgtggggtcgatcgtggccgagatggccgcgatttcgccagccgacgtggggaggtggaggtggagagagaggcgggattcaaaattcgaatcctggccatctcgggagcgcgggtgagcggggagggggttgaggggcgcgggaaaggcgggcgcacgcgcggcgtggccgacgtggcgcggggaaggcgggcgcgggaggttgcgaggcggcggctgcggacggcgggcggccggaggttagggatgggcccgacaggtgggccccacctgtcggtgaccccgggagagagaggagggggcgcgggctga

SEQ ID NO: 63795 - DNA, 307 bp, Oryza sativa
  Clone ID: PAT_MRT4530_65001C.1
aaattataagaaatttactcagactttagaacccaaatatgttcttgcgcgaacaagtgcaagggagagaaagagaagttgggagagatcacctcactgcatgtgcaatcgttgctagacaaatgcagatcaagaatggtgccatggcaagggaggctaatgtcggcagccgcaagaacctgtctagcgaaatccgtcctcacggcgcaactcatctatcacctaacggtacttaaactacccgatgaaaccctagagtccatcgacaaaataaggagaaaattcctttggacgggttaaaattggg

SEQ ID NO: 63796 - DNA, 915 bp, Oryza sativa
  Clone ID: PAT_MRT4530_65002C.1
atgccgtgggagagccggctgcccgcggagcatatggatttgccaggtccaagatggaagaagggcaaagatggcaaggactttgcgtccctagcagcagctaaccccatgtcagccattgtttctgagctcaaggcctcattcataagctcaaagcccgtggcaattttgtctggtccgggtggtagcgccgttcttggagttgggccagagcaagccgtgatcctaaaccgtgctgcctttggccatgccatcgaaaatgcaacagcacagaagcattggttccaactcagccccgaggaggtcttttacctatgccatgctctgaattgcatcagggttgactcactggacaataagcaaatgagtgaaattgaactgtgggattactttaggtctggatcggagtcatttccggagatgtacaaggcttacgcacatctgagattgaagaactgggtggtgagatcagggctgcagtatggtgcggattttgtagcttaccgtcaccatccagcgctcgtccactcggaatttgcagtggttgtagttccagaaggtgcagagtttggcaataggtgtggccgtctggaggtgtggtctgatctactatgtgcactccgggcttctggcagtgtagcaaagacattactggttctgacaattagcagcagcagtaaatgtgaactgagctccccagattgtttggaacagcttgttgttcacgagagaacgatcacaagatggatactgcagcaatgccgtgaacaacgatgtgaaccaagcagagatgaagtgaatagggaagaactgattattgaaaaggaaagtgtagtatttaatcactggggtgtgatactaggcttcactgttctatctggcttgcttgtgtacaggttgaaattcagacaatag

SEQ ID NO: 63797 - DNA, 290 bp, Oryza sativa
  Clone ID: PAT_MRT4530_65003C.1
gcccacacacttcatcacgcttgccatcacccccgcattcacgcgaccgaaaccaacagggggagcggattctacaactattcctcaccctccacaaaatactacgcttgatgaacaaaaaggaactctcatccgtctcggaataccacatttcgcagcatctgcaggcctactctatcaagctatagacgcaaaaactagcaaccattgggacttaatcagaatggatcatctcgaaaaggtatccccaatttgctgcaaagacaaaatcgtactttgggacacccttg

SEQ ID NO: 63798 - DNA, 392 bp, Oryza sativa
  unsure (1)..(392): unsure at all n locations
  Clone ID: PAT_MRT4530_65004C.1
gaaggaatggttccctactggaagcatattgccagcaagtgaagacatgcaccgagatagcgctgaaatgcatggagactgatagggaaaataggcctaatatagtggaaatcatcaatcaaattaacgagaaagaagctatcattggtgagctgccgatagaccatgccttggagaagctaccctcacacaacaacgagtctgtcactcttgagagcaaattgccaagccatttgaacttaaatgagaccaaagaaaatcatgaagccgatcaccataacagttcttgttccaaagagaaagaggaggaccgagaggaagatcagatcatcccaatnggaccatcctgattttccaatagatgtgcatcctcgggaccatggatcttgacg

SEQ ID NO: 63799 - DNA, 147 bp, Oryza sativa
  Clone ID: PAT_MRT4530_65005C.1
gcagacagaggcaaccacgctttcaacacagctcacgctgctccagagggacacgtctggcctaactgctgagaacagagagctcaaactccggttgcagtccatggaagaacaagctaaacttcgagatgctctgaatgacgccct

SEQ ID NO: 63800 - DNA, 153 bp, Oryza sativa
  Clone ID: PAT_MRT4530_65006C.1
atgagggcaagggcagcaaccatcatctgggtccagggtgacgccactggagttgcaccggttagatttggagtgatgccgctgtcgctgttccctattgccggtgcggcgtccacaagaaaatatccaagttttgatagtgtcttcccctaa

SEQ ID NO: 63801 - DNA, 391 bp, Oryza sativa
  unsure (1)..(391): unsure at all n locations
  Clone ID: PAT_MRT4530_65007C.1
ggcgtcatccagatgtggctctagcaagggtggagactgagaagaggaactcattgatcaaagcatgggaggaaaatgagaagacggaagctgagaacaaggcttcgaagaagctatctgctattctttcctgggagaacacaaagaaagcaaacatagaagctcaactgaagaagattgaggtatacagctgtttctgttatttttgttttccttctgaaagatatagtttccaattagcacactacttaaaggttaccaacattctttcttatcaatgatgatgaatggactacacgtgtacacagccttgactaattaactggtaacagttatagggaaagctgtaccttaactataggactacacatgtcatactngtatcatgtat

SEQ ID NO: 63802 - DNA, 1643 bp, Oryza sativa
  Clone ID: PAT_MRT4530_65008C.1
ccacgcgtgcagtttgtacgtacggtacaagctcgccgtccggcgatcatccttgataatctcaattaaaattatacatccctttgttatcgatcatcgatcatcagattggtggctggctggctaggccttatcagtttggaaccggatgctggttgaggagcagagttggaggatcatccctctggttccaggattcgttcctgttggcgttggtggagggcccagcacaccataaatataatgggcatcttctgctgcttccagtccgaggacagaggaggcgacggggacggcgatggcgacggagcgcctccctcgacctcctctagcggctgcagcaacagcagcagcagcagcaagaagaagaatttagcgtcggagcggagcctgggcgggagcagcagggacaacaacagcaacctggtgaacctggtgaacgagatcgtggcagagtcagtgacttaccggcacaagcgcgtggcggacgagatcctgaagatcggcaaggggaaggtgacggcgcgggcgttcacgtacggcgagctgtcggaggcgacgggcgggttcagggcggagtcgctgctgggggagggagggttcgggccggtgtaccgggggaggctgagcatcaaggggacggtgacggaggcggcggtgaagcagctggaccggaacgggatgcaggggaaccgggagttccttgtggaggtgctgatgctgagcctgctggcggagcacccaaacctggtgacgctgctggggtactgcaccgacggcgaccaccgcatcctggtgtacgagtacatggcccgcggctccctggaggaccacctgcttgacctgccccctggcgccgcggctctggactggaccactcggatgcgcatcgcgcagggcgccgcccgcggccttgagcacctgcacgacgcagctcgtccccccgtcatctaccgcgacttcaaggcctccaacatcctcctcgactcctccttccaggcccgcctctccgacttcggcctcgccaaggtcggccccgtcggcgacaagacccacgtctccacccgcgtcatgggcacctacggctactgcgcccccgagtacgctctcaccggcaagctcaccacctgctccgacgtctacagcttcggcgtcgtcttcctcgagatcatcaccggccgccgcgccatcgacatggcccgccctcacgatgagcagaacctcgtccagtgggccgccccgcgcttcaaggacaagaagctcttcgccgacatggccgaccccttgctccgcggcgcctaccccaccaagggcctctaccaggccctcgccatcgccgccatgtgcctccaggaggacgccaccatgcgccctgccatcagcgacgtcgtcaccgcgctcgagtacctcaccgtcgccggcgcctcctccgagcctgcccctcgtccccagaagctgcagccgccggaggacgacgacgatgaccaacgccccgccgcataatcaatcatatcgatcgtctctctctctctctctctatacatgtactaccactatctatataatatgtcatatacttctacttcacttatacagtatatagctacagtacctacctacatacatgctagcttaatttacgc

SEQ ID NO: 63803 - DNA, 265 bp, Oryza sativa
  Clone ID: PAT_MRT4530_65009C.1
caaaaataattgggagcatatcctttttgtgtggaaacaccagtggaaaaaacttttttttgccggggtccaaataacgggatccagtgatcaggctgatggaccaatcttatcttatcagtgatagatcgctcgttcggcacatttttttgtgtgccaaaacataaactatgttcgtgcggagggggtcatatatttatggcttttgaagcgcggggacaaggttttgttataaagggttcggaggctccatttatttacagag

SEQ ID NO: 63804 - DNA, 536 bp, Oryza sativa
  Clone ID: PAT_MRT4530_6500C.1
ttgagtaaccacattgatgccaactccgtggcaaccatcttggtgctagctgggcgagtgtggcgtaggaggaggagcctatcttggcagtccaggagctcccactaggcggaggcctagccgccaccggggaggaatgaggccggactccggagacggaggcggaggcggaggcagaggcggtggagaggaagaccggcggctttaggcccgggacgacgaagaggaagccaaggaggtgcgggggcaacatgtggtggcgagcgcggaagcggcagaggaaaccggcatcgcgggctgcacggaggaaggacctgcccacgagcgtggcgcgcactagtgcggtgggggaagagaggcggaggaggatctcgcggaggaggatctcgcggaggaggtcgtcgccgagcaccgcgacgccgctcgtcgccgtccctagtgtgccgactgcccacgctgccgcccaccacctgccctctcacgccggctgcccgcgtcgttcgacccgcacccgcgtggccacgcctgatgagtga

SEQ ID NO: 63805 - DNA, 230 bp, Oryza sativa
  Clone ID: PAT_MRT4530_65010C.1
tttttcgcctttttccttttacaacagaactggagaataaatgtttggccagctttatttgctcaagataagccaactttaagggaaagaacaatggagaagtcattagatgtgacataagatcttagaggaacagctaaattaatcataacaaacgaacagcaattttacaagtatttcatatagagatatgacaatatttataagaatctacatgagcaggaagaaag
